United States Patent Application Publication US 2005/0228172 A9 - sequence listing, part 109

SEQ ID NO: 505799 - DNA, 496 bp, Homo sapiens
cttgaaatccttacattcttggttattctacctctttggctctcttttctgtttcctacagaattccttttcctctgttcactctttatattttgctcctcaatgttttgctagccttcttttctctccctacattctttccctcttttattttatctgtattgattgcttcacctatcattagaaactgatggttcacaaagctatacctttaactgagatctctgtgacctccaaatgcctacaaaacctctccacttgaatgtataacctgcaattaattgtcaccctcttcactgtagtgttcacaggtacctcaaatttgggctgcaataaaattaattcatcatcttactacacacagctaaakaaagttcccaattcctcgtatttcttatcctcattcagtgttgaattcacagaaattatcatgattgatagtattatatagtgggaaaaacacttggcgtggagatagattagttatgttaagttg

SEQ ID NO: 505800 - DNA, 562 bp, Homo sapiens
gtaccatttaatatcccattacaggaatgttagttactgtatttttgtttgttgtcttattatcattcattgtttttattaaaactattgttatatttgttgtttagagaacactgagacacaaataacattgtgaaatttaacatctttccccatgaaaacttgtgtagaagggggtgactcttcagaactgaagaactatttaccagcctctaggggtacttttggcagagccctttagttgtctatcccttttaggaattgggttgactgaagacagtcacctcatcctgagccaccctcatccccaggtcacactaccacttactgatagatacagaggcataaagactgctccccttccattcaatccacatgggtggatcccaaaagcattgctagcaaacttcttgcatgctaattgcagtctcacaatctgcttcccagggtatccaacccrtgacagattatgaataaataaagaatacccactgtctttgctgctactaaacattctgctgaggttttagtcaaatgcaaagtgacaagaaaaagaaaacat

SEQ ID NO: 505801 - DNA, 634 bp, Homo sapiens
tttgttgcctttgttcacagttttagctgacttaatgcatatttgagaactcatttccctagagtttcaacctgaaaccagaggctcagacaaggagattctacttccgagagaccacgagtcttgaagagaggaccatgtctggtctaaaaaaaaatgaaaaagtttagcagcaagaggagtggacacaaataggggataaataacaggagaggaccgtcccccttgagatcaggcctaacaaattgaatcaaatataacctccaccgttcacacaatgtgtgcatctaactccatttttagtgcttttcctcctcactccttttctgytacctttcttacagggcctttttaggcatttccatttgtggtcagtattttatggctctatgctgaactaaacagataccacagtttgcccactggaacatagttcatcccctttattccatcactttgtagaatagtcatgtaattggactgagagtaactctctcatttcccctccttccattgccctacttcatttcttcaagcacttgaatgattttaaacctttctctaaccatttcctgctgtaggttattatttcaccagggcaagcaactcaagcaagtcaaaatattgctttcat

SEQ ID NO: 505802 - DNA, 468 bp, Homo sapiens
tgctgtatttctggccatattatttgtagcagaaactgaggtttactatcattgctatatttataggtggattatccggttttctccaagtagrcaagaatgggatcttgaggacagttagttgatgatgttagaccaattggagctttgttttctggactgtttttgctacccctggtataaggacataagcttatgtcatctgtgtgctatcaaaatatagtagattttagtggactatatagataaatttagatggataattgaaacatggacatttaaatatgtagactattggtcaacatggcttttgttgtgacttgagtatacacaatcattactcaaaatttcacgttttctccatagatataggcttaaatctaagtaggtttgctcagaagaggaagttccattttattttcttctttgaggttactcaacatccatccagttctgacttcacagtta

SEQ ID NO: 505803 - DNA, 579 bp, Homo sapiens
gaatgggtttaggcagagtatttctcctttggggaagaatgaaagaatcatttagcattataattttcactcctctacaaaaaaaaaawtttaaattgaaatagaaaaatatttgattaagaatttatagatccctcctttcccaccaaaggatcctatttatagtattctttgacatataatcttcattgttcatatatataatcttttcagattttgtttaaaatctgaataaaactctcaagtgacttgaaattttatttcacattttaaatctagtgtttaatgctgtgctttctgctgtttaactacgagcaagtctggtaacagacttagggcctccagccataagggccagagaagagggaaatctcaaggttgactttaccgagcatctgagggcctcacaggaggaaaccagtccccatttcccaagaagtgcagtatctcagtaaccatgctgcaaggtcaagttctgcccacacagtgtttcagcaggattttgtttcagcctgtgttttttatttttcattttagaaagatagctacattgtccttttggtgtagaggcatttctgg

SEQ ID NO: 505804 - DNA, 651 bp, Homo sapiens
actgcttgatcatcttcccttatctgccagaggaacaggtgtctcttcctctttctaagggtaacatgtctctgctcatctcttctgttttcttgtcgttggtgggtcatatcatcctgcaacttcaatctctccactggattctgctctttaagctctgcaagttaactatttttacttttaagacacacacactcacccaacctaccctcaactctgctactccttcaagctaccatcacttttatcactttccttttataaccaatccttgaaaaatagtgtaggctcatccacatttcctcagactgactcacttcctttaacattgcagtcacctttctgtcttgatgaaactgcagtcttgacagtctccagactctcttagtcactaaatccattggccttttacccagtttaccctcctttacatctgtgcttttaaccctcttgcacacagcatgattcttgaaatgacttyccttcctcatgtccctagcgttctatctaaggtgttttgtgaggtctgccttttctctggtggtgatcctctttccgtctcgtgactttaggggtcaccatcttgctgataactcccaaacaattgcctccagccctcacttgtgctggagctctggttccacaaatcca

SEQ ID NO: 505805 - DNA, 552 bp, Homo sapiens
caatgagatctgctacattctgttacttwgggatggatacatgtttaataaatcagaaataggatcggttctattgactaagctaaagtggttttaaaattcatgtcacattgcagatccaaataatagagcctttgaccctgttttcctagggaggaaaaatgtctgcaggagaaacattccttttacagattgaaaccttcttcaacgttttttatcctatcttccagtaagaatattcacaagagaattattgtttgctgaatttaagaaacattcactacgtcatgcaaataactttaattgcattctttgggaaaagacaatcagcatatgagtatgatcccataacatgagccaactattcttaaagcataggttgggccatcttcttatttatgaaaatggactgcctcctgggaatatttaagagtaatatgcaacaactgctgtaattatcagcaatatgtctcagaaaaacttggggaagccataattgaagagtttaaaaaaaagaaagttaaggtttgtgatgaggttactgtactctca

SEQ ID NO: 505806 - DNA, 552 bp, Homo sapiens
caatgagatctgctacattctgttactttgggatggatacatgtttaataaatcagaaataggatcggttctattgactaagctaaagtggttttaaaattcatgtcacattgcagatccaaataatagagcctttgaccctgttttcctagggaggaaaaatgtctgcaggagaaacattccttttacagattgaaaccttcttcaaygttttttatcctatcttccagtaagaatattcacaagagaattattgtttgctgaatttaagaaacattcactacgtcatgcaaataactttaattgcattctttgggaaaagacaatcagcatatgagtatgatcccataacatgagccaactattcttaaagcataggttgggccatcttcttatttatgaaaatggactgcctcctgggaatatttaagagtaatatgcaacaactgctgtaattatcagcaatatgtctcagaaaaacttggggaagccataattgaagagtttaaaaaaaagaaagttaaggtttgtgatgaggttactgtactctca

SEQ ID NO: 505807 - DNA, 552 bp, Homo sapiens
caatgagatctgctacattctgttactttgggatggatacatgtttaataaatcagaaataggatcggttctattgactaagctaaagtggttttaaaattcatgtcacattgcagatccaaataatagagcctttgaccctgttttcctagggaggaaaaatgtctgcaggagaaacattccttttacagattgaaaccttcttcaacgttttttatcctatcttccagtaagaatattcacaagagaattattgtttgctgaatttaagaaacattcactacrtcatgcaaataactttaattgcattctttgggaaaagacaatcagcatatgagtatgatcccataacatgagccaactattcttaaagcataggttgggccatcttcttatttatgaaaatggactgcctcctgggaatatttaagagtaatatgcaacaactgctgtaattatcagcaatatgtctcagaaaaacttggggaagccataattgaagagtttaaaaaaaagaaagttaaggtttgtgatgaggttactgtactctca

SEQ ID NO: 505808 - DNA, 527 bp, Homo sapiens
gaagatgcaacatgagagatttttataggccagactgggaagtggcacatactcgtctgaccaggatttagtcacatggctatatataattgcaagagagattgggaaatgttgtctgtgtgccaagaggtgtaagcagttttagacaccagctacaagtacctgctacagaggtgataggagcttggcagaggaagaacaagagcaggactgaggcttttcactgtgtagatttgtgtgtctgtgtataatttgaacaatgtgaatatataacctattcaaaaaacaaaatatattttttcaaataaaagtcattgtttatataacacttagaacctatawcctaaatcatgcattccaggaaattttgtcatgtatcgtgacttatgaacatactctattccttttgaagcaagaaggttccagaatcagagacacttctccatgacctggattcactgcattccggggacgtttttccttcttcagttgtctgtgactcctctccttgcagttgcagacccact

SEQ ID NO: 505809 - DNA, 642 bp, Homo sapiens
tttctaataaattttactgggaatattgaattacagatggacaaactgtaactaagctactagtagttgagcacactgtttaaactgcattgtaaccaaacacaaataatatgaggagatggtttgattctagaccaaatagtcatgaagaaaaatttttctgcactaaaggaccagtgctaaaatatacaggagtgataaactctgaagaaataaatgatgagatgttaagtgactgagctaaaccatgcctttatgtatgcatatcatttcagatagcttcccaagtaaaataaggtttttttttcagacatgtaagtattaaagtaataaaaccattaataggaatgggatataaarcatgtgattttatatttttacatgaaattaattaacatatgttttctaggtagtacaaaaaagttttagaataaaatatatgtctaatttttgatggttgatttttaaatgggaacatctgctaacaatcccttacgatcacccttttcaaactgctaaagaaaaaagttaatttgaaattgaactgcaaagaaaatatctaaataacacagttgtaatatatttaggaatatcttctcagtcaataaggtgctctgtaaagatatgagctactaagacaaa

SEQ ID NO: 505810 - DNA, 555 bp, Homo sapiens
cctttgcaaggacatggatgaagctggaaaccatcattctcagcaaactaacacaggaacagaaaaccaaacagcacatgttctcactcataagtgggagttgaacaatgagaacacatggacacagggaggggaacatcacacactggggcctgttgsggggtggggtctaggggagggatagcattaggagtaatacccaatgtagatgacaggttgatgggtgcagcaaaccaccatggcacgtgtatacctgtgtaacaaacctgaacgttttgcacctgtatcccagaacttaaagtataataatgaagaaaaaaagaataggctaaaagtatcaacttaaggtcacacattgagtaagttacagaactggaaataaattccagacctcttttttggttctctactttaagtaagaggctaaaatctttttataaaaaacctatttgtatttttgaatctagactatttctgcattttgtggttattctacagaaggaacaggtgaatttactgtttttcccattaatatatttttagtcaaatttgatg

SEQ ID NO: 505811 - DNA, 555 bp, Homo sapiens
cctttgcaaggacatggatgaagctggaaaccatcattctcagcaaactaacacaggaacagaaaaccaaacagcacatgttctcactcataagtgggagttgaacaatgagaacacatggacacagggaggggaacatcacacactggggcctgttggggggtggggtctaggggagggatagcattaggagtaataccyaatgtagatgacaggttgatgggtgcagcaaaccaccatggcacgtgtatacctgtgtaacaaacctgaacgttttgcacctgtatcccagaacttaaagtataataatgaagaaaaaaagaataggctaaaagtatcaacttaaggtcacacattgagtaagttacagaactggaaataaattccagacctcttttttggttctctactttaagtaagaggctaaaatctttttataaaaaacctatttgtatttttgaatctagactatttctgcattttgtggttattctacagaaggaacaggtgaatttactgtttttcccattaatatatttttagtcaaatttgatg

SEQ ID NO: 505812 - DNA, 542 bp, Homo sapiens
gtaagaactgaacagtagataaataaatattaaataaatatattgaaattattatgggtagtattgtatttgcagtttttwaaaaaaacgaaaaaattgagagtcacattgaataatttctagcttcttgaaaataagaagaaacaggggaggcaaaggcactagagttcacggaatagagtacaggcagaacgtagctgcagagacctctacattcctgtgtctggtttctggacttttaaactgggtttcagttagtgtgtgaatatgaggattctaccaaggacagggaaagaacgatctaaaaggactagggggaacacttcccagatcccaccagggatggaattattgatattttcattagccagtctagaaaaatctcataatttatgggccatcaggtagagaaatcaggattttgccacaacagtgattcaacatttgccttagtcaatgcctctaggattttgctaaaatataatcttaaatgcaaaaccccaaaagattaaaccgtctccaaagaactcaactgcatccca

SEQ ID NO: 505813 - DNA, 556 bp, Homo sapiens
tatcttgtttagaaataaaataggagccaggtttgcctgacatagttgccagcttgacttttcccttggcttagtaatttgggagtccaaagatttattttcctttcacagctgttatcaccaatttctggataataaaataaatagtaattagcctcataatgtactatgtttactgttctagtattcagacatttatttcagagatttatttcagagattaggtttttccatatttatttagagagtcattttcattctacaattataattktttttcttcttacatgaaggctgtatattgaaggagattatggtaggatagacaagagttggataaacacagtcactgaaaatgacctctggttaaaatgaatgttggaaaaaatttttaaatcattttgataaacttttaattcacctttatagctagtaaaattgagaagtccacagtgcttacaaagatttccaaagaatgttaaggaatgactagaaattatattgtattatatggagtaaatttaacattgttagggagaaaaaaaatctggggcat

SEQ ID NO: 505814 - DNA, 515 bp, Homo sapiens
aacatggaaaggtagccaaccatgtacgtattattggttatctgattaaacaaatagccartacttaaagaacagaaatactctacttttccatctaaactgtggggagatgggatacaaaagatggaagcaagacaactaatggaataagaaacaggtaggaaaaggttatttcattaatttaacacctaaaatagtggtttttctttgccctaatgtattttcagataacaaagatgtataaattttctccatatattcaaagacaagaatattcaagatctattaatattacaaaaaatagattgtgaatgcagactatacatatcaaattaagaaacaagatttttaatgttgtaaataccaaattacatattttaattaaatgctaaagtagcaaaaataaatagtatttgcatagctattctccagcatgagcaacatgacaatttccattagtcttctagtaataattcatctttactaagtatgatttacatttttcacaatgattg

SEQ ID NO: 505815 - DNA, 515 bp, Homo sapiens
aacatggaaaggtagccaaccatgtacgtattattggttatctgattaaacaaatagccaatacttaaagaacagaaatactctacttttccatctaaactgtggggagatgggatacaaaagatggaagcaagacaactaatggaataagaaacaggtaggaaaaggttatttcattaatttaacacctaaaatagtggtttttctttgccctaatgtattttcagataacaaagatgtataaattttctccatatattcaaagacaagaatattcaagatctattaatattacaaaaaatagattgtgaatgcagactatacatatcaaattaagaaacaagatttttaatgttgtaaataccaaattacatattttaattaaatgctaaagtagcaaaaataaatagtatttgcatagctattctccagcatgagcaacmtgacaatttccattagtcttctagtaataattcatctttactaagtatgatttacatttttcacaatgattg

SEQ ID NO: 505816 - DNA, 632 bp, Homo sapiens
ttagttgatgactttatttggtatgtattaaaaaactaaattttaaaatgtactatattttagttttttgactagtatactgttatttcttaaatataatctcactccgatattttaatataagcatctcaaaatttaccaatatttgataacagatattttacaaacaatcttgaaacatagttactcaaaatgttgtcaaaacaatacccatttagtccataggaaagtggaaagaaatcacaaagtaagcaaagaatgaaatatgaatcttctaattaatcaagacacacataaaataactctaacacctttaatttttgtttactacctgcaactgtgtcatctctaaaattctggtcataattatgaattgcatacattgacaacgaatttaaaaacttttatagtcatatttttcatgtaggtctctttatctttttttttttttttttactgaaatttggcttttctgtttcggcactaattctgttcttccatttcagctcttaaacgtgatgactatttctccagtatcttcctagaagtataactagaagaagggtaartgtcttctttgcttttctttatgacttctgaagcattccttcacccctctctaaaaggtttca

SEQ ID NO: 505817 - DNA, 651 bp, Homo sapiens
ctgagtattactgtgaaagacttaatgagaakgtgtccttgtgagccctgacacaaaccttgctggcagggcactcaggactgccaggaagactcaggaccacagaggggactcaagaccaccagggaagagcaggttgcaggaagcacagggccagccccagagcagttgggggtagagatgagaggttggtttactgccaggttctggggttgcctcaccatcttcatgtttcctccagggaccctctcttatttcatggtgctgtgactagctctacatctctaaaataccacagttttgttgtaccaggaggaaaccttctcacaggccctaaatgtagagcaatctctctgccagtggtcactaggatcacagccctgaggaagctgagggtaacctggtgaatcttctccagtcacattcgggacaggaaccttagcggggttccctgtggagaacagtctcaggaatcctaacctcagccaagacagaggctgggccagatcaatgtcagatagaacctcacaagttttatgtctgacccttctccaccaacaataaagcatgccaatcagtatcagcgccgatctggggcccttttactcctagcccattctgtttctctttatttgttgttgttattcttgc

SEQ ID NO: 505818 - DNA, 643 bp, Homo sapiens
taatgagaatgtgtccttgtgagccctgacacaaaccttgctggcagggcactcaggactgccaggaagactcaggaccacagaggggactcaagaccaccagggaagagcaggttgcaggaagcacagggccagccccagagcagttgggggtagagatgagaggttggtttactgccaggttctggggttgcctcaccatcttcatgtttcctccagggaccctctcttatttcatggtgctgtgactagctctacatctctaaaataccacagttttgttgtaccaggaggaaaccttctcacaggccctaaatgtagagcaatctctctgccagtggtcactaggatcacagccctgaggaagctgagggtaacctggtgaatcttctccagtcacattcgggacaggaaccttagcggggttccctgwggagaacagtctcaggaatcctaacctcagccaagacagaggctgggccagatcaatgtcagatagaacctcacaagttttatgtctgacccttctccaccaacaataaagcatgccaatcagtatcagcgccgatctggggcccttttactcctagcccattctgtttctctttatttgttgttgttattcttgcttttccttgtactg

SEQ ID NO: 505819 - DNA, 643 bp, Homo sapiens
taatgagaatgtgtccttgtgagccctgacacaaaccttgctggcagggcactcaggactgccaggaagactcaggaccacagaggggactcaagaccaccagggaagagcaggttgcaggaagcacagggccagccccagagcagttgggggtagagatgagaggttggtttactgccaggttctggggttgcctcaccatcttcatgtttcctccagggaccctctcttatttcatggtgctgtgactagctctacatctctaaaataccacagttttgttgtaccaggaggaaaccttctcacaggccctaaatgtagagcaatctctctgccagtggtcactaggatcacagccctgaggaagctgagggtaacctggtgaatcttctccagtcacattcgggacaggaaccttagcggggttccctgtggwgaacagtctcaggaatcctaacctcagccaagacagaggctgggccagatcaatgtcagatagaacctcacaagttttatgtctgacccttctccaccaacaataaagcatgccaatcagtatcagcgccgatctggggcccttttactcctagcccattctgtttctctttatttgttgttgttattcttgcttttccttgtactg

SEQ ID NO: 505820 - DNA, 494 bp, Homo sapiens
ctcaaatacaaaaaatacaaaataaacacacacacaaagtcaagatgctaaaaaaaaaaaccccaaaggtatgttttactgcatagcawtgattacattttgttttgcatcttttttaaaaaattaagaaattgagacagggtctcactgtgtcacccaggctggagtgcagtgacgtgatcatagctaactgtagcttcaacctcctgggctcaagcaatcctcccacctcagcctcccgagtagctgggagcactgactggaaagagagttaggtttgggtgactcagttgggtgaaacagagaaggcagcacaatacaacacatgaaataaccgaagcagttttttattaattccagagagaggagggcagcacacttcgcagggccaactagaagggggagccatccaggagacctgtgctcgactgatgggtgggagcaatagcgagagagagggagggacctgagagtggaagcctttattgggatgt

SEQ ID NO: 505821 - DNA, 536 bp, Homo sapiens
aagattatgtgcttgcgctcaggatcatctatggccatacagaatgtcttttacactgtttataaacctcctaactataggccctgcaggccccttatccaactttttgattaaattggataaaaaaggaacagggcaaaaaagggaaacttcttgttattgtcttgtcacccttagtagcaggcacatacttaggaaagtcagatttcctgtgtatgagacatactagagtggaccaaaggaagaaaaycctatgcagagcaacaagcgagtagcagtggacagggagcagtggggcccttagggaaaaaaaacagagctaatggccctggcagggttcctcacacccagagctctaccaccatgtgaggctaacactacaagcccacacccatcatcacattgtatggggcagtttcttgaccctgtgtgagagcagagaagacacctataatggcaaaaacaaggcactcatgaagggattttagtgtcaggaaatgagatggggtcaaggggatttgtatatagaaactgca

SEQ ID NO: 505822 - DNA, 522 bp, Homo sapiens
tatttacaatgtttttttttatcttaggttattgcctgattaaagtaagcacaagtaaaatttaaaattaacaatcaatcacctgtagaaataacaaaaaatgggcttggtgaaatttaaggagcgatgccagaattaaacaaataaagaaacacattgtgtaagttagagtggtcagtgaggactgaaatgatgagaagctggtgctgaacgatatatgaagaacgtcaaatacacttgatattcagaatgctggtcacaacagtgaaaaatctgtagagtggtctgcgcagataagaaattagaaagtgagaaagtcacaaactttcaacagcaggagacatgcaatatattcagtattcagctctctctgtcctctaggaaaaataggttataactgcatggaaaatgagacaagtagtttttaagataattctcgagaaaagttgctaataaagttattcagatgatgttccgacacawgattgtggaggggacgttgacccgtggttgtcactgtca

SEQ ID NO: 505823 - DNA, 623 bp, Homo sapiens
tatagactattaaaaatgtgaataggattttaaacatttatattgtagtaataaggaggtcaacgcttttggtcatagcttttcccactctttggtcatacctattacagtcatgtatgcacagatatgagctaaattgtttcctctatatagatgctgaaatcttaaccactgaatatgacctcattagaaaataggttctttgcaggtgattaagttaagataaaatcagatgagcctgaattcaatatgactgatgtccttataaaaagaaaaaatttgagtagagggagacatacacatagggagagtaccatgtgattatgagggcagagaatagccaaggaaggccaaagactgccactaaaccaccagaagcgagaaacaaggcacataagagactttctctcatagcccttgaagggaccatccctgctgacacctcaatctcagacttttagcttccaggactataagactataaatgtatgttgttcaaggcacccagtttgtgttagttggttatggcagccctrggaaactaatacatgaactaataacaaagcacaataacatgaagcaaaaattgacaaaagaggagcatcagcaaaatggcagtggag

SEQ ID NO: 505824 - DNA, 478 bp, Homo sapiens
tgactcaagcactttgagtaattgtttttaggaaaggtacatggaggctatgcttcgtgttgcttcatgttggagtgtctgtctgttgctcccgagtgtgaacagtacttttcctggatatggatttactgagtcatagttatttccctgcaaactctgcacataactgcttgaagcttcatttacatagtactctttttttaagcaaaaaagtctcaattgtgtatttacttggtatagtttcagggtacactgaaacagattaaggggctaaagccacccaagccacttcttcrtgccttcataatctgtcagacttggttctgtatggtgacattgtcaagtgagttcagatttatgacatttccttgatacccagagatctagtagactgtgtgggatcagaggttcttgtagtaagggaatggcaacttgaggagagaattcacctcttttggccaattgatcctccatctac

SEQ ID NO: 505825 - DNA, 404 bp, Homo sapiens
ccaatcaagccacccacctttccatttgctggggaagggggcggtacccaaccccctctattactagggggttgttatggtaactccccacgcgagggctgggtggcctctagataggacgggctctccacccacccaattgctatggcaacagtggagccgctgagggaggggccactccgtgagaacttggctggagaaaccacgtgggagttggggggcagaggaggggcaccggctgcctcaggaatgccctttccaccctcacctagcaggttggggaagcatcgaggtgctctcagatctcaggataaggaatcctaccgcagacgtgtatctctgcacctcttttaacgaagagttctgmacaaaggaactgtttccacaattattcattgatcact

SEQ ID NO: 505826 - DNA, 624 bp, Homo sapiens
agggtagatgatttttactcaagctaactactgggctcattacactcttaaataccaaaagtaaaatcaaatgtcttttcttatggccgtgatagagtaatttgtaccccattatctttccattataaacaactataaaacaggacaaaatacacaaagcaatacttttcagacattggaaaagagrcagtgcagaaacatcattcctgagggaagagaaacacatgaggtattcctcatggttaccccagttgtctgccttgaaacatttttcaggcaacaatataatgaaatggagcctaagcaaagcatggtaatattaatgagctgaagaagcaatattctgaccccagacctacagaagtggctggaatttgctgtgtagggtcttgaaaaggaggttgctgcacaaagaaggagttctatgaatttgcagatggtcctagttaggtatttttacaaacactacactacacatatagaagatgaagtttaatgaattgtaggaaaaaaaaaaagttactgggaaactaagcactgaacagagatctcagaggccacaaagtacaagcaaacataagaattccaatctgacagagtagagagaatatgctgaatacccca

SEQ ID NO: 505827 - DNA, 521 bp, Homo sapiens
atctttccattataaacaactataaaacaggacaaaatacacaaagcaatacttttcagacattggaaaagagacagtgcagaaacatcattcctgagggaagagaaacacatgaggtattcctcatggttaccccagttgtctgccttgaaacatttttcaggcaacaatataatgaaatggagcctaagcaaagcatggtaayattaatgagctgaagaagcaatattctgaccccagacctacagaagtggctggaatttgctgtgtagggtcttgaaaaggaggttgctgcacaaagaaggagttctatgaatttgcagatggtcctagttaggtatttttacaaacactacactacacatatagaagatgaagtttaatgaattgtaggaaaaaaaaaaagttactgggaaactaagcactgaacagagatctcagaggccacaaagtacaagcaaacataagaattccaatctgacagagtagagagaatatgctgaataccccaggttttcagc

SEQ ID NO: 505828 - DNA, 616 bp, Homo sapiens
cacgcctgtttcaccttccaccatgattgtaagtttcctgaggcctccccagccatatggaactgagagtaaattaaaactcttttctttataaattaccctgtttctggtatgtcatcaaagcagtgtgaaaatggactaatacagatggcttttaagcaaagcacaaaaataatgtataaaaaattagcaagcataaattcagaagtttcaagttggcttgcattatataaaccataattaactttacattttttggcaaaatttccatgtttaataaaagttaataattctttaaataaaagctgtgtgarcactttaaaatactataaaggagtctaaaattaagccgcttcaattttcacaactttcttttactctttctattagaagaactataaatgaactttcaataaaatcagagcttttgatgtggccatttatttttaaaaggcattctatagcataccaatttctgaatctagaatctccattgatattccatttaataaacttggaagccagacacatttattttaaagttcagttttaattaaaagataagactagagtgacagaatggtaagggagagaggggtgttgaattttttgttta

SEQ ID NO: 505829 - DNA, 598 bp, Homo sapiens
ttatggattaaagtttaaattttgtgtgaattatgatgataaaacataagaagtcaaaggtatttttttgttgattatgtggggcctctttgaaatatgtccctaaattcctggaggtgcatataattctacactggtgttaggaatattttggtggaaaagtttgtcatacaatatcatagatacaaatattgctatcctttaaaaatgtcatgaaattacaactattttattgataaaatgatggttgttctaaccttaaaataaaacacttgagtgttttgtgaagatctctgttaaaaaacattttaattgcattgctagattacacaggaatggcattcagtaattatttcattgttgtacacagttgtgagacttgggaaatragattctctcctatcttttgctatttgtaataagcatgcattatcaaatatctactaatttcctacaaaaggaaaaagtaaggtgatgccaaacgttcctggctaatcttcaaagacttttatttttttcacttatcacaattctgtaacatttctggttggagatgattatatttatacaaagatacagatgggaaatttataaccca

SEQ ID NO: 505830 - DNA, 623 bp, Homo sapiens
gggaaaagtgccttttccctctctgaggatagtttgttacctgcctgcaatgtaagcttcgtaagagttgcaagtaagaagcaaatttagggggaaaggggggaaaagggtttattacttaatgtacaagatttataatgatttctttattgtgtcacaataattggattcaactttctatttctgccactattactgaaatacgttaagttttagagttaaatgtcatcaatcaaccagcctgaaattcactacctagtagtagtaaagataaagttattattattatcattatcatcagaaaggtctgcctttctaatgtgactctgctattcacttgctctgcaactatagctttgtctttaagtctatttcatcatttgtaaaattgggattaaacttatctatactgcagatctgaaagtatagttaggagacagtaacatttactgagcatgtgctgtgtgccagggactgtatggcatcttacatarattatttgacttaatcttcccatcacccctatgaacatggtaataccatccttgttttacaaacagggaaactgaagctgagagaaattacataatgtacctaaggtcccatagcttttaagttgcaaa

SEQ ID NO: 505831 - DNA, 623 bp, Homo sapiens
gggaaaagtgccttttccctctctgaggatagtttgttacctgcctgcaatgtaagcttcgtaagagttgcaagtaagaagcaaatttagggggaaaggggggaaaagggtttattacttaatgtacaagatttataatgatttctttattgtgtcacaataattggattcaactttctatttctgccactattactgaaatacgttaagttttagagttaaatgtcatcaatcaaccagcctgaaattcactacctagtagtagtaaagataaagttattattattatcattatcatcagaaaggtctgcctttctaatgtgactctgctattcacttgctctgcaactatagctttgtctttaagtctatttcatcatttgtaaaattgggattaaacttatctatactgcagatctgaaagtatagttaggagacagtaacatttactgagcatgtgctgtgtgccagggactgtatggcatcttacataaattatttsacttaatcttcccatcacccctatgaacatggtaataccatccttgttttacaaacagggaaactgaagctgagagaaattacataatgtacctaaggtcccatagcttttaagttgcaaa

SEQ ID NO: 505832 - DNA, 550 bp, Homo sapiens
tttgtgaaagatcagatagttgtagatgtgtggtgttatttctaaggcctctgttctgttccattggtctatatctttgttttggtaccagtaccatgctgttttggttactgtagccttgtagtatagtttgaagtcaggtagcgtgatgcctccagctttgttctttaaatttattttcctgtcctctcacttttcccctcctccaaatatctatttataaatcctctactgattgctctctggttattattcatttttaaaataaaggcaactgtatcttggtgatttgtttcagaatggtatatggagaggcatagggaagtaaggtggaatggtacacagagtcaaatttagattgctgcctaaaacaccatcttaccatatttgttttgtcttctacccagaggcatgtgtcgtctcatgttcatgcacaatttgttgcgaaaccctttgtatcacaggctstctcagaagtgatagggggatttgtgctcttcttgtcttttgtcccctctcaccagagaggattctggttgtagaacataaa

SEQ ID NO: 505833 - DNA, 360 bp, Homo sapiens
cagtcacaaaatttattttgccarttgcttttaatttttaatttctgagagctcttgttgaattctgatttgctctgcctccttttacatcttatttcacagtcacagtatcattaatgacgttttgaaattttcctgtctgcattgattctgttacctccaaatttttgtgggtttttttgtgttttctgctacagtcacgcttaaaaattttttcttttactttaaaaatttttttgagacagggtcttgttctgtcttaacccaggctgaagtgcagtggtgcgatcatggctcactgcagcctcgacccgcaagtagagtcaacttaaatgtttattcttggttctctatttatat

SEQ ID NO: 505834 - DNA, 297 bp, Homo sapiens
ctgtggcttttcttattgaatgtatgttacgtcaattttttgatgattgattgtgttcctgtttaaagctgttgaggatatttaagatttttgcttgttggttggcctcaagatttggaacaatgccattcctccaggctgccacaaaatgccctgtcactattgcaatttataatctatccacataccatgtaaagtattttctgttttccagttgtgaatcwcttctttttgtccacagttaaacagctcattggacattgcctatagctgattctttacattctccagtgcaga

SEQ ID NO: 505835 - DNA, 603 bp, Homo sapiens
gggagcttcaccagaattccttgaatatatccatcaggaatacaagtggtcagagaacaatgtgctctctgtgggaacttctgcatgaaatcttgtcctcaatgaacttaagcctttagtgccctcaataatcttaattgtctttttacggttaaacttccttagcaatcggctgaattttaggtaatttttcaattgacactttacatataaaatcaaaatggtagatgaatrtttatgtatatgtgctttaaaagctaatggagaaacagtacagcataatgaatcaaagattccaaaaacaggtgcacatcaacacagttcatgttttagtaaagcaagtgaagacactctggaagtagtgtgttggagttaatttgttccagcttataagagccaaatattaaatgttcaggaattttgcaagctgactgacatcaccatcttgaaattggccatggtggtagcatttacacagtagaaattagaaaacagatttttttttaaggcctagttgttaaatatctatcagcaaaccactacactcctgatatcccaatttaccctttgccagctctaaattctatgcaggatcaacatact

SEQ ID NO: 505836 - DNA, 603 bp, Homo sapiens
gggagcttcaccagaattccttgaatatatccatcaggaatacaagtggtcagagaacaatgtgctctctgtgggaacttctgcatgaaatcttgtcctcaatgaacttaagcctttagtgccctcaataatcttaattgtctttttacggttaaacttccttagcaatcggctgaattttaggtaatttttcaattgacactttacatataaaatcaaaatggtagatgaatgtttatgtatatgtgctttaaaagctaatggagaaacagtacagcataatgaatcaaagattccaaaaacaggtgcacatcaacacagttcatgttttagtaaagcaagtgaagacactctgraagtagtgtgttggagttaatttgttccagcttataagagccaaatattaaatgttcaggaattttgcaagctgactgacatcaccatcttgaaattggccatggtggtagcatttacacagtagaaattagaaaacagatttttttttaaggcctagttgttaaatatctatcagcaaaccactacactcctgatatcccaatttaccctttgccagctctaaattctatgcaggatcaacatact

SEQ ID NO: 505837 - DNA, 639 bp, Homo sapiens
actggctaaacatgaacaataaatgatagctggtgaaccttgagtatttgcaaagagtgtactaggcacagtattttgtttagtaaaatatttctagaagttagttattgttattctcattttggtgaagaaactgggactcaaaggggatggacaacttaccctaaggtcacacaaccaaatggtaatagacccaaaattttcacccagaactctgactccaaagcctcactacattgcatctcctcgatgatatataatcattccaatgccaaaayggaaagtcaagattctggtccccccagtaattgcttttatacttatccctaagtctgtcattgaatacaagaagctacaggactggtttcaagtggtgctacatttttataatcttagtgcagaaatggaaagagcaacttgcccattcacccaagactaacaactggcatgaagtgaattgcttctgtagacagtaaacaagagtaagctggtatttttttctaagtcaactttaggacagcttttcaaacaaacacacattgcctttattcccaggacaaaaaccagaaactctaatagtccctggctgttataatttgatgcttaatgtacttctatctatgtaagccgtatcacata

SEQ ID NO: 505838 - DNA, 501 bp, Homo sapiens
ctgccatgattggagcatttcccacttgccatcttcctcctttctccaatcagcttagtgctaactacctgtgcttctgtatcaagccacagtcacgtcattcttcttgggatgcagcctataaagctgatgcattccactctttgaccactaatgtttcctctgggagctgcatgtttcgttgttctacttgggttggcaccattcactcacactacagctctacccactgctgctccccctgagctgttaactgatagtccttcttttaccaggtctccagttgtcacctcactttctggaaggtgaataactactttttctctgtgttgtacttttttggagggtctccagagcagtgttgcttgggcctctaaaattaaagatttgttaatgcttatagacaagcttttgttttcttggaaaaaatatgtgcttgtaggaggctkcattcagtcgctccctgctgtagtggaaccagttctcttccccactccctgt

SEQ ID NO: 505839 - DNA, 227 bp, Homo sapiens
cctcagcctcccaaagcactgggattacaggcatgagccactgtgtccagtctaaaaaataatgtatatattattatatttcgccatttgaaatcctcttggcaatctcctgagctgcttatccytttagagcaggatctgctgtgtgctgtagtccaatttatgcagaacaattatattaccaagcaatgagcacaaaacattacatttcgaaaaagcatagatgt

SEQ ID NO: 505840 - DNA, 248 bp, Homo sapiens
agtgttgtgccgcagaagtcaaaggaacacagcgtctttaggaggaagtatcctcttatattgatgttcaatttctactatttacatcttagtttcttggaagaagctcacctaaaatatttctcacctactgagacttttttattccatcttcctgaaaagtcygccctcctttctctgctttgagaaaaagaaaacaaagttttattccataactatctccgagagcatctttcacattttactgt

SEQ ID NO: 505841 - DNA, 621 bp, Homo sapiens
actttttaaattcagtaggtgtaattattgctacctgccatttcttgtcaaaatccttataataaccctgtatgggttattatgtccattttagrgatggaaaaaccaaggcacagagcagtcaagtaacttggccacatttacacgaccaataatgggtaggtgatttgaggctgagtgtgttgaactccagagcccttgccctcaaatgctatacacacaagctctccagcttactcttcatttatttgctcaaagggccagtcctcttttaacttccagacccacggatccgtgattttccataaacgtacccccaatctctctcccaccaactcactgctcatggtgatcccaatttcccttatattagagccaaatatttttagaaaatcttcaatgaagcttgttatctaggaggaaaacatagtaactataaatgcaattatcagttagctggtgttttagacaaacaaggaactgaggaagtaaaagaggagacagataagttttgaggaagtggaagaggtgtctggctgaaatgtcaagcccggagaaacgggcaggggagaggtattctagcccctagtctctatctggatgtgggacaaatcttggtgt

SEQ ID NO: 505842 - DNA, 487 bp, Homo sapiens
cctcatccactgagtgcttctcatgctcaagtttatttcattataaaacaaaacagagcctcttctggaccctgattccctttcaagttcttgctccatttcttttcttccctcacgtccttacttcctgttttgttttgtttccctccaaagtaatccgctaacatctttgcttcttaaaaaagagtagttacacctgttgtctctgtgtccctggttcctggttattccccaatcctctgtgatttaatttctgctaccccctttccactcaacacacayatatatacacacaaacaaacacacacattcacacatgtacccaatgtgtgtgtgtacacacacacacacacacacacacaccctacagaaactgctcccattgcagccatcagtgccctggcactgccctatccaggactctctttctggtctcatcatcctttaccttgttagaacattcgacactttggacccatctcttctt

SEQ ID NO: 505843 - DNA, 551 bp, Homo sapiens
tgaaatgggaactgctttgaaaacagtaattgtgagtgtattcaaaaccaaccataatggaaaaaaatacaagtgcatcaaataaagccacagtattgtttctgaataccatttggatagaacgcataagaacgtattaccacatacacacacgtgtgtgtgcacatgtgcaaaaactgaaaaccatgttgcccagcccagagtatttgcactttatatgcaggtgtataaaaaatatattgggcacctaccagatgctcacatcctatagattagcagttgttcccccaaatccaatgtaattcaagaattctcattttcaggagaaacattaatttgggtaaaccaaggatttttacagtaaagatctataacgactttcaactgaattatcccttaagtacatttgtgtacatgcatatgtagaaatacatttaccttacaataggacatagtatttttattttttaaaatgcagtttttttwtaaagaaaatttgcagaatttactacactaaacccttcacttttttcatgccactgtacaatttt

SEQ ID NO: 505844 - DNA, 551 bp, Homo sapiens
tgaaatgggaactgctttgaaaacagtaattgtgagtgtattcaaaaccaaccataatggaaaaaaatacaagtgcatcaaataaagccacagtattgtttctgaataccatttggatagaacgcataagaacgtattaccacatacacacacgtgtgtgtgcacatgtgcaaaaactgaaaaccatgttgcccagcccagagtatttgcactttatatgcaggtgtataaaaaatatattgggcacctaccagatgctcacatcctatagattagcagttgttcccccaaatccaatgtaattcaagaattctcattttcaggagaaacattaatttgggtaaaccaaggatttttacagtaaagatctataacgactttcaactgaattatcccttaagtacatttgtgtacatgcatatgtagaaatacatttaccttacaataggacatagtatttttattttttaaaatgcagttttttttwaaagaaaatttgcagaatttactacactaaacccttcacttttttcatgccactgtacaatttt

SEQ ID NO: 505845 - DNA, 632 bp, Homo sapiens
ctgccagcacaaccagaataaagcaggaaggagaagatggaagagcagacttgctgagtcttccagctttcatctttctcctgtgctggatgcatcagactgcctcgagcatcaggctccaaattcttcagcttttggactcttgggcttacaccaatagttttccaggagctctcgggtcattggtcaaggactgaaggctacactatcagcttccttatgtttgagattttgggactcggactgatccaccaatggcttccttactccttaacttgcagacggcctattgtgtgagtcaaytcacctcaattaccttgttatcgtgtgagtcaattcacctcaataaagtccctctcatatatgtacatatatcctattaggtctgtccctctagagaaccctgactaataacaccactcaagcctacccagatttttgacatacagaagtgtgaggcaacaaatttgtgttgttacatgctgctgaatctgtggtaatttgttagaacagcaataacaatgacaaaaaaaaaaaaccactaaaaaagtgtcaacaaatttgtataacttgcatgcaggcacataactgctaaatatcagcccagactatgccataaaatgttttaccta

SEQ ID NO: 505846 - DNA, 663 bp, Homo sapiens
taaaaccaaaaacctaaaaactgaaagcaaatgtaaaaaaaaaaaagaaaagaaaacttcacagttctgaccccctaaaatcaatactataataggtaaaaccccttgctagagaattagccaatctttttgatcaaattcatcagttttccagtttctygtgggttttcttcaagtggtcttcattcataaatttttcctcccatgaaactacttctacagagtagctttttctctgagaataaagaaatctttttcttctgcattcgtggttgtctatatatatttctaaagttgttaggtaaggaagaatgctatttctgttctaagtgtgaggctagagcagacctttctctttggttgatttcctagacacaccatctcagcgtgttcagttcattcttggcaccgaggaagatgaagagcatgtgcctcatgagctgtttacagagctggatgagatctgtatgaaagagggagaagatgctgagtggaaggaaacagccaggtgaggccctaaaatggcctgcatcaagatctgcttgggtaggcaagtgtgtacccttcagcaagtgacaggcctgcctgccttatttcttcttgggagaagctgtgactgacatggggactgacattccagtgtctcctgtggagaattttggt

SEQ ID NO: 505847 - DNA, 663 bp, Homo sapiens
taaaaccaaaaacctaaaaactgaaagcaaatgtaaaaaaaaaaaagaaaagaaaacttcacagttctgaccccctaaaatcaatactataataggtaaaaccccttgctagagaattagccaatctttttgatcaaattcatcagttttccagtttctcgtgggttttcttcaagtggtcttcattcataaatttttcctcccatgaaactacttctacagagtagctttttctctgagaataaagaaatctttttcttctgcattcgtggttgtctatatatatttctaaagttgttaggtaaggaagaatgctatttctgttctaagtgtgaggctagagcagacctttctctttggttgatttcctagacacaccatctcagcgtgttcagttcattcttggcaccgaggaagatgaagagcatgtgcctcatgagctgtttacagagctggatgagatctgtatgaaagagggagaagatgctgagtggaaggaaacagccaggtgaggccctaaaatggcctgcatcaagatctgcttgggtaggcaartgtgtacccttcagcaagtgacaggcctgcctgccttatttcttcttgggagaagctgtgactgacatggggactgacattccagtgtctcctgtggagaattttggt

SEQ ID NO: 505848 - DNA, 401 bp, Homo sapiens
ttttccccaccaaacctgttcctcctgtaatctttctcatctcagtatatggaaactcccttcttccagttggcaaagggagaaaaacacttatatacatccttggctccttttctttcatacctaaccattaaagggtatggtttaatggtttaatggtttaataaaggtatgctaaaggtagcatacccggtctacattctgttcaaaataaatccacwatcacaccattcagcactaacactcctacagttctactacttttcactggcatttattgtttgaattgttatttgaaaatttccatgtggcttaaaaaatcttgatgttgcacaaataaaagaccaaacatgtttaaaagctattttgaatactatctttgatggggttatgtatatata

SEQ ID NO: 505849 - DNA, 339 bp, Homo sapiens
tgcctctgtctctcttcttctttctctgtctttctctctcctctctctatttctctttctgtttctgaaaattggtcttcctgttatttgcattgtttcttaggttaaaaaattcagacagaggaaaggattcagcttttgttttatgtgccaaccttcccaagttactgagaagaagtgctctaagaagacagtttgctaggttttctgttaatgcatcttcagtaataagtctaaaaccatagaaaagaaaatttgattataaaayaatcttgagagataaaacatgaaaaaaatacacaacagtattttattgacattttaattttctttcatttt

SEQ ID NO: 505850 - DNA, 467 bp, Homo sapiens
caaatatttcttcatcttcctcaatgacaccactttctctgcttaaaaagtctaacttaaaggtggaatttatttagttccttgacgaagactccattcagctatgctgttgaaacaagctgtttacacacaaatgtagttgattggagtagttgcatcttagtcagtgaccactagagggaggactttaactgagaaagagacttgctgatttagcaaatgattaaaaggagttaaagtgactaagcggtggcatttatgaagattaacaaatacagctagttaactaatactatccaagaaaaagagttcatttgaaaaacctgcygaacacagcaattgctcataagttgtaggttatgtttgtttattcttgttatgaattcaacatagttcacttccccatttgcaggaaaatgtgttgaaataaaagaggaaatctgggtaacttgttaacaaagaatgtt

SEQ ID NO: 505851 - DNA, 592 bp, Homo sapiens
gagagtaatagttttaaaattataaaggttagctatgaagtcatgggaaggtgaagatgttgaagtgtaagaggattttaaagtgcagagggactgggcrtggtgggctcatgcctgtaatcctagcattttgggaggtcaaggcgggcagataacttgaggtcaggagtttgagaccagcctggccaacatggtgaaaccccatctctactaaagttacaaaaattagctaggtacggtggtgtgtgcctgtaatcccaaatactcgggaggctgaggcaggagaatcgcttgaacccgggaggcgaaggttgtactgagctgaggtcatgccattgcactccagcctgggggacaagagtgaaactctgtctcaaaaataaaataaaataaaaaataaagttcagagggactaaaaacatagcttttgaagtaagtacataaccagaaaccagatatgtcctgaagaaaggtgtttctttactttctgaattattgagtaggactgttcaatttagaagattgtatatctttgatgagagggaaaattaccattagttttcaaaagccttcccacgccacagatttgcag

SEQ ID NO: 505852 - DNA, 607 bp, Homo sapiens
ccttcttttgttgaagagagtaatagttttaaaattataaaggttagctatgaagtcatgggaaggtgaagatgttgaagtgtaagaggattttaaagtgcagagggactgggcatggtgggctcatgcctgtaatcctagcattttgggaggtcaaggcgggcagataacttgaggtcaggagtttgagaccagcctggccaacatggtgaaaccccatctctactaaagttacaaaaattagctaggtacggtggtgtgtgcctgtaatcccaaatactcgggaggctgaggcaggagaatcgcttgaacccgggaggcgaaggttgtactgagctgaggtcatgccattgcactccagcctgggggacaagagtgaaactctgtctcaaaaataaaataaaataaaaaataaagttcagagggactaaaaacatagcttttgaagtaagtacataaccagaaaccagatatgtcctgaagaaaggtgtttctttactttctgaattattgagtaggactgttcaatttagaarattgtatatctttgatgagagggaaaattaccattagttttcaaaagccttcccacgccacagatttgcag

SEQ ID NO: 505853 - DNA, 629 bp, Homo sapiens
tagtgatctgaatgctttttccttttctgtccgtatgagctttaatttcttactttccactgactattcacacttgattttagcatcctctctggacaaaggtcttcgctctccatgtcctataccagggttggcagtttttctgttaaaagccygatggtacatattttcaacttcgtgggccactttaatgtgaagatgggcataggtaatatgtaaatgaatggatgtggctgcattcccgtcaaacttcatttacaaaagcaggtagcaggctggctttgtccctagggccaccgtttacagatccctgcctaaacctgtggcatcctctctgctctggctagcaccctgtccagcccaacccagggggaaggatttggataagaaagtattatagttatttctttttagctgtgataacttaccagggagatgactgagaaaatgtaaaatgttgacccatcatggatcaagtcgtgtcctgtggctttttagccgtatgaccctagatgtgtttattaatctctcagtgtgcacacgttggtgataaccttgcctatcatagatggttgacatggtttggctttgtgtccccacccaaatctcatcttgaattgtaaccccca

SEQ ID NO: 505854 - DNA, 522 bp, Homo sapiens
tgcacactccgcgatgcaggggaatagttgcctgctgagggcgaatgtttgaccagaggggtttggagccaggtgacagatgctctcccttcctcaccctggctggctggtctgaaaaacattcctacccttcagagacagtgtcattgaatggagtaaccagtagcccatggtagtgacccattgggtaaatcgctcctgarttagatcctcctctcttcctgcccaacccaccttgtccgtggttcctgcccatgggggttactctccgcaataaaatgtcctacctcaggctcattctctgaaaaaattaagccaaaatagcctcatgccagtctcacatttccaggtaggtccaggtattttgggaagaaaggaggcttttctcctaactctaaaaaaaatcccagataacctcagaaactcagaaaaccatttctgacttgctatccatttctgtgcgctactttttacctatggcagtaaagatcttctctgaagatcaagttttcttccaaagca

SEQ ID NO: 505855 - DNA, 486 bp, Homo sapiens
tttattgaagagattatcctttccccaatgttgtttttaatacctttgtctaaaaacaattgactgtaaatgtgtggatatcccatgtttatggtttgaaagaattaatattttaaaaatactcatactacccaaagtgatctacagattcaattcaatccctatcaaaattccaatgactttttccacacatatggaacaaacaaacctcaaatttatattcaatcccagaaaactagatagccgaagcaatattgggcaaaaaaagaaaaaaagaaaaaagaaaagttggaggcattacactacctatttcacaatataccacaaatctatagtaatcaaaatagcatgatactgacagactaacagactcatggaccaaygtgacagaatagagagctttgaaataacacacatttacagtcagttgattttatactatcaatttttaacctatatatattgttcttagtaacattttataaa

SEQ ID NO: 505856 - DNA, 525 bp, Homo sapiens
tgatttccttccttaatcatttactatattattgaacaaatagctgtgaagaaaggtgttctaatttattattcaatccacctgactcctagattaatagaaagctagtatatttacctgaaatgtgataactgtttatatatttgacaacatgaacttagtacttgcaaaatgctatcagattgaagggaaaggaagctgtattagtctgttctcatgctgctgataaagacatatctgagactgggttaatttataaagaaaaagaggtttaatggactcatggttccacgtggctrgggaggcctcacaaatcaaggtggaaggcaaaaggtatgttttacatggcagcaggcaagaaagaaaatgagaaccaaatgaaaggagtttgcccttataaaaccattgaaacgggaaaagttcttttatcccctttgcagggcgtgcaacaaggatgcggcttgctttttctgtgccctgcagctcggaccgctagggagagcgtatgcagatgggcaggtcgtg

SEQ ID NO: 505857 - DNA, 598 bp, Homo sapiens
agggtggagggtgggaggagagtggggatcaaaacaaactacctatcaagaaacctgcttatcacctgggtgacaaaataatctgtacaccaaacctctatgacacaaaatttacctacgtaacaaacctgcatatgtacccctgaacctaaatgtttaatatttttaaaaatgcaaatttaaaggatttggttttcctttgtaattgcatcgtcatgcaataygtagatgtccaccttctttgctccagtacatttgataatttattggcagatactcgataccttttggatgatctgacttaaaagggacattgttttcaagagacaaaatataatttcactatccttagttttcctattttcagtttcactctctaaaacatgacatctcctgtaagggaaaaactttgtctccagatgtatgaaaagcatccttaattacactttatctaaaacaatgagacaactcctggactttctcagactggttggctattgtagaatgtggattccttgtctgaacccctagaacgagaattaacctctataacagtattggatccttttaaaaacctccctttcctcttcccccagct

SEQ ID NO: 505858 - DNA, 584 bp, Homo sapiens
caagcatgcaggaaattaaacgcgtccgtctttgccagtaccccggacctctgctcagcatccattttaaccacactttatatatttatatatacacagacatatatatacatatacaaattaccatgaaaaaggctgcaaacctgacgctgtaattatgggctgcatctgaccctagcaggcacctgccaggaagaggcagggtaagcagctctgctactaggcatgttaattgattctcttattgaacttggttattagcgggctcatcttcccggggaaagtgatggggtcctcacctgtcagactcggggtgaagcaggaatgaggcggtgatgactgcctgccgggccctggccctcccagcttcctgcacaggacagaggagatgccagggagcagaggtccctttcctgcctgggcaggggtgggaagccctgctctcccagcggctggcctctgtcctgcctggggcgcagcagctttctcccttggccctgctgccttgccttccttcctcggctctgcsccttcctgggcacccatccctagggctcaccccacagtgagggtcactcctcaga

SEQ ID NO: 505859 - DNA, 646 bp, Homo sapiens
gctgggaacctatattcccttccctggcacttccacctgtgcttggctggctcagtctaggacctaccttctccatggcttttaaacaaggactcagagagttgagtcattttcactctcttgtggcagaagatgagagttttcagtaactgatcaagttaggagttgccagcaatcatgttttctgtctggtcaatgcatttgcagaaaaggagagtcacacggattgtcagagaggagcagagttgcgagatcatgttggtggcatgagttcctgattgaaagcctatctgatattcagccagattccaaccctcggaatctacctccaccttccagccctgaatccttgcagttaattttcatttttgcttactctagtgcatgtgggatatgttccttccaacacaaacagccctaattckgctaatataaatttttacctaatagaaaaaattcctagttcttattttagtttatttggcttctaagaataaaatgttcaatatatcccatattaattctgctcttactgactagcaattagaaaccatattctagctcagtcatgccaccttctgaatgccttccagatgaagttccacagtaagaaaatcttgcaggtcgatctaagaagttaaacgat

SEQ ID NO: 505860 - DNA, 646 bp, Homo sapiens
gctgggaacctatattcccttccctggcacttccacctgtgcttggctggctcagtctaggacctaccttctccatggcttttaaacaaggactcagagagttgagtcattttcactctcttgtggcagaagatgagagttttcagtaactgatcaagttaggagttgccagcaatcatgttttctgtctggtcaatgcatttgcagaaaaggagagtcacacggattgtcagagaggagcagagttgcgagatcatgttggtggcatgagttcctgattgaaagcctatctgatattcagccagattccaaccctcggaatctacctccaccttccagccctgaatccttgcagttaattttcatttttgcttactctagtgcatgtgggatatgttccttccaacacaaacagccctaattcggctaatataaatttttacctaayagaaaaaattcctagttcttattttagtttatttggcttctaagaataaaatgttcaatatatcccatattaattctgctcttactgactagcaattagaaaccatattctagctcagtcatgccaccttctgaatgccttccagatgaagttccacagtaagaaaatcttgcaggtcgatctaagaagttaaacgat

SEQ ID NO: 505861 - DNA, 646 bp, Homo sapiens
gctgggaacctatattcccttccctggcacttccacctgtgcttggctggctcagtctaggacctaccttctccatggcttttaaacaaggactcagagagttgagtcattttcactctcttgtggcagaagatgagagttttcagtaactgatcaagttaggagttgccagcaatcatgttttctgtctggtcaatgcatttgcagaaaaggagagtcacacggattgtcagagaggagcagagttgcgagatcatgttggtggcatgagttcctgattgaaagcctatctgatattcagccagattccaaccctcggaatctacctccaccttccagccctgaatccttgcagttaattttcatttttgcttactctagtgcatgtgggatatgttccttccaacacaaacagccctaattcggctaatataaatttttacctaatagaaaaaattcctagttcttattttagtttatttggcttctaagaataaaatgttcaatatatcccatattaattctgctcttactgactagcaattagaaaccatattctagctcagtcatgccaccttctgaatgccttccagatgaagttccrcagtaagaaaatcttgcaggtcgatctaagaagttaaacgat

SEQ ID NO: 505862 - DNA, 642 bp, Homo sapiens
gtttctactcactgtagaaatgtattctggaatatgttagattctagttttcataagacttggtctcttccctttctgttcccatgcacaatcacctgaagtatgaacctcttccagtttaattgttttgctgatattgtcccttcatactttctagtaggtgtctgttatcatttggctttcctgttctcatgtctgatagatgtccattgcctctcccgcttccttcagtgcacrtgttcatataccatgtgggtcttacagatgtgggtggtatgtcttcatccactagtattttggggtttgtgagataccttgtcacttagttttgttttagatgctccacatttagttttgctatctagggacatctctttttataggagggttttggtgagaataaaaacgatgctactactttttctgcaaccctgtcagaatcctcccaaaaaggaattattgattattccttctaaatgtctcgatttagaatgaataaacaagaattcattctaaatcaaaacttatttagaatgaattattattgattataataactgtttattctaaactgattatttattctaaactagtctttactaaattttcttcatatcagtaaatggtatcacacaatcacac

SEQ ID NO: 505863 - DNA, 628 bp, Homo sapiens
agcctcactgaaaaaactgtgcaggaaaggacatatttgaattgttgaacgaggtctggtgtgaccagagggcagagtagctggtggggtgctgagactgccagagaggtggacagcagtgaggtgccgggtcaggctagtattataagctacactgaggaattctgactttatcttatgtatagggggcagtcattaacatgttgaagcaatgataagacctcatctgatttgctttttagaggtatcactcaggtatggagactgagattagaggagggctaggtgggagttgaggagatgaattgggcatctcttgagcattggtgctggggactggactagagtcagggcatccatccagccaaagttccaccttccactttccagcaaccatacaggagtgaatggtttgcatttatatatawtttggaatatttccttcagcattagttttcttgtctattttcttttttgctccaatttcagctatttattatatcctgtgtagtgtgtgtcttcaggtatgctttaaattcttttgtgaaatcaaaatgtgcaggaaagaaggaatgaaagacggaagaaagaaaggaggagagaggctggtgatactcatgagctggta

SEQ ID NO: 505864 - DNA, 628 bp, Homo sapiens
agcctcactgaaaaaactgtgcaggaaaggacatatttgaattgttgaacgaggtctggtgtgaccagagggcagagtagctggtggggtgctgagactgccagagaggtggacagcagtgaggtgccgggtcaggctagtattataagctacactgaggaattctgactttatcttatgtatagggggcagtcattaacatgttgaagcaatgataagacctcatctgatttgctttttagaggtatcactcaggtatggagactgagattagaggagggctaggtgggagttgaggagatgaattgggcatctcttgagcattggtgctggggactggactagagtcagggcatccatccagccaaagttccaccttccactttccagcaaccatacaggagtgaatggtttgcatttatatatattttggaatatttccttcagcattagttttcttgtctattttcttttttgctccaatttcagctatttattatatcctgtgtaktgtgtgtcttcaggtatgctttaaattcttttgtgaaatcaaaatgtgcaggaaagaaggaatgaaagacggaagaaagaaaggaggagagaggctggtgatactcatgagctggta

SEQ ID NO: 505865 - DNA, 494 bp, Homo sapiens
ctggtgaggtgcttctcttctaatttctacaattgttttaaggagaaaaatttccacctggttttactatgtcaagttctccagaatctctttgcctttttataattttccatgcaaacagaagagtggccaaaagacctggcmtttggcaggtgagagaaaagccgttaagttaccctttgtcttaaatatgaaatatcctccttgagtcgtatcccatggtgctgggaagtctgaacccttcccacatacaccaagctgggctcacatggcttttctagaagtggtccatttcccatctcgcagtatttataaccctctctttgagaagaaaatgggctttactaggaagtcatattaagatagagaattcaggcagccccagtagtaaaaagtaaggacataatttaacttcatttggttgaaaagacaaatgcagataaaagcagtagacaggagccaaatgccttggcacaggaagcaggcagacaatg

SEQ ID NO: 505866 - DNA, 548 bp, Homo sapiens
tgagcattggtccatcccaactgtacctgaccttgccatttgagatagatttggagacttaggactgactcattctactgagtctcatacacctgtcattcttgatcattggccaaagtggaaacctctctagccatctttcctctctgtgtcttttccaattgggtgttttgcttctcttaccccatattatgggttaaaatgtgttcttccagaaaagatatgttgaagtcctaaccctcagaatgtggcctcatttggaaataggattgttgctaatgcaattggttaagatgaggtcatactggagtagggtgggcccctaattcaatatgactagcgtgctcctaaaaagaactccaggtagagagagagacacaaggagaaggtcatgcaaaggtgagaagtcatagatcagaagggtgcatctacaagccaastaacaccaaagatggccagcaaaacaccagaagctaggacagagacctagaacaggttctccttcacagttctcagaaggaaccaattctgcagacattttcttctca

SEQ ID NO: 505867 - DNA, 577 bp, Homo sapiens
gccggtgaggatagtttcaggagcctgcctcctaagccttagctgtccacccaccatgcttggcaactgtggctgccctggaaggcagaagaaacttctatctacaaagaacctccaaaaggactagaaatcagcctccagtgcttcctatttaattytgaaacaatcctatagaaacaaacttacagaaaagttgcgagtccagaacaaagaactcctttgtaaaggagggctcccaggcttttatggtaaatggcaccctcaggtctcagaaacttcttcacagcactcctaggccaaaagcacccaacaattctatttatcaagtacaaacaggccccgacttgcgttggttcacttatgatttctctgctttacgacggtgctgtgaaagtgatacacattcagtcaaaaccatacttggaattttgaattttgatcttttcccccgctagggatgcacagtgcaatactcccacatgagatattcagcacttaatcataacacaggctttgtattagatgatgttgcccatctgtaggctaatgtaagtgctctgagcatgtttaaggcagg

SEQ ID NO: 505868 - DNA, 586 bp, Homo sapiens
ttcaaggaatattctggtctttgccaagcagaaggctagcacagtgtgagatcatgaggatggaccatgcagatcctagctcacgggcagtgtgaccttaggcaggtcaccttacctgcctctgtgagcctgagggctctcatctgtaagatggagatcatacacctggttccagagctttccatacaycgtctcattgaatcctcgaaactaccctggaagacaggcatcttcagcaaacttcattttgcagttgagaaaagtgatgttaaggcagtccttatggctgctaaacagccatgcagaaatccagcccagatctgtctggatctagaacctgggctctgtcccgtcacaggcctttccactaacacaaacattcattcattgggaaagggtagtccacttggcccgcaggtagagagaagtccccataccactgtactcaggattgcctgccatctctgaaggtgccagctccaagcaggcagagcccctccccaaccccaggctggctgggagcaacctggggagagatacagttggcaaaacacattagcatcttcttatctgctaattaattttg

SEQ ID NO: 505869 - DNA, 586 bp, Homo sapiens
ttcaaggaatattctggtctttgccaagcagaaggctagcacagtgtgagatcatgaggatggaccatgcagatcctagctcacgggcagtgtgaccttaggcaggtcaccttacctgcctctgtgagcctgagggctctcatctgtaagatggagatcatacacctggttccagagctttccatacaccgtctcattgaatcctcgaaactaccctggaagacaggcatcttcagcaaacttcattttgcagttgagaaaagtgatgttaaggcagtcyttatggctgctaaacagccatgcagaaatccagcccagatctgtctggatctagaacctgggctctgtcccgtcacaggcctttccactaacacaaacattcattcattgggaaagggtagtccacttggcccgcaggtagagagaagtccccataccactgtactcaggattgcctgccatctctgaaggtgccagctccaagcaggcagagcccctccccaaccccaggctggctgggagcaacctggggagagatacagttggcaaaacacattagcatcttcttatctgctaattaattttg

SEQ ID NO: 505870 - DNA, 509 bp, Homo sapiens
ttttgtgggtaaaacaaaaggcctaaaatagtgtaaaaatttacagggttctgagaataatgtcttcatgaaaagtggattccattaaacctagagcaacyagaaactcttaatattttgaaggtatatagttgttatgctcacctagaaaagcaaaagcacttagcatgtgcagaaataaagagatatatgcaagaacatcatagtccaaatataaactaaaatgctaaatgcattttagctgaaatgcatcatgactgaacaataaagagagtgaaataaaaaagactccgtttgacttttatgcttagaatattcagcctccagtagcacaggtttaatgtcacagaattgttgactcttattttctcctatgtatcccagcccaccaaagtaagaagaacctcctaagtaatagctgagcagattgcttcattctcagaccggactataaagttcccagtggtgcaatctttatctttcctagtccatggcttctgcaggaactt

SEQ ID NO: 505871 - DNA, 572 bp, Homo sapiens
actgcatttaggaaccacactgagaatccgggatcttctcccaatctcaaaacccttaatttaatcatatctgtgaagacccagtttccatataaaataacayttacaggttccagggattaggaagtaatatctttagggggtgatttttcagcttcccacatatgggtagctctggaagtcagatggcctgtcataattacctcgcaattgagtttgcctctctccacttttctcccatacaaacttatttttttctgtttttatattatgcatacctcttttagtactcattctcactgtgtaatgattaatatttacatgtctgttttcccttactagattgttaggtccttaagagtagggttcctgatttgttcctatttgcagctgcctcagtatctggcagacggtaagtgctcataaatttttaatgaatgaactaataaatgtagcttaatgcagccactctctgcctcttcatcaattggtggagcagatggaacagctaactgtatgaacgaaagccatcaagcatgtccagcaaaagtgactgagtgtgtatcaggagg

SEQ ID NO: 505872 - DNA, 582 bp, Homo sapiens
ttgcccctttcccacttctcttacatacatccttttgtgaccactaacattccaaaatcactgaggaaatgaaataacatattgtgaaatgcaatataaaattattctcatgatcaaaattaaatatcttgttgcaacctggaaagaaaaataacacagaacagaatagccctaggaggctgcctccaaactkgaggagggcaccggctgattttcaggctaagacatcaccaaaggtgacaagaactgaccgtccagcttctcatacatgtgataacctgggcaagggaggaaaaatctggtgtacgtgttggcaacaagtcagacgacactgagacgttccagggatagaaaacaggaaagaacattaaatatttgaactctggcaatttttaatcccagctgtgaagggacaggagcgtaaacacagtccatttataaggggtgtgcacattcccaggggctccaaataatgcaacattgtttcactcgtccatgctgctgatagtttcatagtaaaaaagtcactccagacaggttggctccggtcacacctgcctctggagagaggccaaaattgtt

SEQ ID NO: 505873 - DNA, 582 bp, Homo sapiens
ttgcccctttcccacttctcttacatacatccttttgtgaccactaacattccaaaatcactgaggaaatgaaataacatattgtgaaatgcaatataaaattattctcatgatcaaaattaaatatcttgttgcaacctggaaagaaaaataacacagaacagaatagccctaggaggctgcctccaaactggaggagggcaccggctgattttcaggctaagacatcaccaaaggtgacaagaactgaccgtccagcttctcatacatgtgataacctgggcaagggaggaaaaatctggtgtacgtgttggcaacaagtcagacgacactgagacrttccagggatagaaaacaggaaagaacattaaatatttgaactctggcaatttttaatcccagctgtgaagggacaggagcgtaaacacagtccatttataaggggtgtgcacattcccaggggctccaaataatgcaacattgtttcactcgtccatgctgctgatagtttcatagtaaaaaagtcactccagacaggttggctccggtcacacctgcctctggagagaggccaaaattgtt

SEQ ID NO: 505874 - DNA, 504 bp, Homo sapiens
tttgaagcagctttatagaccatagctgcctcagataataagaaccaactctacttggtgcagcaattaatacagtgtcctgtgaatgtgaatcagagtaagtgtaaatgaatacaactgcacatagccatgtctctgccactggagtctcggttggatcttttctgtcttccgtggggcatctggctctcttcagtaggggggctgtcaagggagaccatgacaagaagttgtcacgaatgagtctgacacctgaaagtggaaatcactcagaaagctggcggtggtggtgcaggttttagggacyggtccttccacatagttgatgataagcagatatgttgctaacacttcctatcaattaaagtctttgccatctagttggtgactacatttctagtttcacccaacgcatgacaaatgcttcttaaacaaataagtcttgaagttttgccctctcatactatttttttaaatacagagatatgagaaaaacagggagga

SEQ ID NO: 505875 - DNA, 504 bp, Homo sapiens
tttgaagcagctttatagaccatagctgcctcagataataagaaccaactctacttggtgcagcaattaatacagtgtcctgtgaatgtgaatcagagtaagtgtaaatgaatacaactgcacatagccatgtctctgccactggagtctcggttggatcttttctgtcttccgtggggcatctggctctcttcagtaggggggctgtcaagggagaccatgacaagaagttgtcacgaatgagtctgacacctgaaagtggaaatcactcagaaagctggcggtggtggtgcaggttttagggactggtccttccacatagttgatgataagcagatatgttgctaacacttcctatcaattaaagtctttgccatctagttggtgactacatttctagtttcacccaaygcatgacaaatgcttcttaaacaaataagtcttgaagttttgccctctcatactatttttttaaatacagagatatgagaaaaacagggagga

SEQ ID NO: 505876 - DNA, 562 bp, Homo sapiens
ctttaaaaataaatgttttgagtgatcaatttcttcataaaaatcaaatgatgaatttatattgcaatacacatatgtatacacatccaacgttatcatattactaataaacaaaatacagccaatccattgagaactctattctccctgcccataacccatratgttctgtaaagaaaaaaaaaagatatcatttacatttataaaaaaggaatatgatgcatctgttgcttcataatgagtagattcttgatctcagtatggagctggtttttatatttagagttgtgccatacattaaaaagaaaagctaccatttgtgtctttcatccaagaaggcctcaaaggtgaatttcccttctattttagtaaaatgtcagttgatttctttcaaatttcaatggttaaaaattaattataccatgcttaactgatgtttttggtaaaaggatttcaagaacccaaagtgaaggatttcattcacttaaaaaatatttactgagtgctatttattgagtgtgctgggctgtgtgcagggcactgcgggacagtggcagttgaa

SEQ ID NO: 505877 - DNA, 562 bp, Homo sapiens
ctttaaaaataaatgttttgagtgatcaatttcttcataaaaatcaaatgatgaatttatattgcaatacacatatgtatacacatccaacgttatcatattactaataaacaaaatacagccaatccattgagaactctattctccctgcccataacccataatgttctgtaaagaaaaaaaaaagatatcatttacatttataaaaaaggaatatgatgcatctgttgcttcataatgagtagattcttgatctcagtatggagctggtttttatatttagagttgtgccatacattaaaaagaaaagctaccatttgtgtctttcatccaagaaggcctcaawggtgaatttcccttctattttagtaaaatgtcagttgatttctttcaaatttcaatggttaaaaattaattataccatgcttaactgatgtttttggtaaaaggatttcaagaacccaaagtgaaggatttcattcacttaaaaaatatttactgagtgctatttattgagtgtgctgggctgtgtgcagggcactgcgggacagtggcagttgaa

SEQ ID NO: 505878 - DNA, 540 bp, Homo sapiens
gtttgggtaccttctgtttccaggaggcaatacccttctcatgatccctaaagatagaaaagggaagcataggctctgtcagtcacatcaagatctgagacagtgtggacaatgttactacaaattaatgaggaggattgtgacaagcataacctgaacccatctgccatgagaatacctgagggtgcgataacttcatcttccttattccattctctctccttctcccccgtgttgtgtttcagcttggtctagygctcatttctccccactccttattactacatgtgatgtctcagccaccatggatgccctggagggcaggaactgccacatttatctttcagtcctccaagggatctacccagtgtttgtcacacacatttattgaattaaattaaatcatcatgttcaaagcagtctccaagacagccgcacttctgtgtcaatgatgctcccccaggcccaatgtgtttttagattttggcttagaaatttcttctgagatatataaaagaattggtcacattaatttatagc

SEQ ID NO: 505879 - DNA, 589 bp, Homo sapiens
gtaacctaattggacatataaacaggctataacctattcctgtgccaatcacagagtttcagcccatcacagggcgcccactgttcacactgtgttccaataaggcaacgcggagctacagccaacctggccgttttctgtccctcacttctgttttccataagtcactggcctttttctgtccataaatgttaaccaaccwtgtggcagccacagagttgctcagaatttattttagttctggggggtgtccgatgcatcagttgttctttgctcaattaaactctgtcagatttaatttgtctaaagtttttttttcttcttcttttttaaacactccattctgtagatctcagagctagtaagtggctgagtcggggtctgaatccagggcctgggcttttaaccactgggccatatggattcccagaattggaagtgcctaaaaattcttgcaaattggccatatatatatctccatttatatccatttcccaattatatatatacacacacatatatctgtagttggctttatgtttagatctgagagctggaagctgccagactctaaaaagagaggggcaaa

SEQ ID NO: 505880 - DNA, 589 bp, Homo sapiens
gtaacctaattggacatataaacaggctataacctattcctgtgccaatcacagagtttcagcccatcacagggcgcccactgttcacactgtgttccaataaggcaacgcggagctacagccaacctggccgttttctgtccctcacttctgttttccataagtcactggcctttttctgtccataaatgttaaccaaccttgtggcagccacagagttgctcagaatttattttagttctggggggtgtccgatgcatcagttgttctttgctcaattaaactctgtcagatttaatttgtctaaagtttttttttcttcttcttttttaaacactccattctgtagatctcagagctagtaagtggctgagtyggggtctgaatccagggcctgggcttttaaccactgggccatatggattcccagaattggaagtgcctaaaaattcttgcaaattggccatatatatatctccatttatatccatttcccaattatatatatacacacacatatatctgtagttggctttatgtttagatctgagagctggaagctgccagactctaaaaagagaggggcaaa

SEQ ID NO: 505881 - DNA, 589 bp, Homo sapiens
gtaacctaattggacatataaacaggctataacctattcctgtgccaatcacagagtttcagcccatcacagggcgcccactgttcacactgtgttccaataaggcaacgcggagctacagccaacctggccgttttctgtccctcacttctgttttccataagtcactggcctttttctgtccataaatgttaaccaaccttgtggcagccacagagttgctcagaatttattttagttctggggggtgtccgatgcatcagttgttctttgctcaattaaactctgtcagatttaatttgtctaaagtttttttttcttcttcttttttaaacactccattctgtagatctcagagctagtaagtggctgagtcggggtctgaatccagggcctgggcttttaaccactgggccatatggattcccagaattggaagtgcctaaaaattcttgcaaattggccatatatatatctccatttatatccatttcccaattatatatatacacacacatatatctgtagttgkctttatgtttagatctgagagctggaagctgccagactctaaaaagagaggggcaaa

SEQ ID NO: 505882 - DNA, 624 bp, Homo sapiens
cacatcacagctcacacacaaggtgttttactttttattttgtttactatcagtcttctccactgtttttctgttttgttcaataatgaattcccagagcctagtacagttcctgacacacacgggacattcaataaatgtttggtaaatgaatgtatgaccctacagcaacagaatgaagagggattgaaacctatctggaattccccaggtctggatagccacagtgcagtagaaagatcataagtttcgtcaggcacacttgcctagttgtatgacctaggatacctcacttaacctctttgagacatttttctcattttgtgagctagcttacaagactgctatgagtgaatggatataattggctttaaccataccatggttggtgcttaacacatattcttatattcctaactccaggtttgacaaagactcctggaagcctcaaaaacttgtcaagtttagcaagccttatccagagcagaccttagatgaggcaactcaagacttaatcaaaccgtgttctataaggagctcatttcatttaaagtgctgtagctcttactggggggaccasggtttagtgtgagtgtcaagtgaaaatcacattcttataaacag

SEQ ID NO: 505883 - DNA, 546 bp, Homo sapiens
gtgtcaggagtatttcttctcaaacttgagggaatctgctctcattctctctctctctctctctctctctctcctgatttcctctcttcccaacccttctagtccttccttgtattttggctacttcccttcttgccttcacatgtttgcctttctctcctatctagctaacagtgaaaagagctgggctgtcctagagtgatttgaaaaggggatttrtgagaacccagctcccctaactgcgattgagtgaaggactttgatcattatcaacaagtccaagtaattagtagataccaagatgagatagatgtgaaattccaaagtgagaccctaaatcaccacaggcacattttcagcagaaatagttggccaccattctctatctccagaacttacttgctcttttccaggagcaatttttgagaaagggctctttagggaagtttgggtagtgctctttgtccccatcctgcccccgtagtaggaggtgagtgcctgggtgtctgtctgctcaccatacacatggcaagcaggggcttccct

SEQ ID NO: 505884 - DNA, 516 bp, Homo sapiens
atctgaatgctctaagtctctagtataagagaaagttaaaaaaaaatacctaggacaaatatgtttaaaataagggcaagaattttaggtcccaactaggaasagtgcaaagaaaaagtacatgaagtttaaaagaatattctgcttatgaccagctctgggacattccccttctcagtataaggttttgcatattagcactactgtctcaagagatatggaatttcattgcagatagttgtttcagttggggccaaactagtaagttattaccacaattgaaaacacaaacctttcaccctaaactaaatagtaatcaaattatgtaaacattgttaacatttaggctgtttaaagaacaacaaaaaaagcctataataaaactgtaagataaaaatgaaaagagttataataaacatgtgtctccattcattcaccaacactaaaaaatttcatggtccaatactttattctctatatggctataacaaatgctgaatgcatgtggtggggtgg

SEQ ID NO: 505885 - DNA, 638 bp, Homo sapiens
catgtattttgtcttgttgaaacaaaactcattttgccaagacctatattatatatactatatttttattaaaatatatgactatttgaggtgcatagtatatttatccattaaatattattccttcaagggattataaactccactgaaatagaaggtgataactttttttctatctattttatatgaacttcaacgtacacccgtcttctaataggaagtatttaacaaatgctaaaaatataaataccagtgacactgtaaaaagatttttttccaagcaaaattcatatggttagcttgtgttttttcttttacgcaagatattaaaataatttaacttatttacatagagatttctttcatattataccacaatatggaataaggcattgatattttactaaaggaacagatataaaagaccaaaactttctttatactatcagtakttcccctttttttttttcaggatctagattatactttctaattatatcccagctcctccctcccctagagttgtcttgtcatctgaactcttggtaaagtcttcaagaatagaaatgtgtgaaagtcactggtacactaaaaaccttaaaaacagatatgatgccacctagtggtcccaagaaaat

SEQ ID NO: 505886 - DNA, 538 bp, Homo sapiens
accatttccccaactaaaaatcattgacgtatttttcagtttctgaagtgaatcaaagtattctcaacaacattaataacagcatcttcccacttcccatctgttttatcatctcaagtcatcactcttcctccattctcaacagatttttaaaaaccttatctccakttttctatctctctgatcttttattataaaagttaacatagtcagctttcactaagatggaaccctaaaaattttaggaggaagagaaggagaaatacatgctggcaatgacaacattcactttgagtgggaaattcataaatacaaactaattaatgtactttttgttctggttacattttgtgaaacatatcctaatttcacagttttgtaaaaggtacagacattgtgcggaagaaattttagaaatatcaaacaacttagcatattttgaaaattaagtaaatggcaactgtatcaccataatgttttcttctgagcctcaatagactatgaatttacaagtcttttaatgaaaaaaatcacaatg

SEQ ID NO: 505887 - DNA, 538 bp, Homo sapiens
accatttccccaactaaaaatcattgacgtatttttcagtttctgaagtgaatcaaagtattctcaacaacattaataacagcatcttcccacttcccatctgttttatcatctcaagtcatcactcttcctccattctcaacagatttttaaaaaccttatctccagttttctatctctctgatcttttatyataaaagttaacatagtcagctttcactaagatggaaccctaaaaattttaggaggaagagaaggagaaatacatgctggcaatgacaacattcactttgagtgggaaattcataaatacaaactaattaatgtactttttgttctggttacattttgtgaaacatatcctaatttcacagttttgtaaaaggtacagacattgtgcggaagaaattttagaaatatcaaacaacttagcatattttgaaaattaagtaaatggcaactgtatcaccataatgttttcttctgagcctcaatagactatgaatttacaagtcttttaatgaaaaaaatcacaatg

SEQ ID NO: 505888 - DNA, 538 bp, Homo sapiens
accatttccccaactaaaaatcattgacgtatttttcagtttctgaagtgaatcaaagtattctcaacaacattaataacagcatcttcccacttcccatctgttttatcatctcaagtcatcactcttcctccattctcaacagatttttaaaaaccttatctccagttttctatctctctgatcttttattataaaagttaamatagtcagctttcactaagatggaaccctaaaaattttaggaggaagagaaggagaaatacatgctggcaatgacaacattcactttgagtgggaaattcataaatacaaactaattaatgtactttttgttctggttacattttgtgaaacatatcctaatttcacagttttgtaaaaggtacagacattgtgcggaagaaattttagaaatatcaaacaacttagcatattttgaaaattaagtaaatggcaactgtatcaccataatgttttcttctgagcctcaatagactatgaatttacaagtcttttaatgaaaaaaatcacaatg

SEQ ID NO: 505889 - DNA, 580 bp, Homo sapiens
tcattggctgctgaaaggtcagcctgactacttccacaaacatttaggaaggcacattatgtttcagtcataaagtacttaaccatagctttgattatttatttacaccaccatcatatgaggtcagtaagaattaccttttctactatgattctacgattaggggaatagaaggacatgaaaatagatggaaactgtggttagccaattacccaaagttataaccaaggtcacagattgagtaaaaatttcaaattacatgtctaagccactatatgtcgtttcattcttcaagcaaaggaggcagcttacttcttctatgtggtatgtttgctatttttcatctcttggagagaggtgacagcgtgctggcagtcctyacagccctcgttcactctgggcacctcctctgcctgggctcccactttggcagcacttgaggagcccttcagcccaccgctgcactgtgggagcccctttcttggctggccaaggctggagcccactccctcagcttgcagggaggtgtggagggagaggcgccagcgggaacaggggctgcgtgtggcgcttgcgggcc

SEQ ID NO: 505890 - DNA, 544 bp, Homo sapiens
gttggctctcggctggtggaaaacttaacattggtccttcctgaggatttaaccacttgaattgtcacgagtttcgggaccaccaaggatttaatagggaaccaaaccatcagataacaaagagatggcaatgaatgaatgactgtctaagtaactaaytccttcacgtattcccatgccattctacaggcccaaaaatcttttacaaaattgcctataattcagtatgtctgaaggcattgctcaagatttttcatcgagttttaccaattccctaaggaaatatcccctatactcataattcaaaacgcagaatccacaaatctccctctctgtgtgtgtgtgtgtctgtgtgtatgtcttcttctttctctttcctatttctggcattaacaccttttaagttaagatatccttttccttggcaggacaacaaaccccaaaaaaaaaaaaaaaaaaaaacaaaacatgcaatgaacaacaacaactaaaatgccccgaataaaatctcttatttcactcatctaacttttctaaatcaaat

SEQ ID NO: 505891 - DNA, 544 bp, Homo sapiens
gttggctctcggctggtggaaaacttaacattggtccttcctgaggatttaaccacttgaattgtcacgagtttcgggaccaccaaggatttaatagggaaccaaaccatcagataacaaagagatggcaatgaatgaatgactgtctaagtaactaattccttcacgtattcccatgccattctacaggcccaaaaatcttttacaaaattgcctataattcagtatgtctgaaggcattgctcaagatttttcatcgagttttaccaattccctaaggaaatatcccctatactcataattcaaaacgcagaatccacaaatctccctctctgtgtgtgtgtgtgtctgtgtgtatgtcttcttctttctctttcctatttctggcattaacaccttytaagttaagatatccttttccttggcaggacaacaaaccccaaaaaaaaaaaaaaaaaaaaacaaaacatgcaatgaacaacaacaactaaaatgccccgaataaaatctcttatttcactcatctaacttttctaaatcaaat

SEQ ID NO: 505892 - DNA, 484 bp, Homo sapiens
actgaacaaagataatagtctttgaaattttttttctctttaattcagtgggagcataattaatgtgtattttgccattttgttaattatgttaaaagtctttgtaagaaactcaatttagctagtatgacattttcagtctgttcagtgattattttaatgttagtatttcaggcatctgcctgactggtcaattctgtaatctgacactggtctaccctcataccttgcttgcaccactgtaatagacayctcattaatctcctgcctctggtcatgccttattacagtcattcagccatagggtagccagaggtgtgtgtctaaaatgcaaatataattaaggtactcccttatttaagcccctttattgacttctcagaatctatgttggtgaactgtaacagctacctacttaggttctcttttaatcatgcagaatactaggccctacttcatagttactgattgaaaatttttggtg

SEQ ID NO: 505893 - DNA, 655 bp, Homo sapiens
cttctaggtcacagtgctgctgacacttaggaaaaaaaaaaagcttcagaaatcagtgcgtggctctctgctttgcaagcctgttatatgtggcttttatatgtatctgaaaataattttaacagtcagttttcttttctttttctctattgaagttctccaacttacttttaaaaaaactcacaagttattttagaaagtacacaatatatcaaaggttcccagaattgacttgaagaaagctctgaacatgacttcaactaaaagagaaaaatttcaaatattttataaatgcttgctrtattacctgtatcagtaacacagctgcagagaattacgagagaattactgcagaaagagggtaagacctggtggtacagtgaatggtctaaagctgatcgtctaatagttcatgcaagtcgtatcatctgtgccaggatgaacttgcactggtaagaagaatattattgaaagccaacaggcttgttatatccattgctgtgaaaaatggaatactcagatgtagggcccatcaggaatggctaaaaactgaaatataaagtttgcctcctgaagctgcatactgactaaatatgaataaaaatattgaaaaggtgtcagcctttactgatgccatatcttaaacagtaatata

SEQ ID NO: 505894 - DNA, 521 bp, Homo sapiens
ttaaagtgcaccttgaaagagaccatgtgtttaacaagtcaaatggaggaagagagagrcattggaaggtcaaggccaaagtattttagtaagcacaagacttaagagtttaagtggttctgatttggagggtatgctgaaatacaatacagagtttcaaacttactttgaaaatctgaagaatgtcatttataggttttaggttttatttatttttttaactttctttttattttaaaataattgtggactcaggaagtacacagtacaaagactctcatgtactcatcacccaacttcccccaatgatgacaacttatatagttatagcacaatatcaaaaccagaacattgacattactattatctagaatgcagactttattcagttttcaccatttttaaaaaacctgcactcatttgtgtatgtgtgcatgtttttgtgatagtatttttactctttaatcagcagaattatgtaatcggaggtaggatttaagattatttggcaatagtgaaca

SEQ ID NO: 505895 - DNA, 521 bp, Homo sapiens
ttaaagtgcaccttgaaagagaccatgtgtttaacaagtcaaatggaggaagagagaggcattggaaggtcaaggccaaagtattttagtaagcacaagacttaagagtttaagtggttctgatttggagggtatgctgaaatacaatacagagtttcaaacttactttgaaaatctgaagaatgtcatttataggttttaggttttatttatttttttaactttctttttattttaaaataattgtggactcaggaagtacacagtacaaagactctcatgtactcatcacccaacttcccccaatgatgacaacttatatagttatagcacaatatcaaaaccagaacattgacattactattatctagaatgcagactttattcagttttcaccatttttaaaaaacctgcactcatttgtgtatgtgtgcatgtttttgtgatagtatttttactctttaatcagcagaattatgtaatyggaggtaggatttaagattatttggcaatagtgaaca

SEQ ID NO: 505896 - DNA, 632 bp, Homo sapiens
ggcaatgtttcagatggtggctgctccatcagcctgggtcccagacaaagaacaacatgaaacagtgctccagcaaaccctcaatcaacaagtagcaggagtgttgttttaagacaagagatttgtttattgccacagcagaatttagtcagttctgacagatacacctagttaatctcacctctaatacataattacattatcacaatttacatttcaaactttatatgttctacagcakccatctgtggtgataatcaagcagggtatcggcaatattgttgaaattcactcattcaacaaacatgtttcagatactgcactaagttccaggcaaagaatattgaataagtggacatgatacctttcctcctagtttactatgaggttgattagatcatgaagacaggaagatatttctcagtaatgatattactacttaaagttaaaactaaccatgaagaggttaccattatctggttaagtccttagtagagatgagtttatttaataatacttttcttttcattgtgatgttatcttttatttttttctttccaactttttattttaggtttgggggtacacatgcaggtttgttacatgcgtaaattatgtgatcacatttttaa

SEQ ID NO: 505897 - DNA, 489 bp, Homo sapiens
ggtagaatttgcagtaagttgactatggtgttacattggcattaaaccctaatataggctcaatgaaacaagcaagtcaatggctctaataatcaacatgtaatttaaatgatttctccactgttttccatattttatcattttaaaataatacttcaattattacctaagtaattcataatcttccctggtggcttccctgacaaagataccaytgggcatccctagcgaggcaagtgctgcttctagctgtagggataatcatgacaacctgtctgctcatggggacctagccaaagagaaggccaacccatgaaagcccactgtgccagcttctggatgtgagatatctgagagatttccagggacacttccaacagaaccgccttgttcatcttgccctccgacttttccagaatttttaacatctttcattcctatggaaaactgacttctgttttcctgctcaactcaacagaatccagtcta

SEQ ID NO: 505898 - DNA, 462 bp, Homo sapiens
cattttcattgtaattctcatagccatattcaaaatagatgtgaacaaatttgtatatttaatagaaaattaaacaagcttaagtattttgaaccaatgaatgaacagagtatctgtgccttataaagatacagttaatttacctacacacatttggaaaaatgcgttttgagagaagggggtcatcttaattttaaatatttcttgttgccacaatgaaacatattgaagctatacaaagtgaaaagcaattaacttttcataaaaatactcaaaaatggtaggatctaaaaataaatgaatataaatttgtgattataaagtatcatagataatacccttytctcttattctttgattatcactatgacgtattgtttgggatttttagaaatgcaataattagtgtgatgcatgaatcaagagaacaaaaacactatgcatttttattgactatttaaa

SEQ ID NO: 505899 - DNA, 643 bp, Homo sapiens
gtgtatttttaaataataaaactatcataattgaaaagctgtatttgactgaactacataaaatgttcaaataaaccatagttayttataaggggggtgaaaatgtatgagttaggtgtttgtatactagacaccaaataattgagtttatcctacaaacttataatagactaagtcctacgagaacccaatattttcttcaaatattcatcacagtgtctaattttctagtttatacattgactagctgttttctttttctatttccacaaccagactttgaactctgaggacagagacctcatctcttgtttactagtgacactttcaggatatagctcaatactgccacattgcaagtgtttagcaaaattgttcagtgaaatgtgaattgtgagtgaaatatgtcacaaagttgacaaaaactgggaaaatattctcagataatgtgatctaacatattagaaaatttatagaagtattttgtgctaagtatatagttaatgtagctcaaatataaaataaataggagccatgaataagagagaactttgactcaaaaatgtagctgtgtaatttttttttttaggaaagaaagtctgattatgaggaagctaattcacatttgtatttttttcaacaa

SEQ ID NO: 505900 - DNA, 643 bp, Homo sapiens
gtgtatttttaaataataaaactatcataattgaaaagctgtatttgactgaactacataaaatgttcaaataaaccatagttatttataaggggggtgaaaatgtatgagttaggtgtttgtatactagacaccaaataattgagtttatcctacaaacttataatagactaagtcctacgagaacccaatattttcttcaaatattcatcacagtgtctaattttctagtttatacattgactagctgttttctttttctatttccacaaccagactttgaactctgaggacagagacctcatctcttgtttactagtgacactttcaggatatagctcaatactgccacattgcaagtgtttagcaaaattgttcagtgaaatgtgaattgtgagtgaaatatgtcacaaagttgacaaaaactgggaaaatattctcagataatgtgatctaacatattagaaaatttataraagtattttgtgctaagtatatagttaatgtagctcaaatataaaataaataggagccatgaataagagagaactttgactcaaaaatgtagctgtgtaatttttttttttaggaaagaaagtctgattatgaggaagctaattcacatttgtatttttttcaacaa

SEQ ID NO: 505901 - DNA, 499 bp, Homo sapiens
ctggaattagaaccaggtctcccgacttctgcttcagaactttctctgtccactctggcatcattttcttttcttttttgttttgttttgttttgagatggagtctccctctgtcacccagactggagtgcagtggcactatctcagctcactgcaacctctgcctcccaagttcaagggattctcttgcctcagccycctgagtagctgggattacaagcgcgtgccaccatgcccagctaatttttatatttttggtaaaggtggggtttcgccatgttggccaggctagtctcaaactcctggcctcaagtgatctgcctgccttgacctcccaaagtgctgggattacaggtgtgagccactgcacccagcctctggccattattttcttgttgcttggtgtcagaatcctgaccaggcctttcccaaggtcctgctcagagggccctggcatatttatactttagcacctagtgtagtggtaggagtacagtct

SEQ ID NO: 505902 - DNA, 534 bp, Homo sapiens
agaacccctgggtgctgtctgtaccccttgcggtgtgggggctaagcagcttctctttccctccaccgtgctctatgctgatcctttttctcgtgagaaaacgctggcctgttattattagctaaggtcacacccgctgggcagctcctgggatttttggattcctccccactccagagggaaggctatttctagtggcttcttttctttgagtcctcccttctgtctgcctctctcctgttcctcctctttaccagtagggcttcctcaatgctgacagccctgtgaaaaaagrggagacatgccgagctccggcaggaaactgctggcccaggacctggcttctggggcacaaaggagaatttctgtgtttggaaaagtacagactgagcaggtgacccccgcacagccccttgggggaaacacttgtgccctttgagtctgactgatataaacacagactctcttgactgtcccataaaggccaaagccagagaacctcagaaagggacttgcaaattgtgagtgaggcat

SEQ ID NO: 505903 - DNA, 534 bp, Homo sapiens
agaacccctgggtgctgtctgtaccccttgcggtgtgggggctaagcagcttctctttccctccaccgtgctctatgctgatcctttttctcgtgagaaaacgctggcctgttattattagctaaggtcacacccgctgggcagctcctgggatttttggattcctccccactccagagggaaggctatttctagtggcttcttttctttgagtcctcccttctgtctgcctctctcctgttcctcctctttaccagtagggcttcctcaatgctgacagccctgtgaaaaaaggggagacatgccgagctccggcaggaaactgctggcccaggacctggcttctggggcacaaaggagaatttctgtgtttggaaaagtacagactgagcaggtgacccccgcacagccccttgggggaaacacttgtgccctttgagtctgactgatataaacacagactctcttgactgtcccayaaaggccaaagccagagaacctcagaaagggacttgcaaattgtgagtgaggcat

SEQ ID NO: 505904 - DNA, 472 bp, Homo sapiens
aataatattatcaagaatattaagctaccaagagaatagactagtattaaggatttcatttcaggaattgttatattaaaacagatgtttaaaatgatggttaagtggtagagctagaaatgtttacagtaagaagcatatcagaaatgcccctaactcttcactaattacacagtaactatctccccagccctgttaccaagaaagggatacctgcatagtatttctgtctgtttagagacaagaagatactatgttcaattgctatgaaagcttgattcttatcctctgtccgcagaggtgtgtatgtcattaatccttattagtgatgctcttttgcagacagattctttcaaatgtgaaaggcttaaggaaagtgggtgtaaagaccctcaagtggatgccaaagtgctrcagaggccatgaagtaataaaactacatttgctttaaaataatcattttccttctact

SEQ ID NO: 505905 - DNA, 635 bp, Homo sapiens
aaaactttcgttgtagagacaagatctcgctatgttgcccaggctggttttcctgccactttagagcaggtttcytttttttcatacttttttttttttttttttagtatttattgatcattcttgggtgtttctcggagagggggatttgtcagggtaataggacaacagtggagggaaggtcagcagataaacatgtgaacaaaggtctcggttttcctagacagaggaccctgtggccttccacagtgtttgtgtccctgggtacttgagattagggagtggtgatgactcttttaacgagcatgctgccttcaagcatctgtttaacaaagcacatcttgcactttttcatacttttgggagtggagttttttattaggaattgtccattgaatgttagctaaaacagtcaataaaatgcattaagtgccagctgcatgcaagaccctaagttagatacaatcagccctcttcatcagcaggtccacatcttcagattcaactagatgaggctgaatatttgaagaaagaaaaaataaaaatacaaatagaaagtacagtataacaactgttgccattatacaatatctatacattttgttagtgatgacttcaagtacatgggaccaggc

SEQ ID NO: 505906 - DNA, 552 bp, Homo sapiens
gcagaaagggatacaatggccggctcagtcgcctttaaagctggtgggaagtaacatattacctctgtgtgtttcaagtgggtcagggaagtgccagtcctaccatgtgcccagaaagggaaagcactggaaacgttgatgagcagcgctgcctactccatgacacttccagtattagaaataaccacaaacgcttttttttctttcttttctttcttttttttcttttttyttttttttttttttttgagacggagtctccctatgtcgcccaggctggagtgcagtggcgcagtcttggctcactgaaacctccgcctcccgggttcaagagattctcctgcctcagcctcccaagtagctgggattacaggcatgcgccagggcgcctggcttttcttttcttttctttttgtattttcagtagagatgagggttcaccatgttggccaggctggtcttgaactcctgacttcaagtgatccaaaggtcggctacaaacttgtattatctgatacctactttgagcccaggccagaaaggataaagtaa

SEQ ID NO: 505907 - DNA, 500 bp, Homo sapiens
actctatgaaaaaaaaaaatgtttttttaattagccaggcatagcagcgtacacctatagtctcagccactagggaggctgaggtgggaggattgcttaatgccaggagtttggggctgcagtgagctatgattgtgcactccagcctagggkagagagtgagactttgtctttaaaaaattggaatagaaacaatgaccattctattctctatcaaagtgtaccccctttacacctcagttggggtaaataaaaccctgctccaataaacctgattgccaaaatcactgctttgaaatcaccccaggactcaccaggagccccctcttcaggactgggaaatcctgctctagaattctcaggcttcccctttcccctggatgagccattccactggatagctctatcaccctatggtggggaggagaatttgaaattcagttttacaatagtcattcttaaataatgaaattcagaaaataagattaaagtgtagagtt

SEQ ID NO: 505908 - DNA, 500 bp, Homo sapiens
actctatgaaaaaaaaaaatgtttttttaattagccaggcatagcagcgtacacctatagtctcagccactagggaggctgaggtgggaggattgcttaatgccaggagtttggggctgcagtgagctatgattgtgcactccagcctagggtagagagtgagactttgtctttaaaaaattggaatagaaacaatgaccattctattctctatcaaagtgtaccccctttacmcctcagttggggtaaataaaaccctgctccaataaacctgattgccaaaatcactgctttgaaatcaccccaggactcaccaggagccccctcttcaggactgggaaatcctgctctagaattctcaggcttcccctttcccctggatgagccattccactggatagctctatcaccctatggtggggaggagaatttgaaattcagttttacaatagtcattcttaaataatgaaattcagaaaataagattaaagtgtagagtt

SEQ ID NO: 505909 - DNA, 500 bp, Homo sapiens
actctatgaaaaaaaaaaatgtttttttaattagccaggcatagcagcgtacacctatagtctcagccactagggaggctgaggtgggaggattgcttaatgccaggagtttggggctgcagtgagctatgattgtgcactccagcctagggtagagagtgagactttgtctttaaaaaattggaatagaaacaatgaccattctattctctatcaaagtgtaccccctttacacctcagttggggtaaataaaaccctgctccaataaacctgattgccaaaatcactgctttgaaatcaccccaggactcaccaggagccccctcttcaggactgggaaatcctgctctasaattctcaggcttcccctttcccctggatgagccattccactggatagctctatcaccctatggtggggaggagaatttgaaattcagttttacaatagtcattcttaaataatgaaattcagaaaataagattaaagtgtagagtt

SEQ ID NO: 505910 - DNA, 455 bp, Homo sapiens
cccctgagtgctctgccctaggtttcacaccccatgtgctacttggctctytgagtttaagagttgccgaaatatcctgttctaggaacaacaagggcagagcccagacaatcccagacagtttctctctatctcaggatattgtcttctcggaacattctaaaattattctgagaaccaggaggtacataaagctgagttggtcaaggccattcaggtcttgtcctcctgatcacataaacaaagtaggctataaaacaataagcattagcagaaataatcatattgcattatcacagccattctttattatgataaaaagaatttatccaccaaaaagttttctgaattctaaatctgaatgaacccaataaaacagagatttgggcctgttgttacaatttaataaaggatttactaaaccaaaaaatttacttaaatacataaactctgga

SEQ ID NO: 505911 - DNA, 455 bp, Homo sapiens
cccctgagtgctctgccctaggtttcacaccccatgtgctacttggctctttgagtttaagagttgcmgaaatatcctgttctaggaacaacaagggcagagcccagacaatcccagacagtttctctctatctcaggatattgtcttctcggaacattctaaaattattctgagaaccaggaggtacataaagctgagttggtcaaggccattcaggtcttgtcctcctgatcacataaacaaagtaggctataaaacaataagcattagcagaaataatcatattgcattatcacagccattctttattatgataaaaagaatttatccaccaaaaagttttctgaattctaaatctgaatgaacccaataaaacagagatttgggcctgttgttacaatttaataaaggatttactaaaccaaaaaatttacttaaatacataaactctgga

SEQ ID NO: 505912 - DNA, 455 bp, Homo sapiens
cccctgagtgctctgccctaggtttcacaccccatgtgctacttggctctttgagtttaagagttgccgraatatcctgttctaggaacaacaagggcagagcccagacaatcccagacagtttctctctatctcaggatattgtcttctcggaacattctaaaattattctgagaaccaggaggtacataaagctgagttggtcaaggccattcaggtcttgtcctcctgatcacataaacaaagtaggctataaaacaataagcattagcagaaataatcatattgcattatcacagccattctttattatgataaaaagaatttatccaccaaaaagttttctgaattctaaatctgaatgaacccaataaaacagagatttgggcctgttgttacaatttaataaaggatttactaaaccaaaaaatttacttaaatacataaactctgga

SEQ ID NO: 505913 - DNA, 570 bp, Homo sapiens
agtcacttcaactcttggggatcaatttcctcatccataaaatggagatgatcactctatctgtcctgcctggctcccagaattgtaagcgtcacatgagacaatcatcgcgaaagggtttggcatggggcagaatcactctggaaaaatgagcatcgagtccatagtgagttgaatggcaggggcaccatctctgccctgcaccagagtcagctctgaccgtccccagtcctggatgcagagctcagaggagctcctggagccaggacccccscccaggagcaggcgccctctgcatcattgctgggggcagatgccaggcccttcctgagcccccaggagatgggccagcgtcccccacggtgggtggagggcaggcagcgggggcctgggagagctagctgccagggctgggaagatgctgaggtggagatggaggtatctgtgagggctcaagcccaggggggaaaaaattcttgctggagctgtataattaaaatcctattaagcggcgcctggcagtctcctatcaacccccaccgaggctccaccgacgaaccctcgcagcag

SEQ ID NO: 505914 - DNA, 545 bp, Homo sapiens
ggtgtcctagcccaccatccatggtccatccttcccacacaacctcaattcccctatctcacgcctcaccccaacagtcaccctggggcctaagagtttcagtggaagatagagtgaagggaaaactggcgcggaccctgacagcgggctcggggctgttgggtagggaattctgaggttctgtggtctagaaaggggtagtgtgaaattccccttggtttccctcttggggagggagggatttcgctgaaagagaagtagaagagggctatcaagccttagggcctgaggcaggagccccagtgcccagccaaagagtaggtcgatgagggccccagttcctgcytgagggctggggagaaggtgaagggcatccgggtgccccaacctggctagctctgcggaaaaaaacacctcccaatcccatgtccccttccccattctttctctctcttacctcagggctaagccattcctccccctggggatggccttatgaactttcccaggtcacctttcaccccaaatctcaaacccacccaagg

SEQ ID NO: 505915 - DNA, 581 bp, Homo sapiens
gttactggaagctggaaggatggaatttcatgttatctaattgtgaaacagtaaaaccataactcacaataatttcaaaggcagtacttataaactttagctctaagataagagaatggaaaagaggattttgacagcatgtggggaatgctgctgtctgcattagataaggtagtaaatgaccaaaatgtactgagaaaataataggtcaatttgcaagaagaaatgaaagagaagagaaaaggtccacaartaagaggaatttcacagaatggaagaggcaacttcttctgaacaccaaataataaaagacaaaattgagaaatactttgagtgaaaaaagctgataaaaatccaacctagaaataaagatgcaatctaggctatgggctttacaccctcttttagaaccactaaatagattaaaatgcttcaactagacgaaataattcagtaaaaaagaaactcagaatgtctcttccacgaaagccaaaagacccaaaattaagttgagagagagaagacaaatagaggtaaagcataacttatgtattacatatatattccatattacacacaca

SEQ ID NO: 505916 - DNA, 623 bp, Homo sapiens
taccttggcaataaagtaggtctgtcaccaagtcataattttattgttcccgttacagtatgaaatctgtccaatagacagtgagttgcaataataactctgtgtgtaaagaataataatggaataactgcaaagagaagaagtatctgttctctctgctaarttgagtgacttcatctggatgaaagagttagaagcttgggagataaattgagtggttgaagatgaaatatgagcctgctcagataatcaaataatgcacagttgaattatttatttctattcaggtttcaagtcaaatgttacctcctcatagaagctgtattagtttgttttcatgctgctgataaggacatacctgaaactcagaacaaaaagaggtttaattggacttacagttctacacggatggggaggcctcagaatcataacaggaggtgaaagtcacttcttaacatggcagtggcaagggaaaaataaggaagaagcaaaagtggaaacccctaataaatccatcagatctcatgagacttattcactatcatgagactagcaggggaaagatgggcccccgtgattcaattacctttccttgagtccctcccacaacacgtggtaattcc

SEQ ID NO: 505917 - DNA, 613 bp, Homo sapiens
tatctcatgtggttgtttctatcaatttctcccaggacacaatgattattttcagcttaagatgtaggtctttgtgttagaaaagctttattttttactagtttttttttctcttctatttattttttccatctttgtggggaacaatatttatgttgatgaatagtctcttgtaatgatcaggtagcacccttatctagcatatatctgtgttcctttcaatttcatgtatatgttgctacatatmtatatatacacacacatttataaaagaaacataactttgttatttctttttatttttcttacttttactatggctttcattcttatcgcagttttgtgtatcattctattgttctctgagttttgataccacacttttcatcttcttttctttcattcttttcttgaatgttgataatgttttagctctttttaaagatagctcatgttgtctgcaatttttgagactatggataacattgtgattgtgcctttcacttgtctttttcttatgttcattttctcattgaaaaatgtttatgtttttgcagattttattcatgggactcatgagttccttaatatttgttaatattcataaaaggga

SEQ ID NO: 505918 - DNA, 613 bp, Homo sapiens
tatctcatgtggttgtttctatcaatttctcccaggacacaatgattattttcagcttaagatgtaggtctttgtgttagaaaagctttattttttactagtttttttttctcttctatttattttttccatctttgtggggaacaatatttatgttgatgaatagtctcttgtaatgatcaggtagcacccttatctagcatatatctgtgttcctttcaatttcatgtatatgttgctacatatctatatatacacacacatttataaaagaaacataactttgttatttctttttatttttcttacttttactatggctttcattcttatcgcagttttgtgtatcattctattgttctctgagttttgataccacacttttcatcttcttttctttcattcttttcttgaatgttgataatgttttagctctttttaaagatagctcatgttgtctgcaatttttgagactatggataayattgtgattgtgcctttcacttgtctttttcttatgttcattttctcattgaaaaatgtttatgtttttgcagattttattcatgggactcatgagttccttaatatttgttaatattcataaaaggga

SEQ ID NO: 505919 - DNA, 557 bp, Homo sapiens
tgtgtgacctctggcagcccattcaatctctctgtgccttctcattgtgaacatgggaataataatactactgataaccatgagctattgttgtgagggtcaactgagatatactaacttgaaaaatgtcaactcatatatatcactggtctctggagtaggagctttgggaggtacagagaggaatcggatgtgaatcctgcctctcgagtatcttactggcaagaggaaagagaggcaagtacacaaggaactatactcccaaatggcaagctgctatcttcttaggcaaaggaagataaagagatggtaccattgacaggatagcacaatctagacagtcactctttgcttcacttagcaaagttcaagggaaatattttatttgagcctaatgactctggacacttcccttaaaatgacatatgagaatataagtcagtttttctcctgttgagaggtggcaggctttggaatcaaccacacccttgtgaattctcttgggcacagttttgtttatrcttatatgtcacttaatggttacatatctgttacag

SEQ ID NO: 505920 - DNA, 630 bp, Homo sapiens
ggccattttcctaagcaaactaacacagaaacagaagaccaaatacccatgttctcacttataagtggtagctaaacactgagtactagtggacataaagatggcaacaataatttgggaccactagaagggggaagtaaggaggaaggcaaagtttacaaaactgtcaggtactatgctacgacttgggtgatggggtcattcatatcccaatctcagcatcacacagcataccatgtaacaaatatgcatatgtaccccgaaatttaaaataaaagttgaaatttttttgagaaataggaaaacacacaaaataaattttaaagcattgaaaatagtctgtcacttagttatactattatgatgtatgtatatacacacacatatatatgtttgttcaataaataaattatatataaggtaaataaattattagtaattatataaacttcaaaataaaatatttattttcttaatgcaaataataaatacgtcttctcttatataaaatatggcacatgatgtttaatcgtaagtactactttaaattatttttctrtgagcatgcactatgaagacatacatttaagataaaattctattttgcttggcaaagtcaagctcatgtta

SEQ ID NO: 505921 - DNA, 609 bp, Homo sapiens
ctttctatgttgcccaggctggattcaaatttctaggctcacacaatcctcccacctcagcctcccgagtagctgagactataggtgcaccccactgtgcctggccaatgccatattttttagcaatcaaattaatgcaaaaaaaaatccatattgaacaaaatattttcaataaagacagaatcagtaacagtatcatgccagggcacactggagcctgaggcaaaaggaaaaatccataatactgatttgggactaggggagcttaatgtgcacttgttaatggagcttaatggcaccatcagtgccattctctggcccagtgttctagggctttggggagggcaaggatacattaagatctgaagctgggaaacttccttccagaccttggctcttcttgaaggcttctgttttccatgtggctcttargaaggcccagagaatgcttgcttagcaacctgccgcaaccccagaagatctgagtttagaaggggagcggaatccatccacagtggagctgatttgcatgacagggcttgtcattgctgaggacctggggagtcaccactcccgaccctgcaaggtccttgctgtgtgactttgcgc

SEQ ID NO: 505922 - DNA, 502 bp, Homo sapiens
tgctgggtaaagggggacccatgccaagcaagataaaaagcgctggcgagaagaatgaaagttacactccataaatctcacctgttctcttcacctagaaggccaagcttctacattttcaagtgaagccttcctgactcctggaagaattcatcagtgcctcctcaagactcctggcgcttcaattayagctctgaccacagtgccccatagccaactggcttgcagggctgcgctccttgcagggtgcccagtaccaggcacagagccatccacggctggcacaatgtgtagactgagtgaattctggcataaaagcaagtactctcaaaggcaggcacagatggttcaaggtggcggggtaagagaagtggaaggaaacggctcttttgaggctaagcaggagcaaagaagaggttctaagatataagaaaagggaagcataaatcactctttcctgcaacaaaatcaaactactgctcaggctccaggaaagaatgtc

SEQ ID NO: 505923 - DNA, 502 bp, Homo sapiens
tgctgggtaaagggggacccatgccaagcaagataaaaagcgctggcgagaagaatgaaagttacactccataaatctcacctgttctcttcacctagaaggccaagcttctacattttcaagtgaagccttcctgactcctggaagaattcatcagtgcctcctcaagactcctggcgcttcaattacagctctgaccacagtgccccatagccaactggcttgcagggctgcgctccttgcagggtgcccagtaccaggcacagagccatccackgctggcacaatgtgtagactgagtgaattctggcataaaagcaagtactctcaaaggcaggcacagatggttcaaggtggcggggtaagagaagtggaaggaaacggctcttttgaggctaagcaggagcaaagaagaggttctaagatataagaaaagggaagcataaatcactctttcctgcaacaaaatcaaactactgctcaggctccaggaaagaatgtc

SEQ ID NO: 505924 - DNA, 511 bp, Homo sapiens
tcctcagatgcaggcttctctcttgcttctgtggtttctccaggcttgatgtggaggatggtcaccttgccaggtcactacctgaaggtgacatggggtctttgtaacttatccttgcccccaaccccatccaacacatacacttactccactgttctgcagcttccagatgtctgtccaccaggtgcaatgcaaacccagcccattttggggggctggctgtgagcatggctaaaccaaaggtcgygtcccaggtgcagcccacacaggctttagacctgcttaaggcccagtttttttgcatagaagtcaggggaatagataaattttagttaatattttaattgcctgaaagattactttataaattaaaggaaaatggggtttttaatttttttttacaattaaaaatgcaactcaaatatattttcttttcgaaggcaagtgatacgagaagccagattatcatcaaaagactgcttggtgatcctaagaggatcagccgtgactt

SEQ ID NO: 505925 - DNA, 656 bp, Homo sapiens
ctgtgtgtgtgagagagttcctcagatgcaggcttctctcttgcttctgtggtttctccaggcttgatgtggaggatggtcaccttgccaggtcactacctgaaggtgacatggggtctttgtaacttatccttgcccccaaccccatccaacacatacacttactccactgttctgcagcttccagatgtctgtccaccaggtgcaatgcaaacccagcccattttggggggctggctgtgagcatggctaaaccaaaggtcgcgtcccaggtgcagcccacacaggctttagacctgcttaaggcccagtttttttgcatagaagtcaggggaatagataaattttagttaatattttaattgcctgaaagattactttataaattaaaggaaaatggggtttttaatttttttttacaattaaaaatgcaactcaaatatattttcttttcgaaggcaagtgatacgagaagccagattatcatcaaaagactgcttggtgatcctaagaggatcagccgtgactttttcttcctcctatatcatacaacccactggctcccttgtgcttctttccttttgcgatgaatacagttaccaagaaaggtgacttttttaaaccamtgttgaatcaaagtccaagagaaagtaacg

SEQ ID NO: 505926 - DNA, 548 bp, Homo sapiens
tgtctgcttctcctggctgttcacagggttgtgagacagcaggcccccagaaaattcctcggacacagcctcctcccagcctggctctgctcactgcgctmtccagtgccttgggcctctgatggaagacaacgagtaggactgacctccatactctggtcttcccctcatgacataaacaggcatgcttcagtggcccatcccgttagggtcaacttgctgattgctgatttatctgataaatgaacgtatgctcacagagaagccgagacgggtacattaatagtgtgttacatctcccaagaaggatgttgatacagaattttcaaacagagcaattggagacttagactcacaagaccaaagaatcctagggtatgatggcatgcagggacttaaacaatggtataaaccaatgcattaacttcccagatgggaaagctgaggctcagaaaagggaagtgagtttttcagtcctttgcaactactaagaagtacagccatgcttcctgatttcccagccagtgttcttccaactgcctttgcaa

SEQ ID NO: 505927 - DNA, 550 bp, Homo sapiens
tgattctgatctttctctggggtgaagatgttggggtggagaagcatcatcaggcatgaccttagccccataatgccctctatgagttatttctcttatttaagcagcaaaggccaggacgaatcaggagaggggatcagttgagtatcagaggtcttgcctacccttgccaatccctgccactgggtttacatacccacttggtaccagtaatacaggaagtaagccctttattcctcttaatatcccattattgagaaccccagatgcttctgaaatgagctaggatattacaccaattcaccaattaagtaactccaaaacactgtgtactagaccaggaagtcagctgtgacatccaaaaagcccactctgtagagttattcagtgtgtatccaaaaacaacatagctcacttgtatgatcacagctgccagaaggggccctatagactcacttctaaacctggaggtggtgggagtgcccagcacaggagggtcatttgcarcagtggatccagcccgtaggttaggtggctgggctgattggag

SEQ ID NO: 505928 - DNA, 568 bp, Homo sapiens
attaaaaactgtaatttaaaaattgtaattaaattctttgatacacatgccccagaatggacaccatttgctcagtactcaggaagctaaaatttaaataacaattctgggtacttctgaggatgaatacaaaaattgtatatacaaaagcaaattaaacacaactgatgatctacccttcaaggttattctcaattagaaaatagcagtcttagtcatgagggtaataagaagtgtgactatcattgcaaaaaaaaatgtggtattaatatgtcaataactttatgtcaataacttaaagttctgaaagaaccaaggctcttaaaaacattggctcatgatgatatagacaaagtaatttaaacgattatccattgctgggtgaaaacataagaaaactcatttaacacacgttatgcatgtcctttgggaaattccagtttggaatcaccttacyctgaaaaaagatgagttaggaatgtattcaggaagataagttattgaaaaatcacaagttctatttatttatattgtgtttatatcgtcagcttaattttagtaaaacatt

SEQ ID NO: 505929 - DNA, 638 bp, Homo sapiens
actgatataacagcaggcatgtgtttacattgctataacaggacacagctttacatactgtgatccaaaattgttgtcttcaggccgggtgcagtggctcacacctgtaatcctggcactttgggaggccaaggcgggtggatcacctgaggtcaggagttcaagactggcctgtccaaaatggtgaaaccccatctttactaaaaatacaaaaaattagctgggtgtggtggtggatgcctgtaatcccagctacttgggagaccgaggcaggagaattgcctgaacctgggaggcagaggttgcagtgagctgagatcacaccactgcactccagcctgggcacaacagagcaagtytttgtttcaaaaaaaaaaaaaaaaaaaaaattgtcgtgtaagaatctactctgaaatgtgctactttcagtgctaatccctagcctgcatccacttacctagggtttccttactaaagtcactgattattctgggtgttcgggttttcactggaatatttttttgtacgtcttcctcctgctttggtggttcctacagatttctcccatcatgacagaactactgatatttcttcacacttcaggactttccagagtcagagaattgtcttacaatttt

SEQ ID NO: 505930 - DNA, 469 bp, Homo sapiens
tgaattgaatgactggccctcacctccctccacagcttcatctcccactagcttgctctagccatcttctccatgatgttgctccaagcactagtccttgtgcctgtggtggcttccttccctctccactgtctacagtccccgactgactgtcctcagagggcccagagtcaaccttgtgcagacaaccttgatacttgtgtgccaaggccaggtttccagccacctgagagccactgggtcaggatgcctgtcaggaaggctctgggtccctggggggagggttcaaaggtccagtttacctggagaggactgcggtgactgccccctcctcctcttgcacagcacataggaaagggctgcggtgaggatgaagatgatggccaggaggcacaggacyggcactgtggctgatgtcctggctgtgggaccagcatttttttccggctgcttctggttctccccagcc

SEQ ID NO: 505931 - DNA, 597 bp, Homo sapiens
ttcagaaagacctgggggtctccttgaccatgggctcagggctcagaccccaacacaaacaagccccgtgtgctgaagagaagcaagtcctttagctgaggtccaaaggctgtgagtcctgcatgagcctgaagtggtgcaggtgcctggtcacactggaggtgtagagcttggggatctgaatgtgctgtttgcctcggacatsaaacatctcacagactgcctggaagaaggtggagcagactggggttaatggtcagcagcagcagcatccccaccactggggctatccctttttaggcccttaccatgggccaaacactgagccgtgtgcttcgtgtaacttctaagcacgcttacctgatagggtgccagcaaagactcgaagaggtgcctgggcttggcacatagtagctattgctactattatgaatgttgttttgtctttgtttttgttttgagacagggcctcactctgttgcccaggttggagtacagcagtgccatcatagctcactgaagcctcaacctccctgggtttgagcaatcctcccacctcagcctcccaagtagctgagactacaggtgtgcgccacc

SEQ ID NO: 505932 - DNA, 602 bp, Homo sapiens
ctctgttcagaaagacctgggggtctccttgaccatgggctcagggctcagaccccaacacaaacaagccccgtgtgctgaagagaagcaagtcctttagctgaggtccaaaggctgtgagtcctgcatgagcctgaagtggtgcaggtgcctggtcacactggaggtgtagagcttggggatctgaatgtgctgtttgcctcggacatgaaacatctcacagactgcctggaagaaggtggagcagactggggttaatggtcagcagcagcagcatccccaccactggggctatccctttttaggcccttaccrtgggccaaacactgagccgtgtgcttcgtgtaacttctaagcacgcttacctgatagggtgccagcaaagactcgaagaggtgcctgggcttggcacatagtagctattgctactattatgaatgttgttttgtctttgtttttgttttgagacagggcctcactctgttgcccaggttggagtacagcagtgccatcatagctcactgaagcctcaacctccctgggtttgagcaatcctcccacctcagcctcccaagtagctgagactacaggtgtgcgccacc

SEQ ID NO: 505933 - DNA, 597 bp, Homo sapiens
ttcagaaagacctgggggtctccttgaccatgggctcagggctcagaccccaacacaaacaagccccgtgtgctgaagagaagcaagtcctttagctgaggtccaaaggctgtgagtcctgcatgagcctgaagtggtgcaggtgcctggtcacactggaggtgtagagcttggggatctgaatgtgctgtttgcctcggacatgaaacatctcacagactgcctggaagaaggtggagcagactggggttaatggtcagcagcagcagcatccccaccactggggctatccctttttaggcccttaccatgggccaaacactgagccgtgkgcttcgtgtaacttctaagcacgcttacctgatagggtgccagcaaagactcgaagaggtgcctgggcttggcacatagtagctattgctactattatgaatgttgttttgtctttgtttttgttttgagacagggcctcactctgttgcccaggttggagtacagcagtgccatcatagctcactgaagcctcaacctccctgggtttgagcaatcctcccacctcagcctcccaagtagctgagactacaggtgtgcgccacc

SEQ ID NO: 505934 - DNA, 585 bp, Homo sapiens
tgggggtctccttgaccatgggctcagggctcagaccccaacacaaacaagccccgtgtgctgaagagaagcaagtcctttagctgaggtccaaaggctgtgagtcctgcatgagcctgaagtggtgcaggtgcctggtcacactggaggtgtagagcttggggatctgaatgtgctgtttgcctcggacatgaaacatctcacagactgcctggaagaaggtggagcagactggggttaatggtcagcagcagcagcatccccaccactggggctatccctttttaggcccttaccatgggccaaacactgagccgtgtgcttcgtgtaacttctaagcacgcttacctgatagggtgccagcaaagactcgaagaggtgcctgggcttggcacatagtagctattgctactattatgaatgttgttttgtctttgtttttgttttgagacagggcctcactctgttgcccaggttggagtacagcartgccatcatagctcactgaagcctcaacctccctgggtttgagcaatcctcccacctcagcctcccaagtagctgagactacaggtgtgcgccacc

SEQ ID NO: 505935 - DNA, 405 bp, Homo sapiens
ctcagtaatacttttatctatttctcctgagttcttgtgggcttttccatggcaagaaacatattttgctctcaagttccttctcgcatttcagcacacacctaggaaggaactccttcattagcccactccctgaaaacagcacctcctacctctccttttgccatgctctggagaaataccaattgtctttgccatacctaacttccattttgaaaaccgatcttggtttttctaatttttttcagaaaaaartatcttttccccatcaccactattaaatcttccattctccctttcaaatgatttttactataagcttgtcaaggttttccaaattgtgaaacaaaacttgcaaataaattccaaaatcaaacaaaaaatggctgttaggaaaggtcattt

SEQ ID NO: 505936 - DNA, 592 bp, Homo sapiens
tggtcatggagtcatctagtcttgcatgtggactctggagccactacttgttgctttctcttcgattggctccttggtctctttgagccttcgtttgtccacctgggatagaaatagagattaaacatgattatttaataatagacacaaawcatagtgattcttccttccctatcttccatggccttctctcaaatgtctcttgatttttttggataaatgtcttctctctctccatcagcttcttcattgcttcattggtaaataaacatatttatatttcctatttctgaaaaacaattaaaaatttaaagtggggtcttcttgtttatgtttctctttaagccattcctccattgcccccttcccactggctgccatatttcttgaaatcatattttcacggtgccactctccacatttgcttatcactgaaccacaaccctggtttctttcactgcttatcagaggtctccaatggtcttctattagctctcctactatcagatgtgatatcatgctataagtataaccacattgagaagccattcctctaaaattctaacatggtttccgacactgaagcctcaac

SEQ ID NO: 505937 - DNA, 613 bp, Homo sapiens
catatcaaataccaaaaacctttgaattggcatgtaccatgtatagtgtatgtagggtagtgtcttcctactgataacagtgaacagcactggtttcaagtgtggggttgaacacacttttctttgacatattgaatttgagatgcctttgagatatccaagaagaaatcttcagtacacagttggagatattggtctcaaacaaatgaatgtccraggctggctattcaaatttgataatcaagattgtgcatgcttaagtccaaaagatatgtacatataaagaaataaacaatacccaggactggaccaagataaattccaaacatttagcttccagaagaacagaatgagatggtgaagaaaaaactagaaatgatcagagaggcggaagattagcaaattataatgtcacagaggacaagagacaaacatttctgaagatttgagagttggtcaagtgttatgttgctaagagattaagcaaaaagatttttaaaaatataccattagatttagtagtgtgcaggttattaatgtttgtagagctgtatagataggatgatgaggaaataagctagccctaagtagattatagaataagcatgaggaa

SEQ ID NO: 505938 - DNA, 517 bp, Homo sapiens
ctctgtcaacttaagtgcatttcttactccatttttgttcacagaattttttgttaataaacttttcagtttttagatcagttttaggtttacagaaaaattgagtgaaaagtacmcagttcccatatattctctccctcccctcaacagctttccccactatcaaattctcttaatatccaccattagagtggtacatttgtcattactgatgaacctacattgacacccaaagtatatagtgtacattagcattcactcttggtgctggagtctatgtgttttgacaaatgtctaatggcatgtttataccattgcagcatcatacagaatagtttcgctgccctgaacatccactgtgccctgcctacccatctctccctctccttgacctctggcagccactaataattttattttctccatagttgtaccttttccagaatatcataaagttggaatcatagtgtagccttttcacattggcttcttttacttagtaatatgtacttaagtt

SEQ ID NO: 505939 - DNA, 517 bp, Homo sapiens
ctctgtcaacttaagtgcatttcttactccatttttgttcacagaattttttgttaataaacttttcagtttttagatcagttttaggtttacagaaaaattgagtgaaaagtaccsagttcccatatattctctccctcccctcaacagctttccccactatcaaattctcttaatatccaccattagagtggtacatttgtcattactgatgaacctacattgacacccaaagtatatagtgtacattagcattcactcttggtgctggagtctatgtgttttgacaaatgtctaatggcatgtttataccattgcagcatcatacagaatagtttcgctgccctgaacatccactgtgccctgcctacccatctctccctctccttgacctctggcagccactaataattttattttctccatagttgtaccttttccagaatatcataaagttggaatcatagtgtagccttttcacattggcttcttttacttagtaatatgtacttaagtt

SEQ ID NO: 505940 - DNA, 649 bp, Homo sapiens
aaaacatatatttgttcatccaagtgtgattcttgggcaaaagactggagatggtggtgtacatttaagagttaagatacagatagagtaataaactatgacactgaatgacatcactttggcttgaattctacatagaaaagagaagaatgcttaggatggagctctacatcactccaacattaagagattacacaaaagcaactgtaatttttgtgcatttaaaggagactctaatttggctttgtgttatttagttttaacccaaattttaaaataagaaatgaaaactgggatagaaatcttgtcattgtttataatctgatctaataggaaacaaattttgttacagtaggatacaacttaattttgtatattamccttgtagtctgcaaagttactgaaattgtgtattaacttttacaggttgagcgtgtgtgtgtgtgtgtatgtatgtgtattccttaggagtttctacatataagaacttgtaatcagaaaataattttacttcttcctttcaaatctgtataccatttatttctgtttctttcctgattgctttgactagaatttccagtataattctgaagagaggctgtgagtttgaaatgctaatcttgttcctgttattggggtaaagcagtca

SEQ ID NO: 505941 - DNA, 649 bp, Homo sapiens
aaaacatatatttgttcatccaagtgtgattcttgggcaaaagactggagatggtggtgtacatttaagagttaagatacagatagagtaataaactatgacactgaatgacatcactttggcttgaattctacatagaaaagagaagaatgcttaggatggagctctacatcactccaacattaagagattacacaaaagcaactgtaatttttgtgcatttaaaggagactctaatttggctttgtgttatttagttttaacccaaattttaaaataagaaatgaaaactgggatagaaatcttgtcattgtttataatctgatctaataggaaacaaattttgttacagtaggatacaacttaattttgtatattacccttgtagtctgcaaasttactgaaattgtgtattaacttttacaggttgagcgtgtgtgtgtgtgtgtatgtatgtgtattccttaggagtttctacatataagaacttgtaatcagaaaataattttacttcttcctttcaaatctgtataccatttatttctgtttctttcctgattgctttgactagaatttccagtataattctgaagagaggctgtgagtttgaaatgctaatcttgttcctgttattggggtaaagcagtca

SEQ ID NO: 505942 - DNA, 510 bp, Homo sapiens
ttacatgggtatatcttgtaatgctgaggtttggggtataaatgatcctatcacacaggtagtgarcatagtacccgataagtagtttttcagattttacccccttcttttgtcctctctctggttgtccccagtgtctattgttttcatctttatgtccaatgtgtactcaatgcttagcttccatttataagcaagaacatgtggtatttagttttctgttcctgtgttaatttgcttaggatagtggcctccaactgcatccacgttgctgcaaagaacaagatttcattgttttgtatggctgtgtagtattcgatgctgtatatgtcccgcattttctttatctaatccactgttaaggggcatttaagttaattccatgcctttgctactgtgaattcactcccttttttgaaagatagatttctagaatgttaaattcttggctaatacattcttattttcagctctttgaatatgttgttctgctcccctttttttctgttg

SEQ ID NO: 505943 - DNA, 585 bp, Homo sapiens
ataacccacgtgaaaatagtttcttagagtcctcattaatgttttagagtgtaaagagatcatgatatcaaaatatttgaaaatcattgtactaaactatataagaaaaatgcatcttcagctttactagacgttgtcaaattttctccaaagtagctgtaataacatagatcttcacaaataatggggtagcaaaaattggcctctgctcaatctgacttctacatcttgcgtaaggggatctggttagctgaatctgatcacattcattatcccagttgaaaaggagcctgtgatttgtaattatctttctaggttttgtgaatccagaaggcatagtagaagatttacatcttcaactgagttccatatcaaacacaaccatccttccatacatscctttaagttttaaatttaattctaaaaactgtgtgagctgtatatcaggatttttcagatacagtattgttaactgctattcagttctaaatatcaatactacctattgtaattttcgtcctttacccataaataatttgctactgcatttaagccttaaaatttactaatttttaaattattatt

SEQ ID NO: 505944 - DNA, 587 bp, Homo sapiens
ttcaggaagacagaacccgttctagatattttgaacaggaaaggatttaatattggagattagaacattacaaaaacatgggaggggctaagggaatgaaggtaaggaaaagttacctctagaattcaggaaattaggaagtgcagaaattgcagacaagcactattgatgatcttaactgcctgcagcacggaaataaattatttgcagtggatgccctgaagctgctggcaaaacctcatacttgctacagcctcccactggcacagagtactactggcttctacttstctcccattttcaaattcttgcatgaattcctctcttgatcaaacctaatatccaactctgtggcaataattcttggaaatattacatcccaggcagctagtctctgcatgcatgcaaaaaaaaaaatgtttaacagagagaaaataatgcttagctcctttgaatctggcataacacattaaattatatttgtaataaagtttgattgcattattttattataaaagtaatacatgagcattattttaaaaatcaaacaaaaggggtatgagttcataagcaaaagttgttcatgt

SEQ ID NO: 505945 - DNA, 585 bp, Homo sapiens
tgccagtgtggctagaataaagcaggcagaagaacctggaagggcttgactggctgagtcttctggccttcatctttctcctgtgctggatgcttcctgccctcgaacatcagactccaagttcttcagcttttggactaaactttcaccagtaatttgctaggagctctcrgggcctttggccacagactgaaggctgcactgtcagctaccctgcttttgaggttttgggactcggactggcttccctggccagcttgcagatggcctattgtgggagttcaccttgtgatcgcgtgagccaatactccttcataaactccccttcatacatgcatctgtactgttagttctgtctctttagagagccctggccaacacattcattctttagggaaaaaaaaaaaatcttacccatcttagattcatttgctgggaccctctaaattagattgatgaaagacctatgaacaagagaaagacatactaatttacttaatgtcagttgtaaagaaacgaagacctgaagaaataattaaacctgagtgtttttatactgagtttgatgaagaatggaagatcatg

SEQ ID NO: 505946 - DNA, 571 bp, Homo sapiens
tgtgcttctttttgatggcacagaggaaagaaaatccaaactcattgctatcacctacaaccccccacataatctaaccttgaccatctctccggggcctaacatcagcaagtcagaccacagaggtaggcttgcaagacaggttggtgggggagtcaacasagtttttaaaaacagttgaatggcatttaaaaggattattctgaattccttgttggacatatcacagatctttaattccaagtccattattggagctttgttggtttctttaggcagtgtcatatttccctgagttttcataatttttgtgtctttacattgatacctgtgcatttaaggagacagccaccccttccagcttttgcaggtgttctttggtggttttagatatctactacttaaaatcagaacttaattattggtctgctgtggcttccttttctggggagggcttatggtgagcaccaggactaaaacactgcacaggaactaattgccctgtctggggaagacttaaacaaacagtggaacttaattactgacctttcagttgtttcccagtcagggg

SEQ ID NO: 505947 - DNA, 531 bp, Homo sapiens
ctgttggaatgtgatccattaccccacaatgcattcagtttactgggaaactcattgcatgagaaacttgggtacgtctatttctgctggtctgaagctgatttaggtagcagaaacacaagataagggaccaaaatgacttgttatgaatctactctggcaatgatgcaagtggaatctactctaacaatgatgcaatcactcaaaacattttgaatttgtgtgtgtgtgtgtrtgtatgcgtgcatacaagtgcttttacaggcaatgaacaagccacaaactgaaaagccaatcttactactttactgtcaaaacttaaactttttccttgttttagtgccaagcaagacaattcaactggaacatatattttctcccctagaagttgtctctaaattatttctaactatttccacatattcaaaagaaagtaccacaggctaggatggtaattgcaagaagaaactcagaaaataattcaaacaataacaatatcagttgaataagtaattagcattctagtatgac

SEQ ID NO: 505948 - DNA, 557 bp, Homo sapiens
tgtcatatcaaccaaagctgcaaatctgaataattaaccaccccccccccgaaatatcattgtataaaaactagaarcaggaattttttttgattgcctggacagttgataaacaaattaagagctaaggaaattccagtttaggaaaaactggccttaatattctagtaaatgctttgtcagtctgttttgatttggcaacgaagaactcacatcataatgcaagagttcgagctgggtgagccgaagagtgtgcagtcagccatttttcccggacaatatcagctccacttgacacatcctgctgtgagagaaaaattggtggttgagatgaaatagcttcagggtttctgcatatataaatgttaaaatagaaacagcctaaggagaaattatatgttggctataaccttctccttttgagtcagcatctcaagcatttgtgtataacattcctgttcaggatatattaaccactctttttttttttaaattagaaagagtaaatctttaaaaaaaagtctgatcctgttataagtgggtaggaaaaatgcgcc

SEQ ID NO: 505949 - DNA, 520 bp, Homo sapiens
acacgcagatcagccagtagtagcatggtgctctaggagaggcacaactgacttatgacatgaagacctgggcatatttggcatttgtccttccctatcacatgtatcttcattttcttttcttcttctctttcatgtccctttcttccccattttctttcctgtcttttccttctttccttcrcttcttttctccagtcttttcatctgtttacctcttctctccatttccatttcttcctgttattcttcccttgcttgcttttgttccttctttctatttgtcccctttttctgccatctttgactaaggtactcaaatgtgtgagctctggaggtgaacttctgggtttgacctaggctctaccacttcttttgtatatgatcttgggtaaatttttaaattctcctatatcaaagtttacccatctacaatgaaattatattaataccatatgctttagaattttgttataaggatttaataagataatgtaaagctgtaatgcactcagcatag

SEQ ID NO: 505950 - DNA, 601 bp, Homo sapiens
taccaacactgaaagaaaagaaaacactaatataaccactcatctcatcagaaaagtcattcagtatagggaagctgacaagctcatggtaacagatacaagttttctaaaattttatttttactaacaggtccaattttatcttaggcaacaaatactatcagttgttttctttgaagtgataggttcatttcgttcatatttgagaaaatttccaacaaatactcaagtctgaattgctatagtttgtctgtcagtccttttttcaggtaaaaatgtttcttaaaaatgggggatgaggagtaggtcacccaccactcaagcaattgcacaagtgcttttcctccagataacattgtattttaggctgcagcaaagtgctttatgagaagtttccatttcatcttacagtgtatttaaaaratcttacagaatattttaaatacaagaactcaaagattaagatttaataaaattaattttactatttactgtttttaccaaggaaaatttttagagaaacctttttatttcttttctgtgagtaaaggatatgactacaagaacaatttagtgcctcaattcatgcaaaaatatcagc

SEQ ID NO: 505951 - DNA, 501 bp, Homo sapiens
tgcttgctgctccagccttgccctcccagagctgccggacgctcgcgggtctcggaacgcatcccgccgcgggggcttcggccgtggcatgggcgccgcgggcctgctcggggttttcttggctctcgtcgcaccgggggtcctcggtgagctgggagggggagcacggaggtggggacgcgtcccgggcagggaaagtttctgtgccgcgatgcaaagcagggggccaaaagcgagacggtrggggcagtgctcgacgcgtgtccgcctcccgctagctttgagggaccactgcaataaaccgcctggtcctgattgtccccactggcccctccgggagctgggacctccagaattggaggctgcgccacagaggggcgctgtctggtcggcccggtgtggctggcggcgtgcgggtgctcgcggtctcctgccgggctccccgcccccaggattctgcaggtgctcatcgctctctggccggcggtcagcgctaccgct

SEQ ID NO: 505952 - DNA, 466 bp, Homo sapiens
taaagagatgcatcccaattctagagatgttaacacgtgagaaaaatgtttcttagaatcaaagatatgaggggtttttccatacatcaatgaaacatttgctcaaaaacgtcatatacttggccataaagtatattcactttttwaaaaggccgtgttgataaatatgaaaaagagagaaggtgatcaacaaaatcttaaccacttgaaaattaagatgctcctagatcacccttatatcaaagataaaatttaaaaaattaaaaactatttaggaaagagtgaaaagaagaacacactaaattatttggaacacagagaacttttcagtggaacttgcaagctttaaatgccttcgttattaaggaaaacattaaaaataaaggaatttgaactcatctgtggaaactaaagagcaacaaactaaataaaaagttttaacatattagtcaagatacatatataa

SEQ ID NO: 505953 - DNA, 427 bp, Homo sapiens
ctgggactacaagcacatgccaccaagccttgctaattttttttttttttctgtgtttttagtagagacgtggtttcaccatattggtcaggctagtcttaaactcctgacctcgtgatctgcctgcctcaacaggcatgagccaccgcacccggcgaccttttctactatatcaggtgatgttccaggctgtagcacattgatataatcttattttctcagagattcagaagattcatattaataatagtaaaaagaggaacattaagaaacatattcagaatttgttggatgtttattttcaatattaatacacattattcamtaagtatcaaagtactacatatttactagtcacatataaatctcactctaaccataatatcaaatcaaactagttagaaacaagcaggtatgagcaaaagaa

SEQ ID NO: 505954 - DNA, 565 bp, Homo sapiens
ttttctactatatcaggtgatgttccaggctgtagcacattgatataatcttattttctcagagattcagaagattcatattaataatagtaaaaagaggaacattaagaaacatattcagaatttgttggatgtttattttcaatattaatacacattattcactaagtatcaaagtactacatatttactagtcacatataaatctcactctaaccataatatcaaatcaaactagttagaaacaagcaggtatgagcaaaagaagtgttatgatttaaattatcattaaaaagatagttaatatgcatattggataaatayccacgttaaaacaattttaagagtgaggcaaatcgagttttaaaatttttacaagccattattttattacacaggaatcttattcctgcaccaaggaaaaaggaagctcaattagctcattcagaacttttcttccttaagttcatgtgacattacttcaattatatcgtgaatttaaaggaggacatctcaaaatattattcatagttaacaaattccaggtcattggcattattatatg

SEQ ID NO: 505955 - DNA, 630 bp, Homo sapiens
actcaccctacatgattttagctttctccatcttctaaaatttataggcagtaatggtgaaaaaaaggaaaaacatcgcaggattactgagaagcactgggcctctgagaaaaatatacatgactatgaaactgaggaggaagagaaaaggaagaaataaaaggaataattaaaattttatgtagtgctttctttacatatttaattttgttaacaattctataaayggtcagggtattttccggaaaatacagaatttgaaacaaacttttgagggttctctttgggaaggaaagctatcaacttgtctgaagaaagcaataatcaagacacaatgaatagaatcttttgttaaattcatgtgtcatatggaggtcttggaatacaaattttgaagtatttattaagagctcatttagaaatctaaatatttccacctgcctctcatttctgtttgcataaacgtcctgaaagtctaactgatatctttttgaccactatatatttttgtacaaactcattcctatgtatttaaaactcggtaaaatcctatcctactactggttgctactttactgatttagatttatgaacagcaaatcacttttcccagaacattgaatcctaaat

SEQ ID NO: 505956 - DNA, 533 bp, Homo sapiens
ctgaacacttcatgtaaggaacaggctgaggaactgcttcttaatgttttttctattccatatagacctaggtggccagttctccaccacatcacctgaaagccagagaaacagcagcacctataatggagtcaatgggatattatcagggtggcccatcattccttacccagatataatctcctgcacatcctaggactaagtaattatagcacagctttttgttgaggaagagtagagtttatggcaaaggaaaagggagagtgcctgagattcagggtcatcttgtaagaaagcaaatgaggcaaacatagtgattgagccaatatagcaacccaggaggcttaccgccctgaggagtaccctgtctccaccaccacactcaccaggagggatgtcagcyatgttctggactttaaactttctcccagtacatactttcagccaaagtacttaataatcccagagcagtaagagttgtctagtaaaaataacaagacatctgagaaacataactgcaataagagaaagat

SEQ ID NO: 505957 - DNA, 609 bp, Homo sapiens
ccttttcccagtccttccacccaatcgcctttctggggcatacaacctcctccttcttgctaatgccaaaaaaataagttttgatattttcacctcttacagtccatcttaaattggtctgctctttcttctctgtcccatctggcttgactttatttcaggccccatcgtctctcttctggtcaactgtaacggcctcctggttcctgcttctttctgggctttcaaaacaaatcaaaacgaacaaaaaccaaccaactttctctcttcaaaatgttgtgattatagagcatctaaatctactggatttaaatctacttgtatagtactgatttctaaaactatccccatatatcagaagaatattctgggaggaaaagtttttatttttcaattttatttttgtcatagaaaaaaaaatctttttgggccatktgccctaatgttaaattcagaacccatggtcaccatatctgtgagctaccttgtgcccaagaaaaaggaaagaaagtctcttgctctttccttttcctgtgcaaaatgaattatccccatcccagttctcagacttcagagatctccattccaagtccccagcagtccacacta

SEQ ID NO: 505958 - DNA, 327 bp, Homo sapiens
agaaagtaaaattttaaaaattcgaggaaaatgttaytcagatgacattacacatattaataaatgtcagaagtagaatttaataccagggatgttgggctaacagtcctttccattttcaggatgtcattataattccataaaagaagatcctagctattttgatttggtctggaaagtgaactagaatcagtgattgtacactatgaagacaaattttgattccatatgcaaaactatgcaataaagaggtgtggtgacaataaaataagagataaggtcaagaatcttgatttaaaaaaaaaaaagaaaacaactctaaggtac

SEQ ID NO: 505959 - DNA, 641 bp, Homo sapiens
ctgcaagcacaaatgaatattattttcatgcagattttttggcaactgcgtaaaacatttggagagagcaacccaacatcagaagcatggatggaggatggaggctttgcattctaatcatatgcccgcctctagctccatacttaatctccttgggtcttccctccgtctcctggctgcaccatctggctaactgaactgagagttctcattgtatatgttatctgacaatmgaatagtgatcatttaaaattcaaataaagaactgtcaaagaattgagtcataaatcaaagtccctgtttttgtcttataaacattctgaacttctaagtagctgttgggcatttcatttactttctagatccctttagaaggcagaaagatatagctaaaatacacagagaatttgaagccagaaagtattaggctttgttctaacaattactagcagaactagaatgaatcacttcatgtctcttaatgagcggtagttacatcaaattttaaaagagtacagcaaagtattctttgctgtctgtgggattatatgagtcattcacttaaacattttatgtattgtacagcaatatacaagcataagaaaatgcaaactttagcacacggtttcaaagaaataatt

SEQ ID NO: 505960 - DNA, 601 bp, Homo sapiens
ttccatttggctgaaaataaataaatgaaaactgctgtttgttaagaatgtccattacttcaatataygtgtaaattgaatgttgggaaaaagcttgcagtagggtttcaagaattgagtaatttgcattcttatatttcagggaaagttggtttaagcaaaatattaatgtgacaagtaactatgagcttggaggtagaaaagcatattaatgtacagatcttatttcactgaaggaatatgacacttctggacagctcaagagattggctgcagtatatggaaggaaagaaaggtgatcactgaagccacactgtgctgctttatgacactcaagtcatagcagacattaataagtcactagctattttcatatgcttgtcataaccttcgtgtcacaatttcagtgaagaggcaatataagacaaagaacttcagggagagaaagttaaagcaagcctgtcgaggatcagcaggcccaaatttgatctgccttctgtttttctcactgttccctgagaagcttgtgtcaatctcacttggccaaattttcgaacatggcacctaatttgggaagtgtctgaacacaatcaagttgtca

SEQ ID NO: 505961 - DNA, 601 bp, Homo sapiens
ttccatttggctgaaaataaataaatgaaaactgctgtttgttaagaatgtccattacttcaatatacgtgtaaattgaatgttgggaaaaagcttgcagtagggtttcaagaattgagtaatttgcattcttatatttcagggaaagttggtttaagcaaaatattaatgtgacaagtaactatgagcttggaggtagaaaagcatattaatgyacagatcttatttcactgaaggaatatgacacttctggacagctcaagagattggctgcagtatatggaaggaaagaaaggtgatcactgaagccacactgtgctgctttatgacactcaagtcatagcagacattaataagtcactagctattttcatatgcttgtcataaccttcgtgtcacaatttcagtgaagaggcaatataagacaaagaacttcagggagagaaagttaaagcaagcctgtcgaggatcagcaggcccaaatttgatctgccttctgtttttctcactgttccctgagaagcttgtgtcaatctcacttggccaaattttcgaacatggcacctaatttgggaagtgtctgaacacaatcaagttgtca

SEQ ID NO: 505962 - DNA, 601 bp, Homo sapiens
ttccatttggctgaaaataaataaatgaaaactgctgtttgttaagaatgtccattacttcaatatacgtgtaaattgaatgttgggaaaaagcttgcagtagggtttcaagaattgagtaatttgcattcttatatttcagggaaagttggtttaagcaaaatattaatgtgacaagtaactatgagcttggaggtagaaaagcatattaatgtacagatcttatttcactgaagkaatatgacacttctggacagctcaagagattggctgcagtatatggaaggaaagaaaggtgatcactgaagccacactgtgctgctttatgacactcaagtcatagcagacattaataagtcactagctattttcatatgcttgtcataaccttcgtgtcacaatttcagtgaagaggcaatataagacaaagaacttcagggagagaaagttaaagcaagcctgtcgaggatcagcaggcccaaatttgatctgccttctgtttttctcactgttccctgagaagcttgtgtcaatctcacttggccaaattttcgaacatggcacctaatttgggaagtgtctgaacacaatcaagttgtca

SEQ ID NO: 505963 - DNA, 540 bp, Homo sapiens
gctgcagaccttattattccttgaaaacctcagtttcgacaccagtccttcaaatctctaactaccctcactctctttacatttcagtccgtcatctaccctacttccagagtgtttttcacgattataaattttactgtgttatactcttgtcttaaaacccttcagaggtgccatattaccttgataactgttcagttccttcgcatggaacacaatatccttcattatctggctcctaatcacctctgcagacatgtcattgttcacacacccaactaagcactactatccagccccggtgagtcattttcagtttcctgaacacatcatgacttttcaaaggccttccagtatgcctgagtctgaagcctgttctctttcacccatactatggcacctcccatgtgctatttcacaaatgctgctttaagcaaaaatttcctgggagcgagaatgagaaggaagggaatattatttcaagacttytacaaaataactgtagacatttcacttgggaatttctaagtgcaatagaaa

SEQ ID NO: 505964 - DNA, 501 bp, Homo sapiens
aaaatgtaaaattactgatttgtcaatcttgtcttcaaatacaagataatcttggggacaagactaaatattttactcagcatctgaacaataccaagaaaaaaaatactgccctactgaagaacaccatttatagctttaactttgtccagcacacatttcagcccatcactggccttgctcaattaggtcagtttccccccttgtgagactcagctatgcatacaggtggtatccaactggagaagttcacaaccttcacgggtgggaccaagcaaaacactttcagaaagcaggctgcaagtaggctatgatcracgagatctgctagacctatcgctgcacgtcatcagagtgcatgtgcacaggggctgaaagggccccaaagtcacacagcttcccatgggggtttcccaaaagaagctgagatggtccagaggaagaggatgcaaaaatcagttaatttatggttggaaatggacacaaagagttttaacatat

SEQ ID NO: 505965 - DNA, 577 bp, Homo sapiens
cgcagactccactccctatattcttcatagattaatatttttacaaaacaagtatcaaataggaaactttacaatggctccctattgcatttaaggtgaatttcaaactcctttaagatattttgtccttaaagagccccatgattcctggttccatcacttgtacattttctttaattttcttaaaattcttgccacttttgccaatgctgttctgtcaagaacactctttcccttggccgaacttactcctatgtatactgaagtttcactgtacagatgaattcttccagaaagacttatctacccctaaagcccctgagtrtctgctttacactttcttagtgccctgcattttccccttggtattccttgtgacactgacttgtcgttcattgcctgtttcttgaagttgaataagggcaggaactacatctgctttgttcatagctaaattgtcagcatctcgttgcaatttgaagtaagtagtaaatattcactgggacaataaaggaacaaataaatgaaaacgaaacaaatgttttgaatctaggcattctttatgaaggtgtgttgt

SEQ ID NO: 505966 - DNA, 480 bp, Homo sapiens
gttgctctcccctaaagtcaagctgcctctctgcctttctcttctgaagtcaagttgcctcatccagccaccatctctgaagccaaagtcacctctccccaacgtctagctgcttctccccaacatccagccacttctcctctctgcctgctgcgtttggggtctttataggcacaggatgtgggtggggcaggacataggaatttttggaaaaggcaacattccattggtaaaaaaaaaaawatattattcagaaagaacaaatcaggagacagcaggcacacaggaatggaagttctcactttgggccacaggtttcaacactttttggctcgaaagtagggtcttgccagggacctgcccctgtctgactaaaatttatctgcctcctgttgctatcaaaactaggatgtttatcagaaaattataaactgcctaaatacggccatgactatacaacagaatattctgcagacattt

SEQ ID NO: 505967 - DNA, 636 bp, Homo sapiens
tatatatggcatacttacctctgtttcttagtttccatagcctgattttttattctaaatttctacttttctttctgtttctgactttctgtaatcaaagtctcactcttttatcttggagagctgaaatstctgcaccatttgttgatcatgtctgagaactatttcttaataaattatactgaaatggtttacattgatggatgaatgcccagatttatttcccttgtgatctattgattctacaggttgtggcattaaaattagggaaatagaatcctaagacgtcaaagccagatttttcacacaatatttccaaataattgaatatatttatatttatatttaatatttgtaatgtctttagagaaaaatgtatacactgacaacaaagaaatcatactggattgaagggagatttccccaccatcttatttgcaaaactctattacattacttcaaagataatctttcagttttcttttttttttctgttggtaatctactaacttaataggatctgctagtcatacaataatttatacaaacacactgatactggttcttaaaaagtgaagctttggttgggtgtggtagctcacgcctgtaatcccagcactttgggaggctgaggca

SEQ ID NO: 505968 - DNA, 544 bp, Homo sapiens
ctgcattcaccctcccacccaactctcttcctacctactaagcccgagaggcatttcagcctgccatccctcttgacagttgtggtagccgtgataacaaaacgtcttggtgcttagtggcagtgatgtacatttgggggattatttatatccgaggctgaaatttaagttgcatccaaaaaaaggcatggactagacccctgtctctcaacatatacaaaaatcaaatcaaaatggattaaatacttaaatctaagacctcaaactatgaaactactacaagaaaacactggagaaactctccaggacattggtctgggcaaaaattcatcgagaaatacccsccaagcaaaggcaactaaagcgaaaatgaacaaatgggatcacatcaagttaaaaatcttctgcacagcaaaggcaacaatcaacaaagtgaagagacaacccacagaatgggagaaaatatttgcaaactgtccatctgacaagggagtaataaccagaatatataaggagctcgaacaactctacggcaaaaaagcta

SEQ ID NO: 505969 - DNA, 589 bp, Homo sapiens
ttattaatatcattagataattgcacatataactatataattacaactttgataaggactaagggagaaggagggaagtatagtgagttctgagaatagcaaacagggaacctgacctaatggagagcatcaggagggccctaggaaaatgacattggaggcaggggtgagttagagccgaaaataattttgggggacttagcttctgggtacaatctacagcaagtgcaaaagcccaagtagaaagaaatcaaagccaagaagggaaatggaatgagattaagaaytggaataagaattctagaattcttaatccctgatggtagaaagaataacatctctttaagagaaacttgtgcttgttaaattcttcaagaaattgctttatctttagagctaactctgcggcaggcaccggggctaagccctgttgaaccttctacagagatagggatcaactccaggcccaataatgtatttgtttatttggaaagcattcaagtttattgtgcatctgatgctgccctcggtgctaaacaaatgcagtggagaaccacagtcaacagtaatttaacatcaacttgtgtaa

SEQ ID NO: 505970 - DNA, 483 bp, Homo sapiens
tcttctaacaccaatctatcctaagccctctaccccaattatttataaaatgaaaatacataacagatagtaatatataccaccwgacttcccagcaggcacaactttactcatccattttactttcttttcttacactcatgcattaattcattcatccacttaacaaatattcacttcccaatactaattaatactgtgatatatacaaaacaataggtataaacttcagtttcctatttctaagtgcttactccacatgtgataggctgtgtgatgtagtagggagtaagtcagtgagatctgggttgagaatgtgactatatcatttactagctgtgtgtagtaaagattgcttgcggcctaacccaaacctgtctttgacttctttagaaatagaggcttttccttctaagcaccattgtatccattcctatgatactgtgattgaccaatagcatgtgagagagtgttgttgtttgt

SEQ ID NO: 505971 - DNA, 483 bp, Homo sapiens
tcttctaacaccaatctatcctaagccctctaccccaattatttataaaatgaaaatacataacagatagtaatatataccacctgacttcccagcaggcacaactttactcatccattttactttcttttcttacactcatgcattaattcattcatccacttaacaaatattcacttcccaatactaattaatactgtgatatatacaaaacaataggtataaacttcagtttcctatttctaagtgcttactccacatgtgataggctgtgtgatgtagtagggagtaagtcagtgagatctgggttgagaatstgactatatcatttactagctgtgtgtagtaaagattgcttgcggcctaacccaaacctgtctttgacttctttagaaatagaggcttttccttctaagcaccattgtatccattcctatgatactgtgattgaccaatagcatgtgagagagtgttgttgtttgt

SEQ ID NO: 505972 - DNA, 483 bp, Homo sapiens
tcttctaacaccaatctatcctaagccctctaccccaattatttataaaatgaaaatacataacagatagtaatatataccacctgacttcccagcaggcacaactttactcatccattttactttcttttcttacactcatgcattaattcattcatccacttaacaaatattcacttcccaatactaattaatactgtgatatatacaaaacaataggtataaacttcagtttcctatttctaagtgcttactccacatgtgataggctgtgtgatgtagtagggagtaagtcagtgagatctgggttgagaatgtgactatatcayttactagctgtgtgtagtaaagattgcttgcggcctaacccaaacctgtctttgacttctttagaaatagaggcttttccttctaagcaccattgtatccattcctatgatactgtgattgaccaatagcatgtgagagagtgttgttgtttgt

SEQ ID NO: 505973 - DNA, 540 bp, Homo sapiens
gaaatatgtattgagagactacaatatattataaatattgttgtactaaggctatgtgttaacaagagaaatttgtggatatttaccccatagaatatttttaacttgtatttatrttgatgttcaagaatcatctgaaagtgttattttaatacataaaattaaatatggtcatctatgtgaatttttttgtgaggtgattgatgcatccttgacaaacagcaattgctagctgctcttatcattataagcagaatgcaatattcatgatacattcctgaatagggaaagataataccattgtttttcccccttttttctgtgttattttgaatacagacggtactgcagggacaccagcaatatcaacgacgacaactgtggaaatccgcaaaagcagtgttatgacaactgagatcacctctaaagtggaaaaaagcccaacgacagccactggcaatagctcatgtccttctactgagaccgaggaagaaaaggcaaaacggcttctttactgttcgctatgcaaggttgctgtca

SEQ ID NO: 505974 - DNA, 606 bp, Homo sapiens
ctgctgcctgcagactcctggactctacacccgtcgtgctcacacagttgccttggtgccagtgttatcaaagaggccaacacgagcagaggctcacgttgagctaaagaaaaattaaacatttaagagaattcagttataaagctggaatggccgttcctgcttgacagatgtaaacactgcagctttgtcattacttagctagttgtctcagcacatgtcctttcctttctagctagattatactttaatccagttgttttcatgttcactaaatccaaaccatgtttaaccrgtttattcattggagagtctctgaggtgaagaaagttttgtcctttcaacttcactggggatttgctgtcttctttctgcaaagggattttcctgaatctgtaatctgaacactttgacctgtgagggtttttcccccaactaggagcaaatctgtgaggcttgaccctttgtgtgctgtggagcagagacaatgcccttctgtgaatgtcttctcctcttgaggacagtagtaattggcgacaggaatgttaatcatttggcaagcgcttcttcatggccttgctgccctttgccactgcagccagctcc

SEQ ID NO: 505975 - DNA, 631 bp, Homo sapiens
ctgcctgcagactcctggactctacacccgtcgtgctcacacagttgccttggtgccagtgttatcaaagaggccaacacgagcagaggctcacgttgagctaaagaaaaattaaacatttaagagaattcagttataaagctggaatggccgttcctgcttgacagatgtaaacactgcagctttgtcattacttagctagttgtctcagcacatgtcctttcctttctagctagattatactttaatccagttgttttcatgttcactaaatccaaaccatgtttaaccggtttattcattggagagtctctgaggtgaagaaagttttgtcctttcaactycactggggatttgctgtcttctttctgcaaagggattttcctgaatctgtaatctgaacactttgacctgtgagggtttttcccccaactaggagcaaatctgtgaggcttgaccctttgtgtgctgtggagcagagacaatgcccttctgtgaatgtcttctcctcttgaggacagtagtaattggcgacaggaatgttaatcatttggcaagcgcttcttcatggccttgctgccctttgccactgcagccagctccctgcttgcctctactccctcgagaatgg

SEQ ID NO: 505976 - DNA, 452 bp, Homo sapiens
tagaaaatatctaaaccatgatcctggctagaacagattgcagtcaattttgtttggcatcatcttcagtgttggcactggtttgctgaccgaccctgaaccaccatgaacctgctgcccactagtttatcagcaccaactttctttcctttatgtgggtattcaaaggagtttacataaaaggtttygagtgagaaaataaacttcaaaagttgaaaaaccttgtgcctggccttaatattatcagtgggatgacaacacaaagttacaatttctatgtaaaactgggcctctaggaggaaagaatggtatctaatatttcattcaccacccaacaatagggttatgcattaagatcttattatttgatgaatgtgcagtgttatatttaatgactatttcctcagtcgtttactactggcttcctaaatgaatgctttttccatagcctc

SEQ ID NO: 505977 - DNA, 552 bp, Homo sapiens
atgctaatatattctaacaatttaaatttatgctcacttaagaaaccttattgatgtttggraataacatagacacttgtcatgtggaaacctcattgcttttatcataattctttttaaagagggccaaagcaggaggaggtaaattgttttcctctttattttttttagtgaaaattatagagatgaacaaaaattaaagtttctagtaaactttaaagtataatgcctgagatttggtttaataggtgagagagcaagactgcgtaagtgttggcgggacctctcatatcataggacggtcttatttacataatacgaataacagctaacatttgggtacttactatgtgcaagacaccacttgaattcataatcacacttgatcttctcaatgatatcgtgagataggaacaattgtatttttattcagcatcgtacagttggggtaattgaggcactagttaaataagtcatctgaagtgaccttgctcctcccattgcagatttgaattcaggtggttaagattcaagagggagtgcccttaaccc

SEQ ID NO: 505978 - DNA, 552 bp, Homo sapiens
atgctaatatattctaacaatttaaatttatgctcacttaagaaaccttattgatgtttggaaataacatagacacttgtcatgtggaaacctcattgcttttatcataattctttttaaagagggccaaagcaggaggaggtaaattgttttcctctttattttttttagtgaaaattatagagatgaacaaaaattaaagtttctagtaaactttaaagtataatgcctgagatttggtttaataggtgagagagcaagactgcgtaagtgttggcgggacctctcayatcataggacggtcttatttacataatacgaataacagctaacatttgggtacttactatgtgcaagacaccacttgaattcataatcacacttgatcttctcaatgatatcgtgagataggaacaattgtatttttattcagcatcgtacagttggggtaattgaggcactagttaaataagtcatctgaagtgaccttgctcctcccattgcagatttgaattcaggtggttaagattcaagagggagtgcccttaaccc

SEQ ID NO: 505979 - DNA, 465 bp, Homo sapiens
ggcaactgtgggaatacatctgtgcaccacggtgctcctctgcagttactcaagtccatgggtgctccctttatctttatcaagaactggaaggaactccctgctgttttagaaaaagagaaaactataattttacaagaaaaaattgaaagaagaaaaatgttacttcagtggtatcagcacttcaagacagagcttaaaatgaaatttactaatattttagaaagctcatttttaatgaataataaaagttaattatctttttgagctaasatgtgatttttaaaatcattttgactactgggtgtataaatgtgtttgtgtgtgtatgtatttatagatgttctttaaggtacccttgaaaactctacattatgtatgccacataatgacatttcagtcagtggtagactacatatatgatagtggtcccataagattataatggagctgaaaaatttctat

SEQ ID NO: 505980 - DNA, 628 bp, Homo sapiens
tgaattccctccaaacccatgtgagtaaacttctgcatcattttctctgcttagcactctattttctcaccaaactgatgccctgtcaggagttccagttcatttggctagagtgagaacatctgtttaaattatctgttgttgcctaacaaatgtcaaagaaaaaaattattcgtgacactcggtaaagcacagtaaggcagacatttttcagaacatcttggtaggtgaagggatggcacagtggggtcctgcagtaggggagagacattgtgctcaacctcaaacaacaaaaaagtggacatttctatctagaaaaagcagggtgggctcagtgggtggaaaattactaactggaaacatcaggggtaagggaagattctggctgaactgacctaacaggattcttgctaaaggcaggcagtgctgatcagacatcacctgggtgctggtggagggggaggaaaatgatcaggtatcgaaggtgatcagatactgaggatggggaattctggctaaatggacttggcaggattcttgttaaaattgcattctataaggaaggacaccggagtccaagaagagactgatstaactttgattctttgtcacaaagtatcgaaaaaca

SEQ ID NO: 505981 - DNA, 629 bp, Homo sapiens
ctgcgacattcaagacggcttcactcacatggcacctaggctaagtgtgactggaatggctgaggactggctggatctctttctctctgtctcctggaaatccattatttaacagcacgactcttgcttccatgctggctggatcctaacacaatgaaaatggaagctgccaggtctctaaaaggacagacccaaactggcactgagtattgcggctacattttcttggccaaaacaagtcacaagtgagcccagattcaaagggaagaaagataggttctacctcttgatgggagaggcaacatgcatgttggtggccgtctttacagacaattttctacaatgtgtcctctggccacaacaattcacgtctctccgataggcaaaagatacccaacctcctttccttctctctacctgctaaagcctcatctagttacccattagacttaaactccagtctgcatccagtcctgatagctctctgtagagaataagagactttgtaaagagagagaccatgcagastggaaacaatggatccaggttgacagccagcaccaaagccccagatggatgagcaagaccatcttggaccctccagccctagttgagggtctcagacagca

SEQ ID NO: 505982 - DNA, 565 bp, Homo sapiens
ctgatttcttgctgcatcctcaagcattgaaggggtgaaggagctctctggggccacctttcatgagggcactaatcccatcatttgggccccatcctcatgatatgatctaaacctaatcacctcccaaaagccccacctccaaataccatcacattggggattaggtttcaacatataaaatctgggggaacataaacattgagtctattgcacacgagtttattagttcccagtataacatcccaaggttgctgaggcctattatataaggatcaaagttctcgttcttgtggtgaatgatccgaatttgaatctccrctgtttgagctgctgtttcttgggaggaaggcagatgtttcatgatctcccagtacaggtcagaaaaagaatggcgtaaaatcatctttgccattgaaagctgccagtcttcacatttcctgggggaggcttttagtcatcagctatgaagcctgactcggtcatcttctcccccaacacacacctcgatctgagaggcaggttatgctccaggaataattccctccatccttcctgggcttct

SEQ ID NO: 505983 - DNA, 478 bp, Homo sapiens
gaaagttcttaagacctcatctgaaacataagctcttcctagttttctagcagactgccttcagattccatttgcagcacttttcaacygactgtctatggactcaaaccaccactttttcctgagtctccaaactgccaacctttctcagtggattttaaacttgcaaagccttcacagtcatgtgggccaattcattcatataaataaataaacaaatatcttctgttatttatatttctgtgaagaactttgactaacatacttgttctttggaaaaaaatcaataaaactaataaacatacagtaagattcaatttcatagagagggcacaaataactaatatcaggaatggaagaaagcatatcactacagaccatgcagacattaaaaaaggaagagaatattattaaaaactccttgaacataaattgaacaacttagatgaaataatacatttcttaaagtcacacatta

SEQ ID NO: 505984 - DNA, 506 bp, Homo sapiens
atttagtgcacaagatattaataaatattttcattatgtcatgcctatcttgaaacaaacatattccacccccattctattcttctgccttttttattatagattttcattcatttaggagtcaaatatttctcaagaaatatcatgtatttaatatttaattgcattctcttctgagtatgcaaaaattttgcatggtatataacattttttgaatgagcatcttgattactagtatcagtgggtcacttctacgtacatgggaacactaattcctgactcacatattgtaagtgaaagaraagaaagccttcagctattccaaattattatacagtgtgagtcatgacattcttccattaataattaattttatatgataattgctattctttttaaaaagtgaattttcttgaaaagaatatcacattgaatttttaacaattgtgcttatacttttcagcttgttacccaaaattcataagcagcctgagataaataaatgt

SEQ ID NO: 505985 - DNA, 481 bp, Homo sapiens
atcagacttctgaccacagaattcattgaagaaaaaaacaaaacaaaaaaacttttcaaatattttattttcagatttcagccagaacaaacagcaactgcttgaactacttgtggcttttttttttctgcttttaaactgaggccccaaccaagtgactcagaaccaaaatcagtcagtcttttatgacttaaccaaggatgaaagagatgtcctgaaaagagggtgcaaaaagatgtagtcctcccaagatccagaatcatccgcaaaagacagtcaaaagaaaaaaagacctttgttgccacagaactaagcaatgaaggctgagaccaaaaaaaaaaaamcaaaaaaaaaaaaagaaaaacaaaaaaaaaacaggcctctcatgaattggaacctctaataagacaaattcccctgagagctgacactacatgacaaaaaaaaaaaaacatttggactggctgcctgatgtaagctg

SEQ ID NO: 505986 - DNA, 623 bp, Homo sapiens
tgaccttcccataagtaagagggaactcctcctgcctgaccgacttgagctaggacatcggtctttctctgcctacagattcaaagtgaaacatcggttcttcttgggtttcgaatgtgctggctttcagactagaacttataccatgggctctcctggttctcaagccttcaaattcagactggaactccaccattgtttctcttgggtcccctgctttctgactgcagattttgggacttctgagcctctgaaatcatatgagccaattccttgttatctataataaatcaatctctctttctacatacatayaaacacacaccctattggttccatttctctggagaaccctgaacaatacaaacataatttctaatttaatctcctctttgacccaagaaaataatatgtcccagggaaaaaatgtatacacatttgcaaagaggtgtatagaaggacattcactatcaatggaaaaaatgtgaagcaacgtcaatgtacaacaataaaactttgggtcagtaagtcatggtatattcttatgcagttggccttccatatccttgagttatgcattcatggattcaaccaaccttggatcaaaagcagtaaaaaataaa

SEQ ID NO: 505987 - DNA, 641 bp, Homo sapiens
ttggctgggggttgtctggtctaagacagccttggctggcagacttgcctctgctccawgcagtctctagtcatttaacaggtgagcccaagcctgagcacatggtagctgggcagtatcccaagagaacaagcagcagtgtgtaagaccatttgagatctaggctctgaattaacacaacatcctttccatcacattctattgtccaaagcaagtctcaattctagctcagatttaagtagaagatacagacttcacttcttgaagagaggaactgcaaaccacattgcaattacctctgtgattttcttcctgaaacccatggtctctctttaaccatgagaaagcaccagagaaacccaatttgagacatattctacaaggtacctgccagtgctcttcaaaagtgtcaaggtcatgaaagacaaagaaagcctgaggaactgttacagattgaaggggaaaaccaagcagacatgacaactaatgcagcataaggttatgaattgaatcctgaaacagaaggacactggtagaaagactggctaaatctaaaccaagtctatagttttattaaaaaataaagtgccctggtttggataaattataaggttactttactcctgtctaaccgaaaggaa

SEQ ID NO: 505988 - DNA, 641 bp, Homo sapiens
ttggctgggggttgtctggtctaagacagccttggctggcagacttgcctctgctccaagcagtctctagtcatttaacaggtgagcccaagcctgarcacatggtagctgggcagtatcccaagagaacaagcagcagtgtgtaagaccatttgagatctaggctctgaattaacacaacatcctttccatcacattctattgtccaaagcaagtctcaattctagctcagatttaagtagaagatacagacttcacttcttgaagagaggaactgcaaaccacattgcaattacctctgtgattttcttcctgaaacccatggtctctctttaaccatgagaaagcaccagagaaacccaatttgagacatattctacaaggtacctgccagtgctcttcaaaagtgtcaaggtcatgaaagacaaagaaagcctgaggaactgttacagattgaaggggaaaaccaagcagacatgacaactaatgcagcataaggttatgaattgaatcctgaaacagaaggacactggtagaaagactggctaaatctaaaccaagtctatagttttattaaaaaataaagtgccctggtttggataaattataaggttactttactcctgtctaaccgaaaggaa

SEQ ID NO: 505989 - DNA, 641 bp, Homo sapiens
ttggctgggggttgtctggtctaagacagccttggctggcagacttgcctctgctccaagcagtctctagtcatttaacaggtgagcccaagcctgagcacatggtagctgggcagtatcccaagagaacaagcagcagtgtgtaagaccatttgagatctaggctctgaattaacacaacatcctttccatcacattctattgtccaaagcaagtctcaattctagctcagatttaagtagaagatacagacttcacttcttgaagagaggaactgcaaaccacattgcaattacctctgtgattttcttcctgaaacccatggtctctctttaaccatgagaaagcaccagagaaacccaatttgagacatattctacaaggtacctgccagtgctcttcaaaagtgtcaaggtcatgaaagacaaagaaagcctgaggaactgttacagattgaaggggaaaaccaagcagacatgacaactaatgcagcataaggttatgaattgaatcctgaaacagaaggacactggtagaaagactggctaaatctaaaccaagtctatagttttattaaaaaataaagtgccctggtttgkataaattataaggttactttactcctgtctaaccgaaaggaa

SEQ ID NO: 505990 - DNA, 604 bp, Homo sapiens
tttttcttcaatgttcagtagtttcactatgatgggtctaggcatgaatttctttttaattgtcttgcttgagatccattggtcttcttagagaagtaaaaggaagatgatatccagccaacatacccctaaaccataagctctgagtcagggccatatccaaccaaagaaaattattatttcttgcacataaatgtttaatgagctgacccaactatgagctcttgggctgcatctgctcagtgtcttcttctaattcatcttcttagaaggaggatctttttgtaaacacactaagacatcgtaatgttccaaactgctagaggtgagtattcatcaataygtatagggcacacagcagtggtttagtggtttagatgtcactttaccattctctttgccacaaagaatttgtatgcaaaactgggtctctttagaaagaaataaatatgcatttttgactttcagttaaatttggcaaaattaagccttttctatcccactctctcttctgaagccaaaaaaaaaaaatagtaagtaaaatagctctgcctttggtgaaactaggaaacaataaatatcaaaattctcaatctaaaaagat

SEQ ID NO: 505991 - DNA, 624 bp, Homo sapiens
aattgctagacatttaagtgaattatcttgacataccagcagagttgagtccccaaatgactgtagccacagctaacatcacatggaacagaactgcccaggtgagttcagaccacttacaatattataagrtataataaaactgtgttatttaaagttgctaaatttggggattgtttgcttttttatgaaaaaaagataactgaaacaataggctacagtcttctagcacataaagacagcttaattttctaataatatatgacttactgctcttgaattgatatctgagtttaagcattgctctacagaaatgataatattaatctctattaacataaatgcaatagctgtcttattaaaatgatatgtgagagaaaaattgtttccattcttggtgctaaatggtcataggttttgtttatgttgtcccatgtgtgcacactatacattggcttgtagtataaactgctctttgtcctccagtatttgttctcctcttctttcatggtgatagagccatgatttttggctggacatatagctgtgcaggatggagacaatttctcaacctgccaagctgctgtaatttctgatcaaggagataccaacgaaaatcaccca

SEQ ID NO: 505992 - DNA, 535 bp, Homo sapiens
cactgatttctactaatagcagttcacccatgtggcaatttcttgattcagcgtttacatataaataaaccctgagactcttacggcagtaatgacttttttttttctgcgttaatttcttttgaggctattaaaaaaaaaactgcttttgccattgccatctttcctcctcaactaattccaytgaaactttaatatacatatttgttcatttttgttcacttcattgcccaggctggagtgcagtgccatgatcacagctcactgcagcctcgacctcctgggctcaagtgatcctcccatctcagcctcccaagtagctgggaccacaggctcgtgtcactatgcctgactggtactttttgtagagacagggtttcgccatgttgcctgggctggtcttgaactccaggcttaagcaatttgcttgccttggcctcccaaaatgctgggattacaggtgtgagccactgtaccggccaatataaatttttgaacagacaaaatggaagctactttctaattagctgaatag

SEQ ID NO: 505993 - DNA, 537 bp, Homo sapiens
gccctgggcaggtgacagcctgttcatgccttggtttttctctctgctacttaaaggaaatagtcctccataaggtttttctcaggattaaatgggtcagtttacattagatacttataacagcacttggcatgtgacatgcagtttacagatgttaattgttgtmattcttatactcaactccctactcttcagacacacaaaagtctcagaaatgcctttcgctcatcctctctcatcacttgcatgtgttctccctctggtgggagtggagttccagcttgggcagatccaccctaaatgtcatccactggcttcctgaggccttttgccttctcccagaggagctgataactcttctctgaggtctcacagtggggactccctactttcattttagccctttcctcactcaatgccattctttcccaaaggactatgagcaacacaagggcatggtctggttagaattccttctgaaccctggagccttgccctggacctagcccatagctaaaacccattgaaattgggcgt

SEQ ID NO: 505994 - DNA, 537 bp, Homo sapiens
gccctgggcaggtgacagcctgttcatgccttggtttttctctctgctacttaaaggaaatagtcctccataaggtttttctcaggattaaatgggtcagtttacattagatacttataacagcacttggcatgtgacatgcagtttacagatgttaattgttgtaattcttatactcaactccctactctycagacacacaaaagtctcagaaatgcctttcgctcatcctctctcatcacttgcatgtgttctccctctggtgggagtggagttccagcttgggcagatccaccctaaatgtcatccactggcttcctgaggccttttgccttctcccagaggagctgataactcttctctgaggtctcacagtggggactccctactttcattttagccctttcctcactcaatgccattctttcccaaaggactatgagcaacacaagggcatggtctggttagaattccttctgaaccctggagccttgccctggacctagcccatagctaaaacccattgaaattgggcgt

SEQ ID NO: 505995 - DNA, 434 bp, Homo sapiens
aggtcttgatgggtactgtttcttggtttctatttttcacgaagacaatacatggttcatagacttgacgcgtagatgctagatttaggatcaagtgtctaaatcagggtagtgttggcaacaggcaatttcagctgccactgcaagacagacctgagactgagtactaattccaccatgggctgcaagtccttaaacttctcaatgtctccatttttctttttgttacaaggagttaacagcactctcatgcatttggagtctacagagtaaagccaagggtctagaaagaaacaaagatgcctagaamcagaggtttgtctggaaaatgaagatgtgaatgaatcttttattcagcataattttggcatcccacatttcttctgtaggcctcttatatcagtttctttcatagtacaaccagaaactaacaa

SEQ ID NO: 505996 - DNA, 624 bp, Homo sapiens
ctgcagtatatgcagtataactagtcataccaagatcattataaggatatttagtgcccagttctattcacaactgtatgaatataawcatcttcaaatgagaaagttaaaaggaaggcaactgacatctagtacttatttttcttttttccatttaatcctcacagcaatctaacaagttagattttatcttccccatggtaaagctgaggttaatgttgcagttaaaaaggaagatagctgagattagaacccctattttttcagttccaaagacataccttttcttttatactatgctgcctcctagagaaagtttgaaaatgatagtattagaaagggaggtttctcaatgctattcaatttgcaattgaattcccgccacactcttagcttgaggaatgagacaataaaagaaatggtccctgaccttctacagcttgtaatctgacaacaggaagggttgttaaatacaagaacaaacctataaagtaaactgtaagatagctttttttggcactggatttcagaaggtttaaatgcaatttagatgaagacaggtgaatgaagtaatcccccagtgttcttcctcacccagtggagggggtactaagaaaggcatgg

SEQ ID NO: 505997 - DNA, 542 bp, Homo sapiens
ctgccatttggtaagcactgacaatgagctagacattatcttgtcctctttacatattttagttcattgtatcctcataaccctatgaaatagatcctattatgattcagttttatagataaaaaactgaagcagtctgggcatggttgcacatgcctgtaatctcagcactttgggaggctgaggcaggtaaatggcttgagctcgagaccagcctgggcaacatggcaaaatcccgtctctacaaaagatacaaaaattagctggacatgatggcacatgcctgtagtaccagttactcaggaggctgaggtgggaggatggcttgagcctgggagattgaggctgcagtgagctgtgattgcaccactgccctccagaacmtcagtgacagagccagactctgtctcaaaaaaatcaaaatgaaacaaaaaatctgaaacagagaggtgaagaaacttgcccaaggccacacagtgggtaaaaacccacctctgtctgatttcataggcctaatttaaaattatgtgcatgtgctagta

SEQ ID NO: 505998 - DNA, 588 bp, Homo sapiens
ggtaaaatcagagaactccactgactatcatagaatcagaagagctgaggcagatgccctgtgggaacaggatactaacatagaatcaaaaaatcaaacctctagagataggtactaagagtaatggtagtgattcaaaccagagagtaagatctgagccaygaaagcagggattaggagagtaccatttgtaaatacaaggcactctagtgtgttcttttacatagttatcacaacaaaccttccaggatactccagttttacagagaatgggatggaggctcagagaggcttaataatttgcctaaggtcatactgcttatcagtgtccatatcaaaatttgaaacaagatctgtatgaatccaaattaagtgttgaacccactatacaacaatgcctcctagttgatgcttaggctgcctgtagctcatctgataggaatgaataagagctatggtccccattcctggattagaaataaaggaaagaagaaagggagggaggaagggatggaggaagggaaagagggaagaagggactgagagggagaaaaagaaagaatgaaaaagacagaaagaaaggaagaa

SEQ ID NO: 505999 - DNA, 616 bp, Homo sapiens
cactctctgctcccaaagacaacagcgaacacacttctgtgcctttctaaactaaacctaccaaaactagacctgggacccaaaatatttatgttcccagtctggtttttttttcctggtgagtaaacttgtaaggcaaataaaactgtgatttcagttcttcctgttggtcttctcactccattcctaaagggcttttctcccttgatactttttcttcttagggaaaagtccaatgaaatcatctaataaacaaattcagtgttagaaatctaacccacatatatctaagagtatagctgaagtgaaatttttactgtatatttctcattttatagaagcaaatcaggaaaaaataaactgtttttaaaataaccctcttgaaaactgtaccaaacttaatggtttagtgtctccttttaatacagcaataccaccatctgctggaacttttgaataatgcatttaaaagaattgtaaaatctgatagtcccttctaccagctatgcaaagtattccccctccctatagaaggtatgttttattttattattattattwtttttttttttggaggaagggtctcactctctcacccaggctggagtgcagtggc

SEQ ID NO: 506000 - DNA, 582 bp, Homo sapiens
tctaggtattggtatttctttctttcttttttttttaatttyactttaagttctgggatacatgtgcagaacaagcaggtttgttacatagatatatatgtgccatggtagtttgctgcacctatcaaaccatcatctagattttaagccccgcatgcattaggtatttgtcctaatgctctccctccccttgccctccaccccacaacaggccctggtgtgtgatgttcccctctctgtgtccatatattctcattgttcaactcccacttatgagtgagaatatgcagtgttgggctttctgttcctgtgttagtttgctgagaatgatggcttccagcttcatccatgtccctgcaaaggacatgaactcattcgtttttatggctgcatagtattccataaaacataggctcttactatggaataagcttaaagataaactgaatatttgaagaaagaactagctagtaagtctaggttatgcctagactttcattgtcaagcttcatctttattgaagtgagatgattttcctttttaaagaccataaataagccaagggtggtggctcatgccgct

SEQ ID NO: 506001 - DNA, 562 bp, Homo sapiens
aataaaagttactgcagttagggttaggagagatctaggaggaggkatcgatgtagaaggacatggtaactgaatggaagtggagggtgaagaagaggtaataatgaaagatggtgcagcagatagtgttgttcctcatgtccctccccagttacaggttgagcctcccaaatccggaaaccccaaatccgaaatgctcagaattcgaagctttttgagcaccagcatcatgctcaaaggaaatgctctcagatttttgaatttgggatgctcatccagtaagtatcatgaaaattatctatctatctagatataaaaaaatctaaaatctgaaatactcttctgatcccaaacactttggataagggatactcaacctgtatcacttttccttcacggcttcaatgccttacttcccaccaccagtacctgcatgtatttcctatgtgctttctctggccactgaaacctggttggcccacatgtatggtagaccagagattgggggaattaagtctcctgggagcagctttaactgatgactggctgcatacacatccca

SEQ ID NO: 506002 - DNA, 598 bp, Homo sapiens
tcccctgggcatacctgccttaaattaaatgcaagggtagattcaagtgtatcaagtgtgcttggtgcagcttttgaccatagctaatagacagacaaatagacatatgtagatayatatggatagagctagatctatcatttattgagcacataacatgagctgggtaacacaccaagtatttacctgtattaatttatctaattctcacagccaccctttgaggtaggcactagtattatccccattttgcagatgagagatctcagacctagagagattaaatacatttcccaaataacagttaactgagtaataaccaagtagttgacacagaattacagatggctttagggcatattgtgagttctggatactgcttatcttccatttattataaggaatgagggcagttgccaaatgttgtcaactttgaagcaaaagcttatactcttctttaattgaggagatcctgaaattacaagacaagttgttaaaaatctgttcccatttgccactatgtgaaaccgtacttgtattttttcaaactgagatcagcaaaataaatttagaaatatactagatgatcacattgcta

SEQ ID NO: 506003 - DNA, 563 bp, Homo sapiens
cttatgaaattgacgaaagctctactggcattctggcctctcaataatagttctatgtctgacctcacagcctttctgtcgtccctaagcatcaacaaatacactgagtttagctagtacatcttgcagaacatcagcccacctctgctaggctccctcaaatcctggctagcaactctagagacagatgatcccatcatattttgtctggtttcatttttttctgcaagctacttcttcatatcaacaagcagaaatcaactctaaaacctgttgatattattgcttctgatttcttatgaactgagaggtaaagyagaggtaagaagtttggattgttaaatagaactatgttaagtgttctattgtcaataaaataaattagattttaggaagcattatggttatttacagtatttttaccttatttttttcttgagtatattctcgataggtaaggttgacaggtaagaaagatatacaataggtcaaattgtaaaacctgtaaagaggaattattttaaaaatctaagctcatttatagtaaaatatatgatctccag

SEQ ID NO: 506004 - DNA, 340 bp, Homo sapiens
ttggtaaatattaaagctgctgcaatcttaaattaaggtgaaatattcacttattttacaaaatacatgtaagtaagataacaaatagtaattatggcktttaaatctgttgagctgagacatttgttaacaatagtactgggaacttggtaatattcttactacccaaattaattctcttaaacttaacctccatcttatttaactcagcatctctttctaaaagattcccatttaacagctctgtctttgctagtctaaacatgtgttttctttagcaatgactgtatttgtttaaagattatccgtcaatgcctggtaagctgagtgagtagatggg

SEQ ID NO: 506005 - DNA, 396 bp, Homo sapiens
ttggtaaatattaaagctgctgcaatcttaaattaaggtgaaatattcacttattttacaaaatacatgtaagtaagataacaaatagtaattatggcgtttaaatctgttgagctgagacatttgttaacaatagtactgggaacttggtaatattcttactacccaaattaattctcttaaacttaacctccatcttatttaactcagcatctctttctaaaagattcccatttaacagctctgtctttgctagtctaaacatgtgttttctttagcaatgactgtatttrtttaaagattatccgtcaatgcctggtaagctgagtgagtagatgggcatgtgctcacatctcattattttacaatctggtggtctccttaacagattcttta

SEQ ID NO: 506006 - DNA, 396 bp, Homo sapiens
ttggtaaatattaaagctgctgcaatcttaaattaaggtgaaatattcacttattttacaaaatacatgtaagtaagataacaaatagtaattatggcgtttaaatctgttgagctgagacatttgttaacaatagtactgggaacttggtaatattcttactacccaaattaattctcttaaacttaacctccatcttatttaactcagcatctctttctaaaagattcccatttaacagctctgtctttgctagtctaaacatgtgttttctttagcaatgactgtatttgtttaaagaktatccgtcaatgcctggtaagctgagtgagtagatgggcatgtgctcacatctcattattttacaatctggtggtctccttaacagattcttta

SEQ ID NO: 506007 - DNA, 462 bp, Homo sapiens
gggcttgactgggcggccaggctgcctgagttctgctccttgcctcagcctttgagaagtctgcccttggcaaatcctccaactattttgtatatcagtctcctaatataaaaattaggataatgcagcaccttcctcagaaagttgtgagtattaaatgaaccaatatgtgtaaaaatgtttagaacaatgcctgatatgtggaaagtgctaagtagtaactagyattactaatgccaagcagggaaggggttagtgggtgggaaccctcctcattacttctaccaagtgttattgtacccatctagggtataagaactgtggaaacccaggtttacactgtagagttactctaattatagcatatcatggagttaattgtggaccccatttaacaacagctttgtcacagggcagttttgcaagagtgagactgaactctattgttttcatcctcattat

SEQ ID NO: 506008 - DNA, 492 bp, Homo sapiens
actattcctaacaaccaaagcttatttctaacattttgtatctcagttaaaacaaacctcagcatttctctctgtgattaaaaataagctacaccacaggattacaacgtcaatgtctttccctccccctgcatgtcaagtgttctcgcccttacaaataataaacccggtatctctctgtaataaataattccacacaggttttagaaaagcagcayatgacagagagggtactggaggaggagcaaacacacaacagaataaaccgaatccagaagtgaagctcattcagcctgcccagtacaagcctaactctttcctccctggatccttctaatatgatcatgcatttctataactacatttgcaaatgagtgactcaataactgctacctaactctgtaaagcattgggatgtacttgttcaagagcagctatacggaattaggccctgactgggaatcctgtcactcctcagtgctgtggactgca

SEQ ID NO: 506009 - DNA, 521 bp, Homo sapiens
cctgtgtccatggcaactgaaatgcatgaatactgattctgaaacataatctctctagaaagtcaggccctctattaaaactgtaggttgcatttgtatcttccaagacaggtattatcacaagcttgcataggtatctatttcaactaagcaatggtgatttcatacatcatcttgtttacaaagtagtttccacttggagcatagtgagctgttgatagagcttttgtggtgggaacccaggagcacatcaattgcagagacaaycaccaatagtgagggtacagcccatggcattttctttatgtgtcacgtggtattataatttctttgccccagtttaataaagatggcaatgcaatctgtgctttctgtagacttctggaggtgaagacagcatcgtatgtccatgtccctcagtgaaaggattccatgtgggaatggctcctatatgaggatggagatcctattcttcaatgttgttaacccaatcttatgaggaaattaagatttaaagtgat

SEQ ID NO: 506010 - DNA, 475 bp, Homo sapiens
ctgctgccgtcagatcatcataatcaactcttctttctcatgcttgccacctctataatcccatctgccttctgttggaactccttggggagatgttgacacattcttcttgatggtgagtttctccaggtcagggaatgtgtttgttactgcttgttgaataaagtgaaattaaatccactctttaactactttaacttgaaacagcgtcatctaactcagtaaaactgaacrcttggtttagggttaatccttcaattttgtcaatatagtctattttctctatgattcctagggcaatggagcctggtataatacagggtttttctggtagatttattcttatgtcattatcgtctccctaacaagatatttatttatgtgtcagggggcagacattcgaggaaaagtttggcctggatgccaggaggtttgaagcttgctttttaagtcagacagagacatattgctcgaa

SEQ ID NO: 506011 - DNA, 577 bp, Homo sapiens
tgtcacaccagtgtaatcataaagctggcaacatagtgagtgttcaataaatggtaagtagtaataacagtagtggcaattgaaacagccgtggtagttggaacagcagccattcaataactatttgtgaaatgaagagatcccatagtgaggagggggagggagcgacttttcttcttctgctttgggtacagtgccaacctcaagtaaaatttgagaatgggcaaaacctttctttggcatctctctactctttctctacatctttgtctaccttataatgccttgtttcctagcacctatgagctcagtgacatcgtattgttttcatccttccaggatcttatctctggcctgccattaccccaaaagggctccatgcttctcaatgacctttctattcccygccagtcaaaaactgctattccttcagggcagtcagtctcagttagctgttaaagggaaagtattttatacaagtttgtactaatgtgtgtgagcccctaaaagtccttaatgctccaagggatttacatttttcaaaaacaacagtaactgtccatttaatggaactacc

SEQ ID NO: 506012 - DNA, 623 bp, Homo sapiens
caaatgttctaacaccttttctaaccaatggattctgcacaatccacataacaggaactgtctcagttcacaaatgtgctgaaaaaaagtgaatagaatgagataatgcgatttccaaaagtactgtacttaatcccagggcagagtgtgtgcactggaagagtctggtttgctaagacataaggatattcagtgatttgcattttgaggtatggtccagatctttacaaaagcaagggaagcaaagcaaggggaatatatagtccttagcaaggcattcaaggtcatccataacctgtccctgatttaccttttaaagacctctccccattctgtttcatgaccagacttcaaccaaaccaatttttttttttatcatctccgtgcatttttatactcggcacrttttctaccctaggccttcggtagtgctcttcctgcatttgaaatatcttcagccccatctccacctgataaaattcagtctacatcagaaccatgtgtaaattctattccttccataaaaacattatgtgaggcctaggtagaaggaatgctccctttgctgagctctcaaaacactgaattattctatcattctgtgattacattggcctatagga

SEQ ID NO: 506013 - DNA, 650 bp, Homo sapiens
ctgttggcctggcttctttcttcccgggctttgctatcagcgcctctatcccgcagccgttcattgttcatgcatcaggcgcacagtcccagtgttcattctgccattaccaaaaccactgaaattgtaatcactgctctttaataattctgaatatcaaaggaagacaattctcacaggtcagtatttttgccaaaacttggtattgtgtctttttcattgtagccactctggtggaggtgtagtaaaattgcaatggggttttaacttgcgtttatccartgataaatgtagctgtgcagtttttcgtatgtttattggacacttggctatcccttttttacttttttaaaaatagcattattgaggtataattcacaataacatgaaattcacacatttaaagcacacaattctgatttttagaatattcacagatttgtgcaaccatcactaggatctaattttaatcatcctcaagagaaattctatacctagagcagtcactcctcagttctaggcaaccagtaatctcctattttcttctcagaacttcatcatcttagtttatacatttaggattaggatcattttgagttaatttttgtgtatggtacgaagtggggatccaacttcattatttgcacatg

SEQ ID NO: 506014 - DNA, 518 bp, Homo sapiens
aggcagaatgcttgaagagcaatctagtcttcagataattcagaattccatgacagatcctgaaaatgtgattgaggaagagaacattttcctaggtcaataagacaatggcagtgtattttttttatattattcttcaatattattggggggagtgcaggttggggaaagaaagtgaaggaaaggcgaacaaacacatgttgaaaattttgtgtccaccagttgagagcatggatgaatgcctcattacatgtgggtgaawccaggggcagaactggaaggggtgttgaagccattgaaggggtattgaagtcatttctcagataaggaaagtgaggccagagaggtgaaaaagctcacccactgtcacctgtcttgctaacagtcagttcccaaataggcgttctccctccttccttcccctgtaaccagtacctgcctgtatgtgcatgaggacaaatggtgtgacacttttattaggtcaacacaatatttttctagaggatttaattattttt

SEQ ID NO: 506015 - DNA, 518 bp, Homo sapiens
aggcagaatgcttgaagagcaatctagtcttcagataattcagaattccatgacagatcctgaaaatgtgattgaggaagagaacattttcctaggtcaataagacaatggcagtgtattttttttatattattcttcaatattattggggggagtgcaggttggggaaagaaagtgaaggaaaggcgaacaaacacatgttgaaaattttgtgtccaccagttgagagcatggatgaatgcctcattacatgtgggtgaatccaggggcagaactggaaggggtgttgaagccattgaaggggtattgaagtcatttctcagataaggaaagtgaggccagagaggtgaaaaagctcacccactgtcacctgtcttgctaacagtcagttcccaaataggckttctccctccttccttcccctgtaaccagtacctgcctgtatgtgcatgaggacaaatggtgtgacacttttattaggtcaacacaatatttttctagaggatttaattattttt

SEQ ID NO: 506016 - DNA, 493 bp, Homo sapiens
atttttctgtctcagggtcccattattaatgaactcagtcgctttcrcaaacacaactgcacaagtgtttccaaccacatctataaaactatttaatgcacttttcagaacaaggcgtcttacagccatagtaattgcagttttactagacctttaaatgagaagcaaccacttatgaagttttgatatggcgagctgattagacaagttaaacacaaaggcaccatttatgggggctgtgtacccacgtgggcaccccgcgcacaggcagtgcggcgtcctgctaggtgcacagctttataccacttacaggttgcaagtagcaacgagaaaaatgctagattttacaggaaaataatattcataaatctcccgctgtgaattacagtataactcagagctgtctttgttttgctgctgcgatgaagtcaattctgtttcgggtggaaatgatacacacagagcccaaggtggaagccagtcccctcgcatt

SEQ ID NO: 506017 - DNA, 465 bp, Homo sapiens
tgccttggcctcccgaaatgctgggattgcaggagtgagttgccgtgcccagccacaaattttcttttaccttggaaaacatatatgcaaatatacttgtcaactatccgacaaaggtcttcrgtatgtatgtatggattcattgaacattgtttctttttacataatgaatattttatgatttttagctttggttttttgaaatgaaccaataaattgaagagacacaagaagtaatgtgtgtgtaaataccagcatgcttagcccctcaaataaacctcttacaggtgtctgactcctaaatccaatttgacattttttcagaacttgtctttatcaattatttacattctgctttattttctgatttgtttttttactttcacactcacttatcattgttttacacaatagttgtttactacagtaacaattacatctgacataaatgtactgaggaacaaa

SEQ ID NO: 506018 - DNA, 465 bp, Homo sapiens
tgccttggcctcccgaaatgctgggattgcaggagtgagttgccgtgcccagccacaaattttcttttaccttggaaaacatatatgcaaatatacttgtcaactatccgacaaaggtcttcggtatgtatgtatggattcattgaacattgtttctttttacataatgaatattttatgatttttagctttggttttttgaaatgaaccaataaattgaagagacacaagaagtaatgtgtgtgtaaataccagcaygcttagcccctcaaataaacctcttacaggtgtctgactcctaaatccaatttgacattttttcagaacttgtctttatcaattatttacattctgctttattttctgatttgtttttttactttcacactcacttatcattgttttacacaatagttgtttactacagtaacaattacatctgacataaatgtactgaggaacaaa

SEQ ID NO: 506019 - DNA, 548 bp, Homo sapiens
ttttgcactacaacagcaaaattgaattgttgtgatagatgccatatgtcccataaagctgaaaatatttactttgtggctatttacagaaaaagcttactgactctagataattggctgcttctcagagtaaggacattgtagaggagagcctcctgctgacccacaatggactcatatcatcagccagaaagaaatctttattgttttaagccactgaaattttgaggttggttgttatagtagcataatctagtctatcctggcaattagactgtttataggattaaaaaaaatcggtttgcttagagaggagaaaaccttgtgkagaggaacagtatgaagaaaaaatggatagaaatgttagggtaagattgggaaagtactagactgttgagctcagaaatttagattttatttagaatcttcaatatggattcaggacttggtatctttttcaagggacagaagaatagcatggccagaactttatgacagaaagattaatctaccaatggttatattaataggagcattgggagtagtaa

SEQ ID NO: 506020 - DNA, 623 bp, Homo sapiens
ctggcgcagtgcctcgtcgttgcgggcgctaaggacaagcacggagccgggcgacagcagcgaggccaggagcggggccagcgtccggccgaagccgcgggaggccccggtcagcaagcacacagcacgccccagcccgccctccatgctcctgttctccgccggcggcgctggcacccgagaccaggcaggaggcggtgcggccgcggggggcgggaccgctacgggtgtcggcggggccgccctgccggggcggggcgggaacctcaggcttcgggccgcgagcgcccaggggtgctggttcccttgggatctggttcccttggttgctggtggcggaagtcaaaccgtggcggkagcccagtccgtgccaagtgggacaacagagagggccggcaggcgcggcccacacggaaagccctagcccggttcccagcgctgccgtgttcttcgcccgcaagctcagcctccggctgggacgcatgctcgaatttcctcccagttccagccctaactttgcactactgacctcttccagggcaggccctgcactgggtgctgggcgtccctggtcgtggccagtgaacaccctgaatgaagcttatgcctgtttaggaattgaa

SEQ ID NO: 506021 - DNA, 539 bp, Homo sapiens
ctgttcccctcttcctgtgtccactcccctccaaccacatcagccacctttcaggccctcaaacacaccaagacctggacctcttcaggcttttgcaatttgtatttatgttgagagctgcatgacaagtcagaggtcataggtcttaggttaattatctccttagagacggtaacaaacagaatgtggaccacttgagcatggcaattgaagttgcagtattaaaagtcaaaattgaaaggatagggagagcctgaccattctagaatgcagcactgggcccaggcctcaggtcaagatgctgctccaatagaggagcagaggcatgggctatcttagttcccctggttcctctcactggtacagcactggcttagkggccagctcctgagttagatcatctaaggctacgatgaagactgcattcttttccttcatcccactcatcccagtttgtaattaaataataattgtttgtgtgtttgttttcgttctccctcaccagactgtaaatccaaggggaggcagggaccatgtct

SEQ ID NO: 506022 - DNA, 561 bp, Homo sapiens
tgaggcaaaacagtggttaagtgtctgggtccaggctatccgagtaggaatctgagtcccccactttattttctctgtgaccttgggcaagtcacttaacctatctgtgccctgtctgtaaaaggagagtaatagaacctacctaatacggttgttttgtagcttaaataagttgcatttgtaaatcactttatacaacgtcttggactttatgtaacaagtgctacctaaatttgttaaataagttgaggtaagtagggatttcttttgacatctccaaataaaatggagatgtrcgtgcaaaaaaaaatgataactggggggcggcagcagggtcagttttccccagcgatgaggaggctgcaccgtgggcgagggtcgtcctcgtaacagggaggcagggataaaggagcagcggctcccaggagaggggcgcgggttggggaaacttccatccaggcctaggatttccagggactcgtttctgagaagtggctgtgattctgaggcaagactttgatttcgagcactagaccatggagtgaaattctgtgttgtctg

SEQ ID NO: 506023 - DNA, 561 bp, Homo sapiens
tgaggcaaaacagtggttaagtgtctgggtccaggctatccgagtaggaatctgagtcccccactttattttctctgtgaccttgggcaagtcacttaacctatctgtgccctgtctgtaaaaggagagtaatagaacctacctaatacggttgttttgtagcttaaataagttgcatttgtaaatcactttatacaacgtcttggactttatgtaacaagtgctacctaaatttgttaaataagttgaggtaagtagggatttcttttgacatctccaaataaaatggagatgtgcgtgcaaaaaaaaatgataactggggggcggcagcagggtcagttttccccagcgatgaggaggctgcaccgtgggcragggtcgtcctcgtaacagggaggcagggataaaggagcagcggctcccaggagaggggcgcgggttggggaaacttccatccaggcctaggatttccagggactcgtttctgagaagtggctgtgattctgaggcaagactttgatttcgagcactagaccatggagtgaaattctgtgttgtctg

SEQ ID NO: 506024 - DNA, 565 bp, Homo sapiens
caagcaatcctcctacctcagcctcccaaagtactaggattccaggcatgagtcaccatgcctggcctacttaaagtcttttcttgatatttaaaattaatcaattttttgatacttaaaattaacagcttttatagtcatcattaattacctcataattttactctagcaataatacttcaaagtgtaacaaaatatcaacatataaaaagtatataataactgctgttttcacttcaagttacatctagcatgcttacttgkatttgcaatgaatattcagatgtcagctataattcttaatgacacacctcatttgtcttactggcctttttaaacacattatattgatggcaacatataattttgagggaggctgacactggcatcttctaatctgggggggcggtcactgcagagactactgtaagcagggacagaggctccatagattagaaacaggcagtgacaagaggagaatgtgccctgcaaacaagcaggtccatatgggagaaaacctgttgtaaacagggaaacatggaatgatcgtgggggctaagaacag

SEQ ID NO: 506025 - DNA, 565 bp, Homo sapiens
caagcaatcctcctacctcagcctcccaaagtactaggattccaggcatgagtcaccatgcctggcctacttaaagtcttttcttgatatttaaaattaatcaattttttgatacttaaaattaacagcttttatagtcatcattaattacctcataattttactctagcaataatacttcaaagtgtaacaaaatatcaacatataaaaagtatataataactgctgttttcacttcaagttacatctagcatgcttacttggatttgcaatgaatattcagatgtcagctataattcttaatgacacacctcatttgtcttactggcctttttaaacacattatattgatggcaacatataattttgagggaggctgacactggcatcttctaatctgggggggsggtcactgcagagactactgtaagcagggacagaggctccatagattagaaacaggcagtgacaagaggagaatgtgccctgcaaacaagcaggtccatatgggagaaaacctgttgtaaacagggaaacatggaatgatcgtgggggctaagaacag

SEQ ID NO: 506026 - DNA, 655 bp, Homo sapiens
gactgtagccacatgagtgagctcagcagagactatgagaagaaccactcagccatcccaaaaatactaatggctattgtttaagccactgaattttggggtgcttcattatgcagcattaattgtggcaatacacaattgatacactagttatasccacaacaaccaaatgagattgtagaagagctgtgggatgaaacctaaactgatccaagaaaggtataatgctatgtgaggatcctgcggggggaatctattttttatttttttctttgaggtttatgttctccctaggttacacagggctgtcttgattaatacaggctgcatctttagtctctactgctaactgttcattcacagcacatcagcatttatactttgcatattagaatatgctgtgacaaagcaaattttaggtatttatcataaggacaaataagcagtattatttctattagaaaaaaatcaaaaacaagttaaatgtccatcattaggaaactgattaaataaaggatcacatcctacaatggaatactatgcatcacttaaaagtgaggctgcttctatatttaattgcacagaaagatatttactaaataacactaaatgaaaaaaactaactgtaaaacagtatgatgagtatataggtatt

SEQ ID NO: 506027 - DNA, 655 bp, Homo sapiens
gactgtagccacatgagtgagctcagcagagactatgagaagaaccactcagccatcccaaaaatactaatggctattgtttaagccactgaattttggggtgcttcattatgcagcattaattgtggcaatacacaattgatacactagttatagccacaacaaccaaatgagattgtagaagagctgtgggatgaaacctaaactgatccaagaaaggtataatgctatgtgaggatcctgcggggggaatctattttttatttttttctttgaggtttatgttctccctaggttacacagggctgtcttgattaatacaggctgcatctttagtctctactgctaactgttcattcacagcacatcagcatttatactttgcatattagaatatgctgtgacaaagcaaattttaggtatttatcataaggacaaataagcagyattatttctattagaaaaaaatcaaaaacaagttaaatgtccatcattaggaaactgattaaataaaggatcacatcctacaatggaatactatgcatcacttaaaagtgaggctgcttctatatttaattgcacagaaagatatttactaaataacactaaatgaaaaaaactaactgtaaaacagtatgatgagtatataggtatt

SEQ ID NO: 506028 - DNA, 559 bp, Homo sapiens
tcgtgcaaatggattctaaggcaataaaatcattaataagataaaatagtttaagtaggcaaaacagatgccatatgtaacctataacctaaagtcggcatacccctygggctctcctattacaggacttctactagacgtaattctaagaagcgtgatacactcatttacaagccacaggagactgcaaaatcaattagaaagagggcgcagctacagcaagtagttgtaactaaaaatcagacagaaccctgcaaacaccataagcatcatttattactattgccattgttactgccaacatttataagctgttacctcttaggccaggttcttttttgtgtcttacatgcattagtagtacttcagataggggcaagcagaatttcacatttcacctatcccctgggcatcactgtattaccatacagcacactcagttttgctataacgcttgtgttttttcaagagaacaatttgagtgtaactcgaatttcatgtttctttatgcatgatttcactgcaagaatactaggttatcgcagaaggctgcacttgg

SEQ ID NO: 506029 - DNA, 388 bp, Homo sapiens
aattaaacaaattttcacagccctagaggagtgggctccagtgtgttccttcttgccttgtctgcctggtcattttgacatagaaatttcagctgtgttgaattggcttggtggatatttytggaatcaggcttgaaaaggagagaccttccctgtgacattagtaaaaacaaaaaagtctgagtcatgtggatcacctgaggtcaggagtttgaggccagcctggccaacatggtgaaacctgtctctactaaaactacaaaattagccaggtgtggtggtgcgcgcctgtaatcccagctgcttgggtggctgaggcaggagaatcgcttgaacccaggaggtggaggttacagtgagctgagattgtgccactgcactccagcct

SEQ ID NO: 506030 - DNA, 599 bp, Homo sapiens
taaatgacatgattatacctcatgacaaagttataaacatctgctgagtgcacatcaaatcagaaaattttagaggttagagcgctagagccataatttagctcaatctcttgattgtataggtgagtaaactgagttttctaaaggctaggccaaattgagaaacgtggtctcccagttcccatttagcatgatttccaccaaatgcccagatatggatgatgcaaatatccttgggaacagagtaagtgcgttagcccctcaaatgcagagcccgagttttcagcccctgctatcgtgcctgctccatagtggggtgcagagtgttctttctcattctttcttttttcattttttaaaatttctttgaaccacttttgatttccatatgaktcagattgcatttttatttttcttcacttcttgagtgcttttgattgatacaacttaattttaaatattcttctatttctcctttatgaatcacttattactatgaacagccctgacaaattctcaagttttatacgccttatatttttcaaggctggttttagatatcacaatctttaagaagcctgcttgaccacaagacattt

SEQ ID NO: 506031 - DNA, 540 bp, Homo sapiens
gaattgctctgaaagtaggtggagaatttggggtaaagaaataaagagaaagggactgcactcattarggaacattataaggaaattcagaaatcagaaacaggactagattaaaaattcaaattttaaacttccaagttctttcatataagtagttatttcaactctaaggcattctttgcctcagcatttcagaatctaaatgataaagtgtcgcttctttaacagtcatttgctgtacaaatatgagtcattatcatcagatttttaaagagtttctttactggcttctacatacaattttgaagcttcatgtagttgctagaaatggttttgtactagaatatgttgcatcagtaatttgttgcttttatctttggttactttctaaagtcagcatttatgcttttcattatcataacttacaaattattacagattagtttattttaacataaagctcttttccttttatttaaaaaaattctttagtactttttgacgtagtgggtggaaaatatctagagtatagaacttact

SEQ ID NO: 506032 - DNA, 617 bp, Homo sapiens
gtctttcctgatcacgcattgccctattttattgactgcgcttcagagcacttgactgcatctacacattctcaacacctcccactgctgtgtgttgtactaatttgggtaggtgtctcttgacagtctctgaattagaattcaagctcatagaastgaaacaatgtcattctttaaatacctcaattctaccttgcctatcataggatacggaataaatttatcaaccaaatgaatacgtgaatgaatgagtgttccagaatttagttgggttacctaaatcaatataaccaatgttacatttctaatatcttgtccttagcatttttcaaaagtttcaactcattctggattcccttctgtagtctgtcttttaagtatagtttgtatcatatttttattcatttttcccttctcttttggttatatgatttttcttcctacttttgtatgtatattttaaatctaaggtcatctgagagcttcctgtgcagctaaatgtgaatttccttggttgtccatgtcttttcttttcagctggaatcacttgtggttgtagagatccacctttagaactttccattcctctcagataatatgttctgttgaatctgtgc

SEQ ID NO: 506033 - DNA, 627 bp, Homo sapiens
tttaatgcttgatagatacagagaagatggatgagggaggaagaggagtctctttgggaatcactcctttgttacatgtgtttcttttctataaatcatgccctgggctgcatataatcaaacaaacaatcacaggaagtcagtgacttacagtctaggaaggaaatatattatatatatgaaaaccaactgctggccaggtgcagtggctcacacctgtaatcccagmactttgggaggctgagaccagtggagtgcttgagcccaggagtttgagaccatctttggcaacatagtgagaccctgtctctaccaaaaatacaaaaattagtcagtctcataagctggtctcaaaataagtaataaataaataaatggattttaaaaaaaccaattgcttacttttattgaccacttaaattctaagagctttgcatttattaactcatttgatccttaaaacggctctagaaagttgatactaggttaatactcatcttacaaatgaggaaactgagagagaaggaagtaaggtaacctgggcaggtctcactccatagttcacactgtttaaccattatgatggcatggttggtgtggtataaaataggagagaggttgttgcag

SEQ ID NO: 506034 - DNA, 480 bp, Homo sapiens
cttctgctgggctgaaatctccagatcaatgggtgtctctttggcctatttattctaaggcagaagatggggtcctggcagyagagacctcctttctaccatcctcacggccacactgctttgcacgcactacttactgtttgtcactgagagatgaaaagcaccaaccccagtgcccccatcaattcctatcccccaggcccaggagagtaaggaagtttgaaatggaaggctgctcaattatgcatctgggcccctttcccagggtggggacctgtctctctcctggggatctggtctatacccagcagaagaacatctttggtaagacagaaaaagtgacattcagttatacttgtggttcccaaccctgattgtactttagaatcacctggagattgcaggtgatgccgggaccccactccagaccaattaaatcagtgtctgtggggtggagcccaggcatctttatcctaaaaa

SEQ ID NO: 506035 - DNA, 487 bp, Homo sapiens
aacggtgagcagcagcaagtggtgattaaggaagagatttgctccccagaaagggaactctccaggagctgcttcctggtgggagatcttttcagtgaattcatttaggcagttcttgccttcctgcagaggtagaagtccctgggtgttgctttttactgtttctctctctctctctctctgaagaccagagaagaagaatatatccaatgacaggagagcacatactcataggtgggtgtctgttgaataattmattcattcatccatccatccatccatccaaccatccatccatccatccatccatccatccatccatccatccatccatctatccgttccctcaataatatatatcgtgcaccctttctgttgggttctgaggacacagcagcgaggaagatattcatttgtctctccattctttcctccacaccaggatgtagtctgggtccagaatataagtcaaaacacgtgcagctgc

SEQ ID NO: 506036 - DNA, 614 bp, Homo sapiens
tgagaaaatacatttctgttgtttaagccacctaagtttcttgtatctatgacagtctgaggtgactaatatgtagtgcagaggtctatatttcttttgttaaatttatttctaaagatttttgtgtatatttttggggatactattgtaagtggattattgaaaaacttacttaccatttaccactagtatggatgaaaatccaattgactgtatgttgattttgtatgttgattttgttatttcactaaaatcacttagtagttcttgttctggtagtagttcttgttctgatcccaacttagcaacttaaaacaaaagaatgttttgtcataatcctgcaatttaggcagagctctctgggtgtggggcagcttgtctctgctccactcagtgttagctggggcacctcaaggactagcaactggaataattggaaggctcactcattaatttctggtgattgatgctgattgtaggctggktacataactaggcatgtggttggaacaccaagacatggccattcaaatggctgcttgaattcttcattttgtagtggcttggtcctaagggtaaaactgagagagagagagagagagagagagagagag

SEQ ID NO: 506037 - DNA, 612 bp, Homo sapiens
ctcagttgcagcgatgcggtcctatagaaaacatttggcaatatctggagacattcttggttgtcataactgggaggggtgctactggcatctagtggatagaggccaggaatgctgtgaaacttccaataatgcagagkatagacaacaaactattattcagcccaagatgttaatattgctgaaaatattgactgtcaatattaatacaatttctcaatcttgagaaactaagattgagataccctgatctatagtgaaacccactatttagcaaattagtgcttctctcttgattatgaataaaccaccaagggcattagacacttaagaagttttcaacattgaagatatttaaaccaacaaaaatagcacaaaaaccaaaataaaatttcaacacagatgctgttaatatgctaagggagaataacgttaagacattgtgtttaataagaatatgttctattgaaaagaggatattagaacatttcagaaaatgacaaagaatttttaaaactgcacataaaagattggaaagatggaggactgaggtaaggagttaaggcagattatttataaagctgtaaagacatctcaacagaaaacctaaac

SEQ ID NO: 506038 - DNA, 612 bp, Homo sapiens
ctcagttgcagcgatgcggtcctatagaaaacatttggcaatatctggagacattcttggttgtcataactgggaggggtgctactggcatctagtggatagaggccaggaatgctgtgaaacttccaataatgcagagtatagacaacaaactattattcagcccaagatgttaatattgctgaaaatattgactgtcaatattaatacaatttctcaatcttgagaaactaagattgagawaccctgatctatagtgaaacccactatttagcaaattagtgcttctctcttgattatgaataaaccaccaagggcattagacacttaagaagttttcaacattgaagatatttaaaccaacaaaaatagcacaaaaaccaaaataaaatttcaacacagatgctgttaatatgctaagggagaataacgttaagacattgtgtttaataagaatatgttctattgaaaagaggatattagaacatttcagaaaatgacaaagaatttttaaaactgcacataaaagattggaaagatggaggactgaggtaaggagttaaggcagattatttataaagctgtaaagacatctcaacagaaaacctaaac

SEQ ID NO: 506039 - DNA, 612 bp, Homo sapiens
ctcagttgcagcgatgcggtcctatagaaaacatttggcaatatctggagacattcttggttgtcataactgggaggggtgctactggcatctagtggatagaggccaggaatgctgtgaaacttccaataatgcagagtatagacaacaaactattattcagcccaagatgttaatattgctgaaaatattgactgtcaatattaatacaatttctcaatcttgagaaactaagattgagataccctgatctatagtgaaacccactatttagcaaattagtgcttctctcttgattatgaataaaccaccaagggcattrgacacttaagaagttttcaacattgaagatatttaaaccaacaaaaatagcacaaaaaccaaaataaaatttcaacacagatgctgttaatatgctaagggagaataacgttaagacattgtgtttaataagaatatgttctattgaaaagaggatattagaacatttcagaaaatgacaaagaatttttaaaactgcacataaaagattggaaagatggaggactgaggtaaggagttaaggcagattatttataaagctgtaaagacatctcaacagaaaacctaaac

SEQ ID NO: 506040 - DNA, 637 bp, Homo sapiens
tgtgttcattccacaggcatttcctatgcctgccttctgccaggcctgggscgggctgtggacacagacatgcagctgacacattcccccggggtgggggttcccagggctactcaggctgttggggagagatctgttaaccaattcttcatgctcagtggtttggagctctggcgtcttcctggagtagccaccccaaaccctgcagaagctctcatcctttcttcccgcttgcctccttccagccaagtttggggccaatgccatcctgggcgtgtccttggccgtgtgtaaggcgggagcagctgagaagggggtccccctgtaccgccacatcgcagatctcgctgggaaccctgacctcatactcccagtgccagtgagtgcagctacccgcccttcccagatctcgcctggacagagccaaccccgcccagccagggttggcccccctggaaaatccacctttcagaccagctcctaagaagcagtttcctgaaattgaatctctcctgctgtggtcccacccctccctctcttccacaatccaaaccttccctgaaggctctatgtgcttccttccctgccatataacccagttccttcccattccaatcctaggctcgataactccagc

SEQ ID NO: 506041 - DNA, 551 bp, Homo sapiens
aggtctgtgtcaccttcatcaccaagggtggggcaccactttcctgggtatttgtataccggaaacttgtctgaattgtcacactgcacactggccacrttagaggtcatggacttgacgtccacaccttgcttccatacgtagacattttcagcattgtcctgcagccagcgacgaaaatagaggatctcacagttgcataaccaggggttcccgtggagaaaagcaaaaggcaggaggtgggacccaaaaaagccctttggtattgtatacagcgagttctcttggaggagaagggtgtcgagattctccagcccattcaggagcccagcggggagctcagtcaagttgttgttagccagactgagcttctccagcttgggtgtgggcgtcaggagccctgggggcagggtcttcagctcattgcctttcaggtagagctcttggagttcgccaagaccacgcagggcaccaagaggcagcgaggtcagccggttgaaggagacgtccaggacggtgagagcaggcagtgtctgccctagcaagggcag

SEQ ID NO: 506042 - DNA, 575 bp, Homo sapiens
gttgtctaaactcatctcttgaccttcttttctcactatttgctccaataacagagtcaccttttaatttcccacatcatcttttctctttaaatcttgcctgtttgtaagctcttttctctgggtaaatgctgtcactactttacttggctatgtcatttttcccattcaggatttagttttgctccatcaaaactaatcctttacagcaatataatatatttccacctccaaactctgctatctcagaaaaatcttcatatgtcaatagtagcacttgcaactcggcactgcaattgtatgcttttccataactttcaattcatgagctttgcatgaaaagttaaaagaattttaatacaagcatcattatgtttctacacagtgtctttaattttgccactttggatttggcccttaatttgaagtaccaaataacaatatcataactgagattaaagaaaactataaactcttataattatctttcctgtctttctttttcaattattcatttctttgtacttttcctctgtaatctcagatatttctckactcagacaagttcctagcag

SEQ ID NO: 506043 - DNA, 484 bp, Homo sapiens
cacaataaccaagccattaggagttgagttagggatgtaataatggtgcctgaatgaatctgtctgaaatttttaaaatagttattacaaaatagtaaaatatttattggtgttaatgttakggaagggcatacttttcctgcatgaaatttcagatacatgttgtggtgccttctctgttgtggcaaatatcagatttagaaatgatcacaaaggatatatctgaagttggtttgtgcaggaattagaaaaaaaataacaaaaggaaaacacagtttggcaagttttgcttattactacccaaagttaagagccatattgggagcaataaatttgttacctgagaggataattataccagcaatcaaatggaatgatttctcatggtatgaaaataggctctcaatgaatatttaatatattaataaatattaaattatgcaaatccaagaaaatcacacttacactacttgagaatccagta

SEQ ID NO: 506044 - DNA, 514 bp, Homo sapiens
ctgcagaagttataaatgtagtttatccatccattttttggacttcaatgtaatcaagaaaaatattccatgtaatggggtgtaaaagtgttacaataaccaaggtgttatcccaaagttcactgtmagatacaaatagatctgtaaacaggcctactttatttacttaagcattttaatactttacttttctcagaaaatgacctttcacaaaatttgtttttgatgtgtatactctgtcagcatggaaagttcgataacaaatagtgccttgttccatgatatgtgtcgatgtaagctatataacttctagacacaaactttccattgacattaatagatgagttccttatttgcagggtggctatgaaatgttttcatcccccattaagggcaaagaataggaataaagaaaacatggccacaggtccacaaaaggttctactaagtacttggttacctatagcaataaatagtctcaaaatctagttattatgtttatctgaacttctct

SEQ ID NO: 506045 - DNA, 487 bp, Homo sapiens
aagagagttctctcaagtcaataaagtcttctttattcggtcttatgttttgatccctgtggtccagcaccctcaaaatccagtcccgtgggttctccagcagcttcttctagtacatactggctaattcttgcagtcctttggagtatagctccattctcctcttatgagacccagcatgtccctagctgggctatgccgcaacttaaccccagctattgattgggcagccaggaaaaaaaagtaggagcagatgtcaagagggattcttgcagcctagaggggcagagtgtctttccctgggagagtgggtttggttccagttggttttctrttttcctgtagcaagaaatactggcctctttataagctctaccaaagaagccttttggactacatagtttttaaattatttgtcaactgtcctcagctttttattaacactttgaagtgatcaataaaactcaataatgggccagttccgctg

SEQ ID NO: 506046 - DNA, 604 bp, Homo sapiens
caaattaacacctacgaagacatatctgacaatttctttgaatattactacttttccaccaacctaataataagtatgaacctaaagcttgataggtgttcatacaagatataacatgtatttgtgaatataatatggtagtaaagataagtatcttttgtagattttgagagaagcctgtggatttttatatttttattaaataagtcgataagtagatattgagtccccaccccaactgtgtagtaattagaggtatctaatgagaaacggatggmtttttcaggcaataagttcattgagagtgaaaagtttatttaaaagctggatgtccatctgttaggggacaaatatatcaaatagatttccagccctaattgaatggtagatgtattagtctgttttgtgttgcagtaaaggaatacctccgactgggtaatttataaataaaaaaaggtttatttggctcacggttctgcagactgtgcaagcctggcaccagcatctgctcagcttctagtgaggcctcaggaagcttttactcagagtggacgacagaggaggaggaggcatggcacatggcaagagagggaacaagagaaag

SEQ ID NO: 506047 - DNA, 630 bp, Homo sapiens
agtcctttcatacatgcacacatattatttttaactaggaaattattcaattttagaaaaaagatcaattaaaattgctcacaaagcttctgccacattaaaatcagtaagttggtcttgccctccctctgtaacagccagaacactggtgggaagagaggatgtataaaaatatataaaacaactgctctagggaattgaacgctatgatctctgacagaaggaaaatacgtgagataggcttttcaatcttcctgggttttggcctgaaggaacatcwtgacccacagcacatggtggggaaactgagcacagcctggggatctcactgaactcactaggcagagatcaaggtttgggtttgctgaggccaccggaatttgccaggcaaaatacaaaaaggaataagatacagagagggagacttccagaaactttcatggggtttggggggggtcctacaatctgtttctaaatactaagctgtgaaacataggattggatttcaaaggccaagcaaagagccaatagagagctataaaatgaacaattcccagagatcaaactggactggaaggcactcaagtattaatcagccagaatggagaaacctcttcagagtacagtaga

SEQ ID NO: 506048 - DNA, 628 bp, Homo sapiens
agcacactgtgatcacgttcattaagacctcttccttcacatgaggtctctgaaatccacagggatagagggagatcccaggtctcagagacagccagacagtgagaacgttagaagccctggctccagccccctgtccaacgctctcatccccactgtcctccctccaacaagaagagtgggggtttcagatctacaacatttcagtaaataagatgataaggattctctctctctctctctctctctctatatatatatatatawaaataataattgttttatatatattatatatattttatatataatatatatattatatatataatatatataataccaatctatacagttcaataagtaacttatagaagaaagagagaatgaatcttctttataacatttaaacttgtagttctgtcagaacaacttggacttaaataaataaataaataaaaacataaaatttaaaaataataaacttgtagacttcaccctaattaagaaaataacctgccagctaagcgtggtagctcacacctgtaatcccagcactctgaaaggccgaggcaggaggatgatggcttgagcccaggagttcgagaccagcctgggctgtaacatg

SEQ ID NO: 506049 - DNA, 424 bp, Homo sapiens
ttatgtcccactcaggaggcagagttggctccagcctaaccctctcctcccacttctcctgcacactgggcggaggcctctcaccttcccttttgtggtgaggaacccgaggcccttccacaaaagttaaagatgttcccaaggtcaagccattgccatggagtggagtgaggaccagctctcctgttyccagcctgggctccccaaggatgtcccacaaacctcagagaaggcatagtcttagtgcaccaggacaggagggtagaaacttccaaaagggctcgcttttccagcatggtaccctgggagccctggccaggcctaactgaggtggtaacctcacttgaggaggaggcctgacccagatgcagccatgtttcccaaagctcacagggtggcctgctgggggccaagagggcctggg

SEQ ID NO: 506050 - DNA, 424 bp, Homo sapiens
ttatgtcccactcaggaggcagagttggctccagcctaaccctctcctcccacttctcctgcacactgggcggaggcctctcaccttcccttttgtggtgaggaacccgaggcccttccacaaaagttaaagatgttcccaaggtcaagccattgccatggagtggagtgaggaccagctctcctgtttcyagcctgggctccccaaggatgtcccacaaacctcagagaaggcatagtcttagtgcaccaggacaggagggtagaaacttccaaaagggctcgcttttccagcatggtaccctgggagccctggccaggcctaactgaggtggtaacctcacttgaggaggaggcctgacccagatgcagccatgtttcccaaagctcacagggtggcctgctgggggccaagagggcctggg

SEQ ID NO: 506051 - DNA, 424 bp, Homo sapiens
ttatgtcccactcaggaggcagagttggctccagcctaaccctctcctcccacttctcctgcacactgggcggaggcctctcaccttcccttttgtggtgaggaacccgaggcccttccacaaaagttaaagatgttcccaaggtcaagccattgccatggagtggagtgaggaccagctctcctgtttccagcctgggctccccaaggatgtcccacaaacctcagagaaggcatagtcttagtgcaccaggacaggagggtagaaacttccaaargggctcgcttttccagcatggtaccctgggagccctggccaggcctaactgaggtggtaacctcacttgaggaggaggcctgacccagatgcagccatgtttcccaaagctcacagggtggcctgctgggggccaagagggcctggg

SEQ ID NO: 506052 - DNA, 455 bp, Homo sapiens
tccttgaagtctcctatcttttaacagttatacgagtaactgtatcatgctccatcacacaactgtgttactttcaataagttttaaatgacttaccagctaatgtctttacccccattggctggtaaaggtgcaagatggagctcgtgctcactgtggcttccagggcaacagcacttakgcaggtgaggtctggatgctggggaaatctaaaggagtcctggagagggaggccttccctggacctggacgaggtcaaccatggtgctagctgcttctgggagtgttggcctgcaggtgacctgtgagacagaggctccaccagagagccctcaacaggaatgagagagctgtttggggtggaaaggacttggctgtgcagcttcttaggcactgagttgttcagcttcagcttggacccctctccctccgcagcaatggattgctggctgcca

SEQ ID NO: 506053 - DNA, 584 bp, Homo sapiens
ctgcggggaggatccacattgtaggctctgatgcaatacctatgctggggtagtcctcaagctaagaggccgtttctactttagagacttaatgaccatctagtttggtgttttcctcaggtccattatctctgaaaagagacataggaggaagaggattatttatcctcccatccataagcctgtgtttccagttcaaggatttaggtcagcaagacgcagacccaaaaaccattcatttaataacccaagaaagaaggcaagcagggtggcccaaatcttccaactggggcaagatttaatatagtgttccagtggaaagaatcttctaatggtaacttggactctacatgtcctaattctgttgttaatgagattgatgactctgggcttagtttcttctgttaaaaactaggaaattgtagatmatctctcaactccatttcagctccaggatttctcagttcctggagtacccctgccctagaccctccacatgaagaagagagtcttaccaaattggattatcagagcaagactattagcagagaagcctgaaaacatctttctggcccaaacaacag

SEQ ID NO: 506054 - DNA, 547 bp, Homo sapiens
tgatgtctctctaataaggggagctgacaaggtagaggtcacgctgttgccctgtggatagctcagggacgtggtgaaatgacagctgctgagagagagaggagcgggaggaggagaagggcgcattctttctggagggggaggtccagtcaaattggagtttgagggaatcctgggatttaaaaagtcctggttccaggctggccgcggtggctcrcatctgtaatcccagcactttgggaggccgaggccggcggatcacgaggtcaggagttcgacaccagcctgaccagcatggtgaaaccctgtctctactaaaaatacaaaattagccgggcgtggtggcgcgtgactgtaatcccagctacccaggaggctgaggcaggagaatcgcttgaagaggcagaggttgcagtgtgccaagttcgggccactgcactccagcttggcaacagagcgagactccgtctcaaaaaagaaaaaaaaaaaagtccccttttccagccttctcaactcccctcagacggggcttctagagcaggaaggt

SEQ ID NO: 506055 - DNA, 612 bp, Homo sapiens
ttaattaggtttacttacttggttacccatatgtgtaataaatataggaaagataaggtaaatatttaattatttcttttaacctaaagtattttatctcattcttttcttttctgctctattgaacttttatcatctttcattaacagtttcatttcaatttaataaatatgtattgaacccttaataaatatatgccagtcaccgtgcaaggctagagtcacaaatatttaatttgtaaaagagatatatacgaaattaatcaggagtctgaaagtggttaactactgtgcctgccacagtcacaagtcattctgtgattaaactcctcctacacacccttgttgacgcagccttatgagaaaaattttgcacaataagagaaactaggttcactctctggaactgtaccaagaaatactaagagtgaatcggctgacagggagaatagacactgaaagtttatgaatttgaagatacctgtagcaggtgatcaacaattaagtcagaatgaagtataaacaggaacgaagatcgcgtygagagagaagaaggtagttgacagtgagtggagggaaaggatacttggaaggaaaagcagatacaagaata

SEQ ID NO: 506056 - DNA, 580 bp, Homo sapiens
attttgaataaacctttcatttgatacagttgaggcactgaatgagaggctgcaatatgtaaactctgtaactatgtggaaaacatccaagctttacctagtgcagtcaattacacacatatcctaactttctgtaattctacttacaggtatatatcttacagaaattcttgcatttattcaccagaagacatatacaggactgtttagagaaacatggtttaccatagccatacctcctcaaactggaaataacctaaatctcttatcatctatagaatatattagtaaactgtggtttatttatagaattmaattcttatagagcagtacaaataaatgatcagctctatcatggatactgcagtgatctgctcagaatctctccagagcttagcgccaatcccctaatgatggcagtggcagcccatctggagaggctgttgtgaagatgacagttgcagccagccggcgaggcgcagccaggactgcatgctccacagagctagcaggagccaggaacaggcagaagcccccaccccttccaagttggaggaatggaaatcctgcccctctgggt

SEQ ID NO: 506057 - DNA, 550 bp, Homo sapiens
ggaaaatactgcccactagaagtgtaatatagtactgactgtacttatgatattcccattaaatgacttaatgaaccttattcaatgtaatttgtgtctagatggtgccggtaacacacttagctagtgattgattctcactgatgaatagctgtgtgaattagaaaactgtgaatgagtctaattatagtatgctagagctactgctagatgtacataaaaacgatcaaactcgggcataaccactgtgcagatgaatgcttttccatatgtggatgcttacactagcgctatgtctatggcaatagctctgattagattgcaaagtagcccctaagatggcacagctcaactgccattccaattttgacagcctttttttttctttttgccatttagagagagaaagaactccccrtcagatctgcaaagctgcaaacccagccacaggcttggtctgttttcttggccctctcagtattttcctgcgtcctttctgttcctgacttggctcaatgcaggctccccactgagatcattttctctgtat

SEQ ID NO: 506058 - DNA, 678 bp, Homo sapiens
tggaggagcacgtgggggtatgttgctgtggttggcagatacatctgctgctgctgctgcaggaggaggaagagttcctgttcctggcagtgctggaataggcgttagctggatcccaacctgtggttctgtcctttttctttccctctggctgcttgggatcctctccgttttctaccgagtctgcagcccttgacaatcaacttattaaaggatttctcagcagccacttctgcagcctgccctgtggaaacctggatggaaagcactctactgtctgcacaacagtgatcattcagatcgtcaaataattagaaatgattatttagatctgtctcagtaatggcatcaccgagatcaccaacacagagtgtggtgataaccttgtcctctggtggatccagacaaggtatggtgaagcctgctttagaggcttatctgctccggggtcattgattccataatattggattcagtctttaatattcttatcagcaaggggatcgtctggatctgtaggcttctcatgtctgtatggaccctcctcttctccctcacattctcctttcactcagaaggagcaaatgtgcgtattcctttggtagtagcatgtggtctgcgccagtttgagcagcrtgtcactggtatatgtgactctctccagcaggccaacttacc

SEQ ID NO: 506059 - DNA, 646 bp, Homo sapiens
ctgttgaaatttacaagttaacrttatctaaattcaataaggttagtgccttctagtgtctatgtgtctttaaaatggaaaacagaggacacaatcaggacacttgaaaacaaaaggaataaaatgataatgacagaaattgtcaattatctgtggctcacaagggcatcaaaacctcaaaaaacttgatcagtacaaaacttctctgtccctgctcactagaggagtttgagttttccttaaaatgtgtcttgcatttcaggtagacgagaaagatgtgtgagagcatgggtctttattaatcttgatcagagttcctgagcacagaggatatgccctccatttccttcctaataaaataattggtgcaattcatatgattgtgaacttctcattaatgtgtggcacagagatttaatggtaaaagatcttaaagtctttagaaaaagaaagtgttatattttaatcataacttttcagttctggtagttagaaaaacccactgccaaccaggattttaaggcttccaaaaatttctggcacagtattttggatcaaattcctccagtgtgtttctgtcccctacctctgcagtgacatttctcatgcccatgtgtttcctcagttgagccaagaataaaatgtc

SEQ ID NO: 506060 - DNA, 646 bp, Homo sapiens
ctgttgaaatttacaagttaacattatctaaattcaataaggttagtgccttctagtgtctatgtgtctttaaaatggaaaacagaggacacaatcaggacacttgaaaacaaaaggaataaaatrataatgacagaaattgtcaattatctgtggctcacaagggcatcaaaacctcaaaaaacttgatcagtacaaaacttctctgtccctgctcactagaggagtttgagttttccttaaaatgtgtcttgcatttcaggtagacgagaaagatgtgtgagagcatgggtctttattaatcttgatcagagttcctgagcacagaggatatgccctccatttccttcctaataaaataattggtgcaattcatatgattgtgaacttctcattaatgtgtggcacagagatttaatggtaaaagatcttaaagtctttagaaaaagaaagtgttatattttaatcataacttttcagttctggtagttagaaaaacccactgccaaccaggattttaaggcttccaaaaatttctggcacagtattttggatcaaattcctccagtgtgtttctgtcccctacctctgcagtgacatttctcatgcccatgtgtttcctcagttgagccaagaataaaatgtc

SEQ ID NO: 506061 - DNA, 640 bp, Homo sapiens
ccttccatcattttgttcttttccgtcattcccaagcccctgctgctgtggggcccatcactgcttctccacctctattgcgagctccaagaattactgggcacacacagttttgcccctttacaaacgcctcctgtggattatttgagtcccatagtccattgagtgttcttggttttcttcctggcccccaagagaatcaaactaatggattatctgtaaagatggtggccccagccttttgcagcctgaaacttctggaagccagagccccattcctgcatatttagacctaaaatgagactggccccaaagggatgcaaccaaacagcctgtgatagactgtctcaatctaaatcagctccaaagcttctcctcacatcactgttgcgtcctattcgaaggattatcctaaacacgtgaactctcccaacagaaggatttccttcgctgctgcacctccttccagttcatctcattcagtgcgttcccctcttcgctccaagcacacagagcatgtgtggagkatgaccgcccagtcctcacttagccagtattttccagtttttaaaatatgaaggttcttgaacctagtctcaatttctgtgccttaaggaaatgaaggataatcgtttctcta

SEQ ID NO: 506062 - DNA, 479 bp, Homo sapiens
aggactctgtgttttccttattccatgaaggatgggagggaggcagaaacagagaaaaagcacacgtctgacaaaattggtgatttcagaaaagatagccccgctccgtttgtagtttcaagcaattgttatggctttcacagagttcactcagccaatcaatcacgtgcctttgggtcattgagaaaggttgaacgcataaaamctcagaggctcgaatcattttttaagaagaacaaggaaatcgtttcaaatcctgtcgccggttctgcccacattcactcaatgatctgctgtctcggtgttgggattttgctctcgcgtcttggagagtaagccgttagatccaggaaaggaaggtgggagggttggcctcgttaatgtccctgaagtagggtgccaatccccggctgaccggaagctgcacagatttgcaaacgtagcatttctgttgccttattgttattttctcagaccaa

SEQ ID NO: 506063 - DNA, 479 bp, Homo sapiens
aggactctgtgttttccttattccatgaaggatgggagggaggcagaaacagagaaaaagcacacgtctgacaaaattggtgatttcagaaaagatagccccgctccgtttgtagtttcaagcaattgttatggctttcacagagttcactcagccaatcaatcacgtgcctttgggtcattgagaaaggttgaacgcataaaaactcagaggctcgaatcattttttaagaagaacaaggaaatcgtttcaaatcctgtcgccggttctgcccacattcactcaatgatctgctgtctcggtgttgggattttgctctcgcgtcttggagagtaagccgttagatccaggaaaggaaggtgggagggttggcctcgttaatgtccctgaagtagggtgccaatccccggctgaccggaagctgcacagatwtgcaaacgtagcatttctgttgccttattgttattttctcagaccaa

SEQ ID NO: 506064 - DNA, 615 bp, Homo sapiens
gactacaggcacacatccccacacctggctaayttttgtattttttatagagacggtgttttgctatattgcccaggctcaggtcttccgccccccatggcctcccaaagtgctgggattacaggcgtgagccaccgcgcccggcctgttgggccgtttgtgtaatgccatccgtgcctcctcctgtgtgtcatgcgggaacaccaatcatattttctgattgtatctctgagcagacatggcatcaatggccaataaaatagggcctcctggagacagccccggagagctgtgcgaagacagccagccacgcaccacggtggatggaagctaattaaaaatgacttattaaacactgcagacaccacagcccaaggctgcagatgaacaaacactcatgtttcaacactggcttttcacagggaaggcagccatgctgtcgttctggtaagtcattatttacctcctgaaactcaccaaagggtcttcagtcctcccccaggccccaccccctgccccttctgtgtgcctgttacaaaccctgatattgaagtcattctgcttcccttaaactgaggtgtttagaaaggcaacagattgtacaatttgatgtca

SEQ ID NO: 506065 - DNA, 615 bp, Homo sapiens
gactacaggcacacatccccacacctggctaatttttgtattttttatagagacggtgttttgctatattgcccaggctcaggtcttccrccccccatggcctcccaaagtgctgggattacaggcgtgagccaccgcgcccggcctgttgggccgtttgtgtaatgccatccgtgcctcctcctgtgtgtcatgcgggaacaccaatcatattttctgattgtatctctgagcagacatggcatcaatggccaataaaatagggcctcctggagacagccccggagagctgtgcgaagacagccagccacgcaccacggtggatggaagctaattaaaaatgacttattaaacactgcagacaccacagcccaaggctgcagatgaacaaacactcatgtttcaacactggcttttcacagggaaggcagccatgctgtcgttctggtaagtcattatttacctcctgaaactcaccaaagggtcttcagtcctcccccaggccccaccccctgccccttctgtgtgcctgttacaaaccctgatattgaagtcattctgcttcccttaaactgaggtgtttagaaaggcaacagattgtacaatttgatgtca

SEQ ID NO: 506066 - DNA, 625 bp, Homo sapiens
agggtctagttaggaaaactgaaaccactctaggtatttcaaacagagggactttaatacaagaaattggtttcaaagatattggctgggtgtggtggctcatgcctgtaatcccagcactttggaggctgaggcaggcagatcacttgaggtcaggagtttgagaccagcctggccaacatggcgaaaccccatctctactaaaaatacaaaagttagccaggcttgctggtgcctgcctgtagtcccagctactcaggaggctgaggcataacaaccacttaaacctgagaggcagatgttgcagtaagccaagatcgcacagttgtgcactgcagtctgggcgacagagcgagactccatctcaaaaataaatacatatacacatacataaaaagtaaaaataaacaamgatattaagaaggttggaagagtaaaaggaaggaaatgggactggaggatccaaaaggaagaagctgtcatccttgaaaatcagaagctgttagtgcccttgagctcagtccccgagcctgtgcttgctgcagttggttccagatccatggaagaggtactgcctcactctgggcagggactgctgaaagaggtgctgtctgctcaggctgct

SEQ ID NO: 506067 - DNA, 542 bp, Homo sapiens
tgcccctttccattgccagcttcgtcagtaactaccaccaagagtcagagccagcagcagaaagctttcctcttctcctgccttctaatatccacaagcacctttactttatttgtttattttttatggacagggttttgctctgtcctccaggttggactgtggtggcacaaaattagctcactgcagccttgaactcccaggctcaagtgatcytcctgcctcaacctcctgagtagctgggactgtaggcatgtaccaccacattcagctatttttgtatttttgtagagacagggtctttatattgttgcccaggctggtcttgaactcctgggctcaagtgattctcctgccttggcccctcaaagtgctaggattacaggcataagccactgtgcctggcccaatattaactgttaacaaagtgcatgtaatttcttcagaggtagagactcattcacaatcaatgaattatgaactctagaacaaaaataaggcctcaagatagagttgggtagagagagctacctgaactgact

SEQ ID NO: 506068 - DNA, 632 bp, Homo sapiens
cgaggggtaggtaataacaatcgcagaagactaaatttgactttaatcccctgaagaatggcatgcatacagcttaaaatgataaaagctagagggggtggggagagagggaaagaaaggagggagagaaggaggcagagtgagacagagaggctgagagacagacagagagaagaagagaaatgcaagctgattttctcctgggattatctatttcttgattaggaaatagagtggaaattgagagaaaagatttttgaagaccttgttttgataaacagcgtcatgcttggcagggtgttttcggtagcaggtctggtgtctgcgtggtcaagcagcttggagcgatttacagacctgccaatcccttagataatcccaaaggcagaaatagaaaacaagtcctcgtttgattagtgcacgtagcccggtctgcgtccttctcctggggtctttagagccatggctacrgtgactggctgtacacaagcttgccttgtctttggggttaaaattcctcgactgttgacacagtgcatgatgctttgggcggagtaggtgtcctgtgaatgctggcagcatgaacatggggtgatgcaggcgctcacgaagaaaggctatgtctggactcc

SEQ ID NO: 506069 - DNA, 437 bp, Homo sapiens
gcatgtttattgagggccaggatattgggtgtgggttccaccagaacaataaatctcaaagtttgctgcctggaccagcagcgtcagcatcacctaggaatttgtcagaaatgcaaagtttcagggctaactcaaactacttgatcagaaactctaggatgggaccaggcaatctgttttaataaaccctccatgtgattctggtgtatgccgatgtctaagaaccattgagccactcaaaaccctagtggcttacacacaataaaagctccatttctcactgtctcagtctatcaggctgctataaaagagtcccacagactgggcagtttagaaacaacagaagagttttgaagtttagaagccactgaactgcctttgcaccttggttgaaaataaactraccatgtgtgtgcaaggttttttttttttttttt

SEQ ID NO: 506070 - DNA, 648 bp, Homo sapiens
tggggcaggtctcggagattgggagggtagaggtaaggctgcagccatgtggttctcactctcagcaggcaggtgcaggggattaggcagctcccacatgttgtcactcacctgctggctcagttggatccggtgagacagcaatcagtcctcaagctgcttccccttctctcacatccccattcgtcttctccaagtcctgaaccaagcgtatatttacttctgtgatcaagagtgccagctcctcctgcaggacacccacaccatcaaggccaagggcaacaagaactgacacaggttcaatccatccttaaggactccaacttgtgcctctggttccgtctcatcctgactctcccccaatttacatatatcttccttgtccaccctgcaggactcaaaccccaggatcaagyactaagaaaacagccagagagagacttttccaatcacctcccacaactgggtaaggtcaaatccttataatacataataaataagcgcatacctagcggccatgcttctccaattgaaccatgactgatataagaaagacgtgggacttatttattcaagtccatgtttccatccagccctgaattaagacatggggatttatttattaaagtgtaagtttcgttccaaccc

SEQ ID NO: 506071 - DNA, 648 bp, Homo sapiens
tggggcaggtctcggagattgggagggtagaggtaaggctgcagccatgtggttctcactctcagcaggcaggtgcaggggattaggcagctcccacatgttgtcactcacctgctggctcagttggatccggtgagacagcaatcagtcctcaagctgcttccccttctctcacatccccattcgtcttctccaagtcctgaaccaagcgtatatttacttctgtgatcaagagtgccagctcctcctgcaggacacccacaccatcaaggccaagggcaacaagaactgacacaggttcaatccatccttaaggactccaacttgtgcctctggttccgtctcatcctgactctcccccaatttacatatatcttccttgtccaccctgcaggactcaaaccccaggatcaagtactaagaaaacagccagagagagacttttccaatcacctcccacaactgggtaaggtcaaatccttataatacrtaataaataagcgcatacctagcggccatgcttctccaattgaaccatgactgatataagaaagacgtgggacttatttattcaagtccatgtttccatccagccctgaattaagacatggggatttatttattaaagtgtaagtttcgttccaaccc

SEQ ID NO: 506072 - DNA, 521 bp, Homo sapiens
ctggcgtcattgaggccggcagcattttgacatgtgggtcagggttctctgggtcatactgtcatgttttgaactcttttctgttggagaaaattttacyattttttcaaacccaatcaatagtatggtatagtcttgtttaaatgtcacataatcgcactgaagaaacatctaaaggagaaaaaaagaactacctttagcctcacaaccttcaccctataactgacttcccttttgctttttctcttctggcccttgtccatgtgcacacataattttgcttggttgtaatgagaagacacatacaattttgtattaaagcaataaagttttaatgatgtatagatatacaaagaaaatagctataaagcaatatttatgcaggtttgtaggggaaaaatccattttaaaggagacagtatggaataatagaacatcttagagtagtccatttgggatagtgcttataagactttaataacatttcttctctttcctttttatattgttccttaaccaag

SEQ ID NO: 506073 - DNA, 476 bp, Homo sapiens
ttcttttctttcacacacatgtgtgtgtgtctgtgtgtgtgtgtgaatgaagccctcaaatatggcacaatgtggagagtggggagccatttgcatttcagtcccttggccaaaccaaactgtgacttttcttcccccactgagaattctggaaaactctgaagactttgtttttacctttaatctcacatccctaggtgtttatgaaaattaactttttgtggagcaagaagggtgaggatgggaaagagtgcaaggaaaccattcaggcggggcatatgctgacagagtcagtgttctacggggttaggggagatagttataaacggaaatgtgcagtttcacttaaagaacacatggagacctaggaatgtgactcaatttcttttaaagaagaaataatcagaaaggagggtggataaatatgtttccttatgcttygctttcatgggaaaaattcttttagccattttatt

SEQ ID NO: 506074 - DNA, 492 bp, Homo sapiens
taggtaaacattatgtgtttttttctgttagttactagggaattataagaaatgcaattgatttgatacagtttattttagatttcattgtagttttaataattagaatactttgaatatggtttggagtaagaaaaaaaaccttcaattccctccaaaacatttttgcatttctttcctcttttttcattacttctccctctatcttttaatcattttttaaattcctttctccttcattctcctgtgacattttagaaagttatttgcttaacttttgttcacatcttccattttaaatcctggatgagtttcatgaggtcaatgaaaaccacttggaagacaatgtaaatacgtcttagtgatttttgaagtgtgtgcttctttatatatacatatatatatatayacacacacacacacgtgtgtgtgtgtgtgtgcgtgtactgtccaccatgggaggggagtagatctattcaggtatcccctccc

SEQ ID NO: 506075 - DNA, 494 bp, Homo sapiens
gctatttagacttaaaactgacatcaaaactatctttacatttctttcccaattttcactgccccctttcctcttagttctgtgtaacacagagccttctggtgaatagcctagttatgggttcctcagtgagaggaaaacttagtactcttataatctttttatctaggacaacttttaaaatctgggcatagattttactttagtctttgaatctagtgactgtattaggaataactattgttatatttataggcagcttaataaaagcaatgtgtgacatttctgttatgtatgtgctcaaggtcagtgttaaacatagaaggtcatggaaaattacagaaagcagaaaacattacaaaatttagtgggtagaaagaaatgaaatgacaggataaaaacatagacacctagtcttaaacatactaattaagaaatcttctgcgcttatttcacygcagccaaaaagcaaggtgttgattttttatttgcat

SEQ ID NO: 506076 - DNA, 613 bp, Homo sapiens
aacctgaaacctacaggatttttccccttaatttccatgctctgcggaaaagttccccaactctaccaagggaaggttattttgtttgttttagtcattggtgctccgagaattgtagtaaacagtcaacaaatagttgttacattaataataaacattaagttgaggcatacttcatttaaaaactattgttatggggaatgtaatggaaaagatagacaatatgatgttggcaaaatgtgtttcctaactgaaatgaaagttttgaattatttcaaaagcaaatgctgggggatctatagtttcctgttagagatgtatctacatagcacatcaggaagaggagccgggcgsggtggctcaggcctctaatctctgcattttgggaggccaaggcaggcggatcacttgaagtcaggagttcaagaccagcctggccaaaatggtgaaacccctgtctctactagaaacaccaaaattagctggtgtggtggtgggcacctttaatcccagctactcagaaggctgaggcaggagaatctcttgaatccgtgaagtggaggctgcagtgagccgagatcatgccactgcactccagcccgggcaactccag

SEQ ID NO: 506077 - DNA, 612 bp, Homo sapiens
gagagcagggacttttgttttgttcattagtatattactggcatttatattaataatggacacatagtaaacactcaaaaaataatttttaaatgaattgaatgagtaccccaaaggaacacatctaaractataacttataataatacatttctcccctgtggacacagggagaaacatgtaggactggggacagattcggcaagtcttcccatcacactgggctttagggcccccatgtgagagcctagagtcttcatgtactaactacatcaatcaatagaccaacagtccagcccaaaccctctgttatcaaagaacagcagcatatgagaggcttcaatcttgagtgtgtgggggcataagtatttttttcttttctatctcaaccaccactctcccaattataataaatgaataaagtagattgaagctaagaaaaaaaatacagcaaaattagaagctggcaaaaaaacaaacccactgcctggggcagcctggggctgatggatgatgacagctagcagacaaatcctgttccccattctaaattctgtctactaaacaaattagcaagctcatcaataactgcacggcatttaccttctgcag

SEQ ID NO: 506078 - DNA, 645 bp, Homo sapiens
atgcgtaccccctaaatctataaaaacattatacatgtaatctaaaaattcattggtcaattacaggtttaattttcaactgtcaaaatattctggttgattttatgttcaatataagtcaacagtaaggcatagctgctcaagcaagaggtgttgtcacctttaacgtcattaatagaagatagtgttcataaccaatgagataatcacccagtaaaatgtatcctggtcaattcacataatgttacgtgtgtaaaataattggaaggaccttgacaatttaatgtctaaagctggtgaattagaggataaatctagaaactgagagttcatataaagaggagttgagtagctggaaaacgagaaacttggggaggatttcaaaacagccttcaaaaaagtatcacctttgagtccatcagagtcaggcaagaaacaaatgatggtcttaaaggaaatgatttgaggagaatttaataagggaagtagttataagaatatagacagggcttaagaaccaagacctcagtaagataccacttcacactaggatagctacaataaaaaagacagaaaatarcaagtcttggtgatgatatggagaaattagaacctgcatacaccaccattgagaatgtaaaatgg

SEQ ID NO: 506079 - DNA, 409 bp, Homo sapiens
ctgaagcaccttctgaacaggcatggggaagctrcaggggtcagtggcttttgttagctaaagaacccagagatgggacttttcctttccttaaggccagggcttgccagctcctcccatcttttagaggaaccccaaagcatacccttttctacattctgctaccccctggccccccccagacctgaaatggctcccttcagtctctcttttcttcagccccccaacacttgtctcaccaggcccagcttttccttctggatgtcgcttgccgcccgcctatcctcccacctgcctcctgaggcctggtttggaggttctcctccttccaggagcccagcgctgcctctaggagagagaattatcctggaaactcccccttctccctgcctgacagcagcccctgctg

SEQ ID NO: 506080 - DNA, 623 bp, Homo sapiens
ttgcaaggaggagtctcatgttgacttcagaggtccaggcagaacctgttgaattgcacarttcccatttgctagaggatattacacggtgagatctctctgctcagggaccggggctgagggcttctgtcatcagccagtggagcggccctgcaccgaggcacctccctgcttttgccacattttgcccaccctgctgtctgtcatgtactgaacctttgctggaataattgccataggtgtcaacatgtattaagggcttgctgtatgaaggtactatgcaaagtgccttttgctatgtgcagctaactagcataacaaaccccaagatgccccagaggagatactcttgtttccctgttttgcagatagagaaactgcaggttagagagatgaaataagttgaccaagctagaaattggtgggcagggaacacaacttgggccatgctgctttagagctgccgagtgtttaactgttaaggtgtcattctgcactgcctagaccagcccatgtatgttaccgttccattctgcatgagcatttgtctattatcaagacatctgctggtgcaggctgggacacaacaccaagggagggttaaatcctgggttgccaaacca

SEQ ID NO: 506081 - DNA, 370 bp, Homo sapiens
agctgagactacacaggcacgtgccactaccgcccggctaatttttgtgtttttagtaragacagggtttcatcatgttggccaggctggtctcaaactcctgacctcaaatgatccgcccgcctctgcctcccaaagtgctaggattataggtgtgaaccactgcgcctattattttttgttgttgttgtttttacactttataataacggtcattataaagcgatttaccagaaatgagaaagacttattggtgtctcctggtctgtggcccccttctcaaaacaactatctcaagtattccctcatactagggaaacatgaactattttctttggagaattcatttattcattcattcagtcattgt

SEQ ID NO: 506082 - DNA, 626 bp, Homo sapiens
ggctctgcgtgggtgctacacccctgcagtgttgcctggacagaagtatctgttcgggcagtaaactagggcaacagtgattaccttgtttgtttctctgagtttcaagtatctctgycctatagtgcctgatgtctactgcttgaaaaccactgttacatgtttgttttttttggttgtttagtgaaagagtaaatccaatcacctgttactccatcttggttatatgtaaaactcctgttgttctatttttgtgataaaatttaagttccaggccatgcgtggtggcccgggctcatacctgtaatcccagcactttgggaggctgagacgggtagatgactttgaggccaggagtttgagaccagactggccaacatggcaaaaccccatctctactaaaaatacaaaaattagccaggcatggtgatgtgtgcttgtaagcccagctactcgggaggctgaggcaggataattgttttaacctgggaggcagaggtttcagtgagctgagattgtgccactacactccagcctgggcaacagagcgagacgctgtctcaaaaacaaaacaaaacaaaacaaaacaaaacaaaacaaaacaaaacaaaacacaatttaagttc

SEQ ID NO: 506083 - DNA, 589 bp, Homo sapiens
agatagaatacagttactgggagtaatcacaatgctgttctcttttataaagtggatatgatgtgttatttattcaattaatgcacgtcgccaaaaattgtccttattccttgattgtctcttttttttaccagtctcttgttgaagtggcctcattgtctgggaaaatacttgaggtttgttgtctcacagccatggagatcaaggatgcggacacacaatgagtgaggttaagagcggaaatttaattgggaaaagaaaaagaatagctctctgctacacagagtagtcctgaaaaaataggttgctggtccacagcaaaatgcaggggtttttatagatgagctrgtggggaggtggtgtctgatttacatagggtgcaaaaatctggttaggaccaggtgtgccatttgcctatggcacaaatctctggccgcccccatgccaatcttctattatgcaagtgggttccctgcctgagctgtgccatgttgcccatttttttcttactgtacacgtgctaacaaaaaagggaagatggagcttccatggtgcacacgcctagcccccaggtagccctttcctattg

SEQ ID NO: 506084 - DNA, 622 bp, Homo sapiens
taagggaaatgctacttgtacctacctcatatggtggttgtggggtagttattacatagtaagtgcttggaagagtagcacataggagtactcaattaatgacagctatattggttttttatttttttattattcctgaggattttttttaaacaggctaactagttatgagcatctcactggtatatttactttgaccattgccaactatatatttcatgtagcttgttaaacaaatttataactgtaaccaaagctaaatatatgtaatgatggtattttaagacattcaagttaaattccaytaaaagtaaatcactaaactggggtgacataaagcatgattgaataaggaagaatgggtctgaagaaagcctgccgatagcatctgattcatttttgaatcatggccaatttttatgctacaagaatagctttccatgttgcctttacacttctggatttcatatcatgagggtaaattgctgaaaatgtacacacaaaagaaaaagaacataaaaaacatatacatattctatttgtttgagttctaatgttgctttcaggtcagacattctggattttcatggttttggcttcagaaaattctaagtctagaaag

SEQ ID NO: 506085 - DNA, 622 bp, Homo sapiens
taagggaaatgctacttgtacctacctcatatggtggttgtggggtagttattacatagtaagtgcttggaagagtagcacataggagtactcaattaatgacagctatattggttttttatttttttattattcctgaggattttttttaaacaggctaactagttatgagcatctcactggtatatttactttgaccattgccaactatatatttcatgtagcttgttaaacaaatttataactgtaaccaaagctaaatatatgtaatgatggtattttaagacattcaagttaaattccactaaaagtaaatcactaaactggggtgacataaagcatgattgaataaggaagaatgggtctgaagaaagcctgccgatagcatctgattcatttttgaatcatggccaatttttatgctacargaatagctttccatgttgcctttacacttctggatttcatatcatgagggtaaattgctgaaaatgtacacacaaaagaaaaagaacataaaaaacatatacatattctatttgtttgagttctaatgttgctttcaggtcagacattctggattttcatggttttggcttcagaaaattctaagtctagaaag

SEQ ID NO: 506086 - DNA, 622 bp, Homo sapiens
taagggaaatgctacttgtacctacctcatatggtggttgtggggtagttattacatagtaagtgcttggaagagtagcacataggagtactcaattaatgacagctatattggttttttatttttttattattcctgaggattttttttaaacaggctaactagttatgagcatctcactggtatatttactttgaccattgccaactatatatttcatgtagcttgttaaacaaatttataactgtaaccaaagctaaatatatgtaatgatggtattttaagacattcaagttaaattccactaaaagtaaatcactaaactggggtgacataaagcatgattgaataaggaagaatgggtctgaagaaagcctgccgatagcatctgattcatttttgaatcatggccaatttttatgctacaagaatagctttccatgttgcctttacacttctggatttcatatcatgagggtaaattgctgaaaatgtayacacaaaagaaaaagaacataaaaaacatatacatattctatttgtttgagttctaatgttgctttcaggtcagacattctggattttcatggttttggcttcagaaaattctaagtctagaaag

SEQ ID NO: 506087 - DNA, 504 bp, Homo sapiens
acaaaatctgtactatctgcatttgactcatgagaaaactgaggcacacggtatgtaaataacttgtccaagatcacatacgattgaagcccagaaaatctgaatgtataacccgctcttgtaaggaaatgctgatgctgcttcctaagaaactgttaaggggagagaggagtatcaaataaaaataaaagacaagaagcataaaatcagaaaacctatcaagtatattgactatgattcagaaaccagaatgtattagttttctatttctaacagattgcctcaaatctagtagcttaaaacatcacatatttattatcttatagttctgttggtcagaaatctgccacagatctcactgggctaaaatcaacgtgttaggagggctgaattctctttttgggactcccagagagaatctgtttcctgctccttcgggctgttgscagaattcagtctcttgctgctgtagattgtaggctgaggcccccgtttccttgcagg

SEQ ID NO: 506088 - DNA, 567 bp, Homo sapiens
ctggccactttttggtaagttggcttcattgaacgccttctagcttcctccttttttcctttcatgggcatcaaatctgcatcacactttgaaggcttcccctgaccagttctctttcctccccttttacctttcacaggcattactcccagatgaagttttaactctctaatcatcatcttaacacgttttwcaggtgatataactgccacaatatccaaaacaataatatgtatggttcatagatacatttccatgtaaataatttttaaaagacattaaataccctagaatgggtgcctacagggagaggagcagagtgtgctgaacggggcaagaataacaggaaataaggcaaacataaaaaatcagaagacagattggatggagaattgtgtgcaaaaaactgagacatatgattggttgtgtcagtcatgttgcatgcatctgaggtataaacggaaaacatttataatttctattatttgtttttcttttgagaacctgagtgtttcaactcttactgtaattctgattggacagagatggactcagtaacaggagctg

SEQ ID NO: 506089 - DNA, 602 bp, Homo sapiens
ctgcccccccacaaacaacatatacctatagaaacttgtttttgagatcttgatatgaaaagactatggaaatgactatgcatctgtgcgttgaatttttgtgagataaacagcataggggggaagccccaggatcccaatttccttcaatagctaacagccaccacggatgggcacacagagcctgcgaggctctccatctgtacaaacagcacgtgattctgctattcacaccacattttccttcaaaatgccttgtaatgtacaaagatcaataaaaagtgaaccagtacttttatttaaatgtcatctcataaargcaagcaacacagacaaacttttcccagagcaattctattataatgtgctactcacagatggcaaagccttctcttcttcccaagctcttgaccaagaaggctcacatttattcttttaaaagttagctattgttcactgaaaaaaaagaaatgtatggaagccattttttaagaggaaaacaaatttggagtacaccaaaaatcaagttgttcttaggctgcattccttttgagtttatctcttggtcttcgaatttgatggccagtggcctgtcagtggga

SEQ ID NO: 506090 - DNA, 639 bp, Homo sapiens
tttccctcgcgggataatggaaccacagactgggactccacacttgctttgtatctaggatacatctcagacacacatactcgacctctgaaaatgcccaactaccaaggcagtacttatagtccaattttcctatcttggctcatgcacgaggttgcctggttgccgcagggcttgcttttctccctgttacctccactgtctcctgaataacagtctcaggtttatctatggcttcagtggggagctgggacacccagagagagcgggccacctaaattsgttgggacacctctcccctcttggctggagtcccactctatgcaggcacagagatcctggatggaccaccaggttgtgagaaacacactcacccgtccaaacccaaagaatggacttagaggcacaaagaacagcaaaagtgagagtttttaataacagtcttgcaagatcaggtgtctggtgagcaggcacatccagggcagtcacaacaggtaatttatccctcaccacacaagtccctctcccagttcctcactggttgagaactatggggttaaaatcttcccaaatgttgcctaagtttcattattccccttgtaaggttataaaccgtccctttcctctcttaagtttcaa

SEQ ID NO: 506091 - DNA, 506 bp, Homo sapiens
taaagggctgctggaggacaataaaactaaggtattactaaaaaagaagcttcctttagttcatgattttaaaaaataacagttgctagtttttctttaaaaatgatasctttatgttcccatttgaccatttgaatttaatttagcgacagatccacactgtataacagattgcttggaagtgatgaatgatatactttctcacatttgtattgtagttgaatgcaaaaaaactcaatggaacaatttctgctatttaaatttttttcttattatttaaatttcctttagcaaaataaaggtcattacttttttaacccaaagaaaataacataaaatattttaggggcctattgtttaatattttaaaaattgacttatttttcaaacgttgtaatctaatagctatgtttgcaattgatgcttttaacatactcttgggttaccatggattgtttatgaaatagagccactatggactgtttaaactttaattaacagaacaa

SEQ ID NO: 506092 - DNA, 517 bp, Homo sapiens
tgcaatgggtggatggataaatgcattgaattaatatctgaaaattaacataagtgttatggtgattcatcgaagggaacaattatcttctacttgagtgatgagaaaaggctttaagaaacasattgcatcagaagctggcttgaagaatgtgaatgggcaggcacctatgatatgcattttgtaaaaggaagagtttcttggctttattttcttaatgctggcaccatatatggaaaaaagtgacttccttatggatgctgatcatgagtgagttctgccttttgctggttgaaagaaaggactttccccaaagttttcacatgtcccaagtaagctgctgactttgcttatttttaacagcttcattgaggtataattggcatgcaaaaatcaaacatatttaaagttgaataacttggtgaataaatctcagtcaagatggtgaacatatctatcaccccaaaagtttccttgtgctttttgtaacccttctctcctcatttctctcccactt

SEQ ID NO: 506093 - DNA, 597 bp, Homo sapiens
tagtcttttcccgtcggtttcattcccagggtacagattaaaatacagttccccctttaaaatacagttatatagaaaattctaaattcactactgagtttgttcctataacatctcaggttttcctaaggaggacgtgttacaaattccatcatctctgtaaatcacagatacttcctttaaccagcttttaagatgatattaaaaatttaaagatcctcaaacaaatgtccctgatctatgggattagacaggggtaggaatcgaatttctaaatttatctttggaaggaatccctcagatttaaataagaggataaaggtggtgggagaatgacttcacagaggacctgtatttctcaggcatcacaagatgacaatggatgatgggctatgctcagaactgagcatcttaagaatatagactccagctcaaatctctattctgccacctttatcaaggacaaacatgtgsaacatactcacatattcaaccatctataagcccaaagtggctgtaaggaagtaggctggttttaatggttaatattgataacacttcatttttacattttactagtattttttactaggatca

SEQ ID NO: 506094 - DNA, 597 bp, Homo sapiens
tagtcttttcccgtcggtttcattcccagggtacagattaaaatacagttccccctttaaaatacagttatatagaaaattctaaattcactactgagtttgttcctataacatctcaggttttcctaaggaggacgtgttacaaattccatcatctctgtaaatcacagatacttcctttaaccagcttttaagatgatattaaaaatttaaagatcctcaaacaaatgtccctgatctatgggattagacaggggtaggaatcgaatttctaaatttatctttggaaggaatccctcagatttaaataagaggataaaggtggtgggagaatgacttcacagaggacctgtatttctcaggcatcacaagatgacaatggatgatgggctatgctcagaactgagcatcttaagaatatagactccagctcaaatctctattctgccacctttatcaaggacaaacatgtggaacatactcacatattcaaccatctataagcccaaagtggctgtaaggaagtaggctggttttaatggttaatattgataacacttcattttyacattttactagtattttttactaggatca

SEQ ID NO: 506095 - DNA, 502 bp, Homo sapiens
ttctatgggggcataggacaggcactattatgcttataacccttgcactgatagtatgatctgagacagtatttgctgagaactgaatctaaatttcaggtgatagttcagcttctcctgcaattgaaaaagccagaattcttccattctggaaaccacttgaagcaggcagccagacaggttcctcagtagatgtagaggagcaacatgatcaatatggtaaatgtcaaatcaaaaatctaaaaagtcccagcaggctgggcacagtggctcatgcctataatcccagcactttgggaggccaagacggcagatcacctgaggttgggagttcaagaccagcctgaccaatatggaraaaccccgtctctactaaaaataaaaaaattagctgggcgtgatgatgcatgtctctaatcccagctacttggtaggctgaggcaggaaaattgcttgaacctgggaggcggaggttgcggtgagccaagatcgcgtcattgca

SEQ ID NO: 506096 - DNA, 502 bp, Homo sapiens
ttctatgggggcataggacaggcactattatgcttataacccttgcactgatagtatgatctgagacagtatttgctgagaactgaatctaaatttcaggtgatagttcagcttctcctgcaattgaaaaagccagaattcttccattctggaaaccacttgaagcaggcagccagacaggttcctcagtagatgtagaggagcaacatgatcaatatggtaaatgtcaaatcaaaaatctaaaaagtcccagcaggctgggcacagtggctcatgcctataatcccagcactttgggaggccaagacggcagatcacctgaggttgggagttcaagaccagcctgaccaatatggaaaaaccccgtctctactaaaaataaaaaaattagctgggcgtgatgrtgcatgtctctaatcccagctacttggtaggctgaggcaggaaaattgcttgaacctgggaggcggaggttgcggtgagccaagatcgcgtcattgca

SEQ ID NO: 506097 - DNA, 591 bp, Homo sapiens
aaaaagtgatcggtcaagtcttatgcagcatttctaaggttgagccaagcctatgtaacttatctcttgaaaatgttatctacaaaagtatttgacatctctgccattggagataaatggcataagagctggtagacttactagaagtaaataataatagctaacatttattgagcaattatgaactgccggatcctaaactaagtgctgctcaagcatattaatctatcctttaaccttcaggcagcctgatgaggcagctaccattaattattactctcatgtttttaagtgaggaaaccaagccttactgaggttatttaacttgcccagtatcataggctcctcattggtggaaacaagacttaaacttggaagtgcatgctcttagacattcatttcccagaatctgaataatcaacattctraaattatacagatccaaacaaaagtgtaataaaagccctgcacttagtgacactgttgaaatggaaacctcagaagcaagtccacctcattgggacaaaaatcagaggtgtcatcaaaatgcattgagctctcatgacactaagctcagaatagtacctgagg

SEQ ID NO: 506098 - DNA, 553 bp, Homo sapiens
gaacaagccacagcttctaagacagtctatgatagaaaacaagaactctgagaaaaccgaagtgctctcaggtcaccttctaacctccaggtcctgcctccacttttatccatggctttggtgctattcaagcacagaacctggctttataccaggtggacagggtgctgatgaagattggtactgggagatgctgtaaacattctgataccaccaggtgcctcatgcctgtctcgtcactcattcacactgctggtccagtcatatggctgagayttttcttgctttaaagcaaaattctcatccttagttctttaatggggaaggtagaggatgagggatgatctcaccactgtccctggtcagagggacattttgactggcttcatccactccctctttagtcccccaccttagctagccagggacattttctctaccatgccaacatctgtctttgagccgtccaggatcctatttcccacccaggtataaaggcagatagaatgagaggtgcttacaattgtgctgagccatggaaaggggcatctcc

SEQ ID NO: 506099 - DNA, 553 bp, Homo sapiens
ctgcagcaagaggtatttcagttagacacaaggaggcactggcctgggagactgaagggagtactagctatttctgggggaagagagggatccctccttctgtctgcgacaatctgcttctctggaaaaaggatggtggggatttctctctcctcgtccttcaccggctcctctctcatctctcacctacattttagtttcccctcctttcttgcccgcctccacttctgccttcgttgtctgagtgggcccggctcatcacagtgtygctgggagcctttgagcagggacacaattcagccagtgttcgatgagtcccacacctgctggaggtgaaggagtccaggccctgcccggagcacttccagccaggtggagacacaagacaggaaaaccggtgcctacacccaaggcagagtaagagccgcacactgagaagggaacaagccaagctgtggggctcagagaccacagcccggggggtcaaggaaggcctcggagaggtggcatttggagactgggcgagatttccatactgacagaaaccagtggg

SEQ ID NO: 506100 - DNA, 553 bp, Homo sapiens
ctgcagcaagaggtatttcagttagacacaaggaggcactggcctgggagactgaagggagtactagctatttctgggggaagagagggatccctccttctgtctgcgacaatctgcttctctggaaaaaggatggtggggatttctctctcctcgtccttcaccggctcctctctcatctctcacctacattttagtttcccctcctttcttgcccgcctccacttctgccttcgttgtctgagtgggcccggctcatcacagtgtcgctgggagcctttgagcagggacacaattcagccagtgttcgmtgagtcccacacctgctggaggtgaaggagtccaggccctgcccggagcacttccagccaggtggagacacaagacaggaaaaccggtgcctacacccaaggcagagtaagagccgcacactgagaagggaacaagccaagctgtggggctcagagaccacagcccggggggtcaaggaaggcctcggagaggtggcatttggagactgggcgagatttccatactgacagaaaccagtggg

SEQ ID NO: 506101 - DNA, 553 bp, Homo sapiens
ctgcagcaagaggtatttcagttagacacaaggaggcactggcctgggagactgaagggagtactagctatttctgggggaagagagggatccctccttctgtctgcgacaatctgcttctctggaaaaaggatggtggggatttctctctcctcgtccttcaccggctcctctctcatctctcacctacattttagtttcccctcctttcttgcccgcctccacttctgccttcgttgtctgagtgggcccggctcatcacagtgtcgctgggagcctttgagcagggacacaattcagccagtgttcgatgagtcccacacctgctggaggtgaaggagtccaggccctgcccggagcacttccagccaggtggagacacaagacaggaaaaccggtgcctacacccaaggcagagtaagagccgcacactgagaagggaacaagccaagctgtrgggctcagagaccacagcccggggggtcaaggaaggcctcggagaggtggcatttggagactgggcgagatttccatactgacagaaaccagtggg

SEQ ID NO: 506102 - DNA, 537 bp, Homo sapiens
cagcctgccaaagccttggccctcagatgaacatggatggtgagggctggaggtggctatgatcagtgtcccaggccatctggctgcttcaataagctcaaaatctggcccaagatgaaagagaaggggagacagaaaagatgcactttaaatattttttactcttaaaaaccatatgagtaatatgttttgtaagaaaatacaaaattttttwaaattaaaagcaaaacaaaatcttttcatcttaagccctgagctaattatcatgaacatcttgtacgtgtctcacaatctttcatctactcaaatttttttccccttaattacaaatttgagctcacatcttcattatcttttataatcagcttttaaaattcagcattaacaagacaatccttccatgttgataaatacatttccccggcgtaatttttaatggacagcgagtatgtccctcttacagaagtgacacaatttaataggggtgcaccaaaatttggctttgatcttagtatcaaattttgctctagagcttca

SEQ ID NO: 506103 - DNA, 635 bp, Homo sapiens
cggtctctccagccttgctctgtcctcaccccatgccgaccaatcttctcctctgtcagcccgaatcctgctgccagggtgaccaaccctcctggatggcccaggactgagggctttccccaaatgacacgaggacgagttgggcaccctgtctgcccctctccaactccaccctcaccttcaccaccctgctggcaccagatccctgcaaatcacccccacctggcttctccagggaggcacaaaagctttcctggctctgcagtgatgttttgatgcaacagacatttatgagactggttcctgagctgcacagaacaggcatgagtgaggctgcgtgccactggataggggctgcccatcactggcaggggtccagaggagatggagactcagggggcaggctggagggagggtagcacatctccyttcattaaaagccactttttgtcttagtacaaaatcccaacacccaattggtgcctaacgccctgctctaattccttctgaatgtatttctattcacatggaactggctttggaaaagtctgaatttaacaggattcaaacaggaaatatttttgctctgtctctaatcacagccttcgaccatgctttgccaaatctccttttct

SEQ ID NO: 506104 - DNA, 481 bp, Homo sapiens
ctctcctgaaccctggcattgactatgcatgggcactctttttaattttttaaatatataaataaatctgataggaaaattgaattgctttacagcgatttgagtccctgtgaagggcttttgggtactctgccagggtgtagatgacgtctgaagaggctacaagggaaccagagagaaaaaagcctgatgaaaggaacagagcctacatgatyggtgacaatatcaactggaataacatacatgtaattagacttggggggcatgaacttttttttttaataatggctaaattgttttaatccaaaataatctaggaattattagaattactaagaattaataagagagtttagcaaagttgctgaattaaacaatcaatatataaaaatcaaccagcctgggcaacatagcaagacccagtctctacaaaaaaatacaaaaaaattagctggacaaggtggtatgcacccgttgtccc

SEQ ID NO: 506105 - DNA, 624 bp, Homo sapiens
atgctcctatggctcaaggttgtaaaaataaaaataaaaataaaatccatgctcttgccaccagcataagaaagaaaacagtaaattatctttgatgtacttcctaatcccctcctcctaccttccctcaagaggcaaccactctcctgaaccctggcattgactatgcatgggcactctttttaattttttaaatatataaataaatctgataggaaaattgaattgctttacagcgatttgagtccctgtgaagggcttttgggtactctgccagggtgtagatgacgtctgaagaggctacaagggaaccagagagaaaaaagcctgatgaaaggaacagagcctacatgatcggtgacaatatcaactggaataacatacatgtaattagacytggggggcatgaacttttttttttaataatggctaaattgttttaatccaaaataatctaggaattattagaattactaagaattaataagagagtttagcaaagttgctgaattaaacaatcaatatataaaaatcaaccagcctgggcaacatagcaagacccagtctctacaaaaaaatacaaaaaaattagctggacaaggtggtatgcacccgttgtcccag

SEQ ID NO: 506106 - DNA, 551 bp, Homo sapiens
gggaaagagcactttaagtggaggagaggccctgggcttcgagcttgcccggagagttggggaagcaagcagaccagtgggctgcacagggcagggcaaagggcatggggagtgagccatggagtgaattaaaatgacttttttttttttaagagagagayagagcctcactctgtcacggtggcacaatcatagctcactgtagcctccaattcctgggctcaagcaatattcaagagtagctgggactacaggtgcatgccaccacaccaggctaattcttaaaattttttgatagaaacaagggtctcactatgttgcccaggctagtctcaaactcctgaattcaagtgattctcctgcctcggactcccaaagtgctgggattacaggctttaatgagatctctttgatcctcatatggagactaggtgggggagcaggaggggtgaacaagtggagaagtagatgcggagagctcggccagggtccgggcaggagacaatggtagcctggactgggatgggcgcagtggaggtgagagacgtgct

SEQ ID NO: 506107 - DNA, 629 bp, Homo sapiens
tgagggtggtcgccgggggctgggcacgcccccagtcctgcgccgccgggggctgcggcggtgctgcccaccccagagagccctcggcctggggctccggcgaagcaagtgccttcccggcgccggtcgccaggggggcgcgggagcagccagatgcgccgcagcgctgggaaggcggcgaaggacaggggctaggggagtgaggggcgctcggcaggcagcctcagccctggccctgcgcgggagaagggacagcagagaccgcccgtggggccccggggtgtagggagctgtccgttcagccctggcgcccgcctcgcccgcggcagagggcggcacagccggagccttggaaagacmggcagcgccggcagccgcgggcttctcggccactgcctcccggacgcacgggaagccgccccccgcgccgccgccgccgcactgccgccgtcgcagaggggtgaggaaatcaactcaccgagctctggtcgccgacaagaggagccccggacgccggctctcgccctgcccgaggctgcaaagttgtggactcggcccggctggctcgcagcctgcgcttcgcttcgggaactgggcaagtagcggggatgtggggaggagggagcggg

SEQ ID NO: 506108 - DNA, 656 bp, Homo sapiens
accgctggggcgcagcgcagtgcacgcctgagggtggtcgccgggggctgggcacgcccccagtcctgcgccgccgggggctgcggcggtgctgcccaccccagagagccctcggcctggggctccggcgaagcaagtgccttcccggcgccggtcgccaggggggcgcgggagcagccagatgcgccgcagcgctgggaaggcggcgaaggacaggggctaggggagtgaggggcgctcggcaggcagcctcagccctggccctgcgcgggagaagggacagcagagaccgcccgtggggccccggggtgtagggagctgtccgttcagccctggcgcccgcctcgcccgcggcagagggcggcacagccggagccttggaaagaccggcagcgccggcagccgcgggcttctcggccactgcctcccggacgcacgggaagccgccccccgcgccgccgccgccgcactgccgccgtcgcagaggggtgaggaaatcaactcaccgagctctggtcgccgacaagaggagccccggacgccggctctcgccctgcccgaggctgcaaagttgtggrctcggcccggctggctcgcagcctgcgcttcgcttcgggaactgggcaagtagcggggatgtggggaggagggagcgg

SEQ ID NO: 506109 - DNA, 611 bp, Homo sapiens
atgcttcctctgtctaattttttttgcttataatgatttaatacataaattatacctctatttcccattcttggtttcatgcattgttcttttgggggattgaataaacaccagagagataaacatataaatagatcctcagatatccaccatcaaatttaaatggttaaccaataattaagagttccaaacggaactcagaagccttgctcggtaagtcaggaagagtctgggcaaccttgtgstctggggactttatgctttgtacctttattgttagatttgtacaccatttccttgaatgccaaatttaggcatccttcctaattaatgatcttttcaagcccttttcagaagccattggattttgattaggtcacaaaggaaggctttctctcttaggcacatagttttctgtatccttagcagttaattgagtagcagaataatggtttccttacagaaaggctcgcagactgcacagagaggttgatgcctctttagtcactgggaacttcagtgacattcaataatggttgataaatttaagcccagaattagagaccaagttaatgtatttggacatatctcaagctgatgtttcctaagca

SEQ ID NO: 506110 - DNA, 555 bp, Homo sapiens
aaatcctggccaatgagattaaatgcttgacagttttactttgaaagccagatttggtggactagaccatagaatttacataaaggagacccatgtaggaagaggaattgaaggaatccccgtcttatcaaagaaggctaaagcagagtcagaaatgagtgaagccgatagagatatgttcaaatttctgaattgaagaagtgttaggtaagttagatggagagtgattttaatgggctgtgaacttcactttttggccactctgaattcttgggtggtatggatgagatctaaaacttcctcctgctccagtgcacatcctgccccaggaggacctaggggttaagttgggagcccttggctggtcacggtgcaggctaatgcgacccacagcagaggctggggtggactacccggcctaggatgcctgaggaggagctgcaagagactcaactgtttgtagcaccactgagaaccctgaggaatgctgtcagtccaagtgcgttgctagctctgacaaagcwgagagagaacagattttgagttagattagca

SEQ ID NO: 506111 - DNA, 599 bp, Homo sapiens
aacagcatgggaaagacccgccctcatgattcaatcacctcccaacagcttcctcccatgacatgtgggaattgtgtgagttacaattaaagatgagatttgggtgggggccaaaccatatcacctctcctggggaagataatcccctgggtggccccaagtcagattrccaaataggtaatgattgatgcactggaaaaattgaggaaaccccaaatttcctttgataatatttattactaggatgtttaaaaaaatcaaagtagtcattaggggaaaaaaatcagactaaagtggactttcttacacttatttaattgcttagaattattgtaaaattttgattttacagtatatgtggaacacaatctttttagtgctttgatgtctctaagtgtcttaatctgaccctggttagccaatgccagccatgttctttcccttgagaatttttaaagacttaacaaaaattgtagttagtaggatgatggtgagtcctgatttaaaagaccacattgaactgaggccagagtttgcttcacaacaaggtaatattgcatgtcatctgaagtatggggaagcagaaacagccttgagag

SEQ ID NO: 506112 - DNA, 599 bp, Homo sapiens
aacagcatgggaaagacccgccctcatgattcaatcacctcccaacagcttcctcccatgacatgtgggaattgtgtgagttacaattaaagatgagatttgggtgggggccaaaccatatcacctctcctggggaagataatcccctgggtggccccaagtcagattgccaaataggtaatgattgatgcactggaaaaattgaggaaaccccaaatttcctttgataatatttattactaggatgtttaaaaaaatcaaagtagtcattaggggaaaaaaatcagactaaagtggactttcttacacttatttaattgcttagaattattgtaaaattttgattttacagtatatgtggaacacaatctttttagtgctttgatrtctctaagtgtcttaatctgaccctggttagccaatgccagccatgttctttcccttgagaatttttaaagacttaacaaaaattgtagttagtaggatgatggtgagtcctgatttaaaagaccacattgaactgaggccagagtttgcttcacaacaaggtaatattgcatgtcatctgaagtatggggaagcagaaacagccttgagag

SEQ ID NO: 506113 - DNA, 607 bp, Homo sapiens
gggagagaaaaacaatatcttaagtgttgagaatggatagtgacacattaatccacacaattgcattagtctttcttttctctttcatagtagcatattactttgatatattactttatgatatattaattttactttgtggtagtgcctttttcatttctttttcaaatcatscagtccttccactattaaaaatagactaagattaagccttgttggtttcagggaagaaagcataacttccaacacctggaggcaacaaagggccaagttcttatcctttgagcaattaagtagacttttctagatttataccagagacgatatgcttgaactttcaagtagaagagtgagttgggcccttaataaagttactttggagttaatttaaaaatatttcttaagtgcctactgtgtacaaccaggtgctgtaaatatctaaaacaaaagagccaaacctttgtggaccttgtattctactagggaaaggaagacagtgaatgtgataagcaagtacaatgttaggagatgtggtggatgctgcgatgttccacccaaaattcccttcacgaatggacttcctactccagctactaattgaagttga

SEQ ID NO: 506114 - DNA, 500 bp, Homo sapiens
gcatatctacaataggtgctttgaagtctttgactactaaattcaacatggaggcctatttagagtcagttttgggtgactgacaatttccataatctcccagccccaggcattatcacattcctggtttccttgcatgtcttactagcttgatatatcagaggacagggcctaaagctagtagataatagtcactgcagcctttctgagttctattgtgctctcctggtgatcattggcttattgttctggtaagaagttagctgacctggactcaaactacaagctctgctctcctgtgatatgcagcaactgacaaatccctaaatttttcagcttctgcagttgctttgtttcaggctggcctactgaagtctcccttatgtttgcataagttggtggtcagccaagtatttggaaagagtttatattcagattttggggttcatcctatctgtggttctcccatttctagggaaayttgccctactaatttccag

SEQ ID NO: 506115 - DNA, 461 bp, Homo sapiens
gataggcctgttctctcactccatcacatccaacacctggcaaggacagcttttggtatgctaaagaatttgggaaagatgctgttggtgtaggggcggggagactagaaacaagatctttccatgggcagagctcttcagagcttgataacaaagtttggtctgcagcctttgtcaaataattataaactctccagttgaaacagggaaatgtgggctggcgtggtggctcacacctgtaattccagcactctgggargctgaggcaggtggatcacttgaggtcaggagttcgagaccagcctggccaatatagtgaaaccccatctctactaaaaatacgaaaattagctgggtgtggtgatatgcacctatagtcccagctactcaggaggctgaggcaggagaattgcttgaacccagaaggtggaggttgcagtgggctgagatcatgccaacac

SEQ ID NO: 506116 - DNA, 382 bp, Homo sapiens
tggaattgtactttcagaatatctatgctatcagcctagcacagagttttaaatactgttgcaatacccaccacatcccacccagaggagccctggaatcttcatgagagatagcagtgctcttcttgtggagtttattaaggcttactgactgcttttaccctcagactattgggaaccaaaaatatttctgttgtctggaccatggaaaacaaagaccaggcaaaagagataggggtgaagtaagagatgagtgtaactttgacaggtatcactatcaatagtgacatctcaaatatttaggggaagcaccaccacatggttatcaacactattacatatgtgttattttrttatatttgaagactattatatgaagact

SEQ ID NO: 506117 - DNA, 567 bp, Homo sapiens
gtactttctttaaaaatatcaaggctcagggttcttactgcagtataaccagtccatcctcacagatataataagtatagaaaaatatgtatttatcatattggcatttgacattacaggagtaatagataataactatttaagaatgaaaattcgagattaggtatttctaggtgttagtttactggttgtattttatttgtaattttccatgtttcaaattgtcttcaatgtctgagtgtttaataatcataaaatcaacaacctttatgttaaaagagaataggattataataaaaataaataagcttcataatgttaagtatcaataatttctatattttgaaatatgattaatgcactgtaggtgttcttttaatgcatgtgttagtacacaagtaacataagcaattatttcagttttatcttttattgcaaatcacatgtgcatactataattacctattttcatgtagtattaagaagcattattaattaacacaaaatttgttttctgctartggtttttaacagatagcaaatgcattagttttcctctgtaaacaa

SEQ ID NO: 506118 - DNA, 524 bp, Homo sapiens
atgggcccatgcccagggtggggtcagggagataaagcagagagaaactgggctgggagcagagagtgccatgctctaccctggagacccaaggccaggccaccctgcagagctggtgcccagagcctccagcgtacaggagaggaggcaaacagaacctgacactcagcagcgcccggcagacgcttctggaatgaatgaccaaatcyacatggagagttgaaatgggctaggaacctcagggagacgggcagctcacagctcagcagggccgctccagtagagcaggccaatgccaggcctcctggcaaatttcccggggcccaggcacaactgtcacatcaggaaaggggcaggggtgaccagcccatcggccacgggggcacttcactgctcccacagaagctcggcacccacaggcctgggtgacacacgatccccatgcctggcatcacgatgcctgcccgccaagtccctccacccaccaggactgactccctttggtcagcgattccagatcacca

SEQ ID NO: 506119 - DNA, 551 bp, Homo sapiens
attaaccacaagtacaacctctctgcaaagcagtcacattggagctgcccagtttcaggtttcacagagacattttctaactgaaactgtttgcaaacctctgactcatcttagttccagaatagactcaaggctgacatcagtcatgctaagtcattaaaactttagaaaagggagatctgtgttagacaactagctcactatctacagaaaaataaagctggattactactttgtaccacataaatgctgaactccagatgaaataaagtcctaaatgtaaatggtaaaactatgaatagaacaaaatccaggaaactggcaatgtgacattgcctaacataggaggccaaaaacattttgacttcattaaaatgatgctatctggtcaatgaarggtgccataaacagttaccagatagagccaaactgggggaagatatttgtgttgtctaaaactgataagagattaatacctagctctacaatgaactcgtacaaattggcaagaaaaagacgcaagatccaatataaaaatggacgagggacgc

SEQ ID NO: 506120 - DNA, 621 bp, Homo sapiens
ccagaggcctcttttcatttcatactgtctttgtcccttttagtccaagctggcagtttttattccaatacaattctttgaaaaactttacagatttcctgtgactcttattgggtccatgccatttttcaaaagccaaatctacaaatcaattcaagataagcccttctctaccatgggcttctggtgaagaacaacatcttcagcttcttagaagctttatttgtttgatcaaaagaaactgtagcacacctaagaaaattttagggagccttttgtctagttgaacagtacgctgaggcaacaccttttatctttctgaggtcttaacaaaggatttaacagttacatccttacatccttggagtcttctttagaccatgttttcctggcaatgtcctggattttgtctttgccccatatcattccttaatttraacattatctgctatccaagaggctagacatttcgaaaccataaaatcctggttcctctttttaagctgtcctgctttagcttatctatttcttcttgcattttgctgtaagcagcaaatgaaaaccaggcagtatcttcaacattctgtatgaaaatctccttcgttagatcatccagctcat

SEQ ID NO: 506121 - DNA, 616 bp, Homo sapiens
gaaaatgccacagctttgagtccagtctggctataacttagaggttaaaaagaaaaatgaaaatataccattcattataaacaagctatcagaatgaaaggtctgacttctcattaacaagatacagttcttctatctaaactgtcaaaacagggttaaactgacactgtatattgatttattaatagggtaaaagtctgacatcatttgctcaccactttgaagaattatggtctgattaagtggatcatggttggccttgaaaggaaattttctaaaacaaatgtttttttttttattttaagctgatttaataaatagaaacaagaatttgaatgagaacacaagggttctctaggtaacttaataattgtaatgtccctgkggtggttgtgaagatgcccaacagtgaggctgggttgctgtctggggagcaggggcagcagaccccaaaagacctctcgagtgacttctccaaacccaacaagtttatctgtgttaaccagcaaagggccaaaccacacaaaatatgaaacacatcaagaatttgtggtcgtccttgcacagagactatggtaatcttctttatatcgttctaattttagtataagtgcgg

SEQ ID NO: 506122 - DNA, 636 bp, Homo sapiens
tgtaaaaaacactataaagaaaagccttttaaaatatccagaataaatattgacatctgagatgtattaaagattttttctttttcttttatttttacgtagtagcactggttttccctttcaccatctatgaatgcactttttggtttggatcactggacaaatgagtattgggatttcattctaatctcacattgattttagagatattgccaatcatatcaaatcacacgaggtttggtttgtctgttggtggtggtgttttctgtttttctgtgctcaaaaagacacagctatggaataataagggatgctacaggccagcatggcggtgcaytggcagaactatgcagaggtttgcacagaatcttcctgcacagtatatagctccagccagtgctactaaatcatcacttttttaatacaaaattcagccccaactgctttcaaagtagtaaaaataaatgctgaatcaacatcaggagatatttttgttgtcaaaaagcgaaagttaagggtaaagccaaatctacagagccaatagtgacagcttctactggtccaaattcgtaaaggggaattctggaggttctcctaaagtggaaagagaagaatagaaaacagcattacagtaaa

SEQ ID NO: 506123 - DNA, 614 bp, Homo sapiens
  misc_feature (1)...(614): n = A,T,C or G
tatgtaccaccatgcctgacctaagccttttttctsagtataggtctactgcttggagtttccacccatcttttttgcataaaccatacctgtaatactaccttcattgacccttctcaaagcattaagcttaacgaaagcacctcccttttgtaacacattcttgattccccagtcaatataatatttaattaaataacataaacgcagtgntaagtttactggacacaaatagatttgggatacacattttttgtttgtttgtttgtttttgagacagagttttgctctgtctcccaggctggagagcagtggcacaatcttggctcactgcaacctctacctcctgggttccagtgattcttatgcatcagcctcccatgtaactgggactgtaggtgcccaccaccacacctggctaatctttgtacttttggtagaggcaaagtttcgccatgttggccagcctagtcttgaactcctggcctcaagtgatctgcccacctctgccttccaaagtgtggagattacaggcatgagccactgggccgggcctacatttgacttttgaaattaaagacctcactgatgggtgctgaagagtacggtgaact

SEQ ID NO: 506124 - DNA, 614 bp, Homo sapiens
  misc_feature (1)...(614): n = A,T,C or G
tatgtaccaccatgcctgacctaagccttttttctgagtataggtctactgcttggagtttccacccatcttttttgcataaaccatacctgtaatactaccttcattgacccttctcaaagcattaagcttaacgaaagcacctcccttttgtaacacattcttgattccccagtcaatataatatttaattaaataacataaacgcagtgntaagtttactggacacaaatagatttgggatacacattttttgtttgtttgtttgtttttgagacagagttttgctctgtctcccaggctggagagcagtggcacaatcttggctcactgcaacctctacctcctgggttccagtgattcttatgcatcagcctcccatgtaactgggactgtaggtgcccaccaccacacctggctaatctttgtacttttggtagaggcaaagtttcgccatgttggccagcctagtcttgaactcctggcctcaagtgatctgcccayctctgccttccaaagtgtggagattacaggcatgagccactgggccgggcctacatttgacttttgaaattaaagacctcactgatgggtgctgaagagtacggtgaact

SEQ ID NO: 506125 - DNA, 442 bp, Homo sapiens
actgtttgaaatccatttggattcattgtgtctcatattgtaattctttaatgatcttatctttagttccaagaagacgtctgtgtcaaacgcaggccaatggctttatgaagaaaagccacataaaatggatttgctccatgaaaatggtcctcgtcctggtcttcatgaaaatgtatgcaaagcagttagtgacttctgcaagtgggttactacttttgtaagttagtggtaatayttaaacctacttttaaatgtcaagctcaaagttgcttttattaaaaaacagtattggataaaatctaagtcaaatcctcaaagtcgtaaaggaatcattttcttctattatgtataaatagaaatatttctggtagatgaaatttctggaaaggttgcaaacttgctgctaatttgaatgtttatgtttacatctcacatcatt

SEQ ID NO: 506126 - DNA, 442 bp, Homo sapiens
actgtttgaaatccatttggattcattgtgtctcatattgtaattctttaatgatcttatctttagttccaagaagacgtctgtgtcaaacgcaggccaatggctttatgaagaaaagccacataaaatggatttgctccatgaaaatggtcctcgtcctggtcttcatgaaaatgtatgcaaagcagttagtgacttctgcaagtgggttactacttttgtaagttagtggtaatatttaaacctacttttaaatgtcaagctcaaagttgcttttattaaaaaacagtattggataaaatctaagtcaaatcctcaaagtygtaaaggaatcattttcttctattatgtataaatagaaatatttctggtagatgaaatttctggaaaggttgcaaacttgctgctaatttgaatgtttatgtttacatctcacatcatt

SEQ ID NO: 506127 - DNA, 499 bp, Homo sapiens
actccgtcttaaaaaaatataaataaataaataaataaaaattagctgggcatgatggtgtgccccttcccacacaggaggctgaggtgggaggattgcttgagcctgggaaatcgaggctgcagtgagctgtcatcatgccaytgcactccagcatgggcaacaaagcaagatcctgtctcaaaaaaaaaaaaatctgacataaagagacttttgactcagttatcaaggtcttcccttgtgcgccttccaagaacctatatagttgcctattcctgttcctgagtctctgtagatgtctaaatacctgatgcttttcttggatttaaggtctttaggatttgcattccatgtccccacaaccatcttttgagtgttagttttagtcaatgtattttttttagtactttaaacatcaagctacttacttcattggcaagtgacttaaatataattcagattggtttaagagagaaaagggaagcatccagatatagta

SEQ ID NO: 506128 - DNA, 511 bp, Homo sapiens
actccgtcttaaaaaaatataaataaataaataaataaaaattagctgggcatgatggtgtgccccttcccacacaggaggctgaggtgggaggattgcttgagcctgggaaatcgaggctgcagtgagctgtcatcatgccattgcactccagcatgggcaacaaagcaagaycctgtctcaaaaaaaaaaaaatctgacataaagagacttttgactcagttatcaaggtcttcccttgtgcgccttccaagaacctatatagttgcctattcctgttcctgagtctctgtagatgtctaaatacctgatgcttttcttggatttaaggtctttaggatttgcattccatgtccccacaaccatcttttgagtgttagttttagtcaatgtattttttttagtactttaaacatcaagctacttacttcattggcaagtgacttaaatataattcagattggtttaagagagaaaagggaagcatccagatatagtaggaacttcaggc

SEQ ID NO: 506129 - DNA, 511 bp, Homo sapiens
actccgtcttaaaaaaatataaataaataaataaataaaaattagctgggcatgatggtgtgccccttcccacacaggaggctgaggtgggaggattgcttgagcctgggaaatcgaggctgcagtgagctgtcatcatgccattgcactccagcatgggcaacaaagcaagatcctgtctcaaaaaaaaaaaaatctgacataaagagacttttgactcagttatcaaggtcttcccttgtgckccttccaagaacctatatagttgcctattcctgttcctgagtctctgtagatgtctaaatacctgatgcttttcttggatttaaggtctttaggatttgcattccatgtccccacaaccatcttttgagtgttagttttagtcaatgtattttttttagtactttaaacatcaagctacttacttcattggcaagtgacttaaatataattcagattggtttaagagagaaaagggaagcatccagatatagtaggaacttcaggc

SEQ ID NO: 506130 - DNA, 511 bp, Homo sapiens
actccgtcttaaaaaaatataaataaataaataaataaaaattagctgggcatgatggtgtgccccttcccacacaggaggctgaggtgggaggattgcttgagcctgggaaatcgaggctgcagtgagctgtcatcatgccattgcactccagcatgggcaacaaagcaagatcctgtctcaaaaaaaaaaaaatctgacataaagagacttttgactcagttatcaaggtcttcccttgtgcgccttccaagaacctatatagttgcctattcctgttcctgagtctcygtagatgtctaaatacctgatgcttttcttggatttaaggtctttaggatttgcattccatgtccccacaaccatcttttgagtgttagttttagtcaatgtattttttttagtactttaaacatcaagctacttacttcattggcaagtgacttaaatataattcagattggtttaagagagaaaagggaagcatccagatatagtaggaacttcaggc

SEQ ID NO: 506131 - DNA, 645 bp, Homo sapiens
tggtgtcatgcctttacccccattgttatttggtttgcaggtgtagtctacactgagggcagttttcaagaagccacttaaaacactatgcaggaaaatctctagrgagattctgtgggtgagggagaaggttgacagtaagctggtaagcaaggtttaggactataatggttgtcaaaacactgtgttggttggtaaatagccactgctctgagcaattctgagtgactgctgtgctctggtggctccagccactctctacaagatcagcaactaaaggaaggtattgccattatgattaggggactctaggactccgttgttgcaatctggctggccatcttcctgattggttagtgtatatgctttactggttgttaaatattttaaatatccttcccctggatgagtaccacaaaataaggaatgtttaggggaaagtctgcagactttagggtgccctagggctcccaggaagcttgtttctttatgtgataatggggtagagatttctctaggattattttcctgatggaaaatgctgcattttttgcttttctcttattgaataacttacatagtaaaatgcacaaatctgatgtgtatagctcattaaaattttacatatgtactaacatatccacc

SEQ ID NO: 506132 - DNA, 645 bp, Homo sapiens
tggtgtcatgcctttacccccattgttatttggtttgcaggtgtagtctacactgagggcagttttcaagaagccacttaaaacactatgcaggaaaatctctagagagattctgtgggtgagggagaaggttgacagtaagctggtaagcaaggtttaggactataatggttgtcaaaacactgtgttggttggtaaatagccactgctctgagcaattctgagtgactgctgtgctctggtggctccagccactctctacaagatcagcaactaaaggaaggtattgccattatgattaggggactctaggactccgttgttgcaatctggctggccatcttcctgattggttagtgtatwtgctttactggttgttaaatattttaaatatccttcccctggatgagtaccacaaaataaggaatgtttaggggaaagtctgcagactttagggtgccctagggctcccaggaagcttgtttctttatgtgataatggggtagagatttctctaggattattttcctgatggaaaatgctgcattttttgcttttctcttattgaataacttacatagtaaaatgcacaaatctgatgtgtatagctcattaaaattttacatatgtactaacatatccacc

SEQ ID NO: 506133 - DNA, 645 bp, Homo sapiens
tggtgtcatgcctttacccccattgttatttggtttgcaggtgtagtctacactgagggcagttttcaagaagccacttaaaacactatgcaggaaaatctctagagagattctgtgggtgagggagaaggttgacagtaagctggtaagcaaggtttaggactataatggttgtcaaaacactgtgttggttggtaaatagccactgctctgagcaattctgagtgactgctgtgctctggtggctccagccactctctacaagatcagcaactaaaggaaggtattgccattatgattaggggactctaggactccgttgttgcaatctggctggccatcttcctgattggttagtgtatatgctttactggttgttaaatattttaaatatccttcccctggatgagtaccacaaaataaggaatgtttaggggaaagtctgcagactttagggtgccctagggctcccaggaagcttgtttctttatgtgataatggggkagagatttctctaggattattttcctgatggaaaatgctgcattttttgcttttctcttattgaataacttacatagtaaaatgcacaaatctgatgtgtatagctcattaaaattttacatatgtactaacatatccacc

SEQ ID NO: 506134 - DNA, 645 bp, Homo sapiens
tggtgtcatgcctttacccccattgttatttggtttgcaggtgtagtctacactgagggcagttttcaagaagccacttaaaacactatgcaggaaaatctctagagagattctgtgggtgagggagaaggttgacagtaagctggtaagcaaggtttaggactataatggttgtcaaaacactgtgttggttggtaaatagccactgctctgagcaattctgagtgactgctgtgctctggtggctccagccactctctacaagatcagcaactaaaggaaggtattgccattatgattaggggactctaggactccgttgttgcaatctggctggccatcttcctgattggttagtgtatatgctttactggttgttaaatattttaaatatccttcccctggatgagtaccacaaaataaggaatgtttaggggaaagtctgcagactttagggtgccctagggctcccaggaagcttgtttctttatgtgataatggggtagagatttctctaggattattttcctgatggaaaatgctgcattttttgcttttctcttattgaataacttayatagtaaaatgcacaaatctgatgtgtatagctcattaaaattttacatatgtactaacatatccacc

SEQ ID NO: 506135 - DNA, 605 bp, Homo sapiens
tggcttcccccagagcaaataatccaaggaagagagagtatgagagagagagaragaaagagagaaagagagacagtgtgagagagagctagccaagaccacccaagacagaagcctccgtcttttcataacctcacttcagtgacatttcatcatttctgcaattttctattcattacatgctggtcattaaggccaccgtatacttgaggggagggaaattaagttccacctctagaaagtaagaatatcaaagaattgtagacctatttttaaaaaccacaacggcagaactatgtggaatgttaattattatttctcttctgatgctttttaccaaatctactgtggctacataatcgtttaagacattaatttgtttttgtggttctcttatatttttccatttctcttttcgttttcttttttaggaagtagataataagactgttgcctctagggatttatgtggctgaggggaaaacagtactggcttacaagtgttcctggcttttgctttacaaaagcctaatcacttagaaaaacactgagtattttcgtagacactaagaagggtgggttatttgtggaaacaaccaacatat

SEQ ID NO: 506136 - DNA, 605 bp, Homo sapiens
tggcttcccccagagcaaataatccaaggaagagagagtatgagagagagagagagaaagagagaaagagagacagtgtgagagagagctagccaagaccacccaagacagaagcctccgtcttttcataacctcacttcagtgacatttcatcatttctgcaattttctattcattacatgctggtcattaaggccaccgtatacttgaggggagggaaattaagttccacctctagaaagtaagaatatcaaagaattgtagacctatttttaaaaaccacaacggcagaactatgtggaatgttaattattatttctcttctgatgctttttaccaaatctactgtggctacataatcgtttaagacattaatttgtttttgtggttctcttatatttttccatttctcttttcgttttctyttttaggaagtagataataagactgttgcctctagggatttatgtggctgaggggaaaacagtactggcttacaagtgttcctggcttttgctttacaaaagcctaatcacttagaaaaacactgagtattttcgtagacactaagaagggtgggttatttgtggaaacaaccaacatat

SEQ ID NO: 506137 - DNA, 605 bp, Homo sapiens
tggcttcccccagagcaaataatccaaggaagagagagtatgagagagagagagagaaagagagaaagagagacagtgtgagagagagctagccaagaccacccaagacagaagcctccgtcttttcataacctcacttcagtgacatttcatcatttctgcaattttctattcattacatgctggtcattaaggccaccgtatacttgaggggagggaaattaagttccacctctagaaagtaagaatatcaaagaattgtagacctatttttaaaaaccacaacggcagaactatgtggaatgttaattattatttctcttctgatgctttttaccaaatctactgtggctacataatcgtttaagacattaatttgtttttgtggttctcttatatttttccatttctcttttcgttttcttttttaggaagtagataatmagactgttgcctctagggatttatgtggctgaggggaaaacagtactggcttacaagtgttcctggcttttgctttacaaaagcctaatcacttagaaaaacactgagtattttcgtagacactaagaagggtgggttatttgtggaaacaaccaacatat

SEQ ID NO: 506138 - DNA, 633 bp, Homo sapiens
gttttctatgtctgttggcttctcttccatataggcagtgtatttttgcaatctattgaggataccaaacaattctgaaaatgtttggctcatgcactatatatttttttaagtttactcttactgtgaatcttaaggataacagtcctaggcaagttttaaaatttatccttgaaacaagcaatccatgttgtggacaaagtcaacatgtacaccttccacccaaatgtctggaccttggcatgctcatcttgttccagggtgactctgcagtgctgagatgggatattttaccctggctctaattcctttcaacctgataatctgaacaaatgagatacaacaaaaaagtatatagttgtaatagtagagaaaaatatagtaattcctcaatatccwtgagggatttgttacagaacccctcacagatagcaaaattctcagatgctcaagttcctgatataaaatggccatagtatttgtgtataacctatgtatatcctcccatatactttcaatctctctggattacatataatacctagtgcaaagtaaatactatgtaaatagtagttttgtattatttagggaaaaatgacaaggagaaaaatctgcacatttcactacagacac

SEQ ID NO: 506139 - DNA, 584 bp, Homo sapiens
tctgggacattccaccaaaataccctcaccccagaggagaggcctaactcatttttggaaattgcaaaggtggatgaaacaggcctcaagagcaagagaaattttctgtttttctctctctctctctgcccctcctcctttctctctctctctgagtattattttaaaaatggatgtcatttttgtcttattcataacttatctatgtttgttttactataaatgtcttaaattacttgccatcaagttggggttatgttctaagaagattgagaaagtgtttttgttttgttttttgagacagagtcttgctctattgctcaggctggagtgcaggggtgtgatcacagcacactgcaacctccacctctggggttcaagcaattctcctgcctcagccgcccaagtagctgggaccacaggtgcacaccaccactaatttttgtagttttagtagagacggaatttcaccatgttggccaggctggtcctgaacatctggactcaagtgacctgyccacttgggcctcccaaagtgctgggattacaggcatgagccaccctgctcagcccagagtgctcca

SEQ ID NO: 506140 - DNA, 638 bp, Homo sapiens
ctgaagtaatcaatatgccaaatatataaaatatatttatataagatatacagaaataaagatagttgtagatctacatatacacagtcagatacatatacatagaaatataagaagctacaaaaaataaattrgttatctagatcgaggatcttcaccatttcaatttccacacaaacactgtcatgtcaagaaagttttatatttttctagcaaaaactcattcagatagagaaacgctttcataaatgtttcacaagccctcgtctcaattcaatccttttctcatggtcatgaaagcctgtaagcaaatggatatgaaaagttgtttattttgtcccatggacagtttcctgctattctaaaaaagctttgaccagttctcctttataccccatcacattaatcaaaaatcctagattacctatatcttctctgtgctggtgacctgctccctgcttggagtcagtgccaaattttacttttctgcctcaacatcgtgaaaatgacttcagtctggtaacctacacttgacttcactccttggagtactgtttaacattttgaacctgaataacaacctccacccattggaaggttgttcttatattttttagttttaaatcgggggtaagggt

SEQ ID NO: 506141 - DNA, 504 bp, Homo sapiens
tatgttgcccagactggtctcaaactcctggtctcaagtgatcctcctgcctcagcctcccaaagtgctggattacaggcatgagccactgcatatagccctcattatggttttatattttgcgtttcaatatttaatccatctgggattcattttggtaccttatatattgtgtcaatttgattttctgttttcccacagatttagatggtagttttaaccagttgttgagtaattcatttttcctttgatgatttgagatgctagcttatcctgtattaatattttatatctttttaaggctgtttatgtaaagttattaatgtcctggtatgaaataaaacattgagcattctttgatttcctccttttccttgctcagttgacttactacccttatttttattatgctctaataattctttacattatttacactctcttgacatttgtattaggttttataactargttttgagtttgttctttttattaatttctaag

SEQ ID NO: 506142 - DNA, 493 bp, Homo sapiens
tattttcacttcaaaatatcagaaaagataaatgatttctggtctttgtttatctttgtatgtccaagaataggtctttctgttgtttatatacattagaaataataggaatgagtagagaatttgaggactttttgttgcaggggatgacgggaatgatacctggaaaatatcccttttctgggaaacaagattttgttcatctccctacatgtggcttgtaggatttttctttcccattaaaattcaaaggttggccaagttaagtcatttcattaattttrcctcatacttgataaacttttgaaatctaaagatctgaatctccctttggttgaggtcaaaggttttctgtagtttatgttagctttttgtacgtttgctttattttcttctggaatttctaatatacatatcatttcctggaactgcttttcatgtcccttttctttcatcttattaatctttgcataattgagttataggataacct

SEQ ID NO: 506143 - DNA, 573 bp, Homo sapiens
gtttcataaaagccatagagtgtcagtgtctggcatatatgtgagttatttttttgtggttttgttacttcataatctttgatgtgcttttttttttatataaagggtcttagaacccatctcaggaaatttcatttccagaagaagtattgggacaagtttgtagcaccatcaaacatatacatggcttgatggatggccgcccccatcctcactactctcctccacaaacacacagagagatcctataggctaagtgctctccatgtattagctcacttagtatctgccacatctctagagaggacatttcaacactgttatagatgaagaaacagcttgaaaaggttttggaccccagtcccttgtatacccacatacccaccatgtggtctgctaaggaagtcaagaactgcagcatagagaatcctaaagtattgatgtaatcctgtgtaatttaccaatatatttttaaagcctcattgtgatcctttttttaattatttgaggaaaarttgttggtgaggttgaatggagcttgcctgtaatcattcttgaattcgtaatagcatg

SEQ ID NO: 506144 - DNA, 503 bp, Homo sapiens
caaccaagactgcatgtcttgcaaaatagctgatccttagaactttacctttgctgttagttaactggatgcctcttaaagatgtgattaatactaaagacttgtctgtgtacatttcatttataagggaggaaggaataaaagagttgcaaatagaagatatcggacttgccttgatttctttttcactcttgcttatgagattatttaagtctaagttaaagttttagtytaaagggacctccaaattatagatgataaacaatttgagtctcttgattgaaaagtatcagagcagggcacaatgatttataatctgattaaagagagaaaaatgtgttactactgtctgctcagatatttcaggtttggattgctgagtggtatcacagatatttacaggttaatcattggattaaataccctatccttgtcccagtaattctttaggtcttgttttgactatgatgcttcttttgtttttttaaacttgagacttggca

SEQ ID NO: 506145 - DNA, 589 bp, Homo sapiens
catccacctcaccatttgtttgcaattatatatctggagtaagtgatgtttgggattggttttgcatgagtagaaatgttgtgttctggtaagaattgggagcttgtgtctggaatcagtaaactttgcaagtgagggaaacagggacactgaagcattgctacctgtgcagatcacagatctacctgttgtagatgcagaaggtagygtgcaagtggactacaaatcaaactttttgtttttgtcaaaggtcatagaaagccacagtgaagggaatgcttatttgcggaagagctattttgtgttaccaaaacccttttgtatgatggatttattagtcttctgctactcaaatataatagcttagcgtccctaaatttccataccctttctcaaagggtctgctctcacagctctgtctgagcagcacatatgtcctttccttctgaaccaataagatgcttggatcctggaatttggacctgaaacccagagaatgtcctcagtctcagatgggtaatatcagggcaatggggtggctatatcagaattcagttgtgtgtatgtggagatactgagcaggaaaagt

SEQ ID NO: 506146 - DNA, 562 bp, Homo sapiens
tatatctggagtaagtgatgtttgggattggttttgcatgagtagaaatgttgtgttctggtaagaattgggagcttgtgtctggaatcagtaaactttgcaagtgagggaaacagggacactgaagcattgctacctgtgcagatcacagatctacctgttgtagatgcagaaggtagcgtgcaagtggactacaaatcaaactttttgtttttgtcaaaggtcatagaaagccayagtgaagggaatgcttatttgcggaagagctattttgtgttaccaaaacccttttgtatgatggatttattagtcttctgctactcaaatataatagcttagcgtccctaaatttccataccctttctcaaagggtctgctctcacagctctgtctgagcagcacatatgtcctttccttctgaaccaataagatgcttggatcctggaatttggacctgaaacccagagaatgtcctcagtctcagatgggtaatatcagggcaatggggtggctatatcagaattcagttgtgtgtatgtggagatactgagcaggaaaagtc

SEQ ID NO: 506147 - DNA, 520 bp, Homo sapiens
gatgggggaaggcctagaggtgagctcaggtaaaagcagccatttgtgggtgaaataaaatttagtctagtagtatcttagtttggaagtcaaaagatctgaaagaacatgaggtacgaggatgacagtgtgattgtgtgtacaaagcattggctaaagaatgctttgaagaagagccctggctccagtctgctttggtaatgtactcaacaactctgggcttcaattccttcaacccatcaaaatggggttagtctagatcaagggtcagtgaattttttctatacayggccagacagaaaatattttaggatttgtgggccataccctctctgatgcagcaactgaactctgccattgtagtatcaaaatagccaaagatactatgtaaatgaatgggcttagctatgtcccaataaaacttcatttacagaaacaggtggtggacagaacttggcccagcatcttaaatcagcagtccccaacctttttggcaccagggacgggtttcctggaagaa

SEQ ID NO: 506148 - DNA, 551 bp, Homo sapiens
tgcaagattttctggcaccaaaacacttgcccatgccatctgatcctgctgtcttgttggttctgtgtttgcaaatctagcaagctaaacccactgaattgctgatctagagaagtttttaaagtgcccatctttcattccctttctgttacttcttatagagatttatttcactcattattctttcctgtaccttggtggctagttttgctttgagtgcaaattagagagtattttccccctctggcttccatttttaatcactcaatgagagcatatgtcagaaatattccgtttttaaacttcaccaaagaagcagtgattttggatgcrtgtaaaagaggagaaaaaagtaagaataatcagaagattctttacaatgtgagaatttgattagatatagttttgtcctcactttccctttgaaaggctaaaactttgctgcaattttaagattatttaccccttttcattttttttctttaatgtctaggctaaaatttcctcttgctctcatatttgaatatggattcctactttaggaaaatcac

SEQ ID NO: 506149 - DNA, 621 bp, Homo sapiens
tcttggctcctcatacccaacgccacttttcgcacatgggctatgttattcattttagttctgtaacattttttaaaaatttttatttatatttttattttgggggtccatgtgcaggatgtgcaggtttgttacataggtcaatgtgcgccatggtggtttgctgcacccatcaacccatcgcctaggtattaagcccaacatgcattagctatttttcctgaagctcwccctccctcaaccccacaccccatgtgtgttgttcctctccctgtgtccatgtgttctcattgttcagctcccacctataagtgagaacatgtggtatttggttttctgttcctgcattaatttactaatgataatggcttccagctccatccgtgtccctacaaaggacatgatctaattcctttttatggctacatagtattccagggtgtatatgttaatattaaagggcatacacgatgtctgtttaatttctctaccattctgttccagaacttggcaggaggaggtattacagagactatttgatggtggtcatggaactgtaaaggggacagtactgtcaaaatcctagcaatttctctaaggcagcaggctgtttctaagcca

SEQ ID NO: 506150 - DNA, 460 bp, Homo sapiens
tgctttaacttatacacaacccacctttctcaaagtaaacagagttggcctgggggtcagtgcaatttagtaccttttcttggtcgttgctctgggcctgcaaagcatttgtgactctggctgactccaaagataagtaagacctgggctctctccttctgaattccacaaccttttaagggaaacatataggcacaccaaggctctgacactagatggactataaggttgtgatagggtgaaagcagcatggcctgggaggatggaggaggagcccatttgttcaatcgtcctgcactttggagctccaggagacacarcaacagtgacttgacagtcttcttagaggcttgctttggaactggcttctacaaagtgtctacactgggtgtgaaaccatgtggaggactaggtaacaggtggctcgttccctttccctttgtctttgctcttcagtttt

SEQ ID NO: 506151 - DNA, 460 bp, Homo sapiens
tgctttaacttatacacaacccacctttctcaaagtaaacagagttggcctgggggtcagtgcaatttagtaccttttcttggtcgttgctctgggcctgcaaagcatttgtgactctggctgactccaaagataagtaagacctgggctctctccttctgaattccacaaccttttaagggaaacatataggcacaccaaggctctgacactagatggactataaggttgtgatagggtgaaagcagcatggcctgggaggatggaggaggagcccatttgttcaatcgtcctgcactttggagctccaggagacacagcaacagtgacttgacagtcttcttagaggcttgctttggaactggcttctacaaagtgtctacactgggtgtgaaaccatgtggaggactaggtaacaggtggctcgttccytttccctttgtctttgctcttcagtttt

SEQ ID NO: 506152 - DNA, 726 bp, Homo sapiens
tgtcactgtattttccacccccttcttcttggaaattattaatcctttcatgtttctgcccttacactattcttggtttcctgctaatcttccaagtcttctgaagctttccccatgtctcttgatcccttcctcatgccccgtcttacccaaggttcagtccttggtcctccatgcttcttgctggacaccaccatgtttagaggtcaactctgttctcatggctgcaaacacgagggctgatgactcacagatttatggctcatgtcctgtcttttgctcaaggtttattcccatatctctgactgcccactggtcattttcacttgaaagtcttcccatcacctcagactcaaccaacagtctctaattgagctcatcatctcccctacaaaaccagttccttttcttatttccttgttttttccatggtgcccatgtctcatggtcattcccactcaaagctttgaagtcatctctaatgtttcttttgcgtttatacttggttgccgcatagcctttttcattgtgcctgataatcatcaagttctactgatttttttccccaagcctctcttacttccttgagtttcttcccactttctaatttgggttctcatcatctcaggcacaggtcgttttcagccccttcctggctaaactgcctgactccagcctcccgccctccaatctgatctcayactctcaattggtgcgtttttctta

SEQ ID NO: 506153 - DNA, 434 bp, Homo sapiens
ccagctgttattcttccataaatcttatagtgctgaaaagattgctgaactcctaggagtttttagcaaattcctactgattcatgttttgactgactatagtgaatgctgctgaatctctttctgatctctgactcacccaattactaaagctaaagctcaagttacttgaaggtaaattgttataaygtaacaatgccaatgatctagcaggctctgtgcctgtttcggactgtcctaggccagtcacatctacatgcatcttctttggagaaaggaaccaggaaagaatctttcaattcagttatacccagatgttggggaagaagatgttggaagaagataaaataacaaagcaaattaactcaagaggaaaaagagaggctgaaaaaaatgtcatttagtttttcaaagtctatttttatttaaaaagg

SEQ ID NO: 506154 - DNA, 434 bp, Homo sapiens
ccagctgttattcttccataaatcttatagtgctgaaaagattgctgaactcctaggagtttttagcaaattcctactgattcatgttttgactgactatagtgaatgctgctgaatctctttctgatctctgactcacccaattactaaagctaaagctcaagttacttgaaggtaaattgttataacgtaacaatgccaatgatctagcaggctctgtgcctgtttyggactgtcctaggccagtcacatctacatgcatcttctttggagaaaggaaccaggaaagaatctttcaattcagttatacccagatgttggggaagaagatgttggaagaagataaaataacaaagcaaattaactcaagaggaaaaagagaggctgaaaaaaatgtcatttagtttttcaaagtctatttttatttaaaaagg

SEQ ID NO: 506155 - DNA, 434 bp, Homo sapiens
ccagctgttattcttccataaatcttatagtgctgaaaagattgctgaactcctaggagtttttagcaaattcctactgattcatgttttgactgactatagtgaatgctgctgaatctctttctgatctctgactcacccaattactaaagctaaagctcaagttacttgaaggtaaattgttataacgtaacaatgccaatgatctagcaggctctgtgcctgtttcggactgtcctaggccagtcacatctacatgcaycttctttggagaaaggaaccaggaaagaatctttcaattcagttatacccagatgttggggaagaagatgttggaagaagataaaataacaaagcaaattaactcaagaggaaaaagagaggctgaaaaaaatgtcatttagtttttcaaagtctatttttatttaaaaagg

SEQ ID NO: 506156 - DNA, 608 bp, Homo sapiens
tggctgagggaggacaatcccaccaaagtatagcggacaccagcagyctctctaggctcccaacagtcctaaggctgaagagactgtgaacaggtctgcacaaagcctacaagcaaagaaagtcataagccttaggtttccctgcaatgactttctgcagtaggtggaggaagggaagaaaaaacctatctccatggaaaaaccaccttataagtctttctataaattgcagtagaacaaaggaaaagtatatgctcctgctgattaaccatttctttcagagggatgtggaagagtaggaaacagtattgtaataaaatcaaaaccttatttattctgcaaaggttacaaatccatttgacattagataattccttaatgaggtggtcaaaacaaaaacaagttggttaaattactgttctaattttcaaaagaatgctttcagtgaaaagatttctttatgaacacataatgaggttggtgttttgttacttggttaatacaactgaaagagcacaccagaagattctgtacacccacatcaatggtcgctgcaatggcccaggatgaccacagtgtgttccaatcatcatctcctccctacccaa

SEQ ID NO: 506157 - DNA, 528 bp, Homo sapiens
aggctggctgagggaggacaatcccaccaaagtatagcggacaccagcagtctctctaggctcccaacagtcctaaggctgaagagactgtgarcaggtctgcacaaagcctacaagcaaagaaagtcataagccttaggtttccctgcaatgactttctgcagtaggtggaggaagggaagaaaaaacctatctccatggaaaaaccaccttataagtctttctataaattgcagtagaacaaaggaaaagtatatgctcctgctgattaaccatttctttcagagggatgtggaagagtaggaaacagtattgtaataaaatcaaaaccttatttattctgcaaaggttacaaatccatttgacattagataattccttaatgaggtggtcaaaacaaaaacaagttggttaaattactgttctaattttcaaaagaatgctttcagtgaaaagatttctttatgaacacataatgaggttggtgttttgttacttggttaatacaactgaaagagcacaccagaa

SEQ ID NO: 506158 - DNA, 479 bp, Homo sapiens
tatcatatttagtcatcacttaaatccaatgaggtagtttttattgttctgatttcacagataaggaaattgagataccaagaggctaaataacttactatatgtatctgagtccaaagccagtgatcttttcaataaatccaatatgaaataaagaaacattgcccaggaagaaatatgaccaagtggcaagttccatcagtagayaaagtgaggacacatgaaagactaaccaaggaggaaggcagaaaaagggaaaggacccagactgtgggaacaaagcctgcgtatgtgtgggaagcttggcaaaagctgttatgcagaggatattttgaaaaagtaaaacatgtagaaagaagacacaaatagataattttaactgtttaaagaagattacatcagtctaacatttagccacttttgaacctaaagaggacagtcaaaatggaaacatattttatttctagaaaaattttctc

SEQ ID NO: 506159 - DNA, 578 bp, Homo sapiens
tactcatatgtctgagctatgtgtcctcagcgattagaaaatcggaagtttgcctgtcatccgggcactttgggaggccaacgcgggcagatcacttgaggtcaggagtttgagatcagcctggccaacatggtgaaactctgtctctactaaaaatacaaaaattagccaggcgtggtggtgcatgcctgtgatctctgggaggctgaggcagtaaaatcacttgaacccgggakgcggaggttgcagtgagtgaagatcacgccactgcactccagcctggtagacagagagagactctgtctcaaaaaaaaaaaaaaagaatactctgtcaagtggaaatgatgcagatttaaaatgtatacaaatcgatcttatgattacaaatagaagaaaagcagatgcatgggggaaagaaagctagaggaaacttggcctaatacagagattgaggtcatgggacttcttgttggtttttttcttctttgtctattttccaaaatttaagtcatgttatttatgttacctttattcaaattatcaataaaaatatatcgaattgagttgttctccacagc

SEQ ID NO: 506160 - DNA, 555 bp, Homo sapiens
tagctaattgcatgagggccgcctcttgtgctgaacatgaaaaggaaacctgtaatttattgcaacagaccataccatttctgctgtacaactgtcttttctgtcatgtcaatgagtggatttctcatcgtacattggcagctcaaagactggaaaacagcattagctggagacagagaaaaaaaaaaaagagtttcagaatctcttcatgtactttacacagagctcaattaaggaataaactggaaacagaatttccctttgccatctgccaggggcatttttttttctattgtttatatgtagttctttgattcaactatactgacttactaagatacaagcacatgttacgtgtgacattcagtataagattagtttctgttragcaatcatctttgcatgcccaaggaagtggctgaaggagatcccccactcaaagtagagctgggaccactctatcctctgcaccccatcttccccatgagcctttcgtgatcttgagcatctcaagagttcatctaagcataaaataggcatgaaataactcagtct

SEQ ID NO: 506161 - DNA, 491 bp, Homo sapiens
tccatcacaaaagataggaataaaccagccagaattttagtgtgtggtaaagtacattttactcatatgactctatagaagaaagaaatctacatggggcccaaaccctcattttggggatgataaaactgagcccctgcccacccccaagaaggtaatcagctttcctaggagcaaggaggagcagccaaacccctggcatctaggccaagaccctctcctttctccattgttatccaaacacccagccatgtttcccaggrcgcaggccttcagctcaccacagggtccctgaggctgccagattgttgatttcacaatctatgggacagtcagcatgaacgtgaagaaaaaagaatcgataaaagaaatgaaatgattgggaacattcaaagccagcagcaggagaaactcaacatgagcaatcatccttcaaataacacttcctcacagactaaaagtggcagcaagtgaagttggattcaggccca

SEQ ID NO: 506162 - DNA, 491 bp, Homo sapiens
tccatcacaaaagataggaataaaccagccagaattttagtgtgtggtaaagtacattttactcatatgactctatagaagaaagaaatctacatggggcccaaaccctcattttggggatgataaaactgagcccctgcccacccccaagaaggtaatcagctttcctaggagcaaggaggagcagccaaacccctggcatctaggccaagaccctctcctttctccattgttatccaaacacccagccatgtttcccagggcgcaggccttcagctcaccacagggtccctgaggctgccagattgttgatttcacaatctatgggacagtcagcatgaacgtgaagaaaaaagaatcgataaaagaaaygaaatgattgggaacattcaaagccagcagcaggagaaactcaacatgagcaatcatccttcaaataacacttcctcacagactaaaagtggcagcaagtgaagttggattcaggccca

SEQ ID NO: 506163 - DNA, 491 bp, Homo sapiens
tccatcacaaaagataggaataaaccagccagaattttagtgtgtggtaaagtacattttactcatatgactctatagaagaaagaaatctacatggggcccaaaccctcattttggggatgataaaactgagcccctgcccacccccaagaaggtaatcagctttcctaggagcaaggaggagcagccaaacccctggcatctaggccaagaccctctcctttctccattgttatccaaacacccagccatgtttcccagggcgcaggccttcagctcaccacagggtccctgaggctgccagattgttgatttcacaatctatgggacagtcagcatgaacgtgaagaaaaaagaatcgataaaagaaatgaaatgattgggaacattcaaagccarcagcaggagaaactcaacatgagcaatcatccttcaaataacacttcctcacagactaaaagtggcagcaagtgaagttggattcaggccca

SEQ ID NO: 506164 - DNA, 189 bp, Homo sapiens
tgtgttctggataatagtaatggtagcctttgggttcaaagagaaaatgctggacttcataaaatccctttatgaactaagttgaagtctgatatttgaagaactgcattaaatagggctagaagaagtagctgcattcataacactgagwcattcataacactgcattcataacactgagcattcaca

SEQ ID NO: 506165 - DNA, 657 bp, Homo sapiens
ttccaacgtttttaggtgtgtttgacatccctagagtaaaccaatggagggcactgtgattccaagctgtggcccagatcacagacccaccttcagagaaccagcccctgagccgggagcaaggggcagccatcacagcatgactctagagcagtgaagacagtwacacagcaggatcctaaatgacatggtgtgagcaggctgaagtgtgaagacaagttggtactcacctggatggtcacactcatggactctagcgcaggtttgggtacattcagggggcctagtaccacagggaactggagggtaaatcactgatgcaccacaatggcaggttaattcatcaaaacctggtggagcagcaggtaaaacaaaagaatcctttctgagtttgggatgtgcaagtacatactaacacacacaaacacacacatttttgcttgtatttttagaggagaatttatgggggtgctacttttttcaaaagaggtttttattttattaaacttttattttattaaagctaagctggtgaaaaaggcatgaacagatatgaagtttcatttattactatgaccctgacaacttcccaatacttttcccaacatatttctagactggagattatattaatgactgagtttttaatattataat

SEQ ID NO: 506166 - DNA, 407 bp, Homo sapiens
tgagccactacacccggcctatatgcaattttttcccccgttctaaaactcatttgttcatttaataaagactgatttgataaattaataaagattcagaaaacacaataaatatttgtagaatcaatgaactggtaaagaaaccctggaaactggaagcttttgctagtaggcttttytttgctaagtttctgctcaaacagaacaaaggctttttacagaggtaatgaatagaaagctgtgagcaaaagaatcaagggtcagaacaggtaacaataaaaaaattgagttcctgatgaaaaaatctgagtaaatactaaaaagctctcctaggcacgagagacagaaatatgagcaggtgacagaagaattaggtagagtcacagctggttaaataatattaagga

SEQ ID NO: 506167 - DNA, 651 bp, Homo sapiens
tagcaggcactgtcagtgtcccacccacactgtttaccactccccattcttgtgcatacctgcggcctccctgtgcaacccttgcaatcctttgcccggaggctttctctaggagcccagagacatgaaaggagctagccgatagtgccagggagttaatggtctctcttccagcagccctcaatcagcgactgttgggagttgctggatatataccccaattccttcacctctcagtggggataactctgccatgtgtgccacacagtgtcccagccatccctggttggattgaggcccagtttccccagtggtaacctcagcgatgcatacattattagttcccttccctgccttccttattcccactctcctgcaggtgtttcgtgggattgcctcccagaaaatgatttggaatctaatgtgcttttctcatggtctgcccctgagtccaacctaagacaataccacatccttctggaaaattattattctgctgaggtttgccaaaatctacttctgttgcttgcaacccaaggaccctatcaaaattcatagtggtctggagttgtgwcatgttgcaccaggctgtgataatctgatttttctgaaggccatcagagctctggaacggaagggggtatcaagaga

SEQ ID NO: 506168 - DNA, 585 bp, Homo sapiens
tggtcagctatcttctccacagacttctccaaatgtttcaacttctttagttcaacctcttcctgtggactgttctaaaatgtttaagaagaaaataaagccaatagtcaaaaagaacaggctgggcatggtggctcatgcctgtaatcccagcactttgggaggccgagatgggcagatcatttgaggtcaggagttcaagaccagcctggccaacatggtgaaacactgtctctactaaaaaaacaaaaaaattagccaggcatgctggcgtgcacctgtagtcctagctactcgggaggctgaggcaggagtatagcttgaacctgggaggtggaggtttgtagtgagctgagatcgtgcacctgtactccagccagggtgacagagcgagactgtctcaaaaaaaaaaaagaaaaaagaaaaagcaatcaacaagaacagcagcmtctgtcaggaaaaatacctgaccacacctgcatgaagccactcacctagaaataacagttttaactctgttgcttcttggaaatcaagtcaaagggttatacatcaagttttccatctacaaagactccagactag

SEQ ID NO: 506169 - DNA, 585 bp, Homo sapiens
tggtcagctatcttctccacagacttctccaaatgtttcaacttctttagttcaacctcttcctgtggactgttctaaaatgtttaagaagaaaataaagccaatagtcaaaaagaacaggctgggcatggtggctcatgcctgtaatcccagcactttgggaggccgagatgggcagatcatttgaggtcaggagttcaagaccagcctggccaacatggtgaaacactgtctctactaaaaaaacaaaaaaattagccaggcatgctggcgtgcacctgtagtcctagctactcgggaggctgaggcaggagtatagcttgaacctgggaggtggaggtttgtagtgagctgagatcgtgcacctgtactccagccagggtgacagagcgagactgtctcaaaaaaaaaaaagaaaaaagaaaaagcaatcaacaagaacagcagcctctgtcaggaaaaatacctgaccayacctgcatgaagccactcacctagaaataacagttttaactctgttgcttcttggaaatcaagtcaaagggttatacatcaagttttccatctacaaagactccagactag

SEQ ID NO: 506170 - DNA, 285 bp, Homo sapiens
atgccctcccaaaggggcagccctgcccagctctgacagatggctgccawctgggaatcatttcatttttgtaagaattaggcaatctgggaatttatatgaacctcccgcttgtcaaatacaggcactagtaaacaaatgttttatatgccatgagccaaatagaatacctcctagaaccagatcttcctcttgggccacctgttgccccacatgggtctgataatccctggagtcctacctgcctcttgggatctagtcttcttttcactgccccctggactc

SEQ ID NO: 506171 - DNA, 588 bp, Homo sapiens
tttcaacttattttatgtactcttttttactgacaaaatgtatttattgaacattaaagtagaaatgactggctgttgaccaaaatacattattcctgatccatcatgtagagttttgctaagaaaaagctactaagcaggcactatgtttcccaggcccccttgcatctggggccctgtgattccatgcttgccttatagaatgtgagagaatgggagacgtgtaattaaagaagcaactataccttctctatctacttttttcctcagaggggactctgaggtcctaaaagttgacaaagccgcatggtagaaggaacatgggtccttgagttaccccttggaagctgcctgctaagtagaacaactacattttttgattatccaagcaaaaattaagcttctgttgttaatcaaattcctttgcctggttttccctaagaacagagcctataaaaaaattgtaggcagatagttttttaggaatttattcagagagccagagtgagggggtcactgaagsaagttagagacagagaaaaagggattgtaaagacatattattgagttgaccctcactgcagacag

SEQ ID NO: 506172 - DNA, 298 bp, Homo sapiens
gctcggcctcccaaagtgctgggattgcaggtgtgagccactgcacctggccaggtgacgattactttcatatggtggtagaagtggagaatggaagaagtaaatgaatgtgatatggttttctaagttatcatagatagaaattggtgataaaataaatgcaagagaaaaaattaaaaaatcaaaacaatacctaaatttaggscacagtgatttaccgcggagagtattatttcaagagaagattggattagaaacgatgcttgtatgttttgttggtgatggtcacatactgcag

SEQ ID NO: 506173 - DNA, 667 bp, Homo sapiens
gctgcgactccttgggaaacttcttctgaccttagggaaatcatccagtccatggcatcagagagaaggttatccttatctcattttcatgtattgctccagattgtttgaaacaacaaggatggtcacacaacaccttggccagtgtcagatgctaccttggtgaattctgctgagtttcaggctcttagagaaaacagcatccatcaagaaatccagtgaatttttgcatttagtgccatctctcctaccatcacgtattttcactttaaagtgttattctaaagcataaatggatgtatatggattatgccactaacacatacagtgctataagrcagtggaaagaatgctgacagtgacattgggacaagtgggcccttctattaattaactgtgtggtttttgcccattaattcctttctctgtgccttcttttcttaaatgaaataatatcatttatatatttcgcccaacaaaacctcgaactaggtaaggacaaaggctgcagtttactgatttttgtataaaaagaacctactataatacccatacttgagaatcagatagtgtttatcagttagaatttgtagggtcattgtgaggctgacttgagaaaatgcataaaattattagatgagtgtagattatgagtaatcatcaccat

SEQ ID NO: 506174 - DNA, 492 bp, Homo sapiens
tacactacctccctaaagcctcaatggcctcaagtaacacattttccgaatctttggagagctttggattttatgayaaaataagatagcttttaaattttctttgttactctttcaccagtttctaagaaaattcacttcacattatcattctgaaaatagatctgactggattgaaactctgaaccactctggcctcccctgctgtcaacagcagccagttcttgatctggggaattatgggtgaatcttgaacctgtcaggctgcctgaccaggtccttgtccagtgggtgaatgacagcagcaacatttctgtgtctacttgatgtgccgtctgggagcagccaaatctcagagctctgtgcaggatatctgcaactaaagcccctagtaaaatgctgtgttatgaatgaaagtgggcatgaggtcagaatgaaggcactggctgggagtcagcatacctgagctataatctttcttcaagatcccca

SEQ ID NO: 506175 - DNA, 667 bp, Homo sapiens
gaagtgagaatgtgactcctattaaatgcagttcaggatgttctgccaaagcgatattactccagacctgtgtccgttccagcaaatgaaaacctaaataagtcccacaacagcaccgagtgttctctaaaggactgtggtctgacattttcacgtaaaataaactaacactcataagtaatggtgcattttcaacatgctcgtgtgacaggtatatgaacgcgattggtggtggggggcatatttttgggggcaagagaggactcctcattcacccttccccaagttagaaaatgccatagcatagtaggaatgcrttcaaaaaacaaatttctagatgatatcctgcatatgaaataaactccagtcttttgtaccatctgtatctagcatacttataaaatagaacaaagtgtgcatttttaataaagaagcatggtgttgattttcttcttcagtcctcttcttcttttctattattttataaggtacacaaagtatattatttgtttttaggaatattttagtggggcaacaagcatggccaaacattatctcgtgaagcactttttagaagaggaagcatttgagattctcaaaagcactttcagtgaaatgtttttaaatgcacattatgatgttaagaaattaacttgagttattaaag

SEQ ID NO: 506176 - DNA, 547 bp, Homo sapiens
tccaaatgaatttctaatgtagacaactaaaatcaacaactgtgaagccatactrtcaataggagagtgaagatctcctagcatagacatagcatagaaaaacctcattttgattttcacctccttacagataagattagtttacttgtctagagaggcatttaagaatagaaggtttcctgaagactttctggaggagaggctgatggaattgcctctgggtgcgtaagaaattagcttaaagggaacatatgctagagccacaatatgggtggatttggtattattcagtctgggcagttgaggttctacaaatcacagattctatagtttttagagataccatggagtctttgaggtataatttgtgaatcaggagctagtcagttgcccaacattcatatgtcaacgtagatctcttggtgtcttctcaaggtcattaaatcattcacttaataagcgtttaatgaacattccactatgtgcctagggaacaacaatgaatatgacagatgcaagctatgctttaaggatgtctggtaggatt

SEQ ID NO: 506177 - DNA, 547 bp, Homo sapiens
tccaaatgaatttctaatgtagacaactaaaatcaacaactgtgaagccatactatcaataggagagtgaagatctcctagcatagacatagcatagaaaaacctcattttgattttcacctccttwcagataagattagtttacttgtctagagaggcatttaagaatagaaggtttcctgaagactttctggaggagaggctgatggaattgcctctgggtgcgtaagaaattagcttaaagggaacatatgctagagccacaatatgggtggatttggtattattcagtctgggcagttgaggttctacaaatcacagattctatagtttttagagataccatggagtctttgaggtataatttgtgaatcaggagctagtcagttgcccaacattcatatgtcaacgtagatctcttggtgtcttctcaaggtcattaaatcattcacttaataagcgtttaatgaacattccactatgtgcctagggaacaacaatgaatatgacagatgcaagctatgctttaaggatgtctggtaggatt

SEQ ID NO: 506178 - DNA, 657 bp, Homo sapiens
tgcatgaaaagcagcatgctaagggaacgatgacagaaaaccaggtgttagccaggcatgtgggaactgttttaagagcagtttgtgtggtcccagttctaccaaacrcaaaccaatcacagtttaagaacagaagggggctgggcgcagtggctcacacctgtaatcccagcactttgggaggccgaggcaggcggatcacgtgaggttgagagtttaacaccagcctgaccaacatggagaaaccctgcctctactaaaaatacaaaaaaaaaaaaattagctgggcatagtagcacatgcctgtaattcccagctactcaggaggctgaggcagaagaatcacctgaacccgggaggcagaggttgtggtgagctgagatagtgccactgcactccagcctgggcataacaagagcgaaactccatctcaaaaaaaaaaaaaaaaaaaaaaaagaaccgaaggggtccagacagaactcaagtcatctgccaacagggcagtgtccagaacatacttctgttcataaaaagataatatgtataccatggggtctccatcccacagaaacatggagggctatagatgcatactatttgggaatttccaagtgtccgctatgttccaggagccatactaggaagtcctttaattac

SEQ ID NO: 506179 - DNA, 656 bp, Homo sapiens
gcatgaaaagcagcatgctaagggaacgatgacagaaaaccaggtgttagccaggcatgtgggaactgttttaagagcagtttgtgtggtcccagttctaccaaacgcaaaccaatcacagtttaagaacagaagggggctgggcgcagtggctcacacctgtaatcccagcactttgggaggccgaggcaggcggatcacgtgaggttgagagtttaacaccagcctgaccaacatggagaaaccctgcctctactaaaaatacaaaaaaaaaaaaattagctgggcatagtagcacatgcctgtaattcccagctactcaggaggctgaggcagaagaatcacctgaacccgggaggcrgaggttgtggtgagctgagatagtgccactgcactccagcctgggcataacaagagcgaaactccatctcaaaaaaaaaaaaaaaaaaaaaaaagaaccgaaggggtccagacagaactcaagtcatctgccaacagggcagtgtccagaacatacttctgttcataaaaagataatatgtataccatggggtctccatcccacagaaacatggagggctatagatgcatactatttgggaatttccaagtgtccgctatgttccaggagccatactaggaagtcctttaattac

SEQ ID NO: 506180 - DNA, 451 bp, Homo sapiens
gtaacttgttactacaaacaaaaaaagaatactggcaaaagtaactacacaggagtacatctaggtaaatataaaacgtaaatatagataaatataacagtcagtattcttttttcactcatcttttttatatgataataatgacaaatgaataaaacaataattacaatctatgttagtggatacacaatatatagtaatgtaattagggacaatagcatagagaaggagtgaccttcacaggagcagagttttggaatactattataactaagctggaatcaattcaaactagtttcttacragtttgaaattctaattatagttctcaggttagccaccaagaaaacaactaaaatatattaataaaatgaaatgagaaggaaatttaaacggtattctataaataatgaaacacaaaagaaggtagtaacagggacaatcaaacaaa

SEQ ID NO: 506181 - DNA, 152 bp, Homo sapiens
aatttaaaatttttaaataatttccaagattcatttaaaggaatatacatgtatacaagcagtcaagaaagaagcaagagtgcrctaaactaacttgctattaaaatacatttttaaacttagtaactaaaactgagcagtactgatttgga

SEQ ID NO: 506182 - DNA, 152 bp, Homo sapiens
aatttaaaatttttaaataatttccaagattcatttaaaggaatatacatgtatacaagcagtcaagaaagaagcaagagtgcgctaaastaacttgctattaaaatacatttttaaacttagtaactaaaactgagcagtactgatttgga

SEQ ID NO: 506183 - DNA, 152 bp, Homo sapiens
aatttaaaatttttaaataatttccaagattcatttaaaggaatatacatgtatacaagcagtcaagaaagaagcaagagtgcgctaaactaacttgctattraaatacatttttaaacttagtaactaaaactgagcagtactgatttgga

SEQ ID NO: 506184 - DNA, 515 bp, Homo sapiens
tcaatacattctagttaaataaatgattctaagcatccacaaggtgccaagcctatgattcccgcattctcttaccctgagcaacttcatgtctacagatgctgagtttctcaatgagtattaaaaacaaatgaaagattggtggggcacagtggctcacgcctgtaatcccagcactttgagaggcagaggtgggaggatcacaaggtcaggagttcaagaccagcctggccaacatagcaaaaccctgtctctactaaaaatacaaaaattagctgggcatggwggcacatgcctgtagtctcagctactgtggaggctgaggcaggagaatcacttgaacctgggagggggaggctgcagtaagccaagattgcaccactgccctccagcctgggtaacagagcgatactctgtctcggaaacacacacacacacacacacacacacacacacacacacacacacacatttgttgggcgtggtggcacacgcctgtaatcccagctacatgg

SEQ ID NO: 506185 - DNA, 410 bp, Homo sapiens
tcagctgctgtttgaaggctaccaaacacctacttcctttcctaacgtcactttaattttatcttggaggaattcttttccctatcccattaagttatgggagatgrggccaggcatggtggcttagcaatcccagcacattgggaggctgaggcgggtggatcacttgaggtctggagtttgagactagcctggccaacatagtgaaaccccatctttactaaaaatacaaaaattagccaggtgtggtgatgggcacctgtaatcccaactactccagaggctgtggcatgagaattgcttgaacccaggaagcagaggttgcagtgagctgagatcgcaccactgcactccagcctgggtgacagagtgagaatccatctcaaaaaaaaaaattatgggagaggatg

SEQ ID NO: 506186 - DNA, 410 bp, Homo sapiens
tcagctgctgtttgaaggctaccaaacacctacttcctttcctaacgtcactttaattttatcttggaggaattcttttccctatcccattaagttatgggagatgaggccaggcatggtggcttagcaatcccagcacattgggaggctgaggcgggtggatcacttgaggtctggagtttgagactagcctggccaacatagtgaaaccccatctttactaaaaatacaaaaattagccaggtgtggtgrtgggcacctgtaatcccaactactccagaggctgtggcatgagaattgcttgaacccaggaagcagaggttgcagtgagctgagatcgcaccactgcactccagcctgggtgacagagtgagaatccatctcaaaaaaaaaaattatgggagaggatg

SEQ ID NO: 506187 - DNA, 410 bp, Homo sapiens
tcagctgctgtttgaaggctaccaaacacctacttcctttcctaacgtcactttaattttatcttggaggaattcttttccctatcccattaagttatgggagatgaggccaggcatggtggcttagcaatcccagcacattgggaggctgaggcgggtggatcacttgaggtctggagtttgagactagcctggccaacatagtgaaaccccatctttactaaaaatacaaaaattagccaggtgtggtgatgggcacctgtaatcccarctactccagaggctgtggcatgagaattgcttgaacccaggaagcagaggttgcagtgagctgagatcgcaccactgcactccagcctgggtgacagagtgagaatccatctcaaaaaaaaaaattatgggagaggatg

SEQ ID NO: 506188 - DNA, 305 bp, Homo sapiens
tggcattagattctcataggagcacaaactttactgtgaactgtgcctgtgatggatctagttttcacgctccttaygagaatctaataatacccagtaatctgaggtggaacagtttcatcgtgaaccctgctccctcagttttatcttccacaaaactggtcctggagcccaaaaggttggggatggctgatttatgtattttccaacctccaaagagctacaggaaggattgactaaaggtgttcatctctgttttacttaacttggaactcatccagttcacaaaggcagaaagccttgcc

SEQ ID NO: 506189 - DNA, 454 bp, Homo sapiens
tcaacaaaatactagcaaactgaatgtaggcacatataaaaggcttttatatcataaccaggtggagtttatttcaggaatgcaagratggttcaacataagaaaatccagccatgcaatgctctacattaatagaacaatttaaagaaatgcagaatcacctcagctaacccagaagagcatttgacaaaattcaaaacacattcccaataaaaacactcagaaaactaagaattgaagggaaattcctcaacataattaagcccataactaatatcatactcaaagataaaattttctaaattgttattaaaattacattatgacagtaaagtcattataattgtattagtttgctatggatgcaataacagagtacaacaaactgtgttgcttaaataacagaaatgtattgccttgcatatcttgagaatagaacatcaatattgtggtg

SEQ ID NO: 506190 - DNA, 606 bp, Homo sapiens
aacttgtaaatgatatgcatggcatcatattacatcttagtttacattttgatacagttaaatttacaagcacttttcttaatttagtgtgtctttacatatcttatatggatttccatctataatatattaaagatgtaaagagtgaagtaataaatttattttacttttgtatatgtaaaaaggacattaagaagagtcaattgtttttctatttaaatttaaggcaaccccttatgtttgggtctatttctaagttttcactccaggtcaattgttttacctgtttatctcagttaatttgtaatattaggttaaagctttcaaataattgtcatcaagcatattatagatatcttacaataatcataaatgagacagtttatactacatcattaatactgttattgcctgggcsaagaaaatgctattgagttttatatagggatgtatagccagctactctttagttttcgtagtttgtctaaagaagcttatatgatcaacaagtaaaattttgtttcttaattttcaaccatcctgatgtttgtttatgttatctgtcttcatgtattgacttttagtaatatgttgataaacagtagg

SEQ ID NO: 506191 - DNA, 624 bp, Homo sapiens
gagtggggctcgggattccgagtagacaagcggaaaacactgggccctaagaactgcaggagaagcactcaagcccatcagctacagagggcaacagccctggagaaaacttggccctgggtgtgaaaaagtaacttatccacaactccttctcttctcgaatttcatcaartcacctggagtaccagaagggcagcacttgccgcacatccccttctccatcctcatcaaaactcacctggagtatcagaaagatagcactaatctattcccttctcttctacatccttatcaaagtctcctggagtaccagaagggcagcactcatcccccatctgctcctattctttatcctcatcaaagctcaactagagtaatagaaggataatactcattccccatccccttctccatcctcatcaaaactcaactggagcatcagaaaggcagcactaatctcccaccactttctccatcctcattaaagtcatctgaagtatgagaaggacggcactcatactgcagcctcttctcttctccatggtcttgaaggctcacctggagtaccagaacaggcttgcaaatcactgctagtctgtaacctctttgccctgcagccaggtt

SEQ ID NO: 506192 - DNA, 605 bp, Homo sapiens
gctggagatatgagcactgaagtactgaaatggggagtgcctattccattgcttgtgcctaacggtacctggctcattgcagtccttcaactagtacttcttgtgtgaatgaaggactctgtggtcaacctgagatagaatcctgtaggttttctatgggacttctaacattgattcagtctaggaacctttcaagtgtgcaacctccctgccagggctcagggaaaaggaaaacaagtccccttcccttgagaagagaggcagccacacaaagaggcaatcttacccaaggtgaggattttacatgggcatgctcagagcatggaaaagacaggttcttgaaggtgtctttgaagctgaggcctgaaagacaagaaataggtagatcctaggaaaawatgcaatgtaagccagcaagactggcatgagagaccatcacatggacactaaggtgatataggtcaggtcaggttctcggggccttaagtgccagaagacagagcctagaccagatcctgatattggcaaggagaccatgataaggttttcagcagaaaagtgacaggccaggctttccttctaggaagaacacagggtttatttcc

SEQ ID NO: 506193 - DNA, 519 bp, Homo sapiens
caaacaggaacagattgatagcagggccaattatacaaaaatgatactgatctattatttttttagcagaaaaggaagccatgggtttttctaggaagagctctcttatatgtaactaattagcattggttttactgctagattacaataaaatatataaakattagagaatattgttcatacttaatttttttcattttttattttcaacaagacagtttatcaagatagtttatataatgatttgaatacatcttcatttttttcatactttttaaaataatttttttcacatgttcaagttactgttcatccatgtggttgacagaggcccatgaggttgataaatgaactccactgtaaccaaaacaactgtttttaaaaataaatacatctcctttaccaagattttgaagacatctgaaagcaaaagcaattgatctgttttaccttccttacctgacacttcctgcaaagcaaacacaatgtaaattgttagaaaaagattcaaaaggcagc

SEQ ID NO: 506194 - DNA, 605 bp, Homo sapiens
tttgtccaacactgcccagaaaatcaggtaagaaaacagaactggaaacgatgcctttgtctcccatttttaaatgcagtgctctttctaatgcatcatgttttaccctcctcttcatacacttaccttagtgaccgtaatgatttatcacttcagttcacaaatgcatgtggattctttgaactttttcttttaaaaaacaaacaaactgattgtctttaactgttttaaaacagtgagtctctggtagagaaatactcagacataaatttccttagttattcctagtttgatgcttcctgacaaactcaaaggtatcaatatagttctaccagtctttaagcagatcttgtgttcttgtattacataaggttttggaacactttgttggaatgtttaatcagggatgaaaaatgtcagagctcttgccctaatgattaattctgattaactcatttarccaatctggtttatacttccatcctgtgggttcactaatttcataagttcagacagtcctataacaaggaggataattttctgggacagtgatgatgcacagtccttttctggtatcagagataagtgggtgaaaacaggcattg

SEQ ID NO: 506195 - DNA, 650 bp, Homo sapiens
cacagtgaaagagccaagcttgacctcactacaaagggagggatatgtggggaagggaatagattcaatcgccatacttatatacctttccaatctgtgaataacccagtatgaagtaaagacagaaccagagtattttcctaatgtaggggatactttttcaatgttgattaggagatccagccttgaatgttctgttgataactgagttaggttgtgagtgagaattttcctctattgtttctctcatcttggaaaataaagctaaaatttatggaattgcaattttgaaaagtaactatgttttggctctatattaggatgatttaaaacttactttggtaaatggaactcaagagaatattctgatttcttggaaatataaggtagataataaacaccagttagatcaacgccaccatacgctttcctttagctgaattatgaggaaacaagccaataagaatcatgcactgctcacrtacacacacatgcacacaaaatccaccccaattcttccaggctctcctctgatgtaacggtatcatggaaggtgaaccagtcatcaagagaagtggtattaagagacagaattcttaaggaaagttcctttgaaaagagctaagccctgatcaaataacaggactacc

SEQ ID NO: 506196 - DNA, 602 bp, Homo sapiens
tcatcggtttctagcctctgttttcctagaagtcacattaagagcttgtgtaaatatatttactagaagttcactatggaaaactgtttccaggtttagaattctctattaataaagaccattagggcagttccaagatggccaaataggaatagctccagtctacagctcccagtgtgagcgatgcagaagacgggtgatttctgtatttccaactgaggtaccgtgttcatctcactgggacctgtcggacagtgggtgcaggacagtgggtgcagtgaaccgagtgtgagccaaaacaggacgaggcatcacctcacccgggaagcacaaggggtcagggaactccctttcatagccaagcaaagctgtgacagatggcacctggaaaatcagatcactcccaccctaatattgcacatttccaacagtcttagcaaatggcacaccatgggattatatcctgtgcaaggcttggagggtcccacaccctcagagcctcccttgttgctagcacagcagtctgagatcgaactgcaaggcagcagcaaggctgggggaggagtgtccaccattkctgaggcttcagtaggtaaacaaag

SEQ ID NO: 506197 - DNA, 564 bp, Homo sapiens
gcttctcctgaacttaacattacctcgcaaagtcctgggggtaccaattggtatatcttatctaaaagttcataaaatatgatgaatataaacattaaaatacaacactgaggatgaattgtttgaaacatgcatgggtctttaaacccaagatgttagtgaaatcaagctaaattcaaaataatcagaacttttgacaaaatcaaaaatttatctggaattgatcrccctaagatgaacgtgagacgtgactaataagttctataaagatatacagttataattaagtgaactacaaatctattttgttgtggtgtaaaacactttcagagatgaaaaccttacttataagaatttgcacgcttgtaaatcatgacctcagtaaatctataaggttgcattataataagtagttatggatattacaagtaagtcatttttccttctggcttttcagatttagggtcttgtattcagaaatgtatacccatttgggaaacaatattctggaatttttaacaagatataaaatttcattgtcacagaaagacagcctcattgtaa

SEQ ID NO: 506198 - DNA, 589 bp, Homo sapiens
taatagacataaagctggattgaagtaatgaaaagtctgaattagagaattatatatgcattgttgtctatgtgtacacaaatatgkattaatggctaagcacatgttctagaacagaggtccatttacatagttgttacttttagtgaacattactgatcagttccaatgctctcaaacacatgaaccctaagtcattttgtctaataggataaatattttccttgtatccttatttctattatttttatacatcaatattctatttataattcatgtaagttcagcaaagctgtacatgatgagggattctaaagaggtatttaagacatttgtgttgagtgctggataggtatttaaggtttcattgggagtaacattatcttcaatgtgagactttcaaaactatttgatgatattgatattaaacaggctctatatgtattgagagagtttgattgaagacccaccatgttctgattccatgtggggaactagaagggaacaaggttctgagttcagatgctgacatcagtcatttattcctgtactcaaatctcagatttctactatataacttttgggaaat

SEQ ID NO: 506199 - DNA, 631 bp, Homo sapiens
gctgagtccagtgtaaaagagggatagctatatctacgatttttttcttctgatttccattctttgtcctttgcagactctataaaaataatccctaaagtaaacctaataaaatattactttcctcataccattcttaatgccatggcaaatagaggaagtgccttgtgttttaatctgttggagtcacttgtgttttgttctacaataattcataaatagaaggaaatattttaagctgtgtttttattttcagaaaacctacacaatctcttaaagaagtagagttaattagtactagtttgccaggacygtagtgagatatagattggttgacaaaattaacttcctaggacaaatgtggcttatcacatgaaagaacacacacagttttctaccataaacaatttaaagtagtttcctatgtaaaacattcttagtgtcaaagttacaaatcactagttcttggagctattaaaataaacccttctctattataggaaaacattttccccttgtcagcaagcaggcttatatggtcaactttatgataacaagttaaaggataagtataaacatgttttaaattctagggtaacaagtatgtaacatttcactacacttttcctta

SEQ ID NO: 506200 - DNA, 656 bp, Homo sapiens
tgggattacaggcacgtgccaccacactcagctaagttttgtattattgggagagatggggtttcaccatgttggccaggctgctcttgaattcctgacctcaaatgatctgcccgcctcggcctcccaaagtgctgggattacaggcatgagccaccacgcctggccgatttcctctgtttaaatctggtctgtctttgctttctctgccccacccaatgaggctatgagtgcacttttaagaggcaagtcagggagtttccgtttttttctccaacacaccttccctgctctggtctttatattctgggggccaccgcaacatcttaggtatgcttttcacctctctgtccaagccttggtctgatgcttggtggagacaatttttcartgctgattttgctaggaagttgtctttggtttcttcccattcctgttttaagaactctcacctacctaactcacccttgggctcaggtcccagaatcctagctggccaggctttggcaagtgcaaagtttctctctgcttgttactaggcgagggtttccaggtaatccctggtcttgggtgatctgcaaaacccctgctggtacactttctagtttcagggttatgtgaaaaattctgttctataaatcaaaagatggtttttg

SEQ ID NO: 506201 - DNA, 523 bp, Homo sapiens
aaaataataataataatttttaaagatgtaaacaggtcatgagaccaaaacgtttgaggttcactaacctgggcaaaggggaccatcctatctgagaattaaccggattctgtctttaggtatttgatgttagaaactgcctagaatactcatctgtttccctgcatctttgccttcccttttccaaactcttctgcagcccaccctaggtctgttgacacattttcctcctacaaatggtaatacagttgatcactttgtagttttctttgactgccatcatttttaggctttcctgagtctctagtgtgtttgattggatttcagcgacattctgttattcctgactggattctggacacatcctgtttctctaatcattacgtttacaatgtacctctcagggtggatcatttggtttaggtttctcatggttagtgccagagtgcattctttttttaattcagtctttcaaattttaggtcattttaawagcgttcctactgctgcacttattgtgcca

SEQ ID NO: 506202 - DNA, 644 bp, Homo sapiens
acttggacaacgcctgggatgtggtggtaggaacctttaaccacaaaaatgttttcttctctgaaattgaagtttttgtcttttagagtcatcattctttcatacattcatagtcaaatccacaagtctgtttcagaaataatctttatgagcaatagctaaacaaacaagttagaggaactcaaatcatctctcgagaagaatctatctctgactttcccagcatctcatgtgaatgactcaattataatgactttgataaataatgcagtgtttctcaaagtataatattttttaaggaatagtaagtctctgggatattaataggtgctatgcccccaataaggattcattggtcaaattaatcaattttagaaacactgaattaaagtaaaacaaatttttttactgtatgactgcttagaggcttttaaatccaatgtgccttgtgaatctctaagcatttggagagtataaagcgtttccyggacacgtaggaagatggaatcctgtgaccatatcatagtgtcagtgttctgagggcacattttgggaaagactaatgtagtaggtcttttccatttcttatatctatgataactgccatttcatctgaatttgttgtagctggggacttaacagga

SEQ ID NO: 506203 - DNA, 606 bp, Homo sapiens
gacaaccaccaagaaacagggacctcattcttgcagtctcaaggcacagaacatggtatcaaagctgaattaggttggaagtggattcttttctagaacatgtagataagaccccagccgtgctatcaccttgattttggccttgtgagaccctaagtaggaataagctgagacttgccagaattctgaagtggagaactgtgagccaatttgtgtttctttaagcgtctatgtttctggtaatttgacaacacagaaattgaaacttaatacaaatagtaaagtgtgtagtacatttttatgcttttaaaatataatggtgagggatgtatatgaactattttagttaatgcacatatcttgaacaacactgattttacccagtgttaagttcatagtgctaattagcaaagcctctactgttgatactaaaacaagaacaacaattataaataagtaatttaatagtttctagtggtctcattggagaggaatctcataaattaaaaaaaaatagcrgaatcccattcgtcttgcggtgtgggtgggtggtagagaaagttggaggtgtgttaaattctcttaaatgggtaaagatgacagtga

SEQ ID NO: 506204 - DNA, 680 bp, Homo sapiens
tatcactttatgttgttttgttcatgttttgttttcctaaagagattgaacttttcttttcacctgtccatttgtttgaaattttcattatatatttctactaaaaggacagattttctgtttgcttattataaagtacattttcaagaatttaatgtagatatttttaagtggaactgtatcttttttctttatgtcaaacccaaggcttgtttcttatttatttttccaatatcaactgtagtgtttctcaaagtatgatccctggaccagccacatcagcatcgtctgggaactcactagaaatgcagattcttggattgtaccccagacctaccgaatcmgaaattctggaggtggagcctccagaggttgagaaccactgacatagtattataaatatcaagtctaaatcagacttctttaataggggtcctttcattggatattaataagtatttgggaaaaaatcatttctctagaaatcactgataagtagatatgggtttttctgcaggactttttattgtctttaatggaatattaaattctattaatattctgagaaaacagctataatcaaaccaatttggccacagaatcttttaacagcattttatagggctagtattttgtggaaaacacttcaggaaacaggagttgaaagagttaatcctgga

SEQ ID NO: 506205 - DNA, 606 bp, Homo sapiens
ctgctgactcgtatggtaagactatgtttagctttggaggaaactgccaaactgtctttcaaagtggccgtactattttgcattccaaatagcaatgagtgagactttttgttgctccacattcttgccagcatttggtgttgtcagtgtatttctgactgaaagtttgtcttcacattcccaaatgctggtttgaggatttttaatttatttttgagcatagtgctgtagatttttgagattcaagattgttttgggggagtggagggaggaagatatttcaccagctaatacactcttattcatatgttctgtttttatttctgtatatggtcagattttctgctattcctattcatttttgaacaagtttttmgttcaagaatcccctctattcacttgtgctgttttttgtgcagtttctttcatggatggggttggtggaacaggtgcagggcagggcggagggcaggtgctatgtcttatttcttccttgtttctgtaagatccttaattcattctactgttaaaaaaattcctattacaacctcatattagactttcactttattacttgatttttcgtcattttttctatgtcttctg

SEQ ID NO: 506206 - DNA, 398 bp, Homo sapiens
cctatacatgccctaacactggagccacagtcagcctgttaatgctacartccaaacctaggccccatggctgcactcagaccattcacttcccagacaccagagccatcatcattgcaaggtagtttgcattccaaatcctgaggccaagctttcactggatgtgtctgtgatctagacggtggctcggctaaacaatgagtttgattctggaaacactatagctctgcacacacccatgctcccattcttggctccctggctgcttcactaacattcatgcctcacatactatttccaatgcagccacagggtcctgcttctaaggcaccagtgttattaccaccccagaccacaaaactgtagactctccaggcatgcctgtgcttcagacatca

SEQ ID NO: 506207 - DNA, 636 bp, Homo sapiens
tcctgctgcccgaggtggtcagtgcacrtagaatgtggctgggacctcggtcctccatccagtcctcctgctgcccgaggtggtcagtgcaggcagagcgtggctgggacctcagtgctccataggggcagcccttctgaggagggttcttggacggcgtctgctcctggcacctgagtgtgcctggctgccacctgaatgaggcctccgtaaacacagagtctactgtgtgcaggcctgcccgtgcctctacctcaatgatatgcagcccccacccacccttcactaacatgtcatgaagttgccttcttttcctgcctgcgccaaggcagtcaccatttgggccattcatctgaacagacaacatccagatgctgtctcttggacctggtttggaaaactgggcagaggaggtctgtgttccccgggccttttccacattgtcttatttcccactaatggctaactctctccagggatccaggaatccaagcctggagaagacccccttgtcctccctctgcacctgctcaaggccaacctggccagaaagcaggaggagggagggcttccggagcagcatgagaggtgagctccctggcagctctgagaaaggatagagggaggccaatgcat

SEQ ID NO: 506208 - DNA, 636 bp, Homo sapiens
tcctgctgcccgaggtggtcagtgcacgtagaatgtggctgggacctcggtcctccatccagtcctcctgctgcccgaggtggtcagtgcaggcagagcgtggctgggacctcagtgctccataggggcagcccttctgaggagggttcttggacggcgtctrctcctggcacctgagtgtgcctggctgccacctgaatgaggcctccgtaaacacagagtctactgtgtgcaggcctgcccgtgcctctacctcaatgatatgcagcccccacccacccttcactaacatgtcatgaagttgccttcttttcctgcctgcgccaaggcagtcaccatttgggccattcatctgaacagacaacatccagatgctgtctcttggacctggtttggaaaactgggcagaggaggtctgtgttccccgggccttttccacattgtcttatttcccactaatggctaactctctccagggatccaggaatccaagcctggagaagacccccttgtcctccctctgcacctgctcaaggccaacctggccagaaagcaggaggagggagggcttccggagcagcatgagaggtgagctccctggcagctctgagaaaggatagagggaggccaatgcat

SEQ ID NO: 506209 - DNA, 636 bp, Homo sapiens
tcctgctgcccgaggtggtcagtgcacgtagaatgtggctgggacctcggtcctccatccagtcctcctgctgcccgaggtggtcagtgcaggcagagcgtggctgggacctcagtgctccataggggcagcccttctgaggagggttcttggacggcgtctgctcctggcacctgagtgtgcctggctgccacctgaatgaggcctccgtaaacacagagtctactgtgtgcaggcctgcccgtgcctctacctcaatgatatgcagcccccacccacccttcactaacatgtcatgaagttgccttcttttcctgcctgsgccaaggcagtcaccatttgggccattcatctgaacagacaacatccagatgctgtctcttggacctggtttggaaaactgggcagaggaggtctgtgttccccgggccttttccacattgtcttatttcccactaatggctaactctctccagggatccaggaatccaagcctggagaagacccccttgtcctccctctgcacctgctcaaggccaacctggccagaaagcaggaggagggagggcttccggagcagcatgagaggtgagctccctggcagctctgagaaaggatagagggaggccaatgcat

SEQ ID NO: 506210 - DNA, 636 bp, Homo sapiens
tcctgctgcccgaggtggtcagtgcacgtagaatgtggctgggacctcggtcctccatccagtcctcctgctgcccgaggtggtcagtgcaggcagagcgtggctgggacctcagtgctccataggggcagcccttctgaggagggttcttggacggcgtctgctcctggcacctgagtgtgcctggctgccacctgaatgaggcctccgtaaacacagagtctactgtgtgcaggcctgcccgtgcctctacctcaatgatatgcagcccccacccacccttcactaacatgtcatgaagttgccttcttttcctgcctgcsccaaggcagtcaccatttgggccattcatctgaacagacaacatccagatgctgtctcttggacctggtttggaaaactgggcagaggaggtctgtgttccccgggccttttccacattgtcttatttcccactaatggctaactctctccagggatccaggaatccaagcctggagaagacccccttgtcctccctctgcacctgctcaaggccaacctggccagaaagcaggaggagggagggcttccggagcagcatgagaggtgagctccctggcagctctgagaaaggatagagggaggccaatgcat

SEQ ID NO: 506211 - DNA, 572 bp, Homo sapiens
cttcttcttttaataacagcactaggtgatattggaaaaatccgtgggcagcacataatactaaatagattgcttcttgagggtgctcacttttttaaataatgagttatgtggtaagaattttacattcctgcatgaatttttatacagagagaatttttggttgatsctttttttgttgtttttctataagcactttgaatatggcatcccaagggcccctggcctctgtgttttataatgaaaaattagttgtttatcatattgaggatcccttgcatataacaagtcttttttattgtcttggctcttgacagcttgagcatagtttgcctaggtgtggatctttttatgttttactctgcttcaagtttgttgattttcttgaatgtggggaatcgtgtccttcatttagttttggaagtttctggccattgttacttcaaatatttttctgccccgtgtttttccttctcttcctcctagacctaccattatgaatagaatgggtgctacacatgcttctttcctcctagacctaccattatgaatagaatgggtgctacacatgc

SEQ ID NO: 506212 - DNA, 572 bp, Homo sapiens
cttcttcttttaataacagcactaggtgatattggaaaaatccgtgggcagcacataatactaaatagattgcttcttgagggtgctcacttttttaaataatgagttatgtggtaagaattttacattcctgcatgaatttttatacagagagaatttttggttgatcctttttttgttgtttttctataagcactttgaatatggcatcccaagggcccctggcctctgtgttttataatgaaaaattagttgtttatcatattgaggatcccttgcatataacaagtcttttttattgtcttggctcttgacagcttgagcatagtttgcctaggtgtggatctttttatgttttaytctgcttcaagtttgttgattttcttgaatgtggggaatcgtgtccttcatttagttttggaagtttctggccattgttacttcaaatatttttctgccccgtgtttttccttctcttcctcctagacctaccattatgaatagaatgggtgctacacatgcttctttcctcctagacctaccattatgaatagaatgggtgctacacatgc

SEQ ID NO: 506213 - DNA, 572 bp, Homo sapiens
cttcttcttttaataacagcactaggtgatattggaaaaatccgtgggcagcacataatactaaatagattgcttcttgagggtgctcacttttttaaataatgagttatgtggtaagaattttacattcctgcatgaatttttatacagagagaatttttggttgatcctttttttgttgtttttctataagcactttgaatatggcatcccaagggcccctggcctctgtgttttataatgaaaaattagttgtttatcatattgaggatcccttgcatataacaagtcttttttattgtcttggctcttgacagcttgagcatagtttgcctaggtgtggatctttttatgttttactctgcttcaagtttgttgatyttcttgaatgtggggaatcgtgtccttcatttagttttggaagtttctggccattgttacttcaaatatttttctgccccgtgtttttccttctcttcctcctagacctaccattatgaatagaatgggtgctacacatgcttctttcctcctagacctaccattatgaatagaatgggtgctacacatgc

SEQ ID NO: 506214 - DNA, 552 bp, Homo sapiens
accattgcttaccggcagactagattaattcctacaaagggcccaaatatttcttccttctgattggccccaaagtgactcatattgtattttagcacaaaaatatttgccaatgtaartttaagaaaaaaattaagattttcatgacaagtagattttcaaggagaaaaaccataaaattctgattataaatttcttcagccaaacttagaagcttacttggtaaacatcagttcatctcctatctaatagtgtgatgacaacttcctccccaggaataatacaaggattaaatcaaatgtctcatgtaagcaggtagtatgggatcacatcatctggactcaaattttaactggggtaaatcaataatgagtgtcatttttgcagttcaaacataagcagagcaatggatattatatcatacatctatttaaaatagtatggtatataatgtagcacttgttttagacagttccaaaagtactcaattttcagcaattaaatacatgtaaagcacatggctcacgggacttagtatgcgctcaaaaagaa

SEQ ID NO: 506215 - DNA, 552 bp, Homo sapiens
accattgcttaccggcagactagattaattcctacaaagggcccaaatatttcttccttctgattggccccaaagtgactcatattgtattttagcacaaaaatatttgccaatgtaagtttaagaaaaaaattaagattttcatgacaagtagattttcaaggagaaaaaccataaaattctgattataaatttcttcagccaaacttagaagcttacttggtaaacatcagttcatctcctatctaatagtgtgatgacaacttcctccccaggaataatacaaggattaaatcaaatrtctcatgtaagcaggtagtatgggatcacatcatctggactcaaattttaactggggtaaatcaataatgagtgtcatttttgcagttcaaacataagcagagcaatggatattatatcatacatctatttaaaatagtatggtatataatgtagcacttgttttagacagttccaaaagtactcaattttcagcaattaaatacatgtaaagcacatggctcacgggacttagtatgcgctcaaaaagaa

SEQ ID NO: 506216 - DNA, 552 bp, Homo sapiens
accattgcttaccggcagactagattaattcctacaaagggcccaaatatttcttccttctgattggccccaaagtgactcatattgtattttagcacaaaaatatttgccaatgtaagtttaagaaaaaaattaagattttcatgacaagtagattttcaaggagaaaaaccataaaattctgattataaatttcttcagccaaacttagaagcttacttggtaaacatcagttcatctcctatctaatagtgtgatgacaacttcctccccaggaataatacaaggattaaatcaaatgtctcatgtaagcaggtagtatgggatcacatcatctggactcaaattttaactggggtaaatcaataatgagtgtcatttttgcagttcaaacataagcakagcaatggatattatatcatacatctatttaaaatagtatggtatataatgtagcacttgttttagacagttccaaaagtactcaattttcagcaattaaatacatgtaaagcacatggctcacgggacttagtatgcgctcaaaaagaa

SEQ ID NO: 506217 - DNA, 580 bp, Homo sapiens
agttgatgaatcactatataaagccaaaaccattgcttaccggcagactagattaattcctacaaagggcccaaatatttcttccttctgattggccccaaagtgactcatattgtattttagcacaaaaatatttgccaatgtaagtttaagaaaaaaattaagattttcatgacaagtagattttcaaggagaaaaaccataaaattctgattataaatttcttcagccaaacttagaagcttacttggtaaacatcagttcatctcctatctaatagtgtgatgacaacttcctccccaggaataatacaaggattaaatcaaatgtctcatgtaagcaggtagtatgggatcacatcatctggactcaaattttaactggggtaaatcaataatgagtgtcatttttgcagttcaaacataagcagagcaatggwtattatatcatacatctatttaaaatagtatggtatataatgtagcacttgttttagacagttccaaaagtactcaattttcagcaattaaatacatgtaaagcacatggctcacgggacttagtatgcgctcaaaaagaa

SEQ ID NO: 506218 - DNA, 489 bp, Homo sapiens
gaagtataaactggacatgagacctgtaggaaaagtatgattggaattagcaactaagttgatgtaagttccaaaagatgtcatgttgtatcaagattttaatatatgtgaaaaattgttggtggtatcatacatttattccaatgtacttaggtacatcctcatgatttctttctgtatcggatatatatatatatatattcatgcaacaggaagctctagttggmctttttcacatgctttttactcaagttctcaagatagctgcttcagttccagacgtgatatctaagtttagaacaataattagggacaaaatggaaaggctttgcttgttgcacctgtactttttccatcattttggtcattgttttggttaatcggaaaacaaaaacttttcataagtttactccctttctgcacctttctccttcccaccacctgcagacgtctgtttatacctctctggtcagatatagattccatgcc

SEQ ID NO: 506219 - DNA, 615 bp, Homo sapiens
ttaaataaatatcggagtttaacattcttaatcgcaaaccctcaatttaaccaaccatttattataatcaaaaagcaatcaatatgttgattgtggtgacatgcaaaatggaggtagaattattagtaattaccatatatttgtggttcaatgtgatggtgaaataactgggaaaaaaattttaaagcacactacagttaaaggactggttgctatgttttggagcagcatgctatattgattgtagtctttaaataarttgagtaacatagttgctgtcaaacatatgaattattcatgaagcaaagtttgagaacactaaagcagcccctgtttatgaatattcggacgtgttaatatataaacgactgacccaacactaaccaattcttgcatgaagaaaaggtctcagaaacaaaatggaaatctattaggcaaactcacttgagtcactcgcttgaaatgtaatcagtctgagagatggggaataaagactgagctgcaagtcagggaggtatcaggccaaagagggaggcatggggaccttcttcgactgggattgcttggtgatgccaaagtcttttttgcaggctccagggaccctggaatttctat

SEQ ID NO: 506220 - DNA, 589 bp, Homo sapiens
tgctgttcttccacacttttccatgtctgaggtctgcagggcaggatgtggttacacactgagatacagattaacctaagtgttgcatttaacattctgtagaaaccattctggtaaagaggccttttattttcaggtttgtgcgagtaattatttggttaaaaaaaaacctcctaaaaatttgattatttcaactaacaccagagttagataagaatatgaaggatcaggtatgattttatttatttatgataaactcatagaaygtatactgcaagttttgctatttggaggttttaaaatcttagcagactggtagatttcatatatcagctatcttagggcaaacaaggcagtagtttacattttttcattttgaaaacaactctctactctcgtggtagcaccttttggcctcactgacattgtgcaactgtgcaggccacacacagttgcaaagacccttatcttctatcagcaatgtgtgttgtattgtgattagaccagcccaactcatggatgactgtgtatgccattgtcaaacaatcctgtttggatggggcataaccttgtgattaatgcctttcaa

SEQ ID NO: 506221 - DNA, 647 bp, Homo sapiens
catcattattcaacaggatgtaagtatagattctttaagaggttagaaaacttccttggggctgggcacagtgactcatacctggaattccagcacttggggaggctgaggccgaaggattgcttgagcacaggagttcgaaactagcctggtcaacaaagcaagaccctgtctctacaaaaaattttaaaaattagccaggcatgatagtgtacacctggggtcccagctactcaggaagctgaggtggggagggtcacttgaacctgggagtttgaggctacagtgagctgtgattacaccattgtactctagcctgaatgacagagcaagacactgtctcacagagagcttccttggaccatactaaaataaacctaattcagaaatgctgcttctaacattcagaagcagagttttccacataaaattattacttatacaacaataatgtttgtactgtttaaacagcaataattcttgcctatgggcatttccggttaattgtataatggtgattacttttgcatttgctgtyggtcacaaataccttccattcagaggtcacatttataggtggtttgggaagccagactgaataagaataatatcttgcagactaatttcacaaaatcttactcctttaa

SEQ ID NO: 506222 - DNA, 447 bp, Homo sapiens
tggtggcacgcgtctgtaatcccagctactagggaggctgaggcaggagaatcacttgaacctgggaggcagaggttgcagtgagccaagactgcgctgctgcactccagtgggtgccagagcaagactccatcgccaaaaaaaagaacatcccgttgcaggattctaactatagagacatattacagtagaatatcacagtattaattaccatgaaaatacctatgactacagtttacctttgaaataagaatataaggtaaagaagaaattcaaagtaatcaaataatcaggctgggtgcagtggctcacacttgtgatcccaccactttgggaagctgaggcaggcggatcacttgattcgcctggtcaacatggcgaaactcygcctctactaaaaacgcaaatattagccacgtgtggtggggcgttcctgtaatcccagct

SEQ ID NO: 506223 - DNA, 637 bp, Homo sapiens
gctgtgaaacatactgtcaagctgttaccattttgtcacaaaaaaaaaaaaaaaaaaaggcaggggggcagttcatacatgctgaagaaatagttacaaccaggactaaaaacagaaagacaactcttgttttttcatatgtttactgaacacgagagctgtacccagcagaatgtaagtaaccacttacaaacttttcagtgtatcaactctgatggggctgttagaaagctgaggtatgaatttagtaactgtcttttgtgatcaccttaaactgtttttcctaaacttgaattctatttttttccctcctagttctcccttctgatttttaatagtatcataattctaccaattatccaagtagaaatcttaggtttttcttcttcttgcactrtttctcaccctgctcctgttcagcttatatttcatacttatataatagtagatcccccaatctagcttgatagtatatgctatagtcagcagattaatcttcacagcccataaatttgaccatttcacttccttgcacaaaaacattcagtaggatccctgactaaaattcaaattcaagagcttttataatctacctttgacttaatttcaattaaatgtcttctatggcaactagaca

SEQ ID NO: 506224 - DNA, 306 bp, Homo sapiens
aatgaaatatatgcttatctattccaagtctgctaataggtaagtcatattagttgattgatataatttgaaattaacatgaaatttaagtttaaaatgcagtgamtctaatgataacatacaacaatagattttaaagtaatcattggaaaaccttcagaaaaactaggctgttagtcaaattgaagaatatctcctaagggtttctggaaagagacccctgccctaatttcccactaaaaggtccagaaaaattgatgccacctgtagtttggcaacgtgcactaaaaagttcaaggtaccgtc

SEQ ID NO: 506225 - DNA, 561 bp, Homo sapiens
catccatgttgctgcacaggacatgatttttgttcttttttatggctgcatagtattccatggtgtatatataccatattttctttgtccaatccactgttaatggtcatttgggttgatttcatgtctttgctattgtgaatagtgctgcaatgaacatacaggcgcatgggcctttttggtagaataatttattttcctttgggtatgtatcccataatgggattgctgggttgaatggtagttcaactgtcagttctttgagaaatctccaaaatgttctctactgtagctggactaatttacacggacttttgattttgattgcattcaatctttaggtcaatttggggaaaactgaaatctacacattattgagtwgtattctcaaaatgtattgtacgtctctccatttattgagatcttccttaatgactcagaaaactttataatttgtccatcttttgtgacatttatttttatcttgtatttgtaagtttcaaacaattttaaataatttcaaaacatggcttattaattgccgatgtataaaaatgattt

SEQ ID NO: 506226 - DNA, 585 bp, Homo sapiens
taacaccagtcaaataagcaattttgataaggttcataggtactatggtaataactaagatataaatacaatttttccactttaatatgcatgcagacagagagagaaacacagtatgtaaggctgggcttgagtaccaaaacagtttttaccctttcctgcttaaagtggagaaaataaagaatttgagtgtgcatgtaacataacttattgttccaatttccctgaagttagttagagcacctggataagaactccgaattctgaattggtaattttctgaataggttttattaaagttgaagatatattgtcttccataatttaagtagcaatacagtaaatgtcctcgcagggaawtcctcatttaatactccttgaatggacattacactgaggtatacagcaagttaacttttttttttttttttttttttttttgagacagagtctcgctctgttgccaggctggagtgcagtggcatgatctcggctcactgcaacctgcaacctccacctcccgggttcaggctattctcctgccttagcctcccaagtagctaggactacaggcacgtgccacct

SEQ ID NO: 506227 - DNA, 629 bp, Homo sapiens
acaatcacataagtcaatttcttaaaataaatctctctttctttttatctatctatgtatctatccatctctatctagccacccttcttcttggttctgtttctctggaaatcgtgactaaaaacatcattgtttctcattttcaacaatattttcctttccactgctagctaattaaagataaactaagtagcttcttttcagttctaattaagaaaaaaaaaaacatgaaatacccagagcaggtgtgagagtaaacttcttcaataattagtgtaaatagagtttctttctttctttctttctttttttttttgttctaaagtaataagtgtcctgcttttctcacacaccaggtggcaaaatggtgagtggaaaatgtgtaagaacagtgggggtatgcagacactaataataccttcccctacgttgtaatttgcagttctcaaagcatttccatgtagatttgagtcatacaaaataaccagagggtggggatatttttacccttcacggatgagaccatggaggcactgcagagaaaaagttaagtggsagaacaaaaatttctacttgtattttcaggcaataagtcatgtgttcttgcaattgaatgactgcttatggac

SEQ ID NO: 506228 - DNA, 473 bp, Homo sapiens
tccttgcctattgtaacttctggtgtttgccagcaatcttgggcattctttggytactagatgcattactccaatctctgcttctgtcctcctacagccatcttctctctgtgtgcctgtattcacattttctcttcttcttctaaggacatgaatcacattggatctgaaaacattctgataaagtcaccttaaattgattacatctgcaaagatcccatttcaaaataaggtcacattcctatttatggatggttaggactttaaggtaactttttgccagacacagttcaattaatgacatcagtgaaggcaaaataggattgcaatatgagcatggggtattactaaatgtggagagtgaagtgtttttttttgtttttgtttttgttttttgtcaatgcagtattttagtactttgtacctggataagaccatacttatcatttgaatcaaaacatataaatagctac

SEQ ID NO: 506229 - DNA, 473 bp, Homo sapiens
tccttgcctattgtaacttctggtgtttgccagcaatcttgggcattctttggctactagatgcattactccaatctctgcttctgtcctcctacagccatcttctctctgtgtgcctgtattcacattttctcttcttcttctaaggacatgaatcacattggatctgaaaacattctgataaagtcaccttaaattgattacatctgcaaagatcccatttcaaaataaggtcacattcctatttatggatggttaggactttaaggtaactttttgccagacacagttcaattaatgacatcagtgaaggcaaaataggattgyaatatgagcatggggtattactaaatgtggagagtgaagtgtttttttttgtttttgtttttgttttttgtcaatgcagtattttagtactttgtacctggataagaccatacttatcatttgaatcaaaacatataaatagctac

SEQ ID NO: 506230 - DNA, 339 bp, Homo sapiens
actataaatcttgcattaatgcattcacttactcataagtatttaacatgcccaccccactactcttgctcagggactgggagaggagaagtacaaagctgtactttgaaagtaccctagaaagggagtttgaaggacttggccacgatcttacaggccttatattggacagayaatgcagcctgctaggggtagcgcacacagccaggctgcctgggcccagatctgccgtttatgagctctgcaaccttgggcaagttgcttaatcatgctgcgcttcagtttcctcacttagaaagtagagataacaatagtcattttttcattaggctgtcgtgg

SEQ ID NO: 506231 - DNA, 339 bp, Homo sapiens
actataaatcttgcattaatgcattcacttactcataagtatttaacatgcccaccccactactcttgctcagggactgggagaggagaagtacaaagctgtactttgaaagtaccctagaaagggagtttgaaggacttggccacgatcttacaggccttatattggacagacaatgcagcctgctaggggtagcgcacacagccaggctgcctgggcccagatctgccgtttatgagctctgcaacyttgggcaagttgcttaatcatgctgcgcttcagtttcctcacttagaaagtagagataacaatagtcattttttcattaggctgtcgtgg

SEQ ID NO: 506232 - DNA, 675 bp, Homo sapiens
gatcagagatagtcattagagccttcagaaagagcagctttggagtgagacagaaagactatattgaatttattgacgaacaaaagatctacaaatggagacaactcttgaggtttggtttgtttcttagtttggtttcttgtctttattggggggtagggcgcacaaatagaatggtggctacagtgtcaaattgtttataaactttatactagccgtgtaacttgggcaagttattcaatatctgtgacactcctatttcaaaaatgtaacatggataaaatacttgcttggttttgctatagggattaaattagataaagtgacataatacatgtaaagtgcttggtcccataggcctggacattgttagcttgtattagttaatttataatgggtactttttccccctttgtcaatgatcccatccctaatacctagcacrtggctgttcacatagtatggatttaataaatggctatggaattaatgtacaatgagaagttaggttttatttatttatttttattattcattcatttatgtatttacttagtagagacagagtctcgctctgttgcccaggctaaaatgcagtggcatgatcatgaatcactatagctccgaggctcaagcaattctcctgccacagcgtcccaagtagcaaggattaca

SEQ ID NO: 506233 - DNA, 554 bp, Homo sapiens
tgttcttgaaaatctgatctaactcctaagaagacaaggagggcctcaggggatcagaatagtggactgcagcagggaatttactggaaatcaacatggctttaggcctcttactttcagccttcagaatctaatcaacttcatctatggataaaatgtacaaatttraccattttgctggaaactatcttaatgcaagatcacatcaatgattgaaaatgatgattttatctaggcagcgtgtattttgattttactcatggataactaagaactctaaaaatgttagaatgaaacatagaatagcagatgatttgagattctccttcctactacaaattgtatgggcaaaaaaggcttataaaaccataataatatatgtgaataatgaaacaaagtagaaatggctaaatagtatacccttatttatttatactgaaattatgatttttatatcaaagtagctatttacttatgtagtcctagagttaaaaacaaagaccctcctctatctcaggctctcgggtgattttactgacctcattgcataaaga

SEQ ID NO: 506234 - DNA, 596 bp, Homo sapiens
cagctgcattattaaaaaatgcagttcttttaatttttgttaatttaaattagttttttgcatatacatgacattatagtttctcttttaaatgtatcattctacttttataataaacttaaaggtcaattttgatagaaaaataaatggaccctttctgtcaaatttatgcagacctcttattcaaacaaatttcagtgatcccatgarctttatgaaataatttctttttataatttatgacatttcaaaaataaaatttaattgttgctttgaggaacttgggaacttggcaaagttgataaatatttcaaagttacaaataatatttacagtgaaacaggataatggaaattgcaatcaaaatgctatcaagacgagcatataaaatgatatgagctgtttttcaaaaagatatgtattcctgtaacttgttatctttcagtttctatcattagaaaacattagaaacatgcaggagctcaattattcctccaggacatatgtgaattagataatatacttcagttcctagtgaggagataagaaaattgaagatcttattgggccctcattaaatgtctcttgccagtatt

SEQ ID NO: 506235 - DNA, 596 bp, Homo sapiens
cagctgcattattaaaaaatgcagttcttttaatttttgttaatttaaattagttttttgcatatacatgacattatagtttctcttttaaatgtatcattctacttttataataaacttaaaggtcaattttgatagaaaaataaatggaccctttctgtcaaatttatgcagacctcttattcaaacaaatttcagtgatcccatgagctttatgaaataatttctttttataatttaygacatttcaaaaataaaatttaattgttgctttgaggaacttgggaacttggcaaagttgataaatatttcaaagttacaaataatatttacagtgaaacaggataatggaaattgcaatcaaaatgctatcaagacgagcatataaaatgatatgagctgtttttcaaaaagatatgtattcctgtaacttgttatctttcagtttctatcattagaaaacattagaaacatgcaggagctcaattattcctccaggacatatgtgaattagataatatacttcagttcctagtgaggagataagaaaattgaagatcttattgggccctcattaaatgtctcttgccagtatt

SEQ ID NO: 506236 - DNA, 538 bp, Homo sapiens
caagagctgccaggtttacatatttcaatttcagccctattcagagattaattatcagtttctaatgatcaataccaattttggggaggaacgttctggttggcctatccaagtcaggtgtctaccatcatccaaccaactatggctacagggmaagttcaccgtttgtaagcatggattctgaggctccactcctatgatgcggcattctctctataaaaatagacgtcagccaaatagacacttgtagtcaactatttatctgcctcgatctcccatgtaataagaaagtatttatttaaaaggaataagcataaaatgttagttgaatgaataaaatatgacattaaatgctattttaagtagttcttttgtatactgtactacagcacaggggcccgtcttcctaataagtgattatattaagatgctgttcagattatctaggccattattctctgatagaaatacaatggaagccacgttcataatcttaattgtctggtagcaacactaaaaaaaaaataaataaaaacga

SEQ ID NO: 506237 - DNA, 538 bp, Homo sapiens
caagagctgccaggtttacatatttcaatttcagccctattcagagattaattatcagtttctaatgatcaataccaattttggggaggaacgttctggttggcctatccaagtcaggtgtctaccatcatccaaccaactatggctacagggaaagttcaccgtttgtaagcatggattctgaggctccactcctatgatgcggcattctctctataaaaatagacgtcagccaaatagacacttgtagtcaactatttatctgcctcgatctcccatgtaataagaaagtatttatttaaaaggaataagcataaaatgttagttgaatgaataaaatatgacattaaatgctattttaagtagttcttttgtatactgtactacagcacaggggcccgtcttcctaataagtgattatattaagatgctgttcagattatctaggccattattctctgatagaaatacaatggaagccaygttcataatcttaattgtctggtagcaacactaaaaaaaaaataaataaaaacga

SEQ ID NO: 506238 - DNA, 635 bp, Homo sapiens
ctatttttgcaattataatctgtgaagattgaaaaacgttaagataaataacgtgtccaccttattaacaggcaactcatttccacacttgaatacatatcaataggggttccaagttcaatctccctcaccgacctcttctaactctttaaagacagcgcctgtagggaggtggcgcctcactgcactctctactgggcattgcaatctactttcaagaggctgggggagggtgatggttgttgaaataatagcacaatactaaaagctttcaaatccttttggaaagagaacatgttcagagaaagacaaaatgyatttctggcaataaaaaagagaacgcttctctatatttatagctgtggcagtcagttatgacgctgtttgtagccagcagtctaggtattagtgaaatgactcagggtatgaccttcagtagatcaaaattagttcacaattattaaatactcatggggagcatgacatttgtcaaatacaagaaatattctcatgtctcagctttgatgtgatataatgtccaattctcttagattaaccattaaagtgagaataatgatatttattgtgtaatgatctgacagatttttagaaatgaggatttaaaatcagattaa

SEQ ID NO: 506239 - DNA, 637 bp, Homo sapiens
tttaggtaaagtccaactaagaataataaaaaattgttatgttctctccttttgtataagatttgtgcaaagaggtaaattattaatcaaactgtattagaggggtttattttcttcccctctctatgaggttcaaacaattgggataggttggacaggaggatcaaacatagcatatgtacaaggctataagctctcctgttgtcatggtagttgctatatggttaaaagaaattgtagaagagacggataatgactttcctactattggagaaaagaaagacagaaagatgggaaagacattcacacagagccaaaaggattttctgtgccatgattgaagcctcttgtaakcatccaagcaggtcttcataaaggcactttcctccatcctattgtgcattagttttgatttgcctctctccattttctgttggagagaagtgtctctgctcttgaggactcttgaagagaaactgaaagactgctatcatttttgccatgaagatgagttttaaataaagtgctctagaaagctagttcctgctttctgctcagatccttctaagctaaccacttcaaatgacttttagtgatgaggacattagctgtaataagatactagccttgaaaatgc

SEQ ID NO: 506240 - DNA, 592 bp, Homo sapiens
ctcaaatatgtcagttataatccagtagttaatactgaaggcttccactttccttttattgtagaaaaaataagatgtgtttaattaaaagttgccaycataagtgccacttatttataccatttgttttcttctttcacatgaatataattgagtgattatacagtggaaaagtatcggaataattcttagaatactttcattgccagatgaaaggcaaattttagctatcccctttatagaggttatgagaaaatgccatgcatctcactccatcatctccaaaacaataatgtggtggctcacttagaatttttaatttgcaaatattagtgaattgcatttactgtagttgtcatataaatttaatcttctttaagtctctgaagccacctcaaaattctgttctttctttctccttggaattcatattttaatatgaatggactattaggtagagtcaaaactgattccacagtgtgaaatctttatctgcccttttcccaaaggcaaacattatgttgattatcatatatggaccttggactctatcagttccaagaatagaaagaactatatacggagaaggcca

SEQ ID NO: 506241 - DNA, 592 bp, Homo sapiens
ctcaaatatgtcagttataatccagtagttaatactgaaggcttccactttccttttattgtagaaaaaataagatgtgtttaattaaaagttgccatcataagtgccacttatttataccatttgttttcttctttcacatgaatataattkagtgattatacagtggaaaagtatcggaataattcttagaatactttcattgccagatgaaaggcaaattttagctatcccctttatagaggttatgagaaaatgccatgcatctcactccatcatctccaaaacaataatgtggtggctcacttagaatttttaatttgcaaatattagtgaattgcatttactgtagttgtcatataaatttaatcttctttaagtctctgaagccacctcaaaattctgttctttctttctccttggaattcatattttaatatgaatggactattaggtagagtcaaaactgattccacagtgtgaaatctttatctgcccttttcccaaaggcaaacattatgttgattatcatatatggaccttggactctatcagttccaagaatagaaagaactatatacggagaaggcca

SEQ ID NO: 506242 - DNA, 531 bp, Homo sapiens
ctgtcagcttagccaagctatctgcttctttccccaaggctaggttatggtatcccatttccattttgcttatgtttcctaatgcttttaagaaaaagaaaaatayggctaggtgcagtggctcatgcctgtaatgccagcactttgggaggccaaggcgggcggatcacccgaggtcaggagtttgagaccagcctgaacaacatggagaaaccccttctctactaaaaatacaaaattaacggggcatggtggcgcatgcctgtaatcccagctactagggaggctgaggcaggagaatcgcttgaacccaagaggtggagtttgcggtgaaacgagattgtgccattgcagtccagcatgggcaacagagcgaaattccatctcaaaaaaaaatatatatatacatataaaactcacatcaagtgtttttaatgtaaaaataatggcataactcccctgtaataatgttcccaaagatttctatagtactttgaataagattttcaatcttcagtgatagaatttcaa

SEQ ID NO: 506243 - DNA, 531 bp, Homo sapiens
ctgtcagcttagccaagctatctgcttctttccccaaggctaggttatggtatcccatttccattttgcttatgtttcctaatgcttttaagaaaaagaaaaatatggctaggtgcagtggctcatgcctgtaatgccagcactttgggaggccaaggcgggcggatcacccgaggtcaggagtttgagaccagcctgaacaacatggagaaaccccttctctactaaaaatacaaaattaacggggcrtggtggcgcatgcctgtaatcccagctactagggaggctgaggcaggagaatcgcttgaacccaagaggtggagtttgcggtgaaacgagattgtgccattgcagtccagcatgggcaacagagcgaaattccatctcaaaaaaaaatatatatatacatataaaactcacatcaagtgtttttaatgtaaaaataatggcataactcccctgtaataatgttcccaaagatttctatagtactttgaataagattttcaatcttcagtgatagaatttcaa

SEQ ID NO: 506244 - DNA, 494 bp, Homo sapiens
atttatgaggcagaaaaccctgctggcttaaaatttaaatgtgtactaaattaaacaacctttatcaaggaagttttctaagttatgatgagaaaaacaaaatttccatcactaattagtcattgataaaagagaaraaaatgatctattatctcagattaaatttggcttttaaagatcttgagctgtttattatgagttttgtttctctaaacaatttcccttatatatacaatatacaataaagcaatagcaatacatatttgctacaaagtgatagctacactctaaaggatataaatcatgtatgtgtttataattgatgtgtatagattgtttttctccttattatagattgtttttctccttatctacatatgcagaatggagtttgtttgtgttttgtgtagccatgccattagtggacacaggatagtgttttgaggcagagtgacctgaattagaatcctgaatctgcctcttattagctagtc

SEQ ID NO: 506245 - DNA, 589 bp, Homo sapiens
aacttttaaaatctcccatttgtgggatttttgtcaccatttatcatgagtccagtccatattttgacctcaaaatatgcagagcggaacggtaggtgactctgagagctgacaggtctgattttactggggaggaaactggggcacagagaagcaagtgacttagccaaggtcacacaaggagtcagtggcagagaaaggacaggagcccagggctgggggggaaattaccagccacggaaaagcatgatggaaagaaatcagaggcagcaataatgtgctcaaattattgkgattcttggcatttctaagagccgtcagccatcccatccaggggaaatgaaggcagaggggcgcgggacagggagggaagctccagagttcagggctggcccattcatgcggccactgcctaacgggtggggagacgagaagacaaagcctcaatacaatgatgcctcccctggtgtatttctgtgccaaaaatagccaccattaacttaaatacagccatggagggttcttggtgcaacatagaaggtgtaaaaggcctcaaaaaatgtctccaggagaatttccactcatggta

SEQ ID NO: 506246 - DNA, 480 bp, Homo sapiens
atggactaaaggagataacggatgtgaaagtgctttgtatacaaatgtgggcgattattattatcatgacagttcataaaacccgggtggagatttttgttacaaacaagttctctcccatcccaccagcagtccaggggctggcccagtgctttgttcccaggaagggcatagctggaggggccggctgggttggggcagaggccagggcgggctcctcactcccaccatctgcactgcggggtcagcccatctgtccagcagtgggcacacatgtggcctcatctgagggtatgaggtcttcggggtcaagcaggagaaaattgggggcagatgaggggaagrttccagcttatttttagaaaagggggaaagagaggaagacaggaagggccttgttcgtcagtatttccaccatgtggatggcaggcgggagggtgggcaggcagccaggccaaggctagagacaaagatgtgtcc

SEQ ID NO: 506247 - DNA, 628 bp, Homo sapiens
tatatggtcactgtaattaagtgacaactcataaatgtcccttaagggtgggaagtgttgatctggctgacaggacagactcacatttagttaggagatgggttattgaaatttaacatasttaggagatgggttattgaaatttaacacagttaggagatgggttattgaaatttaacatagttaggagatgggttattgaaatttaacatagttaggagataggttattgagatttaacatagctaggagacaggttattgaaatttaacataggagataggttattgagatttaacacagttaggagatgggttattgaaatttaacagggctacagcagtccctccattaggaccttccttcctcatcttacaagatgagaagaatagatacttattacagatatcatcattactagttacacacaatgcaggaaaggaggatcagatactcctggaggctgttcttcatcacacatgcttttctcaatgcatgtatatgtgtgttatatgagttatctcaaacagttccacctctgacttggtttgttctttgagctgtaatgtatttaaaagtcactgtcactatttgtgggggggatgtgtgtgtgtgtttgaaacattct

SEQ ID NO: 506248 - DNA, 628 bp, Homo sapiens
tatatggtcactgtaattaagtgacaactcataaatgtcccttaagggtgggaagtgttgatctggctgacaggacagactcacatttagttaggagatgggttattgaaatttaacatagttaggagatgggttattgaaatttaacacagttaggagatgggttattgaaatttaacatagttaggagatgggttattgaaatttaacatagttaggagataggttattgagatttaacatagctaggagacaggttattgaaatttaacataggagataggttattgagattyaacacagttaggagatgggttattgaaatttaacagggctacagcagtccctccattaggaccttccttcctcatcttacaagatgagaagaatagatacttattacagatatcatcattactagttacacacaatgcaggaaaggaggatcagatactcctggaggctgttcttcatcacacatgcttttctcaatgcatgtatatgtgtgttatatgagttatctcaaacagttccacctctgacttggtttgttctttgagctgtaatgtatttaaaagtcactgtcactatttgtgggggggatgtgtgtgtgtgtttgaaacattct

SEQ ID NO: 506249 - DNA, 640 bp, Homo sapiens
tgtgtcttaaagatcaagtttttgttatagcctacaagctatggaaaattctgccagatgatttggagacattcatttctcctttatttcttgctagcagagccacacttttgttcggggtccaccagttctccacccgacctctaggaaggtgactctacccataggtcygaggtaaggcctgattcagatatagggggaagaaaaaatagtttttcctctacccttctaagttctaaactggagcctctttaacagaagacagattaacaagagaaaaacaaagagaagtgtattaacatgtatatcccatatatacatgggagatgcccagggaaatgagtaactctcagagagttggcttagaattcaggtttaaatactatctgcagctaaaaacaaagtcatgagggtgatcaggaaaagtacagtaaatgagagaaagggtttgttatgcagattttactcagtgcctcctcccttgctaaagagtctcttgtttagagtcttcattctctcctggcatagagagaaagtcacgcttacaaatgcagagtcccctcataaagtacatttcccttacaaaagggcagtgtatttattctgttcaaggagcttctcctgtatctgctgtgtctca

SEQ ID NO: 506250 - DNA, 640 bp, Homo sapiens
tgtgtcttaaagatcaagtttttgttatagcctacaagctatggaaaattctgccagatgatttggagacattcatttctcctttatttcttgctagcagagccacacttttgttcggggtccaccagttctccacccgacctctaggaaggtgactctacccataggtctgaggtaaggcctgattcagatatagggggaagaaaaaatagtttttcctctacccttctaagttctaaactggagcctctttaacagaagacagattaacaagagaaaaacaaagagaagtgtattaacatgtatatcccatatatacatgggagatgcccagggaaatgagtawctctcagagagttggcttagaattcaggtttaaatactatctgcagctaaaaacaaagtcatgagggtgatcaggaaaagtacagtaaatgagagaaagggtttgttatgcagattttactcagtgcctcctcccttgctaaagagtctcttgtttagagtcttcattctctcctggcatagagagaaagtcacgcttacaaatgcagagtcccctcataaagtacatttcccttacaaaagggcagtgtatttattctgttcaaggagcttctcctgtatctgctgtgtctca

SEQ ID NO: 506251 - DNA, 600 bp, Homo sapiens
acttcattcagcattcctctcacacgttgcctcacagagggaccttgtttaatttactctatttaaataattcctgtcactccctgcactatctctttgccttgatttatttttattcataacacatcattgtttgttcttacattacatactgatttgtttattatcattctccccgattataacatatgaggacaagtaccttgtcttgttcacttctctatcagggcctggcatgtattaggcattcagtaatatttttgtattaataaataattgaacgaatgaatgagggggcataatctctgttagttcacttcttcaaatcacccaaatrtgcaatcagtctagatgtaaactttatgtttgctttgtaaatgcagctctaagataaatacttgctcctatgccagagcccacacagtgtagttgtgcaggttgcacactgcagagtgttagaaggcaccgtacacacacacaagcaattttggaacagccactgtctcattactcattaaaatattcactatttgttgtacttgtctttagttgcacataatagaaaatgtaattcaaaattggaataaacaagaaagattt

SEQ ID NO: 506252 - DNA, 600 bp, Homo sapiens
acttcattcagcattcctctcacacgttgcctcacagagggaccttgtttaatttactctatttaaataattcctgtcactccctgcactatctctttgccttgatttatttttattcataacacatcattgtttgttcttacattacatactgatttgtttattatcattctccccgattataacatatgaggacaagtaccttgtcttgttcacttctctatcagggcctggcatgtattaggcattcagtaatatttttgtattaataaataattgaacgaatgaatgagggggcataatctctgttagttcacttcttcaaatcacccaaatatgcaatcagtctagatgtaaactttatgtttgctttgtaaatgcagctctaagataaatacttgctcctatgccagagcccacacagtgtagttgtgcaggttgcacactgcagagtgttagaaggcaccrtacacacacacaagcaattttggaacagccactgtctcattactcattaaaatattcactatttgttgtacttgtctttagttgcacataatagaaaatgtaattcaaaattggaataaacaagaaagattt

SEQ ID NO: 506253 - DNA, 594 bp, Homo sapiens
tgcttcagggactggtaatgaaaggaagaaatcactccatgtttccaaaagaggtatgtgccatctcatacagttcatagggcaataaaaagcactcttcagagtagatarctctttcacaattacagacctaggacaccagaatgagactttgacattagctttgtgcctagatggaacataaatgttccattgctttgtgagccatcctatctagaaatagttttaattacctttagaataatggcaacttcaggtctattctctccagccaggaactctcacctgagcctaggtaggtcaatccagctatctactagacccagtatttcatacatattcgttatgctttctgcaaaacctgtccttgctgctgcttctcctctgtgtctatctcagtgtatcttcagttcatccatcatccataaccctatatgtatccatattgctgaaatatgaatgattaattaagtagaattttgcctcttattcatggcagggatgtctctgtgtcctttttgtcattcaaccaactgggctgagagatgccattttttgcatgtgggtgccacggtcattctgggcatggatacc

SEQ ID NO: 506254 - DNA, 594 bp, Homo sapiens
tgcttcagggactggtaatgaaaggaagaaatcactccatgtttccaaaagaggtatgtgccatctcatacagttcatagggcaataaaaagcactcttcagagtagatagctctttcacaattacagacctaggacaccagaatgagactttgacattagctttgtgcctagatrgaacataaatgttccattgctttgtgagccatcctatctagaaatagttttaattacctttagaataatggcaacttcaggtctattctctccagccaggaactctcacctgagcctaggtaggtcaatccagctatctactagacccagtatttcatacatattcgttatgctttctgcaaaacctgtccttgctgctgcttctcctctgtgtctatctcagtgtatcttcagttcatccatcatccataaccctatatgtatccatattgctgaaatatgaatgattaattaagtagaattttgcctcttattcatggcagggatgtctctgtgtcctttttgtcattcaaccaactgggctgagagatgccattttttgcatgtgggtgccacggtcattctgggcatggatacc

SEQ ID NO: 506255 - DNA, 594 bp, Homo sapiens
tgcttcagggactggtaatgaaaggaagaaatcactccatgtttccaaaagaggtatgtgccatctcatacagttcatagggcaataaaaagcactcttcagagtagatagctctttcacaattacagacctaggacaccagaatgagactttgacattagctttgtgcctagatggaacataartgttccattgctttgtgagccatcctatctagaaatagttttaattacctttagaataatggcaacttcaggtctattctctccagccaggaactctcacctgagcctaggtaggtcaatccagctatctactagacccagtatttcatacatattcgttatgctttctgcaaaacctgtccttgctgctgcttctcctctgtgtctatctcagtgtatcttcagttcatccatcatccataaccctatatgtatccatattgctgaaatatgaatgattaattaagtagaattttgcctcttattcatggcagggatgtctctgtgtcctttttgtcattcaaccaactgggctgagagatgccattttttgcatgtgggtgccacggtcattctgggcatggatacc

SEQ ID NO: 506256 - DNA, 575 bp, Homo sapiens
tgacaaaggcagagagagtaaatttggcctgcagcctatagtttaccagcctcttctttagaatgtcaagtccatgatatcaggggccctttctgtcttcttcattctgtatctcctatgtgttcaatagtacttgaccttcaaagaaaagaaagtatcttcatattgtgtttaaatctgaatctgcgagaggagctttttatttcaagcagactgcagagagaaaaatcttcactagaatctggtgctttcttgctaatgaaagaaagcactcagtatgtataaagtagggagttaattactattaggcttgtgagtaaaagagacttatggattaattaactcaaggcttggtgaatgcatttaaggcttgtaagcaaaatcaatttctttaacaaatatatttaacagcctaagtgaacaaataaagwttcctaaaataactttaaaaatctttgttgtataacaaatatatggtgcagtttacagtcctgtgaaagtaaataaaatttttctagttgaatagctgaatatcttcgagaaccatcaacttgcttttcaataccttgggacta

SEQ ID NO: 506257 - DNA, 599 bp, Homo sapiens
atgaacttgcaagtgcctgttggccctttgaatcaagtccttcaaatctcagcattccattttcagctatttattcctgcaccagaaagagcacttatctacctagaaaccacaattagaaatgttctccacgtagaaactggtttgaccattttaagaaagaactgactagggtcgttttgtttttaaatcagcaagtcagtctcaatccacaagtcacatctggagataaamctctcaatccacacatttcacagacaccaagagagtgggaagaggaaggaaatcttggcaggcagtggggagctgctagatgggcagaaagcggactggttgaggaatgagagttcgtgtgagcctaggagagctttgagggaggaagagaacaagagtgtggggagataagaagttgtgctcagttgggaagatgatacagcctgaaatgttagagaaagaaaatttcaggagaaaatggaggtgtgacctgagaggaggtagctaagatagaatggagttgaaagttatgaattgaggaaatcatgtagcaagttgaaaagacggagaatgctgtcctgtctatcttggagggactcatggaa

SEQ ID NO: 506258 - DNA, 599 bp, Homo sapiens
atgaacttgcaagtgcctgttggccctttgaatcaagtccttcaaatctcagcattccattttcagctatttattcctgcaccagaaagagcacttatctacctagaaaccacaattagaaatgttctccacgtagaaactggtttgaccattttaagaaagaactgactagggtcgttttgtttttaaatcagcaagtcagtctcaatccacaagtcacatctggagataaacctctcaatccacacatttcacagacaccaagagagtgggaagaggaaggaaatcttggcaggcagyggggagctgctagatgggcagaaagcggactggttgaggaatgagagttcgtgtgagcctaggagagctttgagggaggaagagaacaagagtgtggggagataagaagttgtgctcagttgggaagatgatacagcctgaaatgttagagaaagaaaatttcaggagaaaatggaggtgtgacctgagaggaggtagctaagatagaatggagttgaaagttatgaattgaggaaatcatgtagcaagttgaaaagacggagaatgctgtcctgtctatcttggagggactcatggaa

SEQ ID NO: 506259 - DNA, 599 bp, Homo sapiens
atgaacttgcaagtgcctgttggccctttgaatcaagtccttcaaatctcagcattccattttcagctatttattcctgcaccagaaagagcacttatctacctagaaaccacaattagaaatgttctccacgtagaaactggtttgaccattttaagaaagaactgactagggtcgttttgtttttaaatcagcaagtcagtctcaatccacaagtcacatctggagataaacctctcaatccacacatttcacagacaccaagagagtgggaagaggaaggaaatcttggcaggcagtrgggagctgctagatgggcagaaagcggactggttgaggaatgagagttcgtgtgagcctaggagagctttgagggaggaagagaacaagagtgtggggagataagaagttgtgctcagttgggaagatgatacagcctgaaatgttagagaaagaaaatttcaggagaaaatggaggtgtgacctgagaggaggtagctaagatagaatggagttgaaagttatgaattgaggaaatcatgtagcaagttgaaaagacggagaatgctgtcctgtctatcttggagggactcatggaa

SEQ ID NO: 506260 - DNA, 626 bp, Homo sapiens
ttggtggaaactttggtggaattacccttccagatgtttttatacccatatattttctacaaataagatcatactattcctgatgaactgttatgtcttttattcacttgaaataggtttttaaaaatctcaataacaactcatcttcaatataattttcaatgctagaatcattactattatacaatattgatgtaacttaatgattcttctattggttgaatatttatatagctgacaattgaatttttttaaagtttggggcatatttaaaatagacctaaaatataaagaatagttcgaaaatatccatgtgaaagttgcattttgactactattaaaatatgataagtcttgtatgtaaatctttgtgcttacctttaattatatcactaagataaattcttctaattcttctaagaatttatcctagccatccacagtcaattctgaaayaccctgttatttacatgggtcagccctattcagtgtgtgaagggactgcctgagagcatgaatactaggaggctagtatcaccaggggccatcttggtaggtggctaccacatatgacagggacattttttaagtcggggtcagttgtcttgtagagtaccacatgttct

SEQ ID NO: 506261 - DNA, 650 bp, Homo sapiens
ctgggctgtgttctcatctggaaacttgactggggaagaatctgctttcaagctcatttaggttattgatagaattcattttttctggctgcagaactcatggcagcttgcatcttcaaggccagtaggaagcttgtctgacctcatggagggcccaatccttctttgaatggctttcatatgattaagccaggccaatgaatgagaatctcccttttgattgcctcagtcaactgattcaaaacctcaattaaatttgtaaaattttaaacatttactatataaataaaccttttccatcacttattgaccagaaaccagctacaggttctgcccttagaggaaggagaatatacaagtatgtagttcacataccctaaggttatcttagggtatttcttccaagggagcttctgatctctacctgaatacatttcaatacctgtgatgactaatctcacttgccaatagaatcttagcagcaggctgtttaccaaatgtaacatagtcttttatcttcatttgaakaagactatgaacacattatggtataggattataattaaatgatgacataattgtgtaaactctaaggaaatatgtataaaacaaagagtttccactaaatgaaaggatttggttcaccagtt

SEQ ID NO: 506262 - DNA, 185 bp, Homo sapiens
aatatgtatgggatgttcaaaagagacaaagacatgtgaaatatttttgggggagagtaagaaagtatgaaacacaaattttgtagatacatatttaagtcagaaaagttattttttatatggatgaatggatcagttatctwtcatgtatgtgcacattctgctcttccaggaaaggaacagaa

SEQ ID NO: 506263 - DNA, 576 bp, Homo sapiens
gaatatgtatgggatgttcaaaagagacaaagacatgtgaaatatttttgggggagagtaagaaagtatgaaacacaaattttgtagatacatatttaagtcagaaaagttattttttatatggatgaatggatcagttatctatcatgtatgtgcacattctgctcttccaggaaaggaacagaacagatagagaatttagttwctatcaaggttgcagttatatgaaatatgtttaatagaaaaattggagcaaggactgtgtataaatgtataaatggccaagggcaatgaagagtacaaaatggaccaagcatgaataatatctagaaaagatcagcacagaaatggctaatgagatagaaaaaaatgggtcaagtcaattcattacagactttaaggaagtaaaaatatttttggaatgtaggcactaaaaaaagacaaattagaaagtgttggaaaaaggtaagtgttgattaaagtgggatgcttgaaactgagatttttttatagttctacagctactgacaatcacgaagcttagaatataacaatgggagtttctgactgagtgac

SEQ ID NO: 506264 - DNA, 651 bp, Homo sapiens
gttatatatatgtactgctcacttgctcttcatcatcyactcagtgctctgggtctgctataggactagttagatgctgtagaaaatagtgtatgtcagattttgatgggttgcaataaattgctttaaattttttcatacgttttgcctaaaatgtggtactttgaatgggcaacttgggctgatactttccttgtgtactagtgcttggttggcttgcattttgtattatgataaaaaataacagccctttaagaacttaaaaatgtaaattattattgagacctgactaaatctcattgtattggattgcttggggtactgtaacaaaattccatagactgagtgtcttcaacgcaaacactgatgttgtggaggctgcaaaatccaggaccaggctgatttggttcttggtgagggctctctggctttcagatggacaccttctcacagtgtccttacatgatgaaagagagctctggtttcttccttttcttataagggcactaatcgtatctattatggccctaacctcatgacatcctttaaagttaataatctcccaaaggcctacctccaaatatcattacattgggtataagtgcttcaacatatgaattttaaagtgacaccattcagtccacagcactc

SEQ ID NO: 506265 - DNA, 601 bp, Homo sapiens
tcaagaaggggagtcaattcaaggtaagcagtaacccagatggaggtaggttgaaaactatgattgtggagatatgaaagaattcctgtcyggtagctttactttctcagtaaaatatgtctggagctcctcagagtgagttaattaattggttacacacagcatcttgaccaaaaaaacaaaacaaaacaaagccaaaactaatgactgttgaaattacggcagttttgtgactttaacagcatttaaagcaatattaggcaaataatatatttggagaatgaaatagtttatcttctcgaattgagaaaagaaaataatacattgtctataatttgttttaaaataattcatcatagtatattacaagtatctgtgctggtctaaacttcacttcttgaactgcaaaaagatgatgatatgttgtctataatttattttaaaatagttcatcacagtgtattataagtatctatgctggtcaaaacttcacttcttgaattgcaaaaagataatgacatgttgtctataatttattttaaaatagttcaccacagtgtattataaatatctgtgctggtctaaacttcactaaagtaaa

SEQ ID NO: 506266 - DNA, 672 bp, Homo sapiens
ataatagtgttcagatcaaaactaacaaccccatatttccaaaccatttatagtagggtttatcttgagaataatttctgagggtgggagtttatattctattaaagatttttggttcatcactgtctgaacactaaaggtattgaatgtagtgtttctgtacttctgactattttgtgtggctttctctatagagaagagcatgcgaatagagatgcatagcctgcaggtgtttgcatattgaatccacatgtgctttttccgttagttgctggggatggctttgatggaatctgttatcatttatggcattgtcccttttgtttctagactaggttgtggttttgcctaagttgtgacccccccscaatatcaattgcattgaatgaaatatgatatatttaccgtttgtgattttccatactcaacacctgtgccactctcctccaagtagtattcccacttttatgaccccctttcctttcatttgccttacacttgactttgcgagaatccagatgtagcaagatgctctgattctgatcacaatatttcttagctttattgaaactgtagggctgtttgttaggcccttacgaatgaatttggatttcctcccagtaaacttgtggcatttaatattcatgacctgtagtactataaaactttgaa

SEQ ID NO: 506267 - DNA, 450 bp, Homo sapiens
ccattgggtggtgagattctcagtaacaacctagcctttctgaattctacctgcttttttgtaaaacacgaattcacaaagtttacaaacatcatgatgttttagaaagggctacttgagataatacatgtaagrcactctgtaaaatgtttaataaacattcataattagcgttgccactaataaaccattttctccacatcacatcccaaactgagatataataatagaacagaatgttttctgggcactgctgtccttactggatgccgggacttcatctgggaggaataaagtgatgtaacaggtgtttaaattcattaggcaattatacacagccttctttcctcataatatctggtctctcacagaaaaatataacggaacttaatatatcatttggatgacctgcatttgtttagattgttgaaggagcaagacacatgggtt

SEQ ID NO: 506268 - DNA, 620 bp, Homo sapiens
ttaaataatggataacattatttaaaataatcaagaactgcttgattattttaaataatggataacacataatgtacacttctcccatctcttaatatttctctctttcctttttcaaataatggaacacaacataggaataatttttcattagagtaacaatttatcattatttatctaatgataataatttatcattagagtaacaatctaaattttagcacagtctttccattggattaatgagagttcttacctgaagaattctgtgcccatccaccaaargaaacctgtcatcaacaattaatgttgtttagtcagtggtagttctaccatgttggtttcttgttttagaaaatataatcttggtatttaaagtcagcacgttatgcctgtttataaatcatgtttttccttcttaaggaaataattaaaaggtacaagatagaaaaaggtgctgggagtttgaagatacaacacatgaaatgacaaacatgctcacacagttgaattcaagaaataaaaatatagagatcaaggcatgatgtaggcttattaaaatataaatatgtgtgtgtaatacatatataagtatgtattctgtttaatctctgtccata

SEQ ID NO: 506269 - DNA, 513 bp, Homo sapiens
ggctcagtatggattaaactaattgaggtggcagggttttgttgagaatggaggacaaaattgcatcgcaagcagaatctaagtgaagaattacaataaagaaacaagaaaaaggagggtttgtttagaatcagttcttcctttgcttacttaaatagaattctgtgaactttgrtccaaaaatgagaagaaaaacaacaaaaatatggacaacaacatgattaataagtgctacttgtttcactggttctaccactgctcctaacgaggagtaaagtagaaagatctcaggagcaggaaccagggtgactgggatccagccccagccctgctcctcttacctgcatggtcttgagaaagtcacatttccctccagacctgtttcctcatgtataaaattcctacaacacattttatcatctatgaaatgcagtaacccctatcctgttccgccagccaccttgtgaccttgggctttctgagccacggtttccttatttgcagaaaggggat

SEQ ID NO: 506270 - DNA, 517 bp, Homo sapiens
ccaggctcagtatggattaaactaattgaggtggcagggttttgttgagaatggaggacaaaattgcatcgcaagcagaatctaagtgaagaattacaataaagaaacaagaaaaaggagggtttgtttagaatcagttcttcctttgcttacttaaatagaattctgtgaactttggtccaaaaatgagaagaaaaacaacaaaaatatggacaacaacatgattaataagtgctacttgtttcactggttctaccacygctcctaacgaggagtaaagtagaaagatctcaggagcaggaaccagggtgactgggatccagccccagccctgctcctcttacctgcatggtcttgagaaagtcacatttccctccagacctgtttcctcatgtataaaattcctacaacacattttatcatctatgaaatgcagtaacccctatcctgttccgccagccaccttgtgaccttgggctttctgagccacggtttccttatttgcagaaaggggatt

SEQ ID NO: 506271 - DNA, 517 bp, Homo sapiens
ccaggctcagtatggattaaactaattgaggtggcagggttttgttgagaatggaggacaaaattgcatcgcaagcagaatctaagtgaagaattacaataaagaaacaagaaaaaggagggtttgtttagaatcagttcttcctttgcttacttaaatagaattctgtgaactttggtccaaaaatgagaagaaaaacaacaaaaatatggacaacaacatgattaataagtgctacttgtttcactggttctaccactgctcytaacgaggagtaaagtagaaagatctcaggagcaggaaccagggtgactgggatccagccccagccctgctcctcttacctgcatggtcttgagaaagtcacatttccctccagacctgtttcctcatgtataaaattcctacaacacattttatcatctatgaaatgcagtaacccctatcctgttccgccagccaccttgtgaccttgggctttctgagccacggtttccttatttgcagaaaggggatt

SEQ ID NO: 506272 - DNA, 517 bp, Homo sapiens
ccaggctcagtatggattaaactaattgaggtggcagggttttgttgagaatggaggacaaaattgcatcgcaagcagaatctaagtgaagaattacaataaagaaacaagaaaaaggagggtttgtttagaatcagttcttcctttgcttacttaaatagaattctgtgaactttggtccaaaaatgagaagaaaaacaacaaaaatatggacaacaacatgattaataagtgctacttgtttcactggttctaccactgctcctaacgaggagtaaagtagaaagatctcaggagcaggaaccagggtgactgggatccagccccagccctgctcctcttacctgcatggtcttgagaaagtcacatttccctccagacctgtttcctcatgtataaaattcctacaacacattttatcatctrtgaaatgcagtaacccctatcctgttccgccagccaccttgtgaccttgggctttctgagccacggtttccttatttgcagaaaggggatt

SEQ ID NO: 506273 - DNA, 587 bp, Homo sapiens
cagttaagaaacaatgttgtagagggctggagaaacgctactgtgttgaatgtatgctgcaactctaagatgaatccctattttaggaatgcaatgtttttatttaatgcgtactttggaattgaagaaacaagactgttaacttctgccctccttttagctcacagaagacaacactttattgaccttgaagacacaagttacatttttaaaatactgttctataatatcagtcacactttgtataaatagagacaattttctccccaagttgtctaatctgctaagacaggggttagcaaactttggcccacctcctgattttgtaaataaagttttattggaacaaagccatgwctagttgtctacagattgtcagtgtctgcttccacattacaacagcagagctgagtagttgcaatagagctcatgtggcctgcaaagtctaaaatatttactatctggcttttaatagaaacaatttgctgaccactggtctaaggttatagggaatgcaaactggctgcccaaaggccagttgtcctcaacaaccatgttttgctagtgttttaaaaagtgagccaaag

SEQ ID NO: 506274 - DNA, 631 bp, Homo sapiens
atgactatctgggtaagcctacctaagaataaagccagtgtggaggaagacagaagagagatggagaaaagaagcagagacttaacttgtgatttgaactactgcatccaattgttcctgaagctagcccttcttctgcactttctgactagaaagcagattccagaaagcaaaacccctctcatattttttcttttcttttcttcttttttttttttttaggtttaaaccagttttaattggatttccctcacttgcaacaaggaagacctgaataatattgcttctgtctgyatgtccaaatactttcatttttcaagaagcaatgttataccaacgtcagaacaaaggaacactttatgctgatccttgcagtttccattattagagacccaaaggaatcagaccaggagatcgttttgctttaaactagtagaatctgacctaaggcaaatatcacttgagaaaaaggagaaaacacatttcttccttcaacagcgtcatccccattcttggcagagagagatgtgaatgaccaacagccatgccattgcatagtttcatctttcatgtaactttttcatatttgaagccaaacatttggagccaaagcctgataacccagcgagtc

SEQ ID NO: 506275 - DNA, 631 bp, Homo sapiens
atgactatctgggtaagcctacctaagaataaagccagtgtggaggaagacagaagagagatggagaaaagaagcagagacttaacttgtgatttgaactactgcatccaattgttcctgaagctagcccttcttctgcactttctgactagaaagcagattccagaaagcaaaacccctctcatattttttcttttcttttcttcttttttttttttttaggtttaaaccagttttaattggatttccctcacttgcaacaaggaagacctgaataatattgcttctgtctgtatgtccaaatactttcatttttcaagaagcaatgttataccaacgtcagaacaaaggaacactttatgctgatccttgcagtttccattattagagacccaaaggaatcagaccaggagatcgttttgctttaaactagtagaatctgacctaaggcaaatatcacttgagaaaaaggagaaaacacatttcttccttcaacagcgtcatcyccattcttggcagagagagatgtgaatgaccaacagccatgccattgcatagtttcatctttcatgtaactttttcatatttgaagccaaacatttggagccaaagcctgataacccagcgagtc

SEQ ID NO: 506276 - DNA, 590 bp, Homo sapiens
taggtaaccacatgataataataataagagatgcagatacaggtttgaacgtgggcaatgcctcctggttcatcctgctatgttctgagtacttactaagtgctaggcattatgccaaggacaagattcaccggcactgtgtctgasccctcccaacaatcccatggttgtctgcctcattttgcagatgagaaaatgaaggttgagagcatgcagtgaggcctgacttcagtttcccaatctgtagaacacatcatccacaaagccatgctcctcttggcctctgggcttttaccctcagcagtgtccctcaagccccctaacccatctcgcggctatctcccacctcatcgcagccggagcaccggggccgcagactctcgcagtaatggcggccgcaccagggtgcaccatccttccagaagtagatgaggtccaccagcggctcggagcacttggcacacacaaagcaggtggggtgccactgcttgttgtagcctgccctgtccgagtagaccacggggctgtcaggaggggccgctcccttgcagagctcgcagacctggaaggatggggaaggaccataggag

SEQ ID NO: 506277 - DNA, 611 bp, Homo sapiens
ctggctgtttgtcatcctctttccatctggggctcctttatctgtcttttactgccagtaacattttcactggcctgctcagaaaccatgacaaggtggacctcaactcatgttgttcctcagcttcagttaggattggggctttgtggggagggtgagtgtgcctgggagaagttctctgtgagagctctagatttctgtcttctgccagttcccaggagcagtgaaagttgctaaatgctcattcattcactggttcattcaggtatccatccatcgcacatttataacttgcctattctcatcctctaaagaatgggaacttgacattctcaatccacacaatcttttgagtcattttggagttatcccctgctcctgtaagccccgatgatgatggaaacgacaatggctgtcatgtccctacagcgtgtctgcatccagcactgtgctcaggactttgctckcattactattaccccttacataagcccgagagagttatttctccttctagagttatttttctattcggaaaatcattatcttctctcttagaaattacaaaactgaaggtcagggagattcagtgatttgctcagtaatgcaca

SEQ ID NO: 506278 - DNA, 574 bp, Homo sapiens
  misc_feature (1)...(574): n = A,T,C or G
ctgacacttatagataatcattttactttattctttcaagtaaaatgtattagacaattagactagttttcaaagacccaaatatagtgcttgacacaaaataatagtacaatactttaattataattatttttgttactataggaggttaatggcttgaaaacttcttagaaagagttttttaaaggacccaaaaaactttttaaaaatgtatcatcttctgagagacgacccagatcagacaggattacccaacacaaaatcagtatgagtaagaagaaactacttcaggtgaaaaktcttaggacagcgcatcaagaattttcatgtcctcacaacaacatatattttcatccactctgtttttatatattccttcatgactcttcattttctaaaaagcacatgagagcatttcattattttgaagacattctgcgcagttgctagtcaatccaagaggtcagtgaaggcatttgtgggaaataagaaaaaagaattacagaaaggatcaccctgcccaactcaatacagtgatgaactcttgcagaatgntatttctaccactggtaac

SEQ ID NO: 506279 - DNA, 603 bp, Homo sapiens
cctttataaagacttaaatgacaaatgacatatttttcaggacactaggcccaaccgaagatacgatatcctttcctaatattatgaagtagattttggcacccaaagcacatttatatgtgtagaaagcacatttatatcagtagaaagtaattagtagtggttggtttattagagatagaatttagataattagagagaagatttgggggttaggaactacaaggtaaggataaatgacagaattatagtcaggaacctgaaaaggctctccaaatatatctgtgtaatagaacatttccacagagtgcaaaggatcttcaacttctaaaaccctgtgatataaatgattaatacayccagactatctgatgcttctcatgtatcttcagttcaggataaggggctaccaaataaaacttttcttacccttcatacccaaataatatgtatgcttaggtaagaaccttggtatttgtgggataggtcctggattgaagtctgaaggcccaagtttaagtcccagctcaactggttatttatggcatgacttggctaagtcatgtaaccaatatggaagttatctcatctgttcataatacc

SEQ ID NO: 506280 - DNA, 647 bp, Homo sapiens
tgttttggcttcacacatgtttattcttccttatactgcttgtccacacaaaaaacacaatgaaatgctttatcttaaaaaaatcaattattattcccggaggcctgtggtgtcttcaataaaaaggaaacaatttaacttttcccccaccacctaaatttgtcaaatctttgcattttgccatttttgcttcatttttttattacatattattattattttgtatgtggcttaaacaacagaattttattctctcacaattcaggaggctagaagcatgaggtcaaggtgttcggttgacagggttgatttctcgtaaggtctctctctttggcttataaatggccttcttccagtgtcttcacccgatcttccctgcgtgtctatttttttttttaaagaagtaaaataaagatacagttaaagcctctgagaaatccttccctcctcattcttgtttctctccttcgctttcgagaagtgaccactatgtcgaattaagcgaataacatgatattaaactgaatgttytgactgaagtaacaggatttcaaggtgagattctcatccacttgtggacgtgaaagtaggtgtcccaaatcagaccttacctatctttcaaagaccatatgaagtcctgtttctcc

SEQ ID NO: 506281 - DNA, 447 bp, Homo sapiens
ctctgcctgtgaacatctcatattgtatatgagacaatacatattatttcaacaaactaaaactgtgtttagagctgaagtcgttctaactacttcatttcttgcttctattattctaccacgatcaggtctttttctaatttctcatagcgcaaccaagggcagactataaagaaaagaatgtacagtctggaggctaattttcaactgctcaaaaacccagaccaaccctagggtctgttcctaggtttgggagacacggagatgcatcacagaacacttctgatgggtaatgcttgctctggagatgccctctggtgtgatcagggcttcatcaggcctgtwtgacatttggactttttcctttgtccagttctgcttccttgaccctcctttcattggtgttattccgtaataaatattttgaccctaaacactgtcttgaca

SEQ ID NO: 506282 - DNA, 620 bp, Homo sapiens
ctcccaaggcttcaagtaacatttatatgtagataattctcaaattcatatggttagcacagactttctgttggcaatccagacccttatatccaacctcaggacatctctgaaattgaactcttaattctttattcaaagtagttcttcaagtcttcctcatcaaagtaaataataaatatcarttatccatttggcgatatttgatactatcctctttctcaaaacccacatcccacctcatagcaaatattattggtttaacatccaaaatttctcaatcatatctcagttttcttagtctccattgctacctctcacccacactttcacgtctaacatcttaatgactcaataggctcccagattatttcataacttagaaaattataattcttaagatattttaatacagataaagcaaataactttaattaaaaattacattctataataggcttggtggctcatgcctgtaatcgcagcactttaggagaccacgacagaaggatcatttgaacccaggagttcaaaactagcgtgggcaacatagggagaccttgtctctacaaaaaaatcttaaaaattagccggatatggtggcacacgcctgtattccc

SEQ ID NO: 506283 - DNA, 620 bp, Homo sapiens
ctcccaaggcttcaagtaacatttatatgtagataattctcaaattcatatggttagcacagactttctgttggcaatccagacccttatatccaacctcaggacatctctgaaattgaactcttaattctttattcaaagtagttcttcaagtcttcctcatcaaagtaaataataaatatcaattatccatttggcsatatttgatactatcctctttctcaaaacccacatcccacctcatagcaaatattattggtttaacatccaaaatttctcaatcatatctcagttttcttagtctccattgctacctctcacccacactttcacgtctaacatcttaatgactcaataggctcccagattatttcataacttagaaaattataattcttaagatattttaatacagataaagcaaataactttaattaaaaattacattctataataggcttggtggctcatgcctgtaatcgcagcactttaggagaccacgacagaaggatcatttgaacccaggagttcaaaactagcgtgggcaacatagggagaccttgtctctacaaaaaaatcttaaaaattagccggatatggtggcacacgcctgtattccc

SEQ ID NO: 506284 - DNA, 620 bp, Homo sapiens
ctcccaaggcttcaagtaacatttatatgtagataattctcaaattcatatggttagcacagactttctgttggcaatccagacccttatatccaacctcaggacatctctgaaattgaactcttaattctttattcaaagtagttcttcaagtcttcctcatcaaagtaaataataaatatcaattatccatttggcgatatttgatactatcctctttctcaaaacccacatcccacctcatagcaaatattattggtttaacatccaaaatttctcaatcatatctcagttttcttagtctccattgctacctctcacccacactttcacgtctaacatcttaatgactcaataggctcccagattatttcataacttasaaaattataattcttaagatattttaatacagataaagcaaataactttaattaaaaattacattctataataggcttggtggctcatgcctgtaatcgcagcactttaggagaccacgacagaaggatcatttgaacccaggagttcaaaactagcgtgggcaacatagggagaccttgtctctacaaaaaaatcttaaaaattagccggatatggtggcacacgcctgtattccc

SEQ ID NO: 506285 - DNA, 620 bp, Homo sapiens
ctcccaaggcttcaagtaacatttatatgtagataattctcaaattcatatggttagcacagactttctgttggcaatccagacccttatatccaacctcaggacatctctgaaattgaactcttaattctttattcaaagtagttcttcaagtcttcctcatcaaagtaaataataaatatcaattatccatttggcgatatttgatactatcctctttctcaaaacccacatcccacctcatagcaaatattattggtttaacatccaaaatttctcaatcatatctcagttttcttagtctccattgctacctctcacccacactttcacgtctaacatcttaatgactcaataggctcccagattatttcataacttagaaaattataattcttaagatattttaatacagataaagcaaataactttaattaaaaattacattctataataggcttggtggctcatgcctgtaatcgcagcactttaggagaccasgacagaaggatcatttgaacccaggagttcaaaactagcgtgggcaacatagggagaccttgtctctacaaaaaaatcttaaaaattagccggatatggtggcacacgcctgtattccc

SEQ ID NO: 506286 - DNA, 626 bp, Homo sapiens
tgagctgagtggatttcttgagcttaggtggatccccattgtggttagtcttgatctctccactgtactcaagcctggatgacagagcgagactctgtctcaaaaaacaataaaactaaaactaaaataaaataaaataaaaaattagccagtcatggtggtgcaagcttgtggacccagctactactcaggaggctgaagcaaaacgattgcttgagcccaggagtttgaagctgcagtaggttgtgatggtgccactgcactcaagctgggcaatagagtgagaccttgactctaagaaataataaaaataattttaaacttagattatatataatcgattaaatcatgtaataaattaggtaacgtcatcaattaaataatacatttcttaaaattgtatggagctctactgttcctaggatacaattcaaaatcctgagtgttagcaataatgccagcataatatggtccctgccaatttctccagcttttwctgacaccattcccttttttcctcaataggctccacaattcctttctttctttctttctttctttttttttttccattttcaaatgtcttacgtagccccttccaatttcataggctttaaacgtggtgt

SEQ ID NO: 506287 - DNA, 499 bp, Homo sapiens
aaaagaattcacatctaaatctgttgggagcaaatctcctaggcaatgcacacagaagaagagacccaacctgagtcaggacaacaggtttcctttcaccttttctttcaccttagttctgaagcacctgttcctatgtcttgagggatttccccaagaacagcctttctgtaaagctggtaacgctttacrtgttcaccctttttgattcattcatttattccacagatatttattaagttttggttctgtgccaaggcacaggacatacaaagataaatgtgacataattcctgtcctgggaaaagctttagtccagggatgtaaagaaatgcagagaataaggaaagaaagaatgccctagaaaggggctctctgatgtacacttcattgtgtaaatggaatggatcttcaaggcagcagttataaccacaaagggactctacacaaaccacagagacccctgcttttgtttgttttcacctcttttttcctcggc

SEQ ID NO: 506288 - DNA, 531 bp, Homo sapiens
ctgcatttatctaaacaactggtttcattttagggatgtaggcatttctgtaatattaaactgttatatttcacctcgctagcatgggagtamaactgaggggatgtttgcatgaatcttgtgaattatgatggctctaagccattgtaatttgattaacagaagtcctactttggggtttatcttatttttattatttatttattttttgagtggagtctcactctgttgcccaggctggagtgcagtggtgctatctgggctcactgcaacctctgcctctggggtttaagtgattctcctgcctcagcatcccgagtagctgggattacaggcgcaggccaccatgctggctaattttttgtatttttagtagagatgggatttcaccatgtcggccaggctggtcacaaactcctgacctcaagtgatctgctcaccttggcctcccaaagtgctgggattacaggcatgagccactgcgtctggcctactttgggatttttctctacagtgttttcatgttgttaa

SEQ ID NO: 506289 - DNA, 636 bp, Homo sapiens
tgtgtcttatggaagtagagctgagaaggcatgaaggtctcaggtagctcctcaccaactcttttattgtagggctgtttggtgtcttgcctctgcttacctgcacacatytattgaattctactatccacagagaacttcctctgcttactcatggattctgctcccttataacttcagtttgcccacatctactggtggatgtggtgtcaactctcagagctgactccatggctaactggctcaggttctcatctgctccatatggtttggtcaaatgtccagtcttcatgcaatcagttgtacagagatcttttcctctctgtacattcttttcaacagatattggtatctggactttctatatttggaattatggatgaagcgagaggagatgtgaggagtactgtcatgccaaaattactctacccccaccacgttgaaatgcattcacgcatgttcacacctttattatgtaaaataaatggaggtttgcttagattttaaggcttttagagaataagattttgatacctctacttaacaaatcactccagtatttggtgaacatcaacccagcccttatgtcaactgtgagtaaatctgtaatataccgttttcttatctatgttgaaa

SEQ ID NO: 506290 - DNA, 469 bp, Homo sapiens
gtatgaggagtatcggaataatacttgcctttggaggggtgggttaactaagaaagggacttttttggatgacagaaatgcyttttgtcttcattatgttggtggttacacatttgtcaaagcttattgaacattttacttaaaatgcgtgcattttatgacatgcaaatttttattttatttgaaaaaaaagattgttgagattgaagttaacttgtaagggttcatttctttccagcataataatgtggttttgagttctggatccagattttaaaatattagtgccaaataatggccctgttactttctatggggatacaaactctctatgcttcagatatgccgcttgcaaatcacctatataagagacttatttagaagactaaatgagacaatcagtgtgtggtacctgggcaatagtaggtcaccagtacaggtagctgctcctatgattgttcttattatc

SEQ ID NO: 506291 - DNA, 669 bp, Homo sapiens
atataatcataagcaataattgaaacgagtaaaataaaataaatggtcaggtttcctaaggtctaccatgattttggttattaaatagtgttcgttatactgcatgacctgctcttttggtaatgctgattcaaatggtaaataacatagatttttctctaactttgttttstcttgatctctggattgactattgtcaggtgacttcttgtgatctcatgatcttttcagtggttaatgcagaacaaatcatcttaaagcaacatagcaaccatggcttttgtgattcacatagactgttatttaaatacgacaaaaattctgagtgatacattttatcactatttatacttaatttttatatttatatattttatttcaaaattatttatcatttattatattttatttattttagagacagagtcttactctatagcccaggttgaagtgcagtggtgtgatcatatagctcactgcatcctcaaatgtctgggctcaagagatcatcctgcctcagccttctgaatagctgggactacaggcatgtaccaccatgcctgggtaactttttatttttattttcttgcagacatgaggtcttgctatgttgcccagactctggcttcaagcaatccttccaccctggcctcgcaaattgctgggatt

SEQ ID NO: 506292 - DNA, 411 bp, Homo sapiens
ataagcaggatatcagtagaaagtgggaaaaggagtaaatgagatgtgactatggaaattaggatgctggagctgttggggcatgccaataaggcaacagacctagtgggagaaaaaaatggtattagcaaataatggagatcaaagtgtcaagatacaaactgaagtccatagatatatggcctggaatgccagattgagtagaaaatttaaccaaaaaggcagtttctaagcaacagatgacctaggccgataaaagtcactgcttatgtttgagggctaaggacayggaaggagtccattaccataactcagaagcacacagattttaccactaggctgaccttgggatgagtcatctgctaagtgcctcagtttccccttctataaaatataaataatggcctttca

SEQ ID NO: 506293 - DNA, 666 bp, Homo sapiens
catggtggtctaaaccacatttcaaatgagcactgccctgtgaatgtgatcccagtggctgtgtgacaaggcaaagtggggaggaatcatagggagagtggaaagaggtctgggctgggagtctaggccctrttatgtgtgactttctgacactctgagaacctgagtcttgggtcctttattaatttttttgtaaaggatagggtttggacgtgataattgctaagtgccttccaccactgaaattcttgtcatttgtttggctcagtgtcagcctggtggaagtgtgtgaatgaatgaacattgcaagtgtgcctttctcatccattttcaggctacactgacagttattacaactgagggcaggcggctcactgacactgatacttaacagaccacattaaataaacaagaaaacgaaatgaatagctaacccttatgagaacttactatgaaccaggaagaaggctttcattatgtggtgctatttcattttatttaatcttcagtaccaaactgccacagtaggtacaactactatctctattttgcacgttaaagaaaaaaagatgaagtcacacatgtttatacagggcttcacaatttgcaatttatcaccacatttattctatccaagtctcacacaaacccacaaaggaaagtgag

SEQ ID NO: 506294 - DNA, 613 bp, Homo sapiens
gccacacaatacagatcaggagagagagagaggtgtgtaagaagctagggaagggtgaagtgattggtgtgaaatctccccaacaatggataatgagtgtttacatcccttctttctccacttctcaattgttactttcttttatgagaccctatgggaaaagtatccattaatttycttcttctcccttgtatggtttaaactcaaggtgtttctgagagttgtacattttctcagggctgcttataacacacatgaagtatagctgggtggcttctgtttgcaagaggtctatttttaattaacttttgtgctttttgccttgaagtgacctcatagcgttcagcaggatatacacatacactgtcacactcacacatcaccactatgattgtgtgagaaaattccactgcaagaaaaactggacaagtttttcttagcttctaggaagacggaagactccctgacaaggattttattttcattgtagtgggctgtcagcaaggccatttatcatagcctgaattaataaggaaaggacagaagaaaaacgacttgctgccaaacagcttggggatgttcggggctgcatagatcaatcagctgggcacac

SEQ ID NO: 506295 - DNA, 613 bp, Homo sapiens
gccacacaatacagatcaggagagagagagaggtgtgtaagaagctagggaagggtgaagtgattggtgtgaaatctccccaacaatggataatgagtgtttacatcccttctttctccacttctcaattgttactttcttttatgagaccctatgggaaaagtatccattaatttccttcttctcccttgtatggtttaaactcaaggtgtttctgagagttgtacattttctcagggctgcttataacacacatgaagtatagctgggtggcttctgtttgcaagaggtytatttttaattaacttttgtgctttttgccttgaagtgacctcatagcgttcagcaggatatacacatacactgtcacactcacacatcaccactatgattgtgtgagaaaattccactgcaagaaaaactggacaagtttttcttagcttctaggaagacggaagactccctgacaaggattttattttcattgtagtgggctgtcagcaaggccatttatcatagcctgaattaataaggaaaggacagaagaaaaacgacttgctgccaaacagcttggggatgttcggggctgcatagatcaatcagctgggcacac

SEQ ID NO: 506296 - DNA, 613 bp, Homo sapiens
gccacacaatacagatcaggagagagagagaggtgtgtaagaagctagggaagggtgaagtgattggtgtgaaatctccccaacaatggataatgagtgtttacatcccttctttctccacttctcaattgttactttcttttatgagaccctatgggaaaagtatccattaatttccttcttctcccttgtatggtttaaactcaaggtgtttctgagagttgtacattttctcagggctgcttataacacacatgaagtatagctgggtggcttctgtttgcaagaggtctatttttaattaacttttgtgctttttgccttgaagtgacctcatagcgttcagcaggatatacacatacactgtcacactcacacatcaccactatgattgtgtgagaaaattccactgcaagaaaaactggacaagtttttcttagcttctaggaagacggaagactccctgacaaggattttattttcattgtagtgggctgtcagcaaggccatttatcatagcctgaattaataaggraaggacagaagaaaaacgacttgctgccaaacagcttggggatgttcggggctgcatagatcaatcagctgggcacac

SEQ ID NO: 506297 - DNA, 580 bp, Homo sapiens
cattacttttaayggcaaaaaccgcaattaactttgcaccaacctaatagtatgtcaatgtattgcaaacctatatacttatgtgtgttacatcaactttaggatccctgatcaagtctttggtgtaaggatcacacttgaggctgggcttggtggctcatgcctgtaatcccagcactttgggaggccaaggtgggcggatcacttgaggccaggagtttgagaccagcctgaccaacatggtgaaaccccgtctctactaaaaatacaaaaaaattagctgggcatggtggctaacacctgtaatcccagctgcttggtatgctgaggcaggagaattgcttgaacccaggcagcagaggttgcagtaagccaagatggtgccactgcactccagcttgggtgacggagtgagtgagactccatctcaaaaaaaaaaaaaaaaaagggattacacttgaacagaaatagaaccagagacaggccaaatcagaagatagagccacaaaattattgacccagtaccacaggattaattgatataattgctttgaggccaggtgtgggggatcatcccagc

SEQ ID NO: 506298 - DNA, 580 bp, Homo sapiens
cattacttttaacggcaaaaaccgcaattaactttgcaccaacctaatagtatgtcaatgtattgcaaacctatatacttatgtgtgttacatcaactttaggatccctgatcaagtctttggtgtaaggatcacacttgaggctgggcttggtggctcatgcctgtaatcccagcactttgggaggccaaggtgggcggatcacttgaggccaggagtttgagaccagcctgaccaacatggtgaaacccygtctctactaaaaatacaaaaaaattagctgggcatggtggctaacacctgtaatcccagctgcttggtatgctgaggcaggagaattgcttgaacccaggcagcagaggttgcagtaagccaagatggtgccactgcactccagcttgggtgacggagtgagtgagactccatctcaaaaaaaaaaaaaaaaaagggattacacttgaacagaaatagaaccagagacaggccaaatcagaagatagagccacaaaattattgacccagtaccacaggattaattgatataattgctttgaggccaggtgtgggggatcatcccagc

SEQ ID NO: 506299 - DNA, 580 bp, Homo sapiens
cattacttttaacggcaaaaaccgcaattaactttgcaccaacctaatagtatgtcaatgtattgcaaacctatatacttatgtgtgttacatcaactttaggatccctgatcaagtctttggtgtaaggatcacacttgaggctgggcttggtggctcatgcctgtaatcccagcactttgggaggccaaggtgggcggatcacttgaggccaggagtttgagaccagcctgaccaacatggtgaaaccccgtctctactaaaaatacaaaaaaattagctgggcatggtggctaacacctgtaatcccagctgcttggtatgctgaggcaggagaattgcttgaacccagkcagcagaggttgcagtaagccaagatggtgccactgcactccagcttgggtgacggagtgagtgagactccatctcaaaaaaaaaaaaaaaaaagggattacacttgaacagaaatagaaccagagacaggccaaatcagaagatagagccacaaaattattgacccagtaccacaggattaattgatataattgctttgaggccaggtgtgggggatcatcccagc

SEQ ID NO: 506300 - DNA, 634 bp, Homo sapiens
tcccatttctgttgcactcactgctacacatgtatgttatttgcacattttcacaattacagacaatgctgctgtgaacaccctggtgcattactgtgacccacggtgtgatcggtgggcttctagggtggagtgcatgttcctgctaaagcatccgatgcgcgtggtgaggctgcacctcctgcagcgggcgtgcctctgaccactccagacttggagttcctgggacgctccttcctgcacttcctgtctgcctgtctccccctcggctttattattgctttaaactcttgcttcctgccaacccccaagaaagagaaaagaagaaacaacataagttctctgggattccagccccaagatcttggttgagaaagggggttgggttttccagtgtatgccatgcaaactagtggaaaatgatggggcrcacaaagctgaacaggactttccaccacagggttccgggaggctccagacgggaggggtgtactcagcttccatcatctgggtgtgcctggtattaggcatcttgtggggctactgaccccaggacacagagtgaggagttctgggccagcccaaagctccaccttgtggggatttttctccaggatcgagcaagtctgtttct

SEQ ID NO: 506301 - DNA, 634 bp, Homo sapiens
tcccatttctgttgcactcactgctacacatgtatgttatttgcacattttcacaattacagacaatgctgctgtgaacaccctggtgcattactgtgacccacggtgtgatcggtgggcttctagggtggagtgcatgttcctgctaaagcatccgatgcgcgtggtgaggctgcacctcctgcagcgggcgtgcctctgaccactccagacttggagttcctgggacgctccttcctgcacttcctgtctgcctgtctccccctcggctttattattgctttaaactcttgcttcctgccaacccccaagaaagagaaaagaagaaacaacataagttctctgggattccagccccaagatcttggttgagaaagggggttgggttttccagtgtatgccatgcaaactagtggaaaatgatggggcgcacaaagctgaacaggactttccaccacagggttccgggaggctccagrcgggaggggtgtactcagcttccatcatctgggtgtgcctggtattaggcatcttgtggggctactgaccccaggacacagagtgaggagttctgggccagcccaaagctccaccttgtggggatttttctccaggatcgagcaagtctgtttct

SEQ ID NO: 506302 - DNA, 521 bp, Homo sapiens
gttattattgtctattaaaacatgtatactcagaatttttgcggcattattttttgacgtgtctttattttatttaaaagagccggagccggaagtgcttgcctttttccctgctaggacccaggggttacgwcccatcagcccttgcgcgccaccgtcccttctctcttcctcggcgctgcctacggaggtggcagccatctccttctcggtaagtgttaatccgtggcaatccgcattcctgcgggattcatctggccccgtcgcccagtggtgcggaggcctccccttcagcgcggtagtgtctgtgggtattgttattgtcagcttactggagcgtgtacaggaacagaacgaagccgccgagttgatagggctttgcgtcccagagcctcctgccctccgcctgtattcagagctgcgggctgcttgtttgttccttggcggtggagggtgctagttgaggccagacttcggggtctcctgggggccgtgggacgaccaggggtggcccagcttga

SEQ ID NO: 506303 - DNA, 584 bp, Homo sapiens
aaatcatcacttgatatttaaaaacccagttactatcatgtgcccaaagtaataaatgttttagaatttcaattaarcaaaatgagaagagctggatctcttttctctatctaatgagtcacacagacccattaccccactatccattaattataacaaggtcagcacattacccaaagtctcctcatgactgtataatgaacctatgcagtgctgtgctgtgagcagacccacagagagactccaagccagggcttctagagtttctgtgtcatttctcttggcaatcaaaacagaggccttgaagccaaggaaggttcagacacattaaggcaagaggtcccaggaaaaacatgtctgagatttacacatctaacctggaagtcaggaagcaccaacgtcatttctattgatgttcgagtgcagcattcttccacaggtgttttccatctgtgtttctgtctcctaccctagaatttctacttcttacaagaagacatcttaatacttattgaccacctacaatgtaccaggcacgtacggacatcattatcaccagcattttacagaggaaaaagggtctc

SEQ ID NO: 506304 - DNA, 584 bp, Homo sapiens
aaatcatcacttgatatttaaaaacccagttactatcatgtgcccaaagtaataaatgttttagaatttcaattaaacaaaatgagaagagctggatctcttttctctatctaatgagtcacacagacccattaccccactatccattaattataacaaggtcagcacattacccaaagtctcctcatgactgtataatgaacctatgcagtgctgtgctgtgagcagacccacagagagactccaagccagggcttctagagtttctgtgtcatttctcttggcaatcaaaacagaggccttgaagccaaggaaggttcagacacattaaggcmagaggtcccaggaaaaacatgtctgagatttacacatctaacctggaagtcaggaagcaccaacgtcatttctattgatgttcgagtgcagcattcttccacaggtgttttccatctgtgtttctgtctcctaccctagaatttctacttcttacaagaagacatcttaatacttattgaccacctacaatgtaccaggcacgtacggacatcattatcaccagcattttacagaggaaaaagggtctc

SEQ ID NO: 506305 - DNA, 584 bp, Homo sapiens
cacccctcctgccacgtgtgtattytgagcatcccaggctctgcaggtgtccctccgttcaggctgccataacaaaatatcgcagactgggtgtttagaaacaacagaaatttatttctcacagttttggagtctcacatgtgagatcggggcgccagtgggtttggtgtctggtgagggctgcttcctcgctcatagctggggccttcttgctgtgtttgcacacagtggagggtgcacaagctccctgggcctctctgataagggcactaatcccattaacggggtccccaccctcatgacctcatcaccttccaaaggcccgcttcacaccatcaccttgggacaggaagagctcatctccatggaggcttggcagggccaggcctgccacagagttaggagtgaaggggacagcctgggttccccgagcctcggggaatttctgaaattgcctctgtctcctggtgtttgctcagcttctatgaatgtcaggtgggcttctgaagggagcacggaatctgcgttgcagggtcactgtggcacgaggggaccctggcctctggtgctgtggaaaccggagc

SEQ ID NO: 506306 - DNA, 525 bp, Homo sapiens
tcttcccaggcaccaccctcctgacccacagcacgcagcagcctctctctgcccgccgcctctccctcctgccctctgcccaggccgcccctggggaccttacccactgagcccatctccacctgccttgcggtccttccttatccgagtcggatgccactggtcctctttgctgtacttgctccctgcctgtaccactgtctcccgcctcctgctttccttgctgaattgctgggtccagccccatccctcctcccttactttcctgcctccgagcaggggccccagcctcgctgaaggatctacttcgacattcctgactgctggcctctgcaggcagcatccccccttgggaccttcccgctccctgctcacccacctccttgctcacccacctccccctcctccgagcacagacaggccccggcattgcccctgcccrtcccttgagctccggctgctcccgggtcccatcattgtcagcattctcagaagcacagcccctgccgccacctcctccatggc

SEQ ID NO: 506307 - DNA, 634 bp, Homo sapiens
caccaccatgtccggctaattgtttgtatttttagtacagatggggtttcactgtgttaggatgatcttgatctcctgacctcgtgatctgcccaccttggcctcctaaartgctgggattacaggcattagccatagtgcccggccttaattttgtttaatttttttctttgttgagacaagatctcactctgtagcccaggctggagtgcagtggtgtgatcccggctcactgcagcctctacctcttgggttcaagcaatcctcccacctcagccttctgagtagctgagaccacaggcatgtatcaccacaccaggctaattttttccctttttctaaaggcaaggtcttgctatgttgcccaggctggtcttgaactcctgagctcaagcaatcttcccgttttagcatgggagtaatcccaaagtgctgggattacaggtgtgagtcactctaccaagcctcaactgtttttcatgactccactttttctcacctcttggaaatgagtagtctttgagggaatgtcttttttgtctcaatctctggtttctttgctcagtgcacctgtgtttggcgctttgttgatctccaggcctttttcagcagtgttgtccctggagagcatgat

SEQ ID NO: 506308 - DNA, 673 bp, Homo sapiens
gggctcatgaacccttgattatatggccatctcagaacaaagcattatggacaggaggattgaatgtacttattcgccaaacccaggtcatgtgctcacttcctggagttggggtagagtctgctcctctaaaacaacttagagagtggagaaagggtggttgcccaaggcaaaatcagggcactgtttccagaagaaagagaaagatgataagaaggcaatgatgggacattactggaggtccactstctccagctagctagaagtagtcctggaactaaaatctagttttcgtataaacctctgctcagtgctcttcctattgaatcaagatgttgcctgtggcatatagatgtgatgttaatgctcatacagcatcattcacctggttaaggtgcccagtaattgcaaacacatcaaaaatcctgtcctatttgacaggctcagggaaagtggccagttcagggggcaacagaggctggagacaaagtcacaattggccccaccaatcagcagggaaaccaaactcttggtaacaagcttctgaagtagggagagcaaagatggtttagaaagtgtccacagaggtcatctagtccaccctctcattttacagctagggaaactgaggctcagagaggaaaagtcacttgtctaaaatcaggcagctgag

SEQ ID NO: 506309 - DNA, 632 bp, Homo sapiens
acactcaccgcagctagggatggggctgcagctctggtaaaggagatacaggaagggcacctacagcatctcctaaatgcctcatagggctgccacgaggattgactcaatcaacaagaaactagttcctggcacattgtaagcatattttctttattttttattttttaagatacaaaacctgagaattttagagttagaagccactgtagggggcagtggtcttaacagagagaggcttgacagtagggccatcagtcacagaatgttcaggaggatggatcagggacccaaggggtctcaaaaagagagaaggagagggaaaggggacactgggtagggttgctatgacatctcaggggctggtactcttgagggcttgggatgggtagagtggttaaaaaaaaaaaaaggaagttacattcctcaagactatggaatgcaaaaggattaatttccctaatatctctcagcagcataacccctcatgttayatatagaacctttaagcgcctgatctcatctgcttttccagcaatccagggagggaggcagaaccaaggagggttttcaatctcactttcctgatgatgaaaccaaatggagatcaaaagtcttgcccaggtcaccca

SEQ ID NO: 506310 - DNA, 530 bp, Homo sapiens
gggaaacttcacctgtgaaaaggcactcctttctgtccctttctcttttagtcctctccctttttagctgtctgcattttccaccgctggggttggatttgctctgggtgtggttccctgtttgttcattatttttctgcaaactcatccttctgtaggtttggtttctaaccttcctgcattctatgtaagtcacaccaaaatatgaaatatgaatcggaatgtgcttctgggaagataggtggctgagccgaggttgtggagagccctgacgttaacttgaagaatgtaaagacctttgctttattttttctgtaacttgtcagatttgggattgcttatttggatggacgttttgcagttatttgaattttgctgaagatagcatcatggtgcaatggacagaacagagattggggaatcaggatattttgtcctagctctgccgcttacctggcaaccttaagtgactcgcgtttgggtttctcagtctagacagkgatggaattgaattcttaagggccccttct

SEQ ID NO: 506311 - DNA, 521 bp, Homo sapiens
ccaagcttagaaccccactagatgagccaatttttatgtatgcacaattaaaggcccaaggaatgagtggaggcatccaatatcaagtgcagctatataccaaaaccatttgtgcttcaacactgttatggtttgcctctgtgtccccacccaaatcacatgttgaactrtaattcccgaaggtgggtgggacacctggtgggaggtgattgaatcatgggggcagatttccctcttgctgttcttgtgataatgagttgagttcttatgctatctggctgtttaaaagcatgtagcacttccccctttactttctctctctcctgctgctatgtgaagatgtgcttgcttcctcttcaccttccaccatgattgtaagtttcctgaggcttccccaggcatgcttcctgtacaacctgcagaactgtgagccaattaaacctcttttctttataaatcacccagtctcaggtagttatttacagcagtgtgagaacagactaatacaagaaaattggtac

SEQ ID NO: 506312 - DNA, 549 bp, Homo sapiens
agtagccctgttccactcttctgcgattacagttgtcattttgtacaacatgagaatgactttgacagttatgctgatccggggagacaaaaggggacaagttgagcaggacagattagttctggaaaattagscatttgttgggtcaccctggagctttcagctttgaatttggcctcccagagcattaaataggcctgaaacctttctaaaatgagaactattatactgccagttgcacagagcaattcttgagctgccaaacagatgggagccctgtgaagataaaaggctgccaatatcccaaaggcacaagccatggctccgcctccatatcttggacacaaaagttagagcataacctgcgcactctgagcccacttcccaggaaacacatcagtccattaaaggaatcccaccatgaggaatgcagagccaatcaatactttgaatgaagaagcccctcttacagactatttccttttctcattttccattctctactctcctaaccaaaccatgtccaaaatgctacctggagaaccccac

SEQ ID NO: 506313 - DNA, 513 bp, Homo sapiens
tcttttatgagtatcacccctacaagcacctccccagatcctacccatccttcaaacccagccaaatgtcaccttctctagaagagaagccaaattccttgtgtcaaaggaggcttccctctccaacttccctgagccaccctcctcaggtggtgcctcacatcaccctcacctgtgtgcatgcctcagcattctcagtgtgcagggggttcatggtgggcagggcctgtatccttcatctcaggccccagtccccacccccaaccatgcatagagtctttttgctgagaagagttgctccacaaatgttaaaggagggaggtgggtaaagaaataamtttcaggtcccactccatgacaggagtgaccatgggagggcattcaatgatgccctcctctcctaacatgaacactaaaatacactgtatatgcacaatgcagtaataataggactgggtgactataccaccagtggctcactgcagcaaatgctgactcctcagcaaaatggag

SEQ ID NO: 506314 - DNA, 600 bp, Homo sapiens
ctgtatttatagatctatttggaacttgataagtaggtcatcattaaattcaacctttgatgtccactatttttgctattgataattcaagggcagcagtgtaagaatgtaggggaaggaaaggggctggagaaccttctaaaccaaaccagtgaatacagtgaattcagaaatctgtgcttctcagaggcagygcctttggaagggcagccatggggcatgagaaggaggaggaaatatgttaactcagtggacactgagaggtcctgaggtctaggccaagtcccctgggtaagagttcttgagggtcagatgagtccagaagcagtcaaggcaggacacacggtaaagaaggggagtatgcagggaacagaagagaattaggggtttcgtcagcaaggaattctaattcattgccacagtggtgattttagccattttattgctcctctgaactataaaagcaaatcaaatacacgttcaaagcagcttcgctgggcctggaaaacctcttatttatggttggggagatttgttcagaggccacagatacaaagacacctctagtagtgatgctgtttttccaaggaactcccttgc

SEQ ID NO: 506315 - DNA, 508 bp, Homo sapiens
accttcccgtgtgctggccaatgtggtcctgagaactttcacaacccaggatagcgggggatyggagaaggagtcccaagagggacaaaaatcaaacccctagtcttgaagccgagcttattttaaaaattaatgtaaacagagagttcttaaagccaactaatgtgatgactgcaaatttatagctattctaaacatattccttcacctatagtcacactcctctcccatgcactgcacaaggaccagccctcaggataagaaagacatgagtcaacgtggcaaacggggtcaaaattgacagaaagagggcaatcatgcatgtcagtggggaataatgatgaacctggagaaaccagtattgctccagacccccctcccaaatccttgcagaaaagaatattaataaaataaaattccaaaatctgatcccagagcaataatagaacacccatgccaaacttcacagccgtggggaggatgcatgtagctgagcaatctgtggata

SEQ ID NO: 506316 - DNA, 604 bp, Homo sapiens
tgcctatcagaatctgacaggagyggggcactccaatatccatgagctctaaggatgccaactcagacagcctgggagggatgtgtacagccacagactcagatagcagttcccaaaatgagaagcaagcatgaccatctgggtgagaataagcttggaagctgggaggccagggagaaggcagccacactgtccatctccaagagtgtgatgaagacttgacagggctgtggcaatgggctgagggatgagttggtatttagaaataaagacaaaatcctaagcccccgaaccaactgaatgagtcacactcttggccaagacgaccccagagaagccttaaaatagtgagttcctggccatgacgagaagggaggtcagacacacctcgttatatcccctccttcactcactgccattagactttctttcctaagagttaaatagaatccagcccagctgcactcccctctacttttgctgttttgacacagcaactgtgcagcattccttcctgataagagaccaccgaccacagactggttctgctggtttacggacgctgcgcacaggatgcctctatgtcctccatttcactttatga

SEQ ID NO: 506317 - DNA, 555 bp, Homo sapiens
tgtcttctgttggggcttgayggcatctgtctctaagacaagtgattgaggactagtgtgaaatgcttttttacaagcccatggctcagtggccctttgactagctatagccatgtgaatatatttgaataagtgggacccttctattctcaggttgagacagactcattcagtcttatcacctttggtctaaacggatactggaagagttggataagaaaatattcaaggactggaaaagagggattttagggtgttccttctaacagtcaggtacagtgaccaactgtccgagtttgttcgttagggactaacaggtttcccaggatgagagattttcaatgctaaaaccagaaagtcctgggaaagttgggatgggtttgtctccctagtcacagcttcagaaactgctagagccaaaagagccacacattggtgtcactgaaaaatgatttggggagctgaaaaatattcatgttgtgttttgttttcttccattttcttattaacatctctcttggaacattccaagctgtttctgttgcactactaagg

SEQ ID NO: 506318 - DNA, 555 bp, Homo sapiens
tgtcttctgttggggcttgatggcatctgtctctaagacaagtgattgaggactagtgtgaaatgcttttttacaagcccatggctcagtggccctttgactagctatagccatgtgaatatatttgaataagtgggacccttctattctcaggttgagacagactcattcartcttatcacctttggtctaaacggatactggaagagttggataagaaaatattcaaggactggaaaagagggattttagggtgttccttctaacagtcaggtacagtgaccaactgtccgagtttgttcgttagggactaacaggtttcccaggatgagagattttcaatgctaaaaccagaaagtcctgggaaagttgggatgggtttgtctccctagtcacagcttcagaaactgctagagccaaaagagccacacattggtgtcactgaaaaatgatttggggagctgaaaaatattcatgttgtgttttgttttcttccattttcttattaacatctctcttggaacattccaagctgtttctgttgcactactaagg

SEQ ID NO: 506319 - DNA, 609 bp, Homo sapiens
gtgagaggattcctccttcttgtctactccaaactggagtgtcagcttatttttttctgccttcaaacttgacctgaaactttggctcttcccgagtgctgagcttgctggcccttggtctggaactaaaccatcagctctcctgggtctccagcctgccaacccaccctgcmgattttgggactttacccaactccgtgatcccatgagccagttcgtgtgtgtgtgtgtgtgtgtgtgtgtggtttataatgtagagttctctgttcctctggagaactctgatcaatgcaggaagagtctgttcactgcctcttccagcttccattggctgctggcatccctcggcttgtggccgtatcactccaagctctgcttctgtggccacattgcctcctcctcttctttgtatgcctattttataagggtatgacagtcagtggacttagggatcactcagataagccaggataatttcctcatctcggattctgacttagttacatttgcaaagactttttttttttcaaataaggtcatattcacaggttccagggatttggacatagtctcatcttttagggggccaccacggccctacttcagatc

SEQ ID NO: 506320 - DNA, 542 bp, Homo sapiens
taattttaactgaaaaccacaaccatcccacaagtcatttgttgctaattacacaggtaattggcttggaggcactggcagaggtaaaacccccagagtagtctgatccctgcccaaccagcaggtcccctgagaggatggggtgggggtcaccctcagctcccacaacccscagccgccctttgaacaggtcctcagccagcctggcctcccctggggctgcagtgatccccccaccaatgcgcattcacaattgcagcccctgggcatagagggaaaccctgggtttccagaccatctattctgctcatcttagtggtgaccttggggagcgagtggcttgctatctgtgagatggagatgacagctgcctgtggggatgtccacaggcccctcacatggatggcctctgggctcctccaccctccccacgggtgatccaaaacccacccagggcttcagactgggaggcctgggcccaccctacccaccgaggggcacatacgcctggcccactgcccctttcgctcctgcttgcgcag

SEQ ID NO: 506321 - DNA, 561 bp, Homo sapiens
tgtgccctgagcctgcccgcagtgcccagcccgggggcttatctgactaatgtctctcccttccacagaccatgactccatgagcgtgaaccaggactattctgctcaccttgtgtctgcacacagtaggtgcttaacaaacacctggggtatcttcaagtccattccctcatctgaccctcacagcagccctctgaggaaggcaggtatggactctccgacccatattataaagaggaaggaaggggcctagcaaagtgaggaggmctccccgtggccacatggtgggtcagaggcggaacaggagctggaatcaaggcctgagcccccaaagccggccaatagtttctggtgactgtgcctcatggcttgtgtcgcagcctgcacactggaggagacaggtctgcactcagccattctgaagacggtaaaagtgagaggtcagcctggccctggggaggagacaggacagcaggctagtgctggggacctgggtcgtgatgccccacagacctttgaaataacattaaaaagaagacttgatttataaaaagaaaaaaa

SEQ ID NO: 506322 - DNA, 561 bp, Homo sapiens
tgtgccctgagcctgcccgcagtgcccagcccgggggcttatctgactaatgtctctcccttccacagaccatgactccatgagcgtgaaccaggactattctgctcaccttgtgtctgcacacagtaggtgcttaacaaacacctggggtatcttcaagtccattccctcatctgaccctcacagcagccctctgaggaaggcaggtatggactctccgacccatattataaagaggaaggaaggggcctagcaaagtgaggaggactccccgtggccacatggtgggtcagaggcggaacaggagctggaatcaaggcctgagcccccaaagccggccaatagtttctggtgactgtgcctcatggcttgtgtcgcagcctgcacactggaggagacaggtctgcactcrgccattctgaagacggtaaaagtgagaggtcagcctggccctggggaggagacaggacagcaggctagtgctggggacctgggtcgtgatgccccacagacctttgaaataacattaaaaagaagacttgatttataaaaagaaaaaaa

SEQ ID NO: 506323 - DNA, 492 bp, Homo sapiens
acaaagtcaacaaacttgttctgtaagagatagatggtaaagtttttcagctttgcaagctgtatgattactggcacaactatgcaattccatcattgtagtttgatagcagccacagacaattcctaagcaaatgagtgggactgtgttccaataaaactttatttaaaaacacaattggtgggccagatttggcccatgaactatatagtttgctggcccttgctctagcatgtgtgctgatgaggatcacctaaagaagaaggcactggtgatgtggaagggagrgaaaaccaaacaagcaaggcttccaagaaagcaggaggagatccaggcccaaaagctgtggtggctgtggtggggagaaggacatttgctgctgtatggcaggcagagagaagatgcaggaaggaggtaggtttggtggtgggcatatgcaacttgcccctggagaccttctattgttctgtgataaatgagtggaagcctcag

SEQ ID NO: 506324 - DNA, 630 bp, Homo sapiens
ccttgatccttaagcagtttgcactggctattgctcacctctgcaacctcagctatggccactctgtcttcgatcattttctgctgttacactagaatataacagactgagtaactttaaaagagtagaagtttatttggctcatcgttctagaggctgagaaattcaagagcgtgtgctttggtgtctggtgaggatgattccatggcaaagagcatcacaaggtgagtgagcctaccagacaagagacaagatgggagcaaaagttatccttttatcaaaagcccacttctgtgccactcccacaataaagtcattaatccattcatgagagtgagaggaaatccctcattgcctatagatcccacctcttaatatagtcacaatggcaattaaatttccccataagttttgaaggggacatttaaaccatagcattccatctctggctcccacaacgttatgtcctcacatacaaatacatctaktgtattccaatagctcccaaatcttaactcattcaagcatcaactcacaagtccaaagtccagagtctcatctgaaacagatacaggtgagactcaaggcatgattcatcctgaggcaaatttattcctgctgtgaacctat

SEQ ID NO: 506325 - DNA, 609 bp, Homo sapiens
gctgtttactacatttcccaaattaatctgtgaagcttcgatttttcttttccattgtcaaatatctattataattttatttcttacattgcttttcttcttmtatagatgctttttttgaaagcataatccttacaatcaggtggccctgaagtacattttccaaaagagaaaattaaagggctagctcacgctgagcaaactgatttaagaaaagccttggctttaaaattaggttttcaggatgtttcagaacgaactcaaacagcaaatctgaattgaaactatacaaccacctttttgggtagaacttttgggtagccctcaagcatccttagatttcatcaaacttgcaataatttatctaatatttataagctccatgaaggcagggacttagtttgtcttatccactgatagatcaagacagactagaatggtgtgtaacactaagtaatttctcaataaatattcaatgattgctataaattcttaaatactaatggaacctaataataaataacttacaagttattttgcatctgtgtgaaataccatattattgattatttatgcctgctggtgccagttccagttaacattaagaaa

SEQ ID NO: 506326 - DNA, 571 bp, Homo sapiens
ctgaatcctgagctgccaaagtttcttacaaacattctctcatattgccttttttatattttgggtatgtaatatcttaatccactatttcaaggtaactgttctcccattctttttcctttttccttcaattagccttaaaatttgattaaactatcttctcaaagtttcaagtttttwtatatatatatatttttattatactttaagttttagggtacatatgcacaacgtgcaggttagttacatatgtatacatgtgccatgttggtgtgctgcacccatcaactcatcttttttttttttcagaatgtcattcttcaggacatgtaatcagaacccctaccttcatctggaattatctctgcaaaccatcacttctttctatctcactaatctctcaatcactcattctctaatacctccacttaccagtcctttattaatatctctacaacttacttatggttcaatttctctgtttcagtgcagactggagaaggctttcgtatttctggttgtatttacctcataagaataaaatctacccatttattttaacattggaaat

SEQ ID NO: 506327 - DNA, 558 bp, Homo sapiens
ctggagggagaggaggtgctaccgtccttaacccagcaccatcatgttggkcagaacactcagacctggccaagcggatggaaggggcctttgctgggggtaaagcctggggaaaactttcttccctcaaaagatggagaagctcccaagagcctccttcctgctgccttgtgctctagaccctgggctctggaagggccagggcaaggccaactaaccagataaagctgaaaagcaaaggagaatagagagcccaggccctcagcacatcgccgggcagctaagcagccctgatactgaaatcctgttccgctcactgctgctgtttggcatgtagggtgggcattctgttcctcacagccaaactgccctgcggagaagcagtgcaaactgaaaccctgccagcaacatgccagcgagccgcctcctgcagcctttcctggagaagggctctgtccaaaacccttgatgagagagcgaggaggatgcgatcttgggaaaaggtcaaatgccctcactcgagcccctggcctgcctccctagctgtgaagctgtgtg

SEQ ID NO: 506328 - DNA, 563 bp, Homo sapiens
ctgctatacaccactagttctatcaagcatagaaaataaaggtgaatgtagtttccattatttcttctgtgcttgacaaagggtataacatcacaggagaaatgagaaataagaaactatgtcacaaagaatctrtggtcagcgaaatcatgagtagagctggatggtgcagtttatactagatcactggagaggaacattctcacaggacagaatctttgaagaaagagaaagatagtattctctgttgtcctaccaggaacaggagaaccagaacggaaactggaaaatcgtgaaaattcatctatcttgtatggagtgaataataagaaggtgactgcaaccagggttgagtggattaagatgcaaaggaaatatggtattttgtgtctagagagcatgtacccttacaagcttctaggtttggagggaagaaaacatgacctatatctccatgctgccttatgaattcaatggctctttgaggctgcagttgactttaggggagaatggcacctatatggtccctgagggaggcctgttatctgcagaatggatgttga

SEQ ID NO: 506329 - DNA, 563 bp, Homo sapiens
ctgctatacaccactagttctatcaagcatagaaaataaaggtgaatgtagtttccattatttcttctgtgcttgacaaagggtataacatcacaggagaaatgagaaataagaaactatgtcacaaagaatctatggtcagcgaaatcatgagtagagctggatggtgcagtttatactagatcactggagaggaacattctcacaggacagaatctttgaagaaagagaaagatagtattcyctgttgtcctaccaggaacaggagaaccagaacggaaactggaaaatcgtgaaaattcatctatcttgtatggagtgaataataagaaggtgactgcaaccagggttgagtggattaagatgcaaaggaaatatggtattttgtgtctagagagcatgtacccttacaagcttctaggtttggagggaagaaaacatgacctatatctccatgctgccttatgaattcaatggctctttgaggctgcagttgactttaggggagaatggcacctatatggtccctgagggaggcctgttatctgcagaatggatgttga

SEQ ID NO: 506330 - DNA, 563 bp, Homo sapiens
ctgctatacaccactagttctatcaagcatagaaaataaaggtgaatgtagtttccattatttcttctgtgcttgacaaagggtataacatcacaggagaaatgagaaataagaaactatgtcacaaagaatctatggtcagcgaaatcatgagtagagctggatggtgcagtttatactagatcactggagaggaacattctcacaggacagaatctttgaagaaagagaaagatagtattctctgttgtcctaccaggaacaggagaaccagaacggaaactggaaaatcgtgaaaattcatctatctkgtatggagtgaataataagaaggtgactgcaaccagggttgagtggattaagatgcaaaggaaatatggtattttgtgtctagagagcatgtacccttacaagcttctaggtttggagggaagaaaacatgacctatatctccatgctgccttatgaattcaatggctctttgaggctgcagttgactttaggggagaatggcacctatatggtccctgagggaggcctgttatctgcagaatggatgttga

SEQ ID NO: 506331 - DNA, 641 bp, Homo sapiens
aagagtatatattatatatatatatataattgactggatggaatatcacccactgaggaccagggttgatcctgctaactggctggctggctgtgcctcctttccctcattacccaaagtgctcctctctccaaaccacacctgggaagaaaatcaatgtgattttgtcagcatccggtgttgctgataccccctagctgcccccacggtgggaggcaccagaatccacagtattcagcgcccctttcatggaggatggcacatccttgaggagaatctcgggcttgtctttgtcaatgagatatgagtgttctggatagaagctttaagaaccagcacctgctcctttcccatcttgatgatggaaacagggagacctgggtcacctgagttcttggatcgtgaagatgagcagaacctgtggtgcgaggaagacatgcctttacctgttagccactgagatttttcaagtcattttcacaacctcgccctgtgaaaatctatcctttctaatgcctcaccaatcacaacgggaaatgtggatgactgtctctgtggattccgtggactggtaatgaygaccagtgatattgagctcagttggtgtcaataactattagtgacccactgattcaaccaaa

SEQ ID NO: 506332 - DNA, 578 bp, Homo sapiens
ctgcaagccaaggcacactaaggattgctgggaaccaccagcagctagaaggaggccaggaaggattcttccctactttttagatggaggatgctrctggaaacatcttgaatttggacatgtaaccacccagtttacggtaatttgttacattagcccaaggaaactgatagaagctccactttagatgggaaggtcatggaaggcctctctgaggaagtgacattttagctgtgatcttaaggacaagaaggtgagggtcaggtaaaggtgaagagagagattatgcaggtcagggaacacagcttgtgccacagccccaagataaggaagaatgtgccaggttcaagaaggtgtgtgatctgtccaaggtcataaggccaggaagtagcaaaattgggacttgattccaagtcttctgattgtaagatgagtggttaaagcttttctcactacatcccatatctcagaagaaccttaagaactaaccaacccacccacccaccccttactgttcaattttctgagcaattacaagtgaagttgtagaggcaccaccactggctagaggcaggtgg

SEQ ID NO: 506333 - DNA, 678 bp, Homo sapiens
cttagcctgaaataactgcagttcttttactgctctgctagtctgcaataaatgctaggagctgtttacaggaacagttcttcagaagaaaacaagtcgacaatgcattttgaaggcctaaggaaaataagaagaccaagttatatgcttgagaaaacacgttatttctgaactatgtgaagatatgaggctaggtaagaatgacaggaacttcttacatggagaactctaaaatggcatcaggtttgaaggacaacatatatatgtctaatctctcttaatctctccaggaaatcagattattgtctattttccacatgaggccacagagaataatggtctaacttacagggcttttctaaggttcacataagagtaggacaagaaagtgtttaaaaacctggaaatcactattcaagtatcaggtattattattttaaagtcaagtaaaaaaaagcaattctgccacctgtacagcatctaaattttcccctaaaaggttgtttatgaattctaaatattattcccagatgaagagagactctttatcctaagttatcattttttcccatttgctttcatagtactttatatccttgtcatttagagcattttattyacagtaacattaatccacaaatatcttcacaaagcagaagaaattcaaattgcatggaa

SEQ ID NO: 506334 - DNA, 636 bp, Homo sapiens
cgaatacaaagtttcctagcattaaggtcatttaaacagataygatatagtctctgaagacaagtccaaaaaaattccaaaatattttcagcattataaaccaccaaatttgtcagttggaaagagacaattaaatgaaaatttttttagcttaaaaatcagtgatgttactaaatagtctcatctttaataactctaaacattagtatattagagctaccatcttcttattttcattgttgcttatcaggaaagatgatgtactcttgaattctcacacttctcacaattaccagcatatcatgatcacctaggtaactgtacttgggagtacctaattgaaagcccattttaataaatgtaaagaaaactatgtaatgctatttttgaaaatttcctattacaaacacaatctatacaaatacggaaaaggaagatttgcaaaggactcatccagaagtaaaggtccaggtgaataataagttatatagatgttatatattttttaaaaatctacaaaattcaaaaggacatgattattagtaacttgatttgggtctttgacatggttctgcaatggataaactgctttttggccaatttcacttggcttctctgggttttaatttccttctg

SEQ ID NO: 506335 - DNA, 636 bp, Homo sapiens
cgaatacaaagtttcctagcattaaggtcatttaaacagatacgatatagtctctgaagacaagtccaaaaaaattccaaaatattttcagcattataaaccaccaaatttgtcagttggaaagagacaattaaatgaaaatttttttagcttaaaaatcagtgatgttactaaatagtctcatctttaataactctaaacattagtatattagagctaccatcttcttattttcattgttgcttatcaggaaagatgatgtactcttgaattctcacacttctcacaattaccagcatatcatgatcacctaggtaactgtacttgggagtacytaattgaaagcccattttaataaatgtaaagaaaactatgtaatgctatttttgaaaatttcctattacaaacacaatctatacaaatacggaaaaggaagatttgcaaaggactcatccagaagtaaaggtccaggtgaataataagttatatagatgttatatattttttaaaaatctacaaaattcaaaaggacatgattattagtaacttgatttgggtctttgacatggttctgcaatggataaactgctttttggccaatttcacttggcttctctgggttttaatttccttctg

SEQ ID NO: 506336 - DNA, 636 bp, Homo sapiens
cgaatacaaagtttcctagcattaaggtcatttaaacagatacgatatagtctctgaagacaagtccaaaaaaattccaaaatattttcagcattataaaccaccaaatttgtcagttggaaagagacaattaaatgaaaatttttttagcttaaaaatcagtgatgttactaaatagtctcatctttaataactctaaacattagtatattagagctaccatcttcttattttcattgttgcttatcaggaaagatgatgtactcttgaattctcacacttctcacaattaccagcatatcatgatcacctaggtaactgtacttgggagtacctaattgaaagcccattttaataaatgtaaagaaaactatgtaatgctatttttgaaaatttcctattacaaacacmatctatacaaatacggaaaaggaagatttgcaaaggactcatccagaagtaaaggtccaggtgaataataagttatatagatgttatatattttttaaaaatctacaaaattcaaaaggacatgattattagtaacttgatttgggtctttgacatggttctgcaatggataaactgctttttggccaatttcacttggcttctctgggttttaatttccttctg

SEQ ID NO: 506337 - DNA, 550 bp, Homo sapiens
tgtttcagagtctttgtctctctctctctctctctctctctctctcwcacacacacacacacacacacacacacacacaaacacacacagagtagttgaaatgaagcacaactttcagtatgaaagcagcagggctattgtgccatataatggacaaaattcttgatcttatgctaacggaaaacccactactgacttctacatgactgctattcattattcattcattgtatatgcatttattaagcagtaactatgtgcatgctatttgctatgctctggacatacagtgatgaataagacatgcttcctgagctggagatcagagtttggtatggagaagaggctcacactatgcagtaacttagacagtgttttaaatgtgatagcaaaaccacctggagtttggctggagcgcaaggaaaggagtgaattattatgtgcagggaagttaagacagtgaaatcttatttgccaagaacgagatgagattagaatcaagaaggacatttgttactttaacaatatgaaaatgaattggacagtcttg

SEQ ID NO: 506338 - DNA, 632 bp, Homo sapiens
tggcagccaacttatgacagtaccaatcaaataaatgtgccagtattttcctgcctctcttccatattcttcctccccatgttccaacccagaagagacagaaataaagattaattagcagaagtgtaaagaggcagggaaaaagaggctaaccacacgctcttccctattcataaactttatgccttagtaagtccttgctgttggaaggatagtagttttaactaaataaagttagctactttgacaatcccatgggactagatttttaaataattgcgtcaagactatctttgtgatttacagtaatcacaaggctttctatttccaaagaattattagaggtttcaagaagttttctaaggttttattcagtggcagaagacttctttcattgaataaattataaagaaacaaccagtgacaaaatagtatcacttyatgattagacctcatgaatcctaacacattagtcacactgtgatggttaatactgagtgtcaacttgtttgaaggatcaaagtattgttattgggtgtgtctgtgagggtgttgccaaaggagatcaacatttgagtcagtggactgggaaaggcagaccctaaccttcatctgggtgggcacaatctaat

SEQ ID NO: 506339 - DNA, 495 bp, Homo sapiens
cgcttcccttcacccagtcctctccaccccgtaagaacctacctagtccagcttcccaccacctgtcttccagaggactcccaatatctcctcactggccacyctgctgccttgaactttctcatcctttcccccacagcaggtgcacctgagcttcacctcgcctcccctggttgaaaaccccgcaagtcctccaatgctcctagcatgaagcctcaacctcttttgcctttaataaactatgtgtatatatataatttttttggagagatggtctcactccaacgcccaggctggagtgcagtggcacaatcacaactcactgcagccttgacctcccaggctcaggtggtcctcccacatcagcctcctaagtagctgggaccacaggtgtgcaccaccacgcctggctaattttttgtattttttgtagagatgaggtttcgccaaattgctcaggctggtatatattcatttttaaaatgagaaaaacac

SEQ ID NO: 506340 - DNA, 625 bp, Homo sapiens
ccaaaacaattacttaggacaatttcttccaatttccattttaatggcattgccttttttcatgtataaatcaataccatgctttatttactatgtactgctgaggacgaagaatacttgaaacactttgtttatgtaagttgagccaagatattttaaatattaattttcataactaaaaatagagtagcaagaaaaaaatgaataatgctactaattgactacagattccttggataatgcagagtttaaaaacttttgaggaggtacagaaatgagtaattcaagattggcctggtgtgggagatactaaagggacagaacacagaaaagaaaaagaagattttgaaccatttggctagacccatgctgctggaaagccaccatggccaggattacagggaggggcaagagaacttcagggcccaggagcttctcagtggagcactgacctgactacccaaggtcaaagccacactgttgcctgtggagatcaagggacctactatccatagtaggttttcttcttgctcatctcaaatgtaacrtatctccaaaaatcaaaaatgtctaagtttaaaatttcaatcatagcttaagctttgatttcatgagcaaatgagtt

SEQ ID NO: 506341 - DNA, 282 bp, Homo sapiens
ctggataattgcaatagcatctaagggattgttgrtatctctgctttagtccctccttcctgctgtctatttccaacaaaacggctcctgggtcttctgcagtgggtgtgcagtgaacaagaggcagaatcctcccatcctcctgcccaccaagtcctggtgcttccaagacccctgaaccgagccagtctcccctccaggcagcctgaactctgtttctgctcgggaaggtccttcctgtcagtcatggggagctgaccatggtacctactgggaaccaag

SEQ ID NO: 506342 - DNA, 478 bp, Homo sapiens
ccagttgttagacttttaaaaaataaattgaggcccagcwcgatggctcatgcctgtaatcccagcactttgggacgccaaggcgggcagatcacagggtcaggagatcgagaccatcatggtgaacatggtgaaaccccgactctattaaaaatacaaaaattagctgggtgtggtggcacatgcctgtaatcccagctacttgggaggctgaggcaggagaatcgcttgaacccaggaggtggagattgcagtgagccaagatcatgcaactgcactctagcctggtgacagagcgagagtctgtctcaagataaataaataaataaaaaataagtaaattgaagtgttccactatgtaggtaatgtcatagacaggttcaatacattatatcatccatcagaatgttgtgcaagtaacatttgaggtggaggggaaagtgtctcctgacatctagaagttggcctaacactcaca

SEQ ID NO: 506343 - DNA, 478 bp, Homo sapiens
ccagttgttagacttttaaaaaataaattgaggcccagcacgatggctcatgcctgtaatcccagcactttgggacgccaaggcgggcagatcacagggtcaggagatcgagaccatcatggtgaacatggtgaaaccccgactctattaaaaatacaaaaattagctgggtgtggtggcacatgcctgtaatcccagctacttgggaggctgaggcaggagaatcgcttgaacccaggaggtggagattgcagtgagccaagatcatgcaactgcactctagcctggtgacagagcgagrgtctgtctcaagataaataaataaataaaaaataagtaaattgaagtgttccactatgtaggtaatgtcatagacaggttcaatacattatatcatccatcagaatgttgtgcaagtaacatttgaggtggaggggaaagtgtctcctgacatctagaagttggcctaacactcaca

SEQ ID NO: 506344 - DNA, 613 bp, Homo sapiens
ctccagctgttaactccttcagcctcctaactgggtcatatattcttgggggtggccctcagcctgaggtggtgatagttgccagggaatgtgcttcttatagatgcccacagccagtagctgggaaaaatagttggtttagctcccagccatattttgttcaactcttccagcagaaacaccttgcataaagttccacactggcctgggagaaccttttgacagatctgtgtcacattctgatggctccctctgcmcaattctgcttcttccttacttttccttccacaggtattactcctccaaaatttcttgtgcttctagctccatccctgtcttcctcctggagaacccaacctataatggggacatctggatgagcagacccactgaaacacagaagaaatctaacgcacttacaaatcagaaaaagccagtggggtaagggagggaagatactagaactcaaactagtgggtgacaggccgtggagatacatcttctctttttattcacgttgacagttctgcagaatagatattgtgaattctacttggtagatactaaacctgggaactccagtggtctagaaatgtactgtgtcatgtaactt

SEQ ID NO: 506345 - DNA, 577 bp, Homo sapiens
tctagggcttggctgtggtataagctgcatttagttgattggtttcatttctgaatcttttcaagggagcaaggttctggtcagcgctcccaggctgcctgctccaaccctgatggggggctgggaccaggcctgtttctttgttctctggcccttcaaggtcaagcaccttctgtgctggaggggctgatgtgttctcagtctgttggcataacattccaatgggagctgccagcaaaaatgcttcggtgggaaggtagtagggggcccatgggagagcgcactgtggttggggggtataggaaagcgcacatcagtagggtggcagggcagccgtgggtkagtgcacattggcagagaagcattggggtagcaggcatgtgtgcaccaacagggtggtggatggctgtgcattgtagtggagcattattagaaggctgcaagtgctcctgcaggggaaggctgtagatgagtgcacaccagcagggatctgcctgccaaagcgctctgaggggaaggcaggggctgccagtgaatgaactatggcacagtagcttctgtcaactgtttcagcaga

SEQ ID NO: 506346 - DNA, 550 bp, Homo sapiens
atttagttgattggtttcatttctgaatcttttcaagggagcaaggttctggtcagcgctcccaggctgcctgctccaaccctgatggggggctgggaccaggcctgtttctttgttctctggcccttcaaggtcaagcaccttctgtgctggaggggctgatgtgttctcagtctgttggcataacattccaatgggagctgccagcaaaaatgcttcggtgggaaggtagtagggggcccatgggagagcgcactgtggttggggggtataggaaagcgcacatcagtagggtggcagggcagccgtgggttagtgcacattggcagagaagcattggggtagcaggcatgtgtgcaccaacagggtggtggatggctgtgcattgtagtggagcattatwagaaggctgcaagtgctcctgcaggggaaggctgtagatgagtgcacaccagcagggatctgcctgccaaagcgctctgaggggaaggcaggggctgccagtgaatgaactatggcacagtagcttctgtcaactgtttcagcagag

SEQ ID NO: 506347 - DNA, 622 bp, Homo sapiens
ttgtcttacagctgataaacccagagctcaggaaacatcaattttttaaataatgggcagcaagcagatctgcccaacttttacattatcttattacattggtggcaaaacaaccccatcttctgctccagagctagatactgtctctgtctatcaattctctttgctagattagtagtctgcatccagtcatgagatacaaatcataccaccgttaaaaaggagatgtttaataaaaagaattattaaatttgattaaaggctaactatacaacataagaaaactctatatggtgccctaaggctaagggagagcacccaaggaagaacaaactcagaaggagttaggcctcactgaaaaaggcatagtttaaccagcagatagtggagaagttttcagtgttgccaggctggagctggtctggagttgcttttgaaaatatcagaatcctctctgccatgcaggagggagtgcaaatgaacagcaatctgcacaggmaggcagtgggatcctgggtgctggtggaggcagagagccttccaatacatggatttcacaaggtggtggtggtgggaggaggggtttgcaggagggacagaaggtgacattcaggtgcaggtg

SEQ ID NO: 506348 - DNA, 648 bp, Homo sapiens
tgttgaaaataattatttaatactataattattcatcaattctataaatattacccttttttccagggagwaacatccagaagaaacaattagtaatatttctttactgcttgagtacattttatcatcagatggccaatcatataattgggtttattcaagaaatttttttctgtaaaatataaagtgaatcacctatctaattttgataacaggtaatcttaaataatagacctcattacagagtcatgtccatgcaagtacttgttatacaagcaatgtgtttacacccttcactttggactgcatgaactcaggtatcttcatctgtgtgcaacagaaagcccagggagcagcagcttaaaccataagagcatatactgtttacctgaagagagagaaggtggttccaagtgctctccaaagccccatgatgtcaggacatgggtcagcatctctacagctctcctgcttctctctcatgggtgcaaagtggcttctcacatctcaacatgccaagggcaggaagctgggatacaagggcaaggagagagctcctctcttctacagagaaggaaacatctttcccacaagcctggcaccctgcccttcactctccatgtgatgggaccacaaggcccctcccag

SEQ ID NO: 506349 - DNA, 648 bp, Homo sapiens
tgttgaaaataattatttaatactataattattcatcaattctataaatattacccttttttccagggagtaacatccagaagaaacaattagtaatatttctttactgcttgagtacattttatcatcagatggccaatcatataaytgggtttattcaagaaatttttttctgtaaaatataaagtgaatcacctatctaattttgataacaggtaatcttaaataatagacctcattacagagtcatgtccatgcaagtacttgttatacaagcaatgtgtttacacccttcactttggactgcatgaactcaggtatcttcatctgtgtgcaacagaaagcccagggagcagcagcttaaaccataagagcatatactgtttacctgaagagagagaaggtggttccaagtgctctccaaagccccatgatgtcaggacatgggtcagcatctctacagctctcctgcttctctctcatgggtgcaaagtggcttctcacatctcaacatgccaagggcaggaagctgggatacaagggcaaggagagagctcctctcttctacagagaaggaaacatctttcccacaagcctggcaccctgcccttcactctccatgtgatgggaccacaaggcccctcccag

SEQ ID NO: 506350 - DNA, 666 bp, Homo sapiens
gtcagcctacaacctgtgtgtcaggtcagatagaggctggaaaatcaacagctactgggtaattttaaggttaaccacgcaaaactatgaacagggctctgagacgttgagctccaaatagtcaacctggaaaggcctggcccaaggctgctggatgagatgtccgtgtaatttttctggatgacatcaaattttcttttacaggagctatataatggggcctttcaactagcaataagggaaaaagtacctatttccagagagcctcagcaacagaatttgttgtcaaacttttgggcatttgccaatctgatagtgagaagagatatcccctgtagttttgatttatgtttctctaattatgagggaaattaatgtcttttcatatgattaagcactatctgcattttttttactatgatctgtctattcatatatctagcttattttgtcaytggaattttttctatactgttagaagttctttagatattagaggtattaactttttgtcatgatatgagttgcaaatttttttctagtttattatttctttttctagcatacatatatacacatatataatgtttctgcaaatcttttattatataccatccatatagttttatttttattgtaaatatctaaatgttgaatttagagcgt

SEQ ID NO: 506351 - DNA, 593 bp, Homo sapiens
gatagatcaagacaaagtgcctaggctgggcgcggtggctctttcccataatcccagcactttgggaggctgaggagggtggatcacttgaggtcaggagttcgagaccagcatgaccaacatggtgaaaccctgtctctactaaaaatacaaaaattagccgggtatggtggcacatgcctgtaatcccagctactcaggaggctgaggcaggataatcgcttgaacctggaaggcrgaggttgcagtgagtcgagatctcgccactgcactccagcctggggtgacagtgagactccttctcaaaaaaatgagaaaaaaacaacaaaaaaaagacaaagtgccttaagcacctgcaagagtttctctcttatctgtcgttatattagtcaccaaagccattccacatagattgcacatgtgcctttctatatatacaagtaatatcgaacactgattagagtagcagaaagggatgaaaattttcacaggcgtccatgtgttttgtgactttgaacgaccatgcggaccaccacggggccccaatgccacctgtcagcagctctgaggatgcagccagcaacaggcaggga

SEQ ID NO: 506352 - DNA, 588 bp, Homo sapiens
cccaagtagctgggactacaggcacacgtcaccacgcctggctaatttttgtatttttagtagagayggggtttcaccatgttagccaagatggtctcaatctcctgacctcatgatctgcccgccttggcctcccaaagtgctaggattacaggcgtgagccaccgcatccggcccaccttttaaatatagttactgaatcactttccattgtttttcttcgtcataaatagctctaaccactttcattcttgctccaggactggatcctcatcatctgaatttatcttctggaggcctcaggggcgtgttccctatgtcaggagagctgtgtcaaaggcaaccaacctagggtatttctaaccagcgaccagcaaacaggtcttaatcattcgcatggataagtcattgagttggaaactttagagagagtaaaaataaaaagaattcacactctaaccagagttcttaacagatttcagggaagagggtgtgtgggcacgagagcctgggccattgaaccctctcatctgcacagaggactccacctgactcctcacctgcctgccctggcccaggtgacaagac

SEQ ID NO: 506353 - DNA, 551 bp, Homo sapiens
tctttaaaaaagggactttcattgcccaagggcacccccaagtcttcgccacaccaccatggaaaggatgcaggygctgctttagaagcaaagcatcccaagtttgggaaaagggtctcccaggaagagtccagagaagctaatggggtctttgtggaaggctgacgtgtcctttattccatatgtcatcataatttgggaagagaatccaaggaaatttgtgaatgtttcggaattgataacaaatatgttggttgtttccgcttccgtgactgctatacctataaccacaacctgagtggttcttaagatgacagaaatggattgtctcttcgttcaggaggctgaaagccccaaatccaggtgttgtcagggctgtgcccctccaaaggctctagggaaggatctactccttgtcccctccagttcttggtggctgttaatcattcctggcttgtggttgcatcagtgcagtcttcaagactaatatctccaaagctctctgccctgtctccatatggccctgtttgtgagtctgggccaggtctcct

SEQ ID NO: 506354 - DNA, 608 bp, Homo sapiens
aagcagaaagaacatggacataaaaacagctactgcacagactcccggtgggccacagcatctcagcatgatggaggacacccaggtagccctcactcatcagtgggtgctgggttaactgggtgctctgtagagatgaggcactttcatcctctcagcagtcctaggaggaggctccyggtatgggatgaaatccaaaattcatttggtgaagtcctaacccccagtacctgaagatgtgatcttacctggaaataagggccttgaagatgtaatcagtgacgatgggaccacagtggagtagaggaggcctgaatccaacaagaatgtgtcctcataaaaggggatttatttgagcaaagacttgctcccagggaaaaggccatgtgagcacaatggaagggataggagacaatgagccactgctgtagaccagtgaccctgaaaggtggtgttcaggaggacagtggttggttgtgtgctcctccaagcaggggacatcaagcctatcagactggctgggctcccctgccccagcactgagagaggctcaccaggtcaatgccaagggccatcatgatgttgtggtaagagcttgtgctctgcag

SEQ ID NO: 506355 - DNA, 608 bp, Homo sapiens
aagcagaaagaacatggacataaaaacagctactgcacagactcccggtgggccacagcatctcagcatgatggaggacacccaggtagccctcactcatcagtgggtgctgggttaactgggtgctctgtagagatgaggcactttcatcctctcagcagtcctaggaggaggctcctggtatgggatgaaatccaaaattcatktggtgaagtcctaacccccagtacctgaagatgtgatcttacctggaaataagggccttgaagatgtaatcagtgacgatgggaccacagtggagtagaggaggcctgaatccaacaagaatgtgtcctcataaaaggggatttatttgagcaaagacttgctcccagggaaaaggccatgtgagcacaatggaagggataggagacaatgagccactgctgtagaccagtgaccctgaaaggtggtgttcaggaggacagtggttggttgtgtgctcctccaagcaggggacatcaagcctatcagactggctgggctcccctgccccagcactgagagaggctcaccaggtcaatgccaagggccatcatgatgttgtggtaagagcttgtgctctgcag

SEQ ID NO: 506356 - DNA, 622 bp, Homo sapiens
ttaacccgttttcttctcttggcattattccttaatgaaaaacagtgaattatgtatataaatttataacatcttaaatgaaaggagaagttatttaaaacatgtgaccatgcttcctgaaatgatttctaacctttacatttggagaacaagctaagagatggcatttgcaaaggtttcctaggatgttactaacattaactatttaagatttgctctgtgccctatttaataaaaagtgacttttctcttatttgcagcaaggaaaaattggtcttacttgcaatataaatcaaaaagctggtctcaagtctgtgtcttgtgatctcacctctcaaaaataaatagtccctcacactgagtctctcttgtgacaccgggaggtggaaccaaccacacacggcctcctgttctcatatgctgctggggctaatactaaggttcagtagttgctgccacagaggctaaaaaggagaaagacatcaccatttggttctctgctcctaaatctgcttttccaccatggcatcttctttcttctcaccctgyccactattgcccagcccacagagtcaccagaaaacttgtctggaatgtgacagaactgaagaaaccaaatggc

SEQ ID NO: 506357 - DNA, 480 bp, Homo sapiens
tggggtgaggtagtggaaaagtactagaggactttggtgtragggagtggggagttggttaatgtgattaagtcatctgtatttgctaactggctcctacccttccacagagattagaagacagtggccttatctttcttgattatatttctaagggttggcctcaaggtccttgagaaatgcactccagtgttgtaaccctggcaagaggccaggggaagacttacatctcaaagagtcagagaaagaatttacaaaggaaaattttcttaggtaaatgctctaagaaaaggaaggtcggggacctaaagtcaaaatgcctgtctaaaatttaatagagctgaggggaatattaaagctctcttggtaatgcacttagaactaattcagaattgtaaagctagagaatagctgcaaaattaagggatgacacttattggtcagagcatgctccctgggtgtccccatatacaaaaatgg

SEQ ID NO: 506358 - DNA, 480 bp, Homo sapiens
tggggtgaggtagtggaaaagtactagaggactttggtgtaagggagtggggagttggttaatgtgattaagtcatctgtatttgctaactggctcctacccttccacagagattagaagacagtggccttatctttcttgattatatttctaagggttggcctcaaggtccttgagaaatgcactccagtgttgtaaccctggcaagaggccaggggaagacttacatctcaaagagtcagagaaagaatttacaaaggaaaattttcttaggtaaatgctctaagaaaaggaaggtcggggacctaaagtcaaaatgcctgtctaaaatttaatagagctgaggggaatattaaagctctcttggtaatgcacttagaactaattcagaattgtaaagctagagaatagctgcaaaattaaggratgacacttattggtcagagcatgctccctgggtgtccccatatacaaaaatgg

SEQ ID NO: 506359 - DNA, 480 bp, Homo sapiens
tggggtgaggtagtggaaaagtactagaggactttggtgtaagggagtggggagttggttaatgtgattaagtcatctgtatttgctaactggctcctacccttccacagagattagaagacagtggccttatctttcttgattatatttctaagggttggcctcaaggtccttgagaaatgcactccagtgttgtaaccctggcaagaggccaggggaagacttacatctcaaagagtcagagaaagaatttacaaaggaaaattttcttaggtaaatgctctaagaaaaggaaggtcggggacctaaagtcaaaatgcctgtctaaaatttaatagagctgaggggaatattaaagctctcttggtaatgcacttagaactaattcagaattgtaaagctagagaatagctgcaaaattaagggatgacacttattggtcagagcatgctccctgggtgyccccatatacaaaaatgg

SEQ ID NO: 506360 - DNA, 534 bp, Homo sapiens
tttctgttacctgcagccactgaaccctatattgtcaaatctcaggtacccttttcagttcaactsttgactagaacatacagaaattttgacacatttacttatttcccccttattgaaacatttagtttctgtgaaactggtgtctcctattttttcctccttcattaggaaatacagtgatagttctcctttgtgaaattactaaaatttagaattcctcaggatttctcttgggtctctctttttctttttttttctctttctttttttttattttcttacagttgcttcatacttgatatttcttcctttgacatttgctaacatctatgagctaattaccctcaggtaacttggtacagacctattctctgaattccaggtatatattttgaccgtcttgttgagacatcctctgatattccacaggtttctcacactgaaaaagtccaaaattgagtcactgatgcttgacactaaactgcttttcctttacacaatgccaaacacacttgcagttaccggttggtc

SEQ ID NO: 506361 - DNA, 534 bp, Homo sapiens
tttctgttacctgcagccactgaaccctatattgtcaaatctcaggtacccttttcagttcaactcttgactagaacatacagaaattttgacacatttacttatttcccccttattgaaacatttagtttstgtgaaactggtgtctcctattttttcctccttcattaggaaatacagtgatagttctcctttgtgaaattactaaaatttagaattcctcaggatttctcttgggtctctctttttctttttttttctctttctttttttttattttcttacagttgcttcatacttgatatttcttcctttgacatttgctaacatctatgagctaattaccctcaggtaacttggtacagacctattctctgaattccaggtatatattttgaccgtcttgttgagacatcctctgatattccacaggtttctcacactgaaaaagtccaaaattgagtcactgatgcttgacactaaactgcttttcctttacacaatgccaaacacacttgcagttaccggttggtc

SEQ ID NO: 506362 - DNA, 596 bp, Homo sapiens
tttctaggtaattcacggaacagattatttgcaggagctctgggaatagcaacactttccctcaacaagaagtcaggttaccctgttcatctatttttaaagttaaatctctttcatacccagtgtgaaatttttaacaaagtctgatttgctgttaaagattttgcacactgctrcataattccacttaacactttgagctaggaaaagacctgaatgctaatctgaactccaccaaaaataactgttttaggcagtacacaagttaatttcagattccaaaactagtttcatcatctctttcccctagtttgttttttaaatagtctttgaaaattatggaattataactattcattatgtgttttctctcagggctagatgacttcaataaagcaaagcggaaaatgtctcaaaaatattcttactcttcccactcaaacaatataagaggtgcatattcaatgagcagcagtaaagcccttctaaagtgggtaggtgtaatttgtctttgttatttcacttgacactttttggtcaattacgatgccatccgatgtgaggcaccatttctcaatgagcttcataaagtaaga

SEQ ID NO: 506363 - DNA, 370 bp, Homo sapiens
ggcgggcgtggggtgaggggcagcgacagggggtggagagggaatcgggaagccagggcgtagcaaggttgtagcaagggcgtgggaccgggccgcagagaccgaagagggcaggtgactgcgaggcgggacgtggggtcgctagggggcaacctgggcactgcagggagtgggaaggcagatggggacaggtggcaggcgtcttaccgccctcgccggcctctagcatgccctgcaagtagcggaaggagcctgactgcttgggctccgcggccacgggctcggcyggctcccgcagcatcctgtacacctcggagcccaggtcgactctgcagtcccggctccgcgggaggcctctggctgggtcagc

SEQ ID NO: 506364 - DNA, 601 bp, Homo sapiens
tgccctgaaatgggtctaaaaatgcttgggaggcaaaatcctagacacagtgctgggtaggatgttatggctggcatgagggtgtagaggatgatatccatgtctttggtctgaaagcccctgaggtaaggaactgggccctggggttcgagggatgtagcaggtttggggacaacagtgaaagttggttctagccaggtaggctggagcctggagcactgtgaattggggatcctggatctggttccccctcctggagagagactctgatgtcccctgtctcagtactggsaccctgggccatacaaaccttgtcctatgaggaccctgtcccaagcttttcatggtctactacactcagggcccctgggcagacgaggtgggctgggggactgggtagaggctgggccttgaagctggggaaaggacaaatcaggctgtcagctctgaatgccactccccttagctgccctccaagccacccccaaccaggatgcccaggcaggggctgctgtagttgctgcaaccctgaaggggtggagctgttgatctcggggtagcctatggtggcagggagcctcttgggtggtagtttctgttg

SEQ ID NO: 506365 - DNA, 581 bp, Homo sapiens
cttccccagctgtctgcttccctggagcctgggctggcaagaggcaattactagaaaagggtcagaggtgtggggtgagtgtgagtgaagttgmatgactctgtgtaggcagggagaactttcaagagctagagggagatgactttggatggactcttaaattttgttttcttttctcttcctgtttatgaggaataaaaattaatggtataatctcattatgtaaagttgagagctggagagggcagggttaattttcagttttgaccttggaacttcaaaaggagggaagagaggagggaagagagagagacagagagagagagagagagagagagagagagaaacagaaacagaccatcttctttatacatcctgggttcagaacccttgggcgcaacctgtgttctgcttgtttggctgtatgggatggagagttaagaatggagctcagccctgagtcctgtgccagttgagcttcacaggtgactcttggcagccagtctgagtcatttgcattttcacagccaaagggctgctcacaagatgttctgtgcagatatttaagttgctggattcca

SEQ ID NO: 506366 - DNA, 581 bp, Homo sapiens
cttccccagctgtctgcttccctggagcctgggctggcaagaggcaattactagaaaagggtcagaggtgtggggtgagtgtgagtgaagttgaatgactctgtgtaggcagggagaactttcaagagctagagggagatgactttggatggactcttaaattttgttttcttttctcttcctgtttatgaggaataaaaattaatggtataatctcattatgtaaagttgagagctggagagggcagggttaattttcagttttgaccttggaacttcaaaaggagggaagagaggagggaagagagagagacagagagagagagagagagagagagagagagaaacagaaacagaccatcttctttatacatcctgggttcagaacccttgggcrcaacctgtgttctgcttgtttggctgtatgggatggagagttaagaatggagctcagccctgagtcctgtgccagttgagcttcacaggtgactcttggcagccagtctgagtcatttgcattttcacagccaaagggctgctcacaagatgttctgtgcagatatttaagttgctggattcca

SEQ ID NO: 506367 - DNA, 581 bp, Homo sapiens
cttccccagctgtctgcttccctggagcctgggctggcaagaggcaattactagaaaagggtcagaggtgtggggtgagtgtgagtgaagttgaatgactctgtgtaggcagggagaactttcaagagctagagggagatgactttggatggactcttaaattttgttttcttttctcttcctgtttatgaggaataaaaattaatggtataatctcattatgtaaagttgagagctggagagggcagggttaattttcagttttgaccttggaacttcaaaaggagggaagagaggagggaagagagagagacagagagagagagagagagagagagagagagaaacagaaacagaccatcttctttatacatcctgggttcagaacccttgggcgcaacctgtgttctgcttgtttggctgtatgggatggagagttaagaatggagctcagccctgagtcctrtgccagttgagcttcacaggtgactcttggcagccagtctgagtcatttgcattttcacagccaaagggctgctcacaagatgttctgtgcagatatttaagttgctggattcca

SEQ ID NO: 506368 - DNA, 663 bp, Homo sapiens
tatccttccctcctcccatctcacaactttgtgtgtgtgtaataaatcaatttcggtttgcaataaaaccttgaaaagtatttaccaaaaaaaaagaatacatttttcttttcaagaagtttcatttaaatgctctttgaggtattaccaccttctcttttccccraatccagggtcacccaggctgccaccagggcaatcaggcattttcccaatggtttctggtaaactctgtcttggaactctctcaagttaagttgccttagaaaatcatctgctggcattgaagaatttgctaagtctgggtggagttctgacgctgcttgtctgtattctcaggataacagcctgaaagcctggcccagggagaacgttatgcataggaaattaatactgtggaatcgtctctccagtcagaggagaggaagcgcaggctggagccatttaaagtgagttaagtgctcacatagcagtggcactgcccctggggcaacacaactatcccaaaggctgtctctgccttctagtctcccatcagctcagatagaacagatgggtagggcctggaggatgaggaggactggagtgtgcaagaagcaaatgcaagccagtcctttgcagagctcctcagagattgcctggggtggggacagcaggagggcc

SEQ ID NO: 506369 - DNA, 659 bp, Homo sapiens
ctgatgccggctggagagaagtgagctggctgcactgaaccctgttcaaattgcagattaatgagcaaaacaaatgatcaatgtcattttaaactgtcagaggtattcaaaccagagcaactccatcttgaacaggggctyggtaaaatgaggctgagacctcctggttcccaggaggttaggcattcttagtcacaggatgagataggaggtcaacacaagatacaggtcacaaagaccctgctaataaaacaagatgcagtaaagaagcaggacaaaagagttcatgaccaagaacccaaaggcaaatgcaacagaagcaaagataaatgatgggacctaattaagctaaaaatcttctgcactgtaaaagaaataatcagcagagtaaacagaaaacctacagagtggaaggaatatcttcacaaactatgcatccaacaaaggactaatatccagaatctacaaggaactcaaacaaattagcaagaaaaaaacaaataataccataaaaaattagcctaaggacatgaatagacaattctcaaaagaagatgtacaaatagccaacaaacatatgaaaaaatgctcagcatcactaattatcagaaaaatgcaaatcaaaaccacaatgaaataccaccttactcatgcaagaa

SEQ ID NO: 506370 - DNA, 659 bp, Homo sapiens
ctgatgccggctggagagaagtgagctggctgcactgaaccctgttcaaattgcagattaatgagcaaaacaaatgatcaatgtcattttaaactgtcagaggtattcaaaccagagcaactccatcttgaacaggggcttggtaaaatgaggctgagacctcctggttcccaggaggttaggcattcttagtcacaggatgagataggaggtcaacacaagatacaggtcacaaagaccctgctaataaaacargatgcagtaaagaagcaggacaaaagagttcatgaccaagaacccaaaggcaaatgcaacagaagcaaagataaatgatgggacctaattaagctaaaaatcttctgcactgtaaaagaaataatcagcagagtaaacagaaaacctacagagtggaaggaatatcttcacaaactatgcatccaacaaaggactaatatccagaatctacaaggaactcaaacaaattagcaagaaaaaaacaaataataccataaaaaattagcctaaggacatgaatagacaattctcaaaagaagatgtacaaatagccaacaaacatatgaaaaaatgctcagcatcactaattatcagaaaaatgcaaatcaaaaccacaatgaaataccaccttactcatgcaagaa

SEQ ID NO: 506371 - DNA, 615 bp, Homo sapiens
tccaagtatcacagttgagaaacaaaagtggggagaagttatatggagagaagtaaagagatacacgttataaagaaaaggcagtaatatgtgagtggatacactcacagacctgcagagcacggcatcactcccaagaggtagtgatgtgtgtgaaaatactttagctgtccagaagaggaccggtgtctaccaaaggtagaattttcaccttgaactaaacactgccaattatgcacatgtgacaagaataaatctcaaggagctcacagagagttacaacactaggcaattctctacagcagtggtgtgcattgttattgagggaacatacatgttcttctccaatgctggagggatactcagtgctccgaaggagcacagatgaaggagtaattcattctacctggtggactagaaaacsaaagtttgccaggtgttaaatacttgtcaggacagtgattccaaacaagggagccacatgagtaagagttcagcgatatgaaaaggctgtgtggttacagacatgcgggatcaggtctcatggagagaggttcatgaagatgaggctggagaagcagactgaggcagtttgtaaaaagccttacagaccac

SEQ ID NO: 506372 - DNA, 555 bp, Homo sapiens
gcagaaccaagcaaaggcggtcatccgaggggccggcgaggccaggaacgcgtcgccgcgtgtccgtgaccagggcaccgcgccacggatgccagatcccaggctggagagagcgggtaggggcagagaagaaaacgcgggcaccactcagggtttggtccacgttcttcctgcccatggccttcctcttcccccgcactttaccttgtaccaggttgccccagatccgcgggcagaggcgcagagccgaagcccggaggagaggagtttgagagccgccatcttcgggcggtgaggcaggaggaggctgcgggttggagcgcgcgtttgagcgtcggtgcgcgactgcgaaggaaacccgggcgggctggaggctcgacagcgcgtcgatgacgtcctcccggcctttcgagccgcacgccaccggcgcgctgctggctgctgcttttaaaagaagtgaggctgggcggggccccggcggggagaagaggctctgygcagccggggcggatcgcggggaagttcctctcagcgcctcaggtgtctgggcgtgtg

SEQ ID NO: 506373 - DNA, 581 bp, Homo sapiens
tgtgtcttgctttgtatctgatgtttctttcctgagtcatcttttctttaatgctccatctagctacatctcacttatctttcagcaccctgctgttccgtgaactcccatggctccctgtttttgccactgttgtcacacttgtaacacagatttttgccatctgcttactgttagtcttcgtgctagactgttagctattatacttgagggcactgtcttatctattttgtttctgtaccaccagctctggagccatgatccaaacagagcagaaaacacgtatttcttaaattactacccagccaggtaggattattgcaaaccctttcataaattcattattctttcaaaaaatcaattttgatttcttaaattctctcatgtgtttgttttgtgtttcgttaattttggcttctatcttcattagttctaccttctatttttgagmgttttaatttgtttttcttttactaacttcttgagatggacgtttaaattattgattttcggcctttattcttcgctaacgtatacacttaaggttatagatttttttcctctaaaacatgacttttatt

SEQ ID NO: 506374 - DNA, 600 bp, Homo sapiens
gctgaaaaacaagtgtaaagggtccagttggaagctagattccccccaagtggtgcccttaaagtggatcaatttttcttcactttttagtcaagaattttttttggtttaaatgttgactttcctatctctctgcatatcaaactctggtttgagtcttcaaagttcagactgccaggttcttgggtgcaagaattccttayaaaaaaacaaattccagaatggcagtaaataggagaatttaatccatttatattcaaggtaattactgacaaataaagacttaatactggcatttgttaattgttttctggctgtttttcagatcctttgctccttcctatctttctgtcttcctttgtgatatgatgattttctgtcatggtatctttgaatcctttctggttttttttgtgtatccactataggtttttactttgtaattaccgtgaggcttacataaaacatcttggcttataatagtctattttaagttgataatagcttaacttcaataatgtataaaactctacacttttactctcctttatatttttgatgtcacaatttatatcctctcatttctgtatctacaaacga

SEQ ID NO: 506375 - DNA, 414 bp, Homo sapiens
aaagtggatcaatttttcttcactttttagtcaagaattttttttggtttaaatgttgactttcctatctctctgcatatcaaactctggtttgagtcttcaaagttcagactgccaggttcttgggtgcaagaattccttataaaaawacaaattccagaatggcagtaaataggagaatttaatccatttatattcaaggtaattactgacaaataaagacttaatactggcatttgttaattgttttctggctgtttttcagatcctttgctccttcctatctttctgtcttcctttgtgatatgatgattttctgtcatggtatctttgaatcctttctggttttttttgtgtatccactataggtttttactttgtaattaccgtgaggcttacataaaacatcttggc

SEQ ID NO: 506376 - DNA, 414 bp, Homo sapiens
aaagtggatcaatttttcttcactttttagtcaagaattttttttggtttaaatgttgactttcctatctctctgcatatcaaactctggtttgagtcttcaaagttcagactgccaggttcttgggtgcaagaattccttataaaaaaacaaattccagmatggcagtaaataggagaatttaatccatttatattcaaggtaattactgacaaataaagacttaatactggcatttgttaattgttttctggctgtttttcagatcctttgctccttcctatctttctgtcttcctttgtgatatgatgattttctgtcatggtatctttgaatcctttctggttttttttgtgtatccactataggtttttactttgtaattaccgtgaggcttacataaaacatcttggc

SEQ ID NO: 506377 - DNA, 604 bp, Homo sapiens
  misc_feature (1)...(604): n = A,T,C or G
ctccttcctgcctcaccctatgagatagaggctattgtcacccccattttagaaatgaggaaacccaggcacagtgacatcaggttaagtgccatgtctgaggtaacacatcaataaagggcagaaccaggagtacactcttctatgtccatcctcttggccaccatacatcctgctcaacaccaacaaggcagaattgaatcaaggtgctctgattctcagactagcatttaattctaacttgcaagaccctagaacggtctgtcagaggctgatgactcacaaagcagcatcggtttaaaaaggtgaggcattcactagaatggcaactttgggcttcgtgtttagaagtgccggggctaggggtaggggaatgtgataaatataggctgaacttccattaaacaaaaatgtactgtgagaaaaagcttggtgtgtttgggtgaatagtgagtttctaccacatgcaaagcatgataataatcaggttttcaaaatactcagccaggctctgctrtcttctctaaggtagaaatgcacagacagatnaaagactgttcaggttttatttcaatctttccctccctgcttgtggtcttagaag

SEQ ID NO: 506378 - DNA, 664 bp, Homo sapiens
gtttttcttgaaaaaaagagttctcaaattgttgcaagttaatttggctaattttcagtataagagttttataatggtatgattctgtttcctcctttcctagcctttgtgctgtgattgtctttcattttacttctaattgttataaaccccacaatacattattgttgctttaactagtggattatctctcaaagagattttaaattaaaaatatatatrtatgcactcacatatttaccatttctgatactctttatttcttcgcatagatccctattttcctttggtagttttttttctacctgaaagatttccatgagtgttttatgtagtgcagtgctgctgatgaagaatgctttcatcttttatatgcccaaaaatgttttcttgccttcttttttgaaagatatcttcaccagttgtagaattctaggttggttggttggtttgtttttaatactttaaagatgctccactttcttctggctttcattgtttctgataaacgtgttgttgttcttaccattttttttctgtacataatatgtctgcttcctcagactatttttaaaatgttttcttcttcattgcttttaagcaacttgttaatgatataccttggtacattttcttgtcttttgtgcttggagtttgttgagtt

SEQ ID NO: 506379 - DNA, 610 bp, Homo sapiens
aatgccctcttcttgatcccgtaactcttgatgcctgactgattcttctaacattctctcattgtaggttaagtttgactttttttttatagtttcattttatttttaagtgacaaataataattgtttattatttatgggttacaatgtaatgtttcaatacacgtatacattacagaatgatcacatcagccttactagcatatccatcacctcaratatttatcatttatttgtggtgaaagcatttaaaatcctcttttttaaaaccctctcttttagctattttgaaatatacattattattaactatagtcaccttgctgtgcaatagaacaccagaactgatttcacccaactctaactttgtacctgttgaccaatgtctcccttttcccaatccaccatgtccacctccctccgcagcccctggttaccaccaatctactctctacttctctgggtttgacttttttcgattccacatgtcagtgagaacatatcgcatttgtctctctgtgcctggcttctttcacttaacataatatcttctaggttcatccacattgttgcaaatgacagaatttcctgtttgtgtaaggttgagtac

SEQ ID NO: 506380 - DNA, 610 bp, Homo sapiens
aatgccctcttcttgatcccgtaactcttgatgcctgactgattcttctaacattctctcattgtaggttaagtttgactttttttttatagtttcattttatttttaagtgacaaataataattgtttattatttatgggttacaatgtaatgtttcaatacacgtatacattacagaatgatcacatcagccttactagcatatccatcacctcagatatttatcatttatttgtggtgaaagcatttaaaatcctcttttttaaaaccctctcttttagctattttgaaatatacattattattaactatagtcaccttgctgtgcaatagaacaccagaactgatttcacccaactctaactttgtacctgttgaccaatgtctcccttttcccaatccaccatgtccacctccctcygcagcccctggttaccaccaatctactctctacttctctgggtttgacttttttcgattccacatgtcagtgagaacatatcgcatttgtctctctgtgcctggcttctttcacttaacataatatcttctaggttcatccacattgttgcaaatgacagaatttcctgtttgtgtaaggttgagtac

SEQ ID NO: 506381 - DNA, 610 bp, Homo sapiens
aatgccctcttcttgatcccgtaactcttgatgcctgactgattcttctaacattctctcattgtaggttaagtttgactttttttttatagtttcattttatttttaagtgacaaataataattgtttattatttatgggttacaatgtaatgtttcaatacacgtatacattacagaatgatcacatcagccttactagcatatccatcacctcagatatttatcatttatttgtggtgaaagcatttaaaatcctcttttttaaaaccctctcttttagctattttgaaatatacattattattaactatagtcaccttgctgtgcaatagaacaccagaactgatttcacccaactctaactttgtacctgttgaccaatgtctcccttttcccaatccaccatgtccacctccctccgcagcccctggttaccaccaatctactctctacttctctgggtttgacttttttcgattccacatrtcagtgagaacatatcgcatttgtctctctgtgcctggcttctttcacttaacataatatcttctaggttcatccacattgttgcaaatgacagaatttcctgtttgtgtaaggttgagtac

SEQ ID NO: 506382 - DNA, 585 bp, Homo sapiens
gaaatctcttagcagccacttgtggtggccatgaaatatgatcaggctggagtcatatttctgatacctgttcaactttgaaaacaaagtctggagaaacaactgaatttatcttcaggttgcccattcaaaaagtggggaaagctcaaggattttctctgttggcagagatttgtaaactgcttcaaccaaagttaaactggggagaatatatgtctcatggaaggcaacaagggaactttaaacacatgacaaccgtgcttaagttggtgcakacattctacagaaaaggacaagccagtctctgccaagccctgagactcctgaaatgattaggggagcacagaaaattcagcccaactgtggacagggtgaatttccacaaatctataactccatctgcttactctgctccacgaaggcactgcactgttttcaattccaatttaatgtgtatgtgtttagtcactaatgtgtgtctaaggatggcgtttgtttgaaatgtcagaagtggtgagaggagggcagggaaagactccagagaagtgtaagtcataactcctgcctctactatctgtagatagc

SEQ ID NO: 506383 - DNA, 374 bp, Homo sapiens
tgggtcacaatgggcagagagaacagtacagtcatgctttgcataacaaagttttggtcaacaatagacgacatatatgatgatggtcccataagattataataccatatgtttatggtacctttttatgtttagatctgtgtagatacacaaatacttaccattgtcttataattgcctagtatagtgcaataatgtgctgtacaagtttgtagcctaggagcagtaggctgtascatatagcctaggtgtgtagtaggctatactccctaggtttgtgtaagtacactctgatgtttgcacaatgacaaatcaccgaataatgcagagactcatgactgtactaggattcagggactatgttaagcacttaa

SEQ ID NO: 506384 - DNA, 631 bp, Homo sapiens
acaatgcaccagaagttacaggcctaggagtatgcatgtttttgaagttcctctaaaaatatgatgatcacccaggcttgggaaccattggtcaattgtgctctagactgtgcagtccctaaacagaactgaaacctaggtcaaggaaggcacagggatgagcaatgttgttgcaaggaatagggaagaaccagaaaaagaagagaggagagggtgggcagatgggagaaagagggggctgaaagtgaagggcagaaagccaacactggcccaggtctctactctgtttaggaacagctcaacctaagagcaggccagggtaaggaatgagtccatccacgtggattggaggcattgtaatacagtagtgaagagcataccctctggagtcagactgcctggctgggaatcctgcctctgcctcttataagctgtgggacattgggcaagttatgtaacctctccaggccccagttttcttatttataaaacggaggtattaaaagtagtggcaaaacygcactcacttttgcaccgacctaatactatagtagctacctcatagggatgttaaaagtattataagagctttaagtgcttaacatagtccctgaatcctagtacagtcatg

SEQ ID NO: 506385 - DNA, 576 bp, Homo sapiens
ctagctcactgcagtcttgaactcctgggctgaagtgatcttcccacctcagcctcctgagtagctgggactacaggtgcctaccactgcacccaccttatatatatatatactttttagtatatatgggagtctcactttgttgcccaggctggtcttgaactcctggcttcaagtgatcttccccctcagcctcccaaagacctgatattataggtgtgaaccaacatgcttggcatttcttatcattttttgagtgcatactataagcccagacagtataaattgttagcatagtgttatctgacatctattgccatctcaggatattgaatgtgatgattgctggcagcagttggggatggagtggaggaagttgttatggtgatctattgtagggatcactccagaactcagtggttcaaagcaataaccttatacatctacaatttgagcaaggattggtgggaatagccaatttgttctctatttgatakgagctgaggcaaatcaaaagtaagaaaccagtcttcctcactcacttgtgcaacagatcacactggctgttggctggga

SEQ ID NO: 506386 - DNA, 463 bp, Homo sapiens
tatgctataaacctttccattgagttttttatttgtgttgtgtttttaaaatgctacaagttctactttattttttaattcaaaactgctagattactttttatagtttcctatttccttcagatattttcaagcttctcttctgtttctttgaatcttaacaaacatagttgttttataatctatgtctgataattgaaatatctaaagtctttgtggttctgtytcttctggtgctcattcacagtgctttgttttctcatatgcctggttaatttttactgtgcatgtttcaaagtccttgaaaaattatttatggtgataattgaggtctaagatgaaggtgactgcattagctcctgccagatttatttctgtttcattcttattctgaaagtgcaggcctctagggccacaggctagtgaggaaagtgtgccctattagactccctacctcaggcag

SEQ ID NO: 506387 - DNA, 614 bp, Homo sapiens
tccattcacaggcaggagtttctgttctcattagagcaaccccactttaccatcacttttcactccaatactgaaatgacccatacgtgacaatattcagttgatttctgggagtactaagatcccagaaagaaaagcatgcaacctatttttcctttctaacttcaaataacttcaaaattgatatacccatggttttgtgtgtacctttatttagaaagtaatccttaataacttgtttttcaaggtcagggtttaattcmgtcattttgtgtttaaggactactagagtctgagaaacacggcactgctaatttataaggctgtacttaaaggtaaatctaaaatcaaaaaagctttgatgtcttggcctgaccaaagcatgttagcattttataactggctaacaaaggaggacttttcccacaagtggtgagtatgtcctgcagtttccttcagcataaaggagtgtatcttttcaaaaaagtttggctttttcttcactgtggagaaagtcacactccacattcatggtagatgacattatgaagtgtgtgccccaaacacttagtagaaaactgtgagagacagtttattttagcagaaaactgtga

SEQ ID NO: 506388 - DNA, 618 bp, Homo sapiens
ctggatgtaccttcaccactcctggcgactggacctcaggtaggatgggctagagatataggactggctcgcgaggcactgtggagtaaaagcagccagctctaaaactccctcatggaaagtaaatttgcatgggtacttaggaataaagcaaaagagacagaaaaaaacattaatggtggttatgtctgggttgtggcattgtgaatctgtaaacactgtttgaggtttttcccttttttattcatccttacacactggaagaatctggtctaaatttgggtgagtaatccatgggctacccactacagccctgctttcccttggccctgaaggatgaatctcctcagaatgagggtgtggatgagagctgttcctttttgaggttgccgctgcctttgagacattgatatcacaggagaacgtagttctcaaagggcctctaaaatggccctttaagaaacaagtaccctggccmctatgaacctgcctctcctttacacgtcaggtccaattcatagcctgcttccttcattctaaaatactataagcaaggccatgtagtatctagaatctataaaaatccaatatactgatattataaacatttttccatct

SEQ ID NO: 506389 - DNA, 618 bp, Homo sapiens
ctggatgtaccttcaccactcctggcgactggacctcaggtaggatgggctagagatataggactggctcgcgaggcactgtggagtaaaagcagccagctctaaaactccctcatggaaagtaaatttgcatgggtacttaggaataaagcaaaagagacagaaaaaaacattaatggtggttatgtctgggttgtggcattgtgaatctgtaaacactgtttgaggtttttcccttttttattcatccttacacactggaagaatctggtctaaatttgggtgagtaatccatgggctacccactacagccctgctttcccttggccctgaaggatgaatctcctcagaatgagggtgtggatgagagctgttcctttttgaggttgccgctgcctttgagacattgatatcacaggagaacgtagttctcaaagggcctctaaaatggccctttaagaaacaagtaccctggcccctatgaacctgcctctcctttacacgtcaggtccaattcrtagcctgcttccttcattctaaaatactataagcaaggccatgtagtatctagaatctataaaaatccaatatactgatattataaacatttttccatct

SEQ ID NO: 506390 - DNA, 622 bp, Homo sapiens
tggctgtcctatctatattgcatcttggaccccgtgggtcctggcatgtgctgtgtgctctttctgtccttgataggatcataggccttttctttccacatgtacattttccccaatacaattgttttttttttttgaggcagggtctcactctgtcactcaagctggagtgcagtggtgcgatctcggctcactgaaacctccacttcctagattcaagcgatccgcctacctcagcttctctagtagctgggactacagtcacttgccaacatgcccggcaaatttttgtatttttagtagagacggggtttcaccatgttggttgggttggtcttgaactcctgatcccaggcgatctgcccgcctcggcctccccaagtgctgggattacaggtgagagccactgagcccggctcccaatacagttttttattgcaaaattcatgccctaatggagtctcctgtcgtgtgccttgtttccattaactaggcatcatctttttttttttaatgttttatttcgtagcctatctgctgatgyggcatcacttttgtttccagtaaatgaaaggaaaacatttccactcacttaggcaaaaagaagaagaaaagcttgagt

SEQ ID NO: 506391 - DNA, 611 bp, Homo sapiens
gatgatacatcttttaagatttcccaaggcgagtagattccataagcttctgtgataacattttccwgcatttaaatatggaaatgagaagcattattttttattttgtttcatttttcttaggtacatttaaaatgtttgctttcttttctggcttcagtggagatgaataaagctgataataaaacactgttcaaatgtagggccacatttgtcttgtcatcgtgttttcctgtcattgtaactggcaaatagtaggtgcctgataaccatttgttgaaaatataaattaacaaataaagtctatatttaatgacttttcaatcttcttttccttatagccaaataatcctaatttttgtacaactatataatactatatctgcaattcagtaattataaaatctcctataatagcatttttttcataatgtatttggcagcaaaatttaaccttatgtgaattcattgttttggtggcaaactttgatctgaattgacatgaggatgtttatagcttttctttatttacttggtatgcatattcatatatatatttttagaaatattaacagtattctgccttttaccctactgggctgttacataac

SEQ ID NO: 506392 - DNA, 653 bp, Homo sapiens
ctgcaatcactgattatttaagtagtaaaacacatcgtactacagcatccaactgtctcacttgtctttgaaccagtcttctctggctccatgcacagtttagattttggggccataggccaactcatgtgtatatkatcttccttaattttttcctcacagtcaaaggctttttagtttttctttgacaattatctagagtgtgagacttagatagtatcattaacttgacctttccattaaaccagagaaaattcaaagaaatctcatctaaatctcttttagggaaaataagctttagaaacaataacatttgcaagcattgaaattttttattttttattgcctcattttttccttggagttgaccaaaataattgatatctcaaaatctgttggaagcagcagacttttaaaatctcatattagatgagaatgtgaataatcacattgtatgtaggtcctgttttgcaatactttactgaaaaatcactaaaaaggacgtttttgcccgtggatgggatgattccttctagctctttctcacctgttctgctcagatgccaacttgtctttatttccttttgagtgtccaacctgttggctttattcctaaggtttgtaaggaattaattctttacctctccataggg

SEQ ID NO: 506393 - DNA, 653 bp, Homo sapiens
ctgcaatcactgattatttaagtagtaaaacacatcgtactacagcatccaactgtctcacttgtctttgaaccagtcttctctggctccatgcacagtttagattttggggccataggccaactcatgtgtatattatcttccttaattttttcctcacagtcaaaggctttttagtttttctttgacaattatctagagtgtgagacttagatagtatcattaacttgacctttccattaaaccagagaaaattcaaagaaatctcatctaaatctcttttagggaaaataagctttagaaacaataacatttgcaagcattgaaattttttattttttattgcctcattttttccttggagttgaccaaaataattgatatctcaaaatctgttggaagcagcagacttttaaaatctcatattagatgagaatgtgaataatcacattgtatgtaggtcctgttttgcaatactttactgaaaaatcactaaaaaggacgtttttgcccgtggatgggatgattccttctagctctttctcacctgttctgctcagatgccaacttgtctttatttcyttttgagtgtccaacctgttggctttattcctaaggtttgtaaggaattaattctttacctctccataggg

SEQ ID NO: 506394 - DNA, 562 bp, Homo sapiens
acttagaaagcttgtgccactactagatgtattcttcctgaaaaatataaatagtactcatggttagaattttctaattcaaccataaattagtttatttccatgtaagtaacaaagacatcatgatttaaaaaaaaccctaaatattaatcacttaaacccaggaggtggagtctcactgcattcaatcagttgaacccagtgagacaagattgcaccactacactccagcctgggcaatacagtgagaccctgtctcagaaacaacaaacaaacaaatcctaaatattatgagttaatttattttttatacttaacaacaaattgtgggtcacatgggattgtctagttagcagatttttccctcaaagtcagaacactstcattcaactattaaaaaggtaatgtggtgatggtttttataaatggtagcaaaattataacatgaaatgatagtttgagagttgaatagagatatatcagaatgtgaataatttgaggctcagttcatttacatgtgcaaaaattacagcattagtcacgaaacaaagatcactattca

SEQ ID NO: 506395 - DNA, 506 bp, Homo sapiens
gaatggcgtgaacccaggaggcagagcttgcagtgagccgagatcgtgccactgcactccagcctgggtgactgagtaagactctgtctcaaaaaaaaaaaaaaaagaattggttcatttggtcatggaagttggtgagtccaaaacgtgcaggatggtccagcagactgaagacccaaggagtggattttgcaactcaaatccgaaggctatcaactggcagatttccctcttcctttgagaacatcagttgtttttgttattgttgctcttaaggccttcaattctttgagtgaggcccatccacattatggagggtactctattttactcatttactgattaatctcatctaaaaartagtttcacggcaatatagatatgtttgaccaaatatccaagtaccatgggctagccagctgacatataaagttaatcatcatactctctgtgtagtgtctcatcatttagcccaaagaagcttgggcttctttacagcatagcag

SEQ ID NO: 506396 - DNA, 627 bp, Homo sapiens
ctgatcctgtagtttagtcggactgggtagttgtcacctatctcataactcagccctgcccaggtcaggaccagactgctttggcggctcttattctgctcacatcttgggggttgcctagctcccaagctgggggctggagtttatgtcacrcttgcttttcagtcctggttgcagaatcccatttcctacacaggccccagttcagcaaaccacagattgagttactctgatacttaggactggtgctataggttcccaggtcacacaatttgttaaaccctaggattgagaatggcatcttactgtagctgcttaggtctcagggaaggtgtggaacccagggtgtgttatttccctatagcagttcctttatacagtctcctggttgcttcccaagtcaaattcaatggtttgggagggtcaagatacactcccatggcctggattatacaattgattctccagtaggaaagtgaaccacagaaagacactcagttaccttctcccacgttgcagactcccttttggttgccagcctgcccttgtccacattagctgtttgttgtcctctctttttggagtttctgtttgcttttctgttaaatgcctgtgttctgtcttgga

SEQ ID NO: 506397 - DNA, 627 bp, Homo sapiens
ctgatcctgtagtttagtcggactgggtagttgtcacctatctcataactcagccctgcccaggtcaggaccagactgctttggcggctcttattctgctcacatcttgggggttgcctagctcccaagctgggggctggagtttatgtcacgcttgcttttcagtcctggttgcagaatcccatttcctacacaggccccagttcagcaaaccacagattgagttactctgatacttaggactggtgctataggttcccaggtcacasaatttgttaaaccctaggattgagaatggcatcttactgtagctgcttaggtctcagggaaggtgtggaacccagggtgtgttatttccctatagcagttcctttatacagtctcctggttgcttcccaagtcaaattcaatggtttgggagggtcaagatacactcccatggcctggattatacaattgattctccagtaggaaagtgaaccacagaaagacactcagttaccttctcccacgttgcagactcccttttggttgccagcctgcccttgtccacattagctgtttgttgtcctctctttttggagtttctgtttgcttttctgttaaatgcctgtgttctgtcttgga

SEQ ID NO: 506398 - DNA, 627 bp, Homo sapiens
ctgatcctgtagtttagtcggactgggtagttgtcacctatctcataactcagccctgcccaggtcaggaccagactgctttggcggctcttattctgctcacatcttgggggttgcctagctcccaagctgggggctggagtttatgtcacgcttgcttttcagtcctggttgcagaatcccatttcctacacaggccccagttcagcaaaccacagattgagttactctgatacttaggactggtgctataggttcccaggtcacacaatttgttaaaccctaggattgagaatggcatcttactgtagctgcttaggtctcagggaaggtgtggaacccagggtgtgttatttccctatagcagttcctttatacagtctcctggttgcttcccaagtcaaattcaatggtttgggagggtcaagatacactcccatggcctggattatacaattgattctcyagtaggaaagtgaaccacagaaagacactcagttaccttctcccacgttgcagactcccttttggttgccagcctgcccttgtccacattagctgtttgttgtcctctctttttggagtttctgtttgcttttctgttaaatgcctgtgttctgtcttgga

SEQ ID NO: 506399 - DNA, 447 bp, Homo sapiens
ctatttttatggcaagattttatttaatatgtaaggctggagggaggtgtgagaggaaagtaaagaaaagctttggattattaaaggtgtgggaaagctatttacactgcttcagggataaataggagggaaggagtactcagacagagggagcgagtgattatatraagaaaaatactatgatgatactaattgtgttttgtaggaatatggatgctgcctctttgtctctaaatgtgctaccctgaattacaagttacctttggctttttgattctacaaaatcataggagctccctgaaatctggagcatttgctcagactattgctttctgttatctaccctaggtcggaaatatttaagtgttttttcttcagtcctacagagttttagtctgatactttagaaaacagaactgagttcctattcgaaaagatttactcaca

SEQ ID NO: 506400 - DNA, 447 bp, Homo sapiens
ctatttttatggcaagattttatttaatatgtaaggctggagggaggtgtgagaggaaagtaaagaaaagctttggattattaaaggtgtgggaaagctatttacactgcttcagggataaataggagggaaggagtactcagacagagggagcgagtgattatatgaagaaaaatactatgatgatactaattgtgttttgtaggaatatggatgctgcctctttgtctctaaatgtgctaccctgaattacaagttacctttggctttttgattctrcaaaatcataggagctccctgaaatctggagcatttgctcagactattgctttctgttatctaccctaggtcggaaatatttaagtgttttttcttcagtcctacagagttttagtctgatactttagaaaacagaactgagttcctattcgaaaagatttactcaca

SEQ ID NO: 506401 - DNA, 596 bp, Homo sapiens
tttaattattttgattgccatggaaaagaaatagcacgatataaaggcttcctcactttctttgctttctctcacaaacaatgccaagcaatgagatgaggctgtcaccttctctgctctcaggtttctactgaaagtggactattttgatgacgtgatgagtcctagactctcaggattcacagatacacatcagaggattaaaggggctctaagcatggggtttgtgagagttttgggttttctatcctctgtgaaatgatcaccttgtctttgaaaatagttctttagtgttagcatgtcttacttgagatcaacamaggcggttagtcccatcatttcctttgggtagggacaatccttagtgatgccagggctctcagggttcatttaggagattgtcctgagaatgccccgtaacagagaatacctatggtttcttccagaaagtgttcctttgacttgtcaatagtgagcaggaggcctttctgatcacttagcactagagggtggcctcagtatttatgaactcctgtgagagggcggcaggatgaaagtactagtagtagcactagaaatgaagtattatttatttc

SEQ ID NO: 506402 - DNA, 512 bp, Homo sapiens
gccctgtgaggacttactaagaagcaggcagcctgcaagccagaaagagcctgaccaaaagctgactcaattggcamcttgatcttggacatcccagcctctagagatacgagaaataaatgtctgttgtttaagccactcagtctgtgatattttgttatagcagcctgagaagactaatatagtgactttcttcagaatccaatcctgaagtcagatgtggctcatgtgccctaaacgggaggcttttctttcctagtataccctttgagtgttgcgtttctgaagaagagctgaaggaggaaaacttgagattatttaaagtgcatgctttcctattccttccccaggcttctgtgtagagatggtaatcaccaataaaataaatcttggagcagtgttgtatccttaaaaggacatagtactgggggtcacctaaatctgacatccaaacccatgcatcctattagtatctttgtgactcaaatgactctttctgagccttggtttcc

SEQ ID NO: 506403 - DNA, 512 bp, Homo sapiens
gccctgtgaggacttactaagaagcaggcagcctgcaagccagaaagagcctgaccaaaagctgactcaattggcaccttgatcttggacatcccagcctctagagatacgagaaataaatgtctgttgtttaagccactcagtctgtgatattttgttatagcagcctgagaagactaatatagtgactttcttcagaatccaatcctgaagtcagatgtggctcatgtgccctaaacgggaggcttttctttcctagtataccctttgagtgttgcgttwctgaagaagagctgaaggaggaaaacttgagattatttaaagtgcatgctttcctattccttccccaggcttctgtgtagagatggtaatcaccaataaaataaatcttggagcagtgttgtatccttaaaaggacatagtactgggggtcacctaaatctgacatccaaacccatgcatcctattagtatctttgtgactcaaatgactctttctgagccttggtttcc

SEQ ID NO: 506404 - DNA, 512 bp, Homo sapiens
gccctgtgaggacttactaagaagcaggcagcctgcaagccagaaagagcctgaccaaaagctgactcaattggcaccttgatcttggacatcccagcctctagagatacgagaaataaatgtctgttgtttaagccactcagtctgtgatattttgttatagcagcctgagaagactaatatagtgactttcttcagaatccaatcctgaagtcagatgtggctcatgtgccctaaacgggaggcttttctttcctagtataccctttgagtgttgcgtttctgaagaagagctgaaggaggaaaacttgagattatttaaagtgcatsctttcctattccttccccaggcttctgtgtagagatggtaatcaccaataaaataaatcttggagcagtgttgtatccttaaaaggacatagtactgggggtcacctaaatctgacatccaaacccatgcatcctattagtatctttgtgactcaaatgactctttctgagccttggtttcc

SEQ ID NO: 506405 - DNA, 454 bp, Homo sapiens
acggagtaaaacgtattacagactactgagtgctatgtatcatttttataatagaaacaaaaatgtttgccatatagcagtatgtggttaagataaaaatagcttgtcaggtaggccagggaagtttctccatagtaagctatagatgaacagtgagggggaaatcgtttattgattataacatttaaatgttagtttttcttaatcrattcttgtatgaataagggaaggtggaaagctaaagccatttaggatttgagagggtctgggtatgaggggataaaggcatatgcttgtcattgtttggagcatatatcaggcatagaagttttaggttcccaattttattattacgattaggtgggatgtatacaacagaaagcttcaaataatagtggattaaatattttttatttttattttgtgtaaaagaaaaagtacaggattggcatgg

SEQ ID NO: 506406 - DNA, 523 bp, Homo sapiens
ggacaaaataccattagatcagagctggagatttatttgtctgggagcaagtcctgatttctggcaggctggcactaacagctaagcattcaaattttctggctactcataaacactctcatggarcatcagtgtcagaccaggtgattctaataaagtgagaaaaaaacaagtcctctctggcatcatgtttgagtctttccattctttctgtctcctagataattaaggtttattaagagactgaatcacagaattattccacttgctgacaacacccaattcacagcaaactcattcttccttgaatcctaccccaaactgcccaacacaagctccaagcttgtgaaaagccccaaccaacaccctcttactgagccagcccatggtttcacatagtgagcagtctcccttgctaagccagcatcaatgaacataaatttgtttgacttcaggtgaattcccagtggtcttggatttacgggcatcaccactgtagattgccaagagggacttttgtgaa

SEQ ID NO: 506407 - DNA, 639 bp, Homo sapiens
ctgcaattttatagctgtaaatgtaaagactgaagattttaaaactgctttgtgatgccttgtgcagtgtaactttttttttttttttttttttttgaggcagggtctccctctgtggcccaggctagagcacaaatacggttcattgcagcctcaacctccctggatcaagcaatcctccttcctcagcctctggattagctggaactacaggcacatgcccagctaattttaaaatttttctgtagaaatgaggtctccctatgttgcccaggctggtcttgaattcctgagctcaagtgagatcctgcctcggcctcccaaagtgctgggattacaggtgtgagacacagtgaaatattgtcttggaaatgtatgacaagtcctacttttatattgytctttaatagtgtttgagtttgcctactgaggaagataaggtataattttaaattatatgtccactggatttaagtaatacaatcttaatagctagagcaatagtgacaaatatattgttttcaccttttcctttgattatagctggaaaaatatttaaaaccatagagcatccatattcttatgtgatattacgcatatcactcacaggaaaaacacaactaattttgagttgaaccc

SEQ ID NO: 506408 - DNA, 217 bp, Homo sapiens
ttttggaagccccaagtttgagaagcaayggctagggcattacattatacactgaagacaaagaaacccgcacattcaggctaccaaaactagtagttttcttacctggtagttttgtgtagtagctgggggtggtggtggtggtgcttcttgttgcctctgagtataaccatagtcagttgctgtgtgtgcagtggggtagcctccataagcagca

SEQ ID NO: 506409 - DNA, 553 bp, Homo sapiens
tagctgggactacaggcacacaccaccacacctggataatttttgtttttttgtttkctgtttttagagacagggtttcattatgttgccttggctggtcttgaactcttggcctcaagcaatcctcctacctcagcctcccaaatagctaagattacaggcaggagccactgtgcctggcaggaatttgagttttcttagaagcggcttgtgatctgatgaatatatttaaaatctaatctacactgatacaggggatgaaggaggaggcagcaagaccagttagaaggttactgcaatagcttagatgggagataccagtggtttggatgaagtggtggtggtagaggtggtaagacgtagtcagattttgggtatagtttgaaggtagaatcaacaggacttgctgagcaattggaggtgataggtgaagaaaagaatcaagaataacttcctgggatgggcagactaaagtgggagtgactctggcaatcatccccccagcctgtttcacatggtaacacagatcccccactgtcatttatgtaagaat

SEQ ID NO: 506410 - DNA, 553 bp, Homo sapiens
tagctgggactacaggcacacaccaccacacctggataatttttgtttttttgttttctgtttttagagacagggtttcattatgttgccttggctggtcttgaactcttggcctcaagcaatcctcctacctcagcctcccaaatagctaagattacaggcaggagccactgtgcctggcaggaatttgagttttcttagaagcggcttgtgatctgatgaatatatttaaaatctaatctacactgatacaggggatgaaggaggaggcagcaagaccagttagaaggttactgcaatagcttagatgggagataccagtggtttggatgaagtggtggtggtagaggtggtaagacgtagtcagattttgggtatagtttgaaggtagaatcaacaggacttgctgagcaattggaggtgataggtgaagaaaagaatcaagaataacttcctgggatgggcagactaaagtgggagtgrctctggcaatcatccccccagcctgtttcacatggtaacacagatcccccactgtcatttatgtaagaat

SEQ ID NO: 506411 - DNA, 440 bp, Homo sapiens
ccttctcgtggtaatggcagacacaggaaggcaggcccaagcacactagcatgcttcaagcctcaacttgcatcatgtatactaatatcctattggccaaagcaagtcccatggctgagccaagtagcagtgagatcggaaaaacaccyctcttatgagaactggatgggccagggaggatttctgggcaataatctactctaccacatggtatgagatatttagtaatggaaccaagtgatcaaacttaacaccacgaatagtagagtatctagcatgtacctcctgatttattgtgacagttcttaagacagtctataaatattcttgtcaaaaatgtttaacctgaaactaatctagcctctacatttaatttctggttcacaggaaatatggtaaaggagtgagttaaatggacactgtctcagttatctattgct

SEQ ID NO: 506412 - DNA, 403 bp, Homo sapiens
ctggtaccaaaccagcttggttctgttctgcttccactgcctgtcaagactgtgtgctctgggcaaggtacttcaaccactgggtcttggcttcctcatctggaaaatgcaaataaaactgcaactttataaagcttttctgaaatcaaatgcagcaatgtacataaaaggcaaataagctcacyctatgttttacctaattttctttttatcctgctctgtgtatttcttaagccaaaccatcttacttcctttttagaatgcatcgggatagacacaaataaatggaaacaccattacaaagcccctgctcacacttcagaattcagattgcattacctcctccgggaagtcttccttaatcactctctgctcgagtctcatttagatgatctcctgtgtg

SEQ ID NO: 506413 - DNA, 639 bp, Homo sapiens
aaaaatccccacagaatattctgtttcttgctgggatcttgactaacacaggaactttccgtttagttgggataagactataggaaccttataatttatcatccaaaccaagacacttctgagagtgaaagggggcactattaattaaaccatggcaacgggcgcaaatcagaackgttccaggccaccggaatgaatgagcatcctaggtaagtcaggcacataaaaagataattgttataatgaagagataaaaacatttctaaaagagataatattacagcatagattaaggtaagtgccaagggtggaatagactttcagtgctacagccattccaagacaagagagattatttctcctggggaaagacatttgagatcagtgggttgctcagttctcctccaactaaatgaagtcacacaatccatgtgtgcttggctgattttgtagattttctccaagaaatttcagtcccagttgggtcccccgcctccacccctcacacacccagtgtaactgtttctatttctttccattgtttaggctctgggtttttaaggaaagcaaattaatttaaatcttagccaattattccttttaaaaaataccaaatgcattcctgattcaattataaat

SEQ ID NO: 506414 - DNA, 581 bp, Homo sapiens
catccagactacaatgtacttgccaacctttgagacctgtcatagagccccaaagcaccttaagaccagtggcagtcctgctcttccttgcctgtttctgtgctaattttctgccacttggaatgactattgcctctgctgcttctatcagggcagaaaactgaatttggggcttgaattggagctatgctgatgatacttggacttgcctatcttttttctaccccacactttgtcgctcaaatctccactttctcagccctgttctagggttctttattagcacagatttctggcctcaaatttttctgatctggcccatttcattgttcccaagtctcargcttggaaactgcaataattctcttaggccttcttgccaatgtttaagtagcttctttgccactacccaagttactaggagtcatctaatctgaatttaacttgattttcaatctctattcatagatttcaattcagagatctttgtttttttaatcagcttccatctggaaagacattagattttccttgtctttaatggtcatgacatatgtcactcaatcacctcagccatttct

SEQ ID NO: 506415 - DNA, 434 bp, Homo sapiens
taatccaaaaatttccacaacttagattcccagacaaaatgtcaagttcaaaaaataaaacagagatttccctttctccccagccttaagcccacctcccaggtcctcattttctgccatgaaactgattctttgctggatgatgcactctcttcaaggcatcactgctcttacaccgtagcccccaaaagacatcagagccatcgttgtccaccatcagcaygcttcccatgatccacacactccactcttaacatcaccatgtcagtgctacctacactaagctgtgctacaccaaggctcccccagggggactcccccaacaaaaagttaaaatgtcagccctaagtatattttctgcagttttggaggactccattgcaactatcctgaaggaaaattctttgacatgacacacacacatacatacacaa

SEQ ID NO: 506416 - DNA, 566 bp, Homo sapiens
ttgaagcttccatgtaatctgctatatgtcaaatgtcattatgttagaagcccccaagccagcacatcagaaaatatattcacctaaattcaaagaagctgcaatatctcttaatagaactttagtatccacaaggacatgtcaargagaaagaaaagagggtcccacagtttactctgctgtctggtgtctgtggcacttgtctctggcacgagaatatttatgtatactttgtgggagtcttgctaattgtaattatgattgcttactacagtttccaaggtaacagttgtcactgcaatgcttcactgccaactcaatttccattctcctgctgatataacaaatattatgtgacattttaactgaaaatatctgtaaatgggtgtctgagtgtggtgtgtttcttaaaaagggaaggaaaacaattattagcttttcattattcatctcagtggcacgtttgatcagtaattacttcaattttatatttagaaaggaatggaccagggtcccatgaggtcttggatttggaggctctgggttcctatcctgcctgtccctgt

SEQ ID NO: 506417 - DNA, 581 bp, Homo sapiens
acagagatgttttctgaaacccaaaggcagaagagcgggtggggagccagaggatgctctgcccatgtcgtgcctctgcctcactattcacatstacctgattcttagcccaggcaacagggagggtgcaagacataaacctcacatcttcagtaattttatattttgggacatgacatatgcagagactagctaactctctccaggtttccctccaattcccagcagagagaattttctccacccctgttccaataaatgaaccaacaggcaagcaaaaaaacatagctaccaagagcctgtggtagacagactctaagatggctcctgcctcctggttttcacacccttttgtgacaacccccaccatgagtgtgggctggacttactgactcccttgtaattaataaaatagagagaaatgataacatgttacttctaagattagattattaaaagcctatggctttcctctgaggcacatgcactctgttgaatcacttgctctgggggcactccgcaccttatcatgacacagccctgtgcaaaggcccatgtgacaagggatcaagggctgccaa

SEQ ID NO: 506418 - DNA, 415 bp, Homo sapiens
gtgagctgtgatcatgccactgcactccagcgtgggagacaagagtgagaccctgactcaaaacctcaaaagaaagaaggaggaggactcccagaagtcctccaagtgagaaagagaaaaaaggactgtctgtctgaagactgaagagaggagtggaggcatctcaaggcaagttgctccagtaattgaggacaatcatcttccagaattgaaggaggagggcttggacatcacgtgttctaccagtctcaatcacaaaggtgtgattgaaaattagaagggaaaacttgccmcctgaccaggtggcaacagaatagaacagaagcatttgtaaagtctcctctgagccaagtagaggtgtacatgttgcccctcttccagttaagcccaccttagaagaatgcattggagatcc

SEQ ID NO: 506419 - DNA, 587 bp, Homo sapiens
gttcctgccttgttggctgtgacactcactcttggaacctgaagtcaccatgtaagaagtcccaaaggttaccatgctttgaggaagccccagctgtgtgcagaggccatatagaaatgctttggttggcagtcccagttgagcccagtttcaagtcatcctagcccaagcaccagacatgcaaatgaaaaagcctccagttaattccagccattaaagacacccaccctttcagstatgccagctaaagccccagacatcatgaaccaggggcttcaggaattgccattgtaccgcgtccaaattactgacccatagaatctgtgagcacgataaattttttaaatttttttattttttgtagagacagggtctccccatattgcccaggctggtcttgaactcctggcctcaagcaatcctcccgccttggcctcccaaggtgtggagattatgggcgtgagccattgcacccagcccatttttttttttcccctaatgccactaagtttgagattgttgcacaaccataggtaatcatagcagtattattattcccattgtacagatgtggaaactgagacttg

SEQ ID NO: 506420 - DNA, 587 bp, Homo sapiens
gttcctgccttgttggctgtgacactcactcttggaacctgaagtcaccatgtaagaagtcccaaaggttaccatgctttgaggaagccccagctgtgtgcagaggccatatagaaatgctttggttggcagtcccagttgagcccagtttcaagtcatcctagcccaagcaccagacatgcaaatgaaaaagcctccagttaattccagccattaaagacacccaccctttcagctatgccagctaaagccccagacatcatgaaccaggggcttcaggaattgccattgtaccgcgtccaaattactgacccatagaatctgtgagcacgataaattttttaaatttttttattttttgtagagacagggtctccccatattgcccaggctggtcttgaactcctggcctcaagcaatcctcccgccttggcctcccaaggtgtggagattatgggcgtgagccaytgcacccagcccatttttttttttcccctaatgccactaagtttgagattgttgcacaaccataggtaatcatagcagtattattattcccattgtacagatgtggaaactgagacttg

SEQ ID NO: 506421 - DNA, 670 bp, Homo sapiens
ggcaggcctatctacaaacaggacagttttctacagctaagtcttcacatactggttactatgtaaggcttaaatttggtctatttaatgttgaacaaaattctttatcctgttgaacaaaattattcttaacacagccagagtacctgaatcaagactatgggagtagccagtccatctcctgggcacccttactgcacaaagaaaacaagttacatayattttatagctctaaggcaacaactacccatggagtaacttatgtctaacacaggccgggcacagtggctcatgaggtcaagagatcaagaccatcctggccaacatggtgaaacctcgtctgtactaaaaatagaaaacaattaactgggtttgatggcacacacctgtagtcccagctactcgggaggctgaggcaggagaatcgcttgaagctgggaggcggaggctgcagtgagctgagatcacatcactgcactacagcctggtgacagagtgagactccatctcaaaaaacaaacaaacaaacaaaaaacttatgtctgccacaaccagccaataacactgccatttgtttaggcttccatttttacttcaaacacaaagttttagattctctctctatcttaactaaaatcaagaagctggcactaccaaatgttatttaatt

SEQ ID NO: 506422 - DNA, 670 bp, Homo sapiens
ggcaggcctatctacaaacaggacagttttctacagctaagtcttcacatactggttactatgtaaggcttaaatttggtctatttaatgttgaacaaaattctttatcctgttgaacaaaattattcttaacacagccagagtacctgaatcaagactatgggagtagccagtccatctcctgggcacccttactgcacaaagaaaacaagttacatatattttatagctctaaggcaacaactacccatggagtaacttatgtctaacacaggccgggcacagtggctcatgaggtcaagagatcaagaccatcctggccaacatggtgaaaccycgtctgtactaaaaatagaaaacaattaactgggtttgatggcacacacctgtagtcccagctactcgggaggctgaggcaggagaatcgcttgaagctgggaggcggaggctgcagtgagctgagatcacatcactgcactacagcctggtgacagagtgagactccatctcaaaaaacaaacaaacaaacaaaaaacttatgtctgccacaaccagccaataacactgccatttgtttaggcttccatttttacttcaaacacaaagttttagattctctctctatcttaactaaaatcaagaagctggcactaccaaatgttatttaatt

SEQ ID NO: 506423 - DNA, 670 bp, Homo sapiens
ggcaggcctatctacaaacaggacagttttctacagctaagtcttcacatactggttactatgtaaggcttaaatttggtctatttaatgttgaacaaaattctttatcctgttgaacaaaattattcttaacacagccagagtacctgaatcaagactatgggagtagccagtccatctcctgggcacccttactgcacaaagaaaacaagttacatatattttatagctctaaggcaacaactacccatggagtaacttatgtctaacacaggccgggcacagtggctcatgaggtcaagagatcaagaccatcctggccaacatggtgaaacctcgtctgtactaaaaatagaaaacaattaactgggtttgatggcacacacctgtagtcccagctactcgggaggctgaggcaggagaatcgcttgaagctgggaggcggaggctgcagtgagctgagatcacatcactgcactmcagcctggtgacagagtgagactccatctcaaaaaacaaacaaacaaacaaaaaacttatgtctgccacaaccagccaataacactgccatttgtttaggcttccatttttacttcaaacacaaagttttagattctctctctatcttaactaaaatcaagaagctggcactaccaaatgttatttaatt

SEQ ID NO: 506424 - DNA, 596 bp, Homo sapiens
cctgacctatgaaaaaatgacattgtacaagctatgatgaagggatgaacaagctgcagtaggaacatggatgaaggagcaactaagtccgcattttgaagtaaggaatatcttttctcagccctcatctttactgatttctattagaatttcacaatgacaagttaaaatatactttccttttattgattcatrtgacaatgtgcttttctctgtgaaatttaaaatatctgtggtattcttgatatttcaaaaaaatctcactccctgtatgatatgatttggctgtgtctccacccaaatctcaccttgaattgtaacaatccccacctgttgaaggtagggccaggtggaagttattgaatcatgggagggggtggggggcaggcggttcctccatactgttctggtagtgaataagtctcacgagatctgatggttctataaacgggagttcgcctgcaaacgctctcttgcctgctgccgtgtaagatgggtattgcttctccttcatcttccaccatgagtctgaggccttccaagccatctggaactgtgagtcaattaaacctctttcctctttaaataacccagtc

SEQ ID NO: 506425 - DNA, 596 bp, Homo sapiens
cctgacctatgaaaaaatgacattgtacaagctatgatgaagggatgaacaagctgcagtaggaacatggatgaaggagcaactaagtccgcattttgaagtaaggaatatcttttctcagccctcatctttactgatttctattagaatttcacaatgacaagttaaaatatactttccttttattgattcatatgacaatgtgcttttctctgtgaaatttaaaatatctgtggtattcttgatatttcaaaaaaatctcactccctgtatgatatgatttggctgtgtctccacccaaatctcaccttgaattgtaacaatccccacctgttgaaggtagggccaggtggaagttattgaatcatgggagggggtggggggcaggcggttcctccatactgttctggtagtgaataagtctcacgagatctgatggttctataaacgggagttcgcctgcaaacgctctcttgcctgctgccgtgtaagatgggtattgcttctccttcatcttccaccatgagtstgaggccttccaagccatctggaactgtgagtcaattaaacctctttcctctttaaataacccagtc

SEQ ID NO: 506426 - DNA, 531 bp, Homo sapiens
ggtttgtgaaattcacatagtcacagaaaaatgtgatactaaaatgtcctgaggctatatcactaccatatattaaaaatatgctgagatttacccctgargaacaaccttaaattgattcaatcactcacatattactgtttttcatctacacgcgttttaaaattttaagtaaaatatttcatctctgtgctttaagctccattgcttagtttgattctcataaaaatgtcataagtataaatattaataactagcggtaaatcaaataaatgaaactgatgaacagtgtgaaatacccataagccactcataagaaattattagtttgtaacatgaaactgccatctttgtggttcataatagtcaaatattattgatttcttacggttcaatctaacaaatactttgctaatgaagctcttccctcaaaacagttccctgatctggcatcccatcctatatctcgtgcccggtattcaattaaatgcgtagttctaaacacacttactttaaggatcccttatcggt

SEQ ID NO: 506427 - DNA, 581 bp, Homo sapiens
tgcagacgagccctgtcatacggccggaggaggcctcgcctgcccgtgcggcgggctccgggcaccctgataccttgacacaggaggccccgggcggccgggaagggctgtgcgggggagggactgcgtctacacccgcgcccgactcgctcgggtcacggcactgccctgccaccaggcggctggggcgggggtgaggccaggcgtcggccctcgcgattctgttttctacgctgaggctcggagccttcgaagaacgggacagcggggcccacggacggctctgaaggccttcccgcggccgcaagagctctcggcggccggcgtttgaggcgcgcggctccgctgggaagcgagacccgggtggcgggacaagacttgcttcccggccacgcgcgctcggccggccgtggggcggggcataggccgtgacgtgrtgtcgcgtatcgagtctccgcccccttcccgcctccccgtatataagacttcgccgagcgctctcactcgcacaagtggaccggggtgttgggtgctagtcggcaccagaggcaagggtgcgaggaccacggccggctcggacg

SEQ ID NO: 506428 - DNA, 631 bp, Homo sapiens
ctcaggcatgagaatcatttgaacctgggaggtgaaggttccagtgagccgagattgcaatactgcactccaacatgggcgatagagtgagaaactctgtctcaaaaaaattggaatccaggttaaattggtcacaatgttaccaagtcagaaagctcacaatgcagattgcaaaatactaatgaggacatcactgaytttcatctatatcaaggtgtgtttaaattgctaaagcaatactgttttagttttagtttttgtttttgagatggagtctcgctctgttgcccaggctggagtgcaggggtgtgatctcagctcactgcaacctccgcctcctgggttcgagagattctcctgcctcagcccccgaggagctgggattacaggcacctgccatgatgcctgactaattttcgtacttttagtagagtcggagtttcaccaagtgggtcaaggtggtctcgaactcctgacctcaggtgatccacctgcctcagcctcccaaagtgctgaattacaggcgtgaaccactgcacccagccgagcaatactggttttattttccacaaatactggccctctatgacataatatttgtggaataaaagaacaacaaaacattctatta

SEQ ID NO: 506429 - DNA, 631 bp, Homo sapiens
ctcaggcatgagaatcatttgaacctgggaggtgaaggttccagtgagccgagattgcaatactgcactccaacatgggcgatagagtgagaaactctgtctcaaaaaaattggaatccaggttaaattggtcacaatgttaccaagtcagaaagctcacaatgcagattgcaaaatactaatgaggacatcactgattttcatctatatcaaggtgtgtttaaattgctaaagcaatactgttttagttttagtttttgtttttgagatggagtctcgctctgttgcccaggctggagtgcaggggtgtgatctcagctcactgcaacctccgcctcctgggttcgagagattctcctgcctcagcccccgaggagctgggattacaggcrcctgccatgatgcctgactaattttcgtacttttagtagagtcggagtttcaccaagtgggtcaaggtggtctcgaactcctgacctcaggtgatccacctgcctcagcctcccaaagtgctgaattacaggcgtgaaccactgcacccagccgagcaatactggttttattttccacaaatactggccctctatgacataatatttgtggaataaaagaacaacaaaacattctatta

SEQ ID NO: 506430 - DNA, 522 bp, Homo sapiens
tgcctcaagtttgctggcttgagcgcaatgagtcaaacaggtaattaatgtaatactatattctctttggcccgttctttaactttcctaatttgacagcattttatttttaatatactcagtgattttcaatgtgttcttttctctacttcccaaatgcaggtataaattagtaamcagaattaaataacctgttaacacaaattttgcatatatctcctattaccaaacaccacgcgttgtccaccatctagtgaactcttccctcctgagcaccttattagctatatcatgatcatggactgccttctcaaactgtgacagaacagtatttatcttccttcctgtgtcaggaaagaaaacaaatgctcaggggacaactactctagaggtaaagtatgctctagagcacagcctctggggctagaggaggaagaaagaatctgacgatgtacaaaccctggtcctgacaggcacctgcactagccaagtcccaggaggtttctaggtctggacaaaatt

SEQ ID NO: 506431 - DNA, 424 bp, Homo sapiens
ctgggcatggtggctcatgcctgtaatcctgacactttgggaggtggaggcgagaggattgcttgagtacccagaagttcaataccagcttgggcaacatagtgagacctcacttctggaaaaaaaaaaaaaaaaaaaaaaaaaaaaggtgaaatttatttaattatttatttaatttttaaaaacacttgaaaagaatattacttgttataattaaattcttctcactcttttggtaatctggcaggtggtagattttttwaaattttttttgttggagatggcaatcctccgtcaattacccatttgtatttatttattaacattattttggttttggaagcccaaatatctgggattcagtgatgtggagggtagtatagacgcccctgggctatgtatagctggacagtataaaggaagc

SEQ ID NO: 506432 - DNA, 626 bp, Homo sapiens
ccctcatcaagacagccccaatcacagccacacagagcgtaaagaaacccaactctgttcccagggtcatgtcacagagccgcatctccgcgggtgaccgcctagacctttccttacgttgaactgcttgtgcgcggagcaaggggaaaagcatctctttcaattcctcccgaggccactctttctttatggacccacctgcatgggcgcttcgtgtctcattgttggcaaatgtcctttctctctggctaggaccgcactggtctgggcttccggtcaagcgtgcacagtcccggcgctccacgctccacactctgcactcttggggttcgctaaccggctccaacatcagcactggagctgtcctctcctggcgccgcacacgcgtactgcckaggagccccgtgcactcctgggagctgtagtctcgccctccgggtgttcccggcaaacgggcgagcggtgaactacaactcccggcaagcaagcaaaccattaaacaggctcgatccgccagtcgggctcggccgcggagcctccctactcctttccaaacgctcctgggttacctctcccagtctcccctgctcttttcctcgccaggggcaggcgaatgtgaccccagc

SEQ ID NO: 506433 - DNA, 616 bp, Homo sapiens
caagggggatgtggtgggctgaataatagccctttagtgaagtccaaatccaaatcccctgaatctgtgaatgtgttaacttacagggcaagaggtctttagaagatgtgattaagggtcttgagatgaggagagtatcttggattatctgaatgggcccacagtaatcacaaatccttataagaaggataccggaaggtcagaagagaaagagatgtgytgatggaggaaggaagtggccatgagcttaggaatgcagaaaatctctacaagctgggtaaacacaaggaaacctgtccacttctagatcctccagccggaaagaagccctgccaacaccctgactttggtccagtgggactgattttggacttctaacttcagaactataagataatatatttgtgtattttatgccataagtttgtggtgatttgttatactagtagggaatgaatacagaggataactaaatgtttttcctaataagttgctgagcaattttttgtttttgtttcatataacatacaagtgtccaggtcattttattcttacaattcacttcaataatgccacatgcaagaagtgtagctttctgtatcattcttgatctggt

SEQ ID NO: 506434 - DNA, 646 bp, Homo sapiens
ctcaactctttttttgtctgtttgttaaaagaaaggccataagaagcaaagccaaatgcaaacagaacagaggtataaataaacagccgctctggtgagtgccaggaaagagcttagcgtgactaaaggagaaaatgtaacaggtaaacttcctcctagcatttcttatgcagcaggaaccaattcctcsaaatagccatgctcactgtatccttttcccaatactgaggcaagccttggtcacaccatcaccaggcacctggggaaaacaaacacaagggaccctgccttcctgcgagaattgaacattctgtgaaagtgacatttcagggatgcaacaatttctacaccttctatttgcttgagtgtctatttgcttctatcttttctaaataatataaccacaaaaatccatatttgcagaatgcataatcaattattagggctaccaaaatcctttccaaatcaatcttggactagtggcactaacctgccaatatgagggttaagaaaatcatgcagtacaggaaacagaggaggactgggccataggtttgtttcacgattgctggtcttcactttgatctgcatatgctcatttaccaccttccaccatacttccagcttaagtaaaatggggattgct

SEQ ID NO: 506435 - DNA, 563 bp, Homo sapiens
  misc_feature (1)...(563): n = A,T,C or G
ttccctgagggagttccctcagtcactgtgacctcacctatggtccttgaggcctgaggggtcctccccaaggtccctctcctagcccccaaggtgaaaattcccccccagagctaatgccagggggttggagcaggattaaactttgtcacagccctcggcctgctgttgccctgactcaggattctaggaaggacttttgggctaggagccttgtttrgtttgttgggttttaagatggagtttcactcttgttgcccaggctggagtgcaatggcgggatcttggctcactacaacctccactttctgggttcaagagattctcctgcctcagcctcccaagtagcntggataacaggtgcacgccaccacgcccggctttttgtatttttagtagaaatggggtttcaccatgttagccatgctggtctcgaactcctgacctcaggtgacccacccgcctcagcctcccaaagtggcagggatacaggcgtgagccaccgcgccccagccaggactcttgttttacaaagtgggctcaggcccacagcaagcaggatc

SEQ ID NO: 506436 - DNA, 563 bp, Homo sapiens
  misc_feature (1)...(563): n = A,T,C or G
ttccctgagggagttccctcagtcactgtgacctcacctatggtccttgaggcctgaggggtcctccccaaggtccctctcctagcccccaaggtgaaaattcccccccagagctaatgccagggggttggagcaggattaaactttgtcacagccctcggcctgctgttgccctgactcaggattctaggaaggacttttgggctaggagccttgtttagtttgttgggttttaagatggagtttcactcttgttgcccaggcyggagtgcaatggcgggatcttggctcactacaacctccactttctgggttcaagagattctcctgcctcagcctcccaagtagcntggataacaggtgcacgccaccacgcccggctttttgtatttttagtagaaatggggtttcaccatgttagccatgctggtctcgaactcctgacctcaggtgacccacccgcctcagcctcccaaagtggcagggatacaggcgtgagccaccgcgccccagccaggactcttgttttacaaagtgggctcaggcccacagcaagcaggatc

SEQ ID NO: 506437 - DNA, 563 bp, Homo sapiens
  misc_feature (1)...(563): n = A,T,C or G
ttccctgagggagttccctcagtcactgtgacctcacctatggtccttgaggcctgaggggtcctccccaaggtccctctcctagcccccaaggtgaaaattcccccccagagctaatgccagggggttggagcaggattaaactttgtcacagccctcggcctgctgttgccctgactcaggattctaggaaggacttttgggctaggagccttgtttagtttgttgggttttaagatggagtttcactcttgttgcccaggctggagtgcaatggcgggatcttggctcactacaacctccactttctggrttcaagagattctcctgcctcagcctcccaagtagcntggataacaggtgcacgccaccacgcccggctttttgtatttttagtagaaatggggtttcaccatgttagccatgctggtctcgaactcctgacctcaggtgacccacccgcctcagcctcccaaagtggcagggatacaggcgtgagccaccgcgccccagccaggactcttgttttacaaagtgggctcaggcccacagcaagcaggatc

SEQ ID NO: 506438 - DNA, 538 bp, Homo sapiens
tgcctgtctcttaaaaagacccttgtcatttcattggacccacctggataatccagggtaagtttcctgtctcaagactcttcacttgttcacatctacaaagtccccgatgctgtgtaagggaacctatgcacagttctggggatgaggaagtggacattttggggtacatgattgagcctaccataacaggattcctccttggtctctgagccttctcttccccagtcaaggctgttccctgttcctcccaccaaagaattcctttccaggctgggcatagtggctcatacctgtgattccagcactttgggaggttgagggaggaggattgcttgagcccaggagtttgagaccagcccagacaaaaaggcaagaccttgcctatacaaatttttgttttataattagctgggcatggtgatacacacctgtagtcccagctacttgsgaggctaaggcaggaggatcacttgagctcaggagtttgaggctgcagtgagccatgattatgccactgcactctagcctgggtgac

SEQ ID NO: 506439 - DNA, 715 bp, Homo sapiens
tgctacttggagggggggctattgattaaagtgtgtgtaaggcagtacttaaggaggaagcagtgacctctaagcctgagagtcaagggaagggcaaagtttctggaatgctgggaggggaacwgcatagagagaaccccctgacgggggctgaggccttcctcaaagggacacaggggtcaatgtataaacacgcccatctctctttctttccaccctccagtctctggcctgtgcccgcactgaatgaacacaacaggatgctggaggcaagggagccccgtggtgtggcccatgcatgggagcttcccagcccagagcaggtggcgaggggtgcagagtctggagggatgagtggacaagccagatatagaaagacaaagtattgctgggcagcatggggcacagcaataagattaatgggagggaggtcaggaagatctttccaaagagtgacttttttcaggagagaggatgagaaggatgagctgaggaccctggaggcaggcatgtggtgtgtgaggaggctcagggtaggagagggctggaggcagcggcggcagcagctcccagcaggcccagaagaaggtggtaagagtccaggcttcattctgaatgtgattagagcccactggcagattttagaaagagacagtaaaagggtgacgcccacaaagatgtgaatgggataggaggcaaatggcatccaaattta

SEQ ID NO: 506440 - DNA, 521 bp, Homo sapiens
ccatctctctttctttccaccctccagtctctggcctgtgcccgcactgaatgaacacaacaggatgctggaggcaagggagccccgtggtgtggcccatgcatgggagcttcccagcccagagcaggtggcgaggggtgcagagtctggagggatgagtggacaagccagatatagaaagacaaagtattgctgggcagcatggggcacagcaataagattaatgggagggaggtcaggaagatctttccaaagagtgacttttttcaggagagaggatgagaaggatgagctgaggaccctggaggcaggcatgtggtgtgtgaggaggctcagggtaggagagggctggaggcagcggcrgcagcagctcccagcaggcccagaagaaggtggtaagagtccaggcttcattctgaatgtgattagagcccactggcagattttagaaagagacagtaaaagggtgacgcccacaaagatgtgaatgggataggaggcaaatggcatccaaatttagg

SEQ ID NO: 506441 - DNA, 524 bp, Homo sapiens
ttatttactcaacaagaagagactgagctccttctgtgagcttggccatgtgctcagtctggggacaccagggacaattgagcctccccatcaccatcccccatgagttcatgacccagggcagagctggtagaattctccctgccctctggaaggtggaagacctgagtcagggtggycccctgctgagtactcactatgtgccaggccctgggctggacatgctatagacaaacctctcagtctcctgatggggactgagatagaagttcctggctcagttttactactgagaaaattgaggtatagagaggttaagcagtcacatagctaataagtggtagagtggggatctgaacccagtctgcccagttctaaagcctagattcttcccttacctggtttatacaacgaatatcttagatctgatcatcaaacaggctatttccacaaccaaaaaccattctctcatcacaggcagccaagtggcattgaccacatgagaatggggacacctaagagca

SEQ ID NO: 506442 - DNA, 456 bp, Homo sapiens
aagaacttcctgagaactaagatgggggaaatcactggtattagaagagtgaaaaggtcagtaattaaggctacaactgtgctcttagaggcaaaagaagaaaatgagactgccaggcatgaataatgagaaatctttgatggaattagccatgcagaacagatattaaatgcatcctcattcttctcatagtcaaaagtttttgcctaagctggatgggaaaaagagaatcccatttcactaagtataaaagaggggattttagagaaggtctcagaagaaagagatgtggcggtttggtgaaactcaccagaggctgaaccctctccagcataacacacggattgggaggagtggggtggcattaggccaggtgcatagcccagtgctgctctctctggacttgtttgctagctgaactcatccatttrcataattttcagtgccatttctcag

SEQ ID NO: 506443 - DNA, 313 bp, Homo sapiens
ccacaccccgctaatgccctcctgtgagtgaatgtgatgggctacagtacttttgagctaatcaaatgggacgctacctaatggacctgaaccagtcaggcaagtcttttaaaagaaagggacatggcagagaggcgctcttctgcaggcttggagtagggcaagtggccatggtgccacctacaagggggcccctggaagccgagagtggtcccyaatggcagcttacaagaaaacagggacctcagtgccccaacgtagggaacagcccctctccccccctggctcttaggacccccatcacaggggggtg

SEQ ID NO: 506444 - DNA, 313 bp, Homo sapiens
ccacaccccgctaatgccctcctgtgagtgaatgtgatgggctacagtacttttgagctaatcaaatgggacgctacctaatggacctgaaccagtcaggcaagtcttttaaaagaaagggacatggcagagaggcgctcttctgcaggcttggagtagggcaagtggccatggtgccacctacaagggggcccctggaagccgagagtggtccccratggcagcttacaagaaaacagggacctcagtgccccaacgtagggaacagcccctctccccccctggctcttaggacccccatcacaggggggtg

SEQ ID NO: 506445 - DNA, 313 bp, Homo sapiens
ccacaccccgctaatgccctcctgtgagtgaatgtgatgggctacagtacttttgagctaatcaaatgggacgctacctaatggacctgaaccagtcaggcaagtcttttaaaagaaagggacatggcagagaggcgctcttctgcaggcttggagtagggcaagtggccatggtgccacctacaagggggcccctggaagccgagagtggtccccaatggcagcttrcaagaaaacagggacctcagtgccccaacgtagggaacagcccctctccccccctggctcttaggacccccatcacaggggggtg

SEQ ID NO: 506446 - DNA, 246 bp, Homo sapiens
ttccagctgcaggtagccacacaaatgagcccaggttaaaccagccaggaagtccccaygcaactcacagggtcatgagcaataatggcttgtggtggtttaaagtttctaattttaggtgcaataggtaactgaaacagcccacaagggtgtgagcctgtggagggtgcatttcccacctgctgaagcttctcaattcccaggatccaatccagataagactcttgttctcagtgtccttgatgg

SEQ ID NO: 506447 - DNA, 246 bp, Homo sapiens
ttccagctgcaggtagccacacaaatgagcccaggttaaaccagccaggaagtccccacgcaactcacagggtcatgagcaataatggcttstggtggtttaaagtttctaattttaggtgcaataggtaactgaaacagcccacaagggtgtgagcctgtggagggtgcatttcccacctgctgaagcttctcaattcccaggatccaatccagataagactcttgttctcagtgtccttgatgg

SEQ ID NO: 506448 - DNA, 627 bp, Homo sapiens
gatgatttaaataatttaaataaagattttatctacatatctacagatattattggctaaagaattaaattgtgattgctaatttttgtgattttttgcataaatatatatgtttatgttttatagtcattcattacctgtagtcaatragcagtaaaaagtgttgtcctacaaggtcaaacaacattaagaaaattcattttttaaccatataatgtaagttaatttgtaaaaacaagtaatatgttcaaaaaagtatttttaataatggttattaatatagtagctagtaaattaggcacaaatgcaacatgaaatgtataccctccctctactatgtgtaccaaccacatttaacaacaaaaagaagaaagaggtttcttgatatatatatatatatatatatatatatatatatatttttttttttaagaacaaatgtcagaagagagagaatttctctccttttttcaaaaagcaggtaatgtgagtttgactaggcaaggtggagttttccttgatttgaatgatgctacagaattatcgataaatattgaaggcagctccaaatgaaacctaagcccaacttacggaattgcatacatatctagaatgacagtggcaact

SEQ ID NO: 506449 - DNA, 627 bp, Homo sapiens
gatgatttaaataatttaaataaagattttatctacatatctacagatattattggctaaagaattaaattgtgattgctaatttttgtgattttttgcataaatatatatgtttatgttttatagtcattcattacctgtagtcaatgagcagtaaaaagtgttgtcctacaaggtcaaacaacattaagaaaattcattttttaaccatataatgtaagttaatttgtaaaaacaagtaatatgttcaaaaaagtatttttaataatggttattaatatagtagctagtaaattaggcacaaatgcaacatgaaatgtataccctccctctactatgtgtaccaaccacatttaacaacaaaaagaagaaagaggtttcttgatatatatatatatatatatatatatatatatatwtttttttttttaagaacaaatgtcagaagagagagaatttctctccttttttcaaaaagcaggtaatgtgagtttgactaggcaaggtggagttttccttgatttgaatgatgctacagaattatcgataaatattgaaggcagctccaaatgaaacctaagcccaacttacggaattgcatacatatctagaatgacagtggcaact

SEQ ID NO: 506450 - DNA, 627 bp, Homo sapiens
gatgatttaaataatttaaataaagattttatctacatatctacagatattattggctaaagaattaaattgtgattgctaatttttgtgattttttgcataaatatatatgtttatgttttatagtcattcattacctgtagtcaatgagcagtaaaaagtgttgtcctacaaggtcaaacaacattaagaaaattcattttttaaccatataatgtaagttaatttgtaaaaacaagtaatatgttcaaaaaagtatttttaataatggttattaatatagtagctagtaaattaggcacaaatgcaacatgaaatgtataccctccctctactatgtgtaccaaccacatttaacaacaaaaagaagaaagaggtttcttgatatatatatatatatatatatatatatatatatatttttttttttaagaacaaatgtcagaagagagagaatttctctccttttttcaaaaagcaggtaatgtgagtttgactaggcaagrtggagttttccttgatttgaatgatgctacagaattatcgataaatattgaaggcagctccaaatgaaacctaagcccaacttacggaattgcatacatatctagaatgacagtggcaact

SEQ ID NO: 506451 - DNA, 627 bp, Homo sapiens
gatgatttaaataatttaaataaagattttatctacatatctacagatattattggctaaagaattaaattgtgattgctaatttttgtgattttttgcataaatatatatgtttatgttttatagtcattcattacctgtagtcaatgagcagtaaaaagtgttgtcctacaaggtcaaacaacattaagaaaattcattttttaaccatataatgtaagttaatttgtaaaaacaagtaatatgttcaaaaaagtatttttaataatggttattaatatagtagctagtaaattaggcacaaatgcaacatgaaatgtataccctccctctactatgtgtaccaaccacatttaacaacaaaaagaagaaagaggtttcttgatatatatatatatatatatatatatatatatatatttttttttttaagaacaaatgtcagaagagagagaatttctctccttttttcaaaaagcaggtaatgtgagtttgactaggcaaggtggagttttccttgatttgaatgatgctacagaattatcrataaatattgaaggcagctccaaatgaaacctaagcccaacttacggaattgcatacatatctagaatgacagtggcaact

SEQ ID NO: 506452 - DNA, 462 bp, Homo sapiens
atacctgtgtctaagtttctgtctgttagctgggaacagacttcttgcaacaaagactctcacctcattttaaaatcaaataacaaaaaactttctttactgtaatggattctaagaaaaagcatatgagatcttcttgcaagatatgttttttagtataaaaagaaccaatagaattgtgtgcatctatttggtaagatacatgtttttatagtttaactttttacttactagtttataattaaaatatcatatgcagattgttggagacaaactcttctaatatttctttaagtgttcaaggaatcaaataatgctaagataaaatacatagctgaacattttagccagttttgttcatggccaaagactataatggcagaaacatatattatgctaaagtaaatgtgtaagaatattgatgtccaagctgtckgtcttttctatcaggacatccctctt

SEQ ID NO: 506453 - DNA, 639 bp, Homo sapiens
ttgctctggcatgcctggacagaactagacaagccccagcccatagtgcatgccattccttatttggagatgcttccttaactatccttgggcaacttcctttcctttctttgttctattccccttacctaattaagaaagttttaaactaatagccaattgggtaaaatgtgaaatgtgaggtcctattccagccaaccggaaccrgacacagcagtagggtagatgcaaaaatacatatgcgttatataaataactgtcttctttgttcagcgtgctctcgtggctggacagctattgagtagcaccctttctgcagaaagtaaagctcgccttgctgagagatcatttgttccagcgttaattcttttttttgcaacaccaaaaacttcattcccaacacattttataatataatggtcaattttctagaaaaacattagctataaaaattgtctaagggaagatagaaaacacggatacaatcataattgtggaaggaattgaaaagttagtaaattattcatgcccttcaaaagtctccaaataatgctgatttcctctgaaagctctataaagcagatattttccatcactgagattctttcaaattctgaaaaagatgaatctcttaacaaa

SEQ ID NO: 506454 - DNA, 639 bp, Homo sapiens
ttgctctggcatgcctggacagaactagacaagccccagcccatagtgcatgccattccttatttggagatgcttccttaactatccttgggcaacttcctttcctttctttgttctattccccttacctaattaagaaagttttaaactaatagccaattgggtaaaatgtgaaatgtgaggtcctattccagccaaccggaaccggacacagcagtagggtagatgcaaaaatacatatgcgttatataaataactgtcttctttgttcagcgtgctctcgtggctggacagctattgagtagcaccctttctgcagaaagtaaagctcgccttgctgagagatcatttgttccagcgttaattcttttttttgcaacaccaaaaacttcattcccaacacattttataatataatggtcaattttctagaaaaacattagctataaaaattgtctaagggaagatagaaaacacggatacaatcataattgtggaaggaattgaaaagttagtaaattattcatgcccttcaaaagtctccaaataatgctgatttcctctgaaagctctataaagcagatattttccatcaytgagattctttcaaattctgaaaaagatgaatctcttaacaaa

SEQ ID NO: 506455 - DNA, 516 bp, Homo sapiens
tgcctactttcaacagtgcttccacactctggtttgccacagtttctactaattgttattaccccacacactgaagctgagtgtcacatctcagaattgtattaaataatattccagttgagaataagaataaaagtgggggaaaggcatatctttatcttaagattgactttttgtttaagaatagaatagaaatttatggaatcagtggatcttgtgaatccccccatccagatgtttgtcgggccatagggctggcaaatttatttagctttgagaaatgtgaggtgacaggatagctttttaaactctcagaagttctcagatgaagcaaaaggatatgaatctgccatacaaagtggggttgttgtattgattttcttccactsttgtgcaccttatccttctgcaacactttagtgacttaaatttaggatattaaatggcggttactgaataatcccctgacatatcaatccttacttcacttatataaaggcacaggggagctcaaag

SEQ ID NO: 506456 - DNA, 510 bp, Homo sapiens
cccatctgcactggaattcattctcctaagttccctaaaatacttcagaactccaaaaagaactgtaggaattctatccatttgggaatttattttcaggccttgaaatcaacccaagtctgaatggttttcaaagcaattgccaatcagcagattccccagcagcctgaaaggcacctgggaaaatcaggattgtcacaaagccatgtaagtattttggaaatatattttaatgaggtgcttttctttgggaaaaagtttgattctaattaaagaagaagccaagctaattcttgcagtttcttaaatacaattttgggaggttcttttagttatgaaamgtataaaaatttgaccctggacaaagtttaggcagagtttgtattattaatatgtacccaagcaagtattatatagaaaatttatgctttaatttgtaaagagagtgttctcaaatggaaagtttcaattttgatggacacttctggattctaaatttatcagattact

SEQ ID NO: 506457 - DNA, 593 bp, Homo sapiens
ctgctccatgtctgtgggtgtttctgatgcctggatatatgcctaagcatggagctgagatggccccctgaactgagatttctgtacagaaggagtagggtgactcaggctgctggaccaggcaaactggtgctctgaatgcttggagatctgcctgggcatgtagcagaaaagtccccccctgcatcaggatccctgcacaggaagagtggggttactcagactgctgaactagatgagtggacactctaaatgcctggagatctgcttggacatggagtggaaagggtccctctgtaccacaatgtgtatttatgaaggatagggcatcacaggatgctggtccaggcaagagcgtactccaaatgcctggatttcagcctcgggtagagcagagaaagccctgctgcaccataatctcagggatataggctggggcactcagcaatggcacaagcagattagcttcatatcrccaagctggccctggttgcattacttggcctttgttgatgaaggaagtactggtgcatccctgatgatgtgcagggcatggggttctcagggtcctatcctgtgatctcctgccaagc

SEQ ID NO: 506458 - DNA, 622 bp, Homo sapiens
tcacacaagaaacagaatgacctttagacatgagctaaaagtgcatgcaaagcaagtaaaaattgcaagactcaggcagattaaaagattaaggttaaaatctattcttttaagtaatatgtgaagccaaagagggctgtcgagtcagcctttcctgtgaatcctttttggtctgaartcttttcacacatcatatattcatattttctgaccaaggaaatatacaggggctcagaaacgaattgctgttgttttataacagggaaaaatctcaaaatcaatggaattaaaaaactgctatattgaagtataactgatatatgaaaattgcactatttaatgtagacaatttgatgagtctagacatatacccacatctctgaaaccatcaccacaattgaggtagtagacacatacagcaccttcaaaagtttccatatgcctctttggtttcttcttgttgtgagaacacctaacatgagatccaccctcttaactttttaagtgcacagtacagtgttactaactataggcattgtgttgtacagcagatctctagaacttattcacattgcataactgaagttttgtagatattaaacaaaaactccctattttctcc

SEQ ID NO: 506459 - DNA, 534 bp, Homo sapiens
gctggtagaatcacacaagaaacagaatgacctttagacatgagctaaaagtgcatgcaaagcaagtaaaaattgcaagactcaggcagattaaaagattaaggttaaaatctattcttttaagtaatatgtgaagccaaagagggctgtcgagtcagcctttcctgtgaatcctttttggtctgaaatcttttcacacatcatatattcatattttctgaccaaggaaatatacaggggctcagaaacgaattgctgttgttttataacagggaaaaatctcaaaatcaatggaattaaaaaactgctatattgaagtataactgatatatgaaaattgcactatttaatgtagacaatttgatgagtctagacatatacccacatctctgaaaccatcaccacaattgaggtagtagacacatacagcaccttcaaaagtttccatatgcctstttggtttcttcttgttgtgagaacacctaacatgagatccaccctcttaactttttaagtgcacagtacagtgttact

SEQ ID NO: 506460 - DNA, 526 bp, Homo sapiens
ctgggtgtggccatggagttgttagtgaaaatagtgtgtgcatcctttgggaaatgtccccaaagggcggaggcatgtcwtttccctttctttccctctttccttctagtggaatacagacatggtggctggagctggagcagccatctggaaccagtagtttgactttagaaaaggaggccatgatggccgggcgcggtggctcatgcctgtaatcccagcactttgggagaccgaggcagggggatcacatgacgtcaggagttcaagaccagcctggtcaacatggcgaaaccccgtctctactaaaaatacaaaaattagctgggtgtggtggcacgcacctgtaatcccagctactcgagaggctgaggcaggagaatcgtttgaactgggaggtagaggttggagtgagtcaagattgcaccattgcattccagcctgggcaacaagagtgaaactccagctcaaaaaaaaaaaaaaaagaaaaagaggccatgcccagtaatagaagtctaagtccctg

SEQ ID NO: 506461 - DNA, 517 bp, Homo sapiens
cttcagggtttttcagtatagcagctacattcttcaatatatgattcaataccctgaagaatcaaaactgagaagagaataacgtatttattaaggtaagagatgtagggaagacacatttgagtccattttgctttagatgtctttattgatctgagtttttcaagcaaataaaatacttatttaaatgatgagtctctggccataatcytttttttttttttttttttttttttgacatggagtttcactctgttgcccaggctggagtgcagttgcgcaatctcagctcactccaacctccacctcccaggttcaagcgattcttgtgctcagcctcctgagtagctgggattacaggcgcccgccagcacacctggataattttcatatttctagtagaggtggattttcactgggttggccagtctggtcttgaactcctgaccttaagtgatccaccgccttgtcctctcaaaatgctgggattacaggcgtgagctaccacgcccggtct

SEQ ID NO: 506462 - DNA, 431 bp, Homo sapiens
ttcacagcaatatcaaaagcactatattttttctcaagtatgatttgactgaaatgataaaatttcgtcattcagagatctcacatttctctttatgagtttcagaatgtgaagacaaaaaattgytaacctgctatctgttttcaagtcaaaactgattatcccaagtcattgccagtctcaataagaatgcttaacatgttttaaaaattctttttattcttttgaaacgtgcagggtaattttatttttaatccttctgtattcactcttgccaatcattctgaatgtgagtgataagtttgttttgtatacattttatttatagcataaaaagtaaatcaaagacattagtttcataaacctttcctattatctttttttgagacagaatcttgctctgttgcccaggctggagtgcagtggcttga

SEQ ID NO: 506463 - DNA, 233 bp, Homo sapiens
aattcagggtgcacatggctttgacttagwaaacccacttctgggttccatgctagagaaacacccctgacacagaatgtggtcagtaatgttcatttctccactattgcacacatgtaagtctgaaaagtaaatctttgctttaagtagttggtggtagtctatgctgatgggaaaatggaaacacaaagctgttaaatatttgattaaaatcacccaaaaagtcagttctc

SEQ ID NO: 506464 - DNA, 592 bp, Homo sapiens
atcttggaagcagatcttctatccctaatcaacacttcagatgactgcagccctggaggccagattaactgcaacctcaagaaagtccctaagccaggaccagccagccgagctactcctatattcattgaccctcagaaattgtgtgagataataaacactttttattttaagttgctaagagttggagtaatttgttacatagcaatagatacagggattttggccaaaagaaagactaataacacctggttgaagagagagtcattaagagttgacattgtccatggatacttcttgagagcaggagtttcttcttcaccttgacttcttccaacccactcggattgggcctgtgtgtagtgcactcttagtaaatatctattgagttattgagggaagaagaccagccgtaaatacygtgaaagtaaaagaagcctaaccatgggtataagaggagggttgggccaaataggagcttcatgtagagcacatgtccagagagatcaaccatcctggtttgccctgaactgaggggtttccttaaatgtgggttgtttagtgctaaaactgggatagtaagaggacaaaa

SEQ ID NO: 506465 - DNA, 593 bp, Homo sapiens
atttaatcaaatccattctcaataaaaggagaaacatccctacttctctccatcagagaggatggttgggttaagttttctaacaagtaagatatttgttcttctatttgcttagcctagatacctaggattctytccagaatattgtccagcctacggacaaccagggagcctcaaagattttgatgcatttgtctgaaaaagaatgctagctaataaataacccctgtgtcccaagggctttttctctgtctagccatccagttacttctatctaatgaggtcagagaacaaagaacaatgggaaatttcctcttcctcactgcaaacttgcctccctctcccagtccctgtacattaataaaaattaacatttatacagtctactaggtgccagacatggttctgagtgcttcatatatattaattcattcagtcctcataaccagcctgtgaggtagagaactctcggtatctccattttacagataaggaaactgagctacatagaggttaaataaattgcccaaatagtacttacacaaatagtaagtagtagagccagggttctaatctagacagtttaatgttgg

SEQ ID NO: 506466 - DNA, 593 bp, Homo sapiens
atttaatcaaatccattctcaataaaaggagaaacatccctacttctctccatcagagaggatggttgggttaagttttctaacaagtaagatatttgttcttctatttgcttagcctagatacctaggattctctccagaatattgtccagcctacggacaaccagggagcctcaaagattttgatgcatttgtctgaaaaagaatgctagctaataaataacccctgtgtcccaagggctttttctctgtctagccatccagttacttctatctaatgaggtcagagaacaaagaacaatgggaaatttcctcttcctcactgcaaacttgcctccctctyccagtccctgtacattaataaaaattaacatttatacagtctactaggtgccagacatggttctgagtgcttcatatatattaattcattcagtcctcataaccagcctgtgaggtagagaactctcggtatctccattttacagataaggaaactgagctacatagaggttaaataaattgcccaaatagtacttacacaaatagtaagtagtagagccagggttctaatctagacagtttaatgttgg

SEQ ID NO: 506467 - DNA, 642 bp, Homo sapiens
ttttttttgctaaacaatgttaggctgagtaattgttaaacttaattctattttcagtgaccaggcctagaaggaaacacgatggattacagatctctaatttttgaaacaaattcatgtgagcaaacattttactagccctaatcttatgaaaaaatttatacgaacttttatgtcatctgatccttgcttgtcttagtaacttgctcaggatgaaaacgtgatgtcatactagatatcgctctctctatcacatgacaaattaaatcagcaaatcctaggtctactttcaaagyatatctacaatctgactattctaactacttacacacagttaaccccctggtccaagacaccactatgttactggatcatttacataaccttttaaaggggctctctgccctcactcccctgtaatttattttcatcacagctactagagtgatctgactaagcatagaacagatcgtcacattctttttctcacaacccttccatgttgctaggagtgaaggcttataaagccctaaataattaggcttctgcaacttttctttctgtcatcccctgtctatttgatggttctgtttaaatctcactgggttttgcgcagttcctcaaatataccagacattttca

SEQ ID NO: 506468 - DNA, 632 bp, Homo sapiens
aatcttattcaatagctgcaacagataccacaaccttaatgagctgctaccttgttagcattggctcccataacctgcttttccctcttctctaagtagtctggaatctgtcacagtagtatgcattaaaaacctgttcstcaatatcaagactttcaacacatctgcctcagttatttattattaagccagtctaatattattttgcaaatataacatgtgtcacatgttttttattctccatttcctaccttaatttaacactttatttgctttgtggcactattaacatagcttccttaagatcttgttggctctaatttctgttcgacctccatccccatctgccaatgattccccatattaagttgagatggtgcttagtttagcagtaataattacactttgattttagccactgttgttggaaatcttcctcatgtattccttcaatcaaagaaataatgtatttggttcctgctgtgcaccaggctgtgtactagatcgtggggattcaagagtgagccaggcagacactgttcctgcccatctgaaggctgacatcctaggagggaagatgaataatatacaagtgaacaaacagatacaataatcttggatcaggtggtaat

SEQ ID NO: 506469 - DNA, 632 bp, Homo sapiens
aatcttattcaatagctgcaacagataccacaaccttaatgagctgctaccttgttagcattggctcccataacctgcttttccctcttctctaagtagtctggaatctgtcacagtagtatgcattaaaaacctgttcctcaatatcaagactttcaacacatctgcctcagttatttattattaagccagtctaatattattttgcaaatataacatgtgtcacatgttttttattctccatttcctaccttaatttaacactttatttgctttgtggcactattaacatagcttccttaagatcttgttggctctaatttctgttcgacctccatccccatctgccaatgattccccatattaagttgagatggtgcttagtttagcagtaakaattacactttgattttagccactgttgttggaaatcttcctcatgtattccttcaatcaaagaaataatgtatttggttcctgctgtgcaccaggctgtgtactagatcgtggggattcaagagtgagccaggcagacactgttcctgcccatctgaaggctgacatcctaggagggaagatgaataatatacaagtgaacaaacagatacaataatcttggatcaggtggtaat

SEQ ID NO: 506470 - DNA, 601 bp, Homo sapiens
tgtcttcgcctctcattactttgggattaattatgattatttgtcacagaaactcacccagcaaacttgactttggatagaaagatacacggcatttttggtgactctttgctctgtagtttagcctccagggagcaaaggctggtgagtgccttgtctgaggtggctctgcttattccttcagcagaccaaagagtacagggaacacatgcctagaaagtgtaggcagaaattaataagcacttggaatttattttgtttgttctttctcccatcgccccccaccaacccctggttctcttttctgtctccatgtaaaccacagctttcactaaaatcctggttttgtagwttgaagagagagaaagagcatggaaacgtttattgtcacagagatccacaacattgactttttctgattagacagcagtaaaatgtagagatgttgacatgacgaaaagagaatctgataatacctgcaaaccggattaactgttatttagacatttacatggtgcacactattttaacgtcactcacataataaaattattcagacgaaaatgtgaagaattagtgactcaggattttttcacttcct

SEQ ID NO: 506471 - DNA, 601 bp, Homo sapiens
tgtcttcgcctctcattactttgggattaattatgattatttgtcacagaaactcacccagcaaacttgactttggatagaaagatacacggcatttttggtgactctttgctctgtagtttagcctccagggagcaaaggctggtgagtgccttgtctgaggtggctctgcttattccttcagcagaccaaagagtacagggaacacatgcctagaaagtgtaggcagaaattaataagcacttggaatttattttgtttgttctttctcccatcgccccccaccaacccctggttctcttttctgtctccatgtaaaccacagctttcactaaaatcctggttttgtagtttgaagagagagaaagagyatggaaacgtttattgtcacagagatccacaacattgactttttctgattagacagcagtaaaatgtagagatgttgacatgacgaaaagagaatctgataatacctgcaaaccggattaactgttatttagacatttacatggtgcacactattttaacgtcactcacataataaaattattcagacgaaaatgtgaagaattagtgactcaggattttttcacttcct

SEQ ID NO: 506472 - DNA, 601 bp, Homo sapiens
tgtcttcgcctctcattactttgggattaattatgattatttgtcacagaaactcacccagcaaacttgactttggatagaaagatacacggcatttttggtgactctttgctctgtagtttagcctccagggagcaaaggctggtgagtgccttgtctgaggtggctctgcttattccttcagcagaccaaagagtacagggaacacatgcctagaaagtgtaggcagaaattaataagcacttggaatttattttgtttgttctttctcccatcgccccccaccaacccctggttctcttttctgtctccatgtaaaccacagctttcactaaaatcctggttttgtagtttgaagagagagaaagagcatggaaacgtttattgtcacagagatccacaacattgactttttctgattagacagcagtaaaatgtagagatgttgacatgacgaaaagagaatctgataatacctgcraaccggattaactgttatttagacatttacatggtgcacactattttaacgtcactcacataataaaattattcagacgaaaatgtgaagaattagtgactcaggattttttcacttcct

SEQ ID NO: 506473 - DNA, 502 bp, Homo sapiens
gagacggggtttcaccatgttggtcaggctggtctaraactgctgaccttgtgatctgcccacctcgacctcccaaagtgctgggattacaggcgtgagctaccgctcccggcctttggtttgttttttgaagaatatacagtgaccttgagtcatccctaaaagatgacagccttaatcagaagccatcaggaacagcaagagaagagacctgagaaaaatgaaaagaagtcaactctacacattacagtcaaatttactttgtagcaaaggactcaacgaaaagaaatctaagcacgcagacctagataaattgacggctgtattatggacaagatgaaatcactagactcaaaaagcaaagtctttctagtcatcggtggcttttccaattagaacaggcagcaagtggcactccttccatggccccttcatcagaggagctttccttcactttttacctggacatcaaggctctgtttctccacctctaacttcagtt

SEQ ID NO: 506474 - DNA, 502 bp, Homo sapiens
gagacggggtttcaccatgttggtcaggctggtctaaaactgctgaccttgtgatctgcccacctcgacctcccaaagtgctgggattacaggcgtgagctaccgctcccggcctttggtttgttttttgaagaatatacagtgaccttgagtcatccctaaaagatgacagccttaatcagaagccatcaggaacagcaagagaagagacctgagaaaaatgaaaagaagtcaactctacacattacagtcaaatttactttgtagcaaaggactcaacgaaaagaaatctaagcacgcagacctagataaattgacggctgtattatggacaagatgaaatcactagactcaaaaagcaaagtctttctagtcatcggtggcttttccaattagaacaggcagcaagyggcactccttccatggccccttcatcagaggagctttccttcactttttacctggacatcaaggctctgtttctccacctctaacttcagtt

SEQ ID NO: 506475 - DNA, 541 bp, Homo sapiens
gctaacacagtgaagccccgtctctactaaaaatacaaaaaattaaccaggcatggtggcaggcgctggcagacccagctactcrggaggctgaggcaggagaatcgcttgaagccgggaggcagaggttacagtgagccaaggtcgcgccactacactccagcctaggcaaaaaagcgagacttcttctcaaaaaaaaggaaagaaagaacaggagtgtgttttccttaactaaagctggttaatgccctagagatccagacattctcagcctccgaactctgaccgtgagcagtacacaggtgtcatcagtgtcagtcctcctggttcccaagcactcccattttggacccatagagtcttgccatacaattgaacaaggagccacaggcaacagagaactttaagagtatttttaagagccccagtgcacaatcccagaagatctgagacattaccagtagagaggtgaccacagcagtagataaagcagaagaggagacctgaactagggaacacagggcaagacataaaatcaagg

SEQ ID NO: 506476 - DNA, 541 bp, Homo sapiens
gctaacacagtgaagccccgtctctactaaaaatacaaaaaattaaccaggcatggtggcaggcgctggcagacccagctactcgggaggctgaggcaggagaatcgcttgaagccgggaggcagaggttacagtgagccaaggtcgcgccactacactccagcctaggcaaaaaagcgagacttcttctcaaaaaaaaggaaagaaagaacaggagtgtgttttccttaactaaagctggttaatgccctagagatccagacattctcagcctccgaactctgaccgtgagcagtacacaggtgtcatcagtgtcagtcctcctggttcccaagcactcccattttggacccatagagtcttgccatacaattgaacaaggagccacaggcaacagagaactttaagagtatttttaaragccccagtgcacaatcccagaagatctgagacattaccagtagagaggtgaccacagcagtagataaagcagaagaggagacctgaactagggaacacagggcaagacataaaatcaagg

SEQ ID NO: 506477 - DNA, 343 bp, Homo sapiens
ccaacaacgtatttcgaaataccccagaccattgtcggtacgkccatcacatttccagtcaagtgactctcacctgcagcctgtcttgaaaaatgcagtcacctccctccgaccttgaatctacatgaacgctttaaagtgtgttttcacctttcaattctgcaaattgcttactgctacagaatccttttaaagctagtcagggtgatgctgatgatgataagaattatcccagcagggttccgcttccactgccagaattaatgtggtctatttaaagcgcagctcacctgccaattagcgcctgcggtgtccgtaatttaatttagggatatacactgat

SEQ ID NO: 506478 - DNA, 320 bp, Homo sapiens
tatacatggggagaaccagagagtgattaccacccccttttttcatatatatatatgtatgtatagtaattttattatttttttgtagggacagtatcttactatcttgcccaggctggtctcaaattccttgccctaagtgatcctcccaccttggcctcycaaagtgctgggattacaggcctgagccaccgtgcctggcctccttttttctgttttcataattgccatcctaatgggtggaaatggtgtctcatgtggttttgttctcttctcttctgaagtttcagaattgttttcaaaaagccattcatgagctc

SEQ ID NO: 506479 - DNA, 320 bp, Homo sapiens
tatacatggggagaaccagagagtgattaccacccccttttttcatatatatatatgtatgtatagtaattttattatttttttgtagggacagtatcttactatcttgcccaggctggtctcaaattccttgccctaagtgatcctcccaccttggcctcccaaagtgctgggattacaggcctgagycaccgtgcctggcctccttttttctgttttcataattgccatcctaatgggtggaaatggtgtctcatgtggttttgttctcttctcttctgaagtttcagaattgttttcaaaaagccattcatgagctc

SEQ ID NO: 506480 - DNA, 601 bp, Homo sapiens
ctgcttttggtaagggaagccttggaaggatgtctgctaaaggtgcagagaaaatgcagagctccattcaaggtgaaaaaagtggttgacaactggcagaaagaagctggctttagggaggaagtcagaagccagggtgctgtacccgttgggctgtgtgttatcctgggtcactggatcatgggcatgtccacagggtccctcaggggtgggttcttgacacccagggtggcatggacttgggccagtggctatttactarggggtatgaatgtgtctcagcatgttaagatctagtggagctggactgatacctattggccgaatgtgacctctgcctgtttcaaaggtgtttaatcctgatgtctcataaattaagactcaggcttgtaatcccagcactttgggaggccgaggtgggtggatcacttgaggtctggagttcgagaccagcctggccaacatggtgaaaccctgtctccattaaaaatacaaaaattagctgggcatggtggtaggcacctgtaattccagctacttgggaggctgaggcaggagaattccttgaatccaggaggcggaggattcagtgagccgagac

SEQ ID NO: 506481 - DNA, 620 bp, Homo sapiens
ctgtctttccaaatagagcctctgtttatgtctgtctattcagaccctacctattttatttgtatccacccaggaggcagatagagcatattatacaactgctcataccttttttttttttttttttaaacagggtctcactctgtcacccaggctggagtgtggtggcaaaatttcagctcactgcaacctccgtctcccaggttcaagccattctcttgcctcagcctccctagtagctgggattacaggtgcgtgcctccaggcctggctaatttttgtatttttagtagagacggggtttcagtatgttggccaggctggtctcgaactcctgacctcaagtgattcgcccgcctcggcctcccaaagtgctaggattataggcrtgagccactgcgcctggcctctttttgtatttttaaagtagtccataataaatgctaaaatcatgaaaataaaatgcagaaatttaaaaaaatacttttttttttaaatgcaggacttgagcctaggaaagattttgaacttagatattgatcaaaacgtcaaattcctctggggtccaggtggtgaggtaagtgggagaggctgcctaggcaggacagggagaagctgaa

SEQ ID NO: 506482 - DNA, 620 bp, Homo sapiens
ctgtctttccaaatagagcctctgtttatgtctgtctattcagaccctacctattttatttgtatccacccaggaggcagatagagcatattatacaactgctcataccttttttttttttttttttaaacagggtctcactctgtcacccaggctggagtgtggtggcaaaatttcagctcactgcaacctccgtctcccaggttcaagccattctcttgcctcagcctccctagtagctgggattacaggtgcgtgcctccaggcctggctaatttttgtatttttagtagagacggggtttcagtatgttggccaggctggtctcgaactcctgacctcaagtgattcgcccgcctcggcctcccaaagtgctaggattataggcgtgagccactgcgcctggcctctttttgtatttttaaagtagtccataataaatrctaaaatcatgaaaataaaatgcagaaatttaaaaaaatacttttttttttaaatgcaggacttgagcctaggaaagattttgaacttagatattgatcaaaacgtcaaattcctctggggtccaggtggtgaggtaagtgggagaggctgcctaggcaggacagggagaagctgaa

SEQ ID NO: 506483 - DNA, 566 bp, Homo sapiens
ctgagtggccccagccccctcagtaccgtgtccttatcaagatagagtgacaggatcaacacccaaatcatgggcggccatgaagataactgtgatgtgcttagaacagcatcaggatcagagttaagagtcaataaataggccgggtgcagtggcgcacacctgtaatcccagcactttggggaggccaaggtgggcagatcacttgaaggcatgattttgagactagccaggccaacatagtgagactctgtctctataaaaaataaaaaaaattacctggatatggtggtgygtacctgtattcccagctaattgggaggctgaggcaggaggattctttgagcccaggaggtcaaggctgcagtgagttatgattacaccactgcactccagcctgggtgacagggctagacccgtctcaaaaagaaaaagaaaaaaaaaagaaatccccagggcagtgagtgtcttctgtcccctctgggccctttccccttgtctgaagtcacccgcatggccagtggctttgcttttctgcctcctcttctgtcagctcttaccaccag

SEQ ID NO: 506484 - DNA, 627 bp, Homo sapiens
tggacaaggatggaatatgcaaggatcatcgaaatgtaaaagccaggaccggagagggaagccgagtgggtaactgggaagaactggtgatgggaagagcaaagcactgggaacaggggtgggagggatgagagggatggggaaracaaacgggttgcagaattgagctcctctggggaccagaagctcctgggacacgggggtactggggtcagcaaactaactgtccagaaagactatgcctgtgtggaaactgcagggactggagaccaggggcctgggtagcggggatgactggggatgggggacctggaactggagctgggacgcagcgggtctaggagttaggagagactgagacctgggaggtctcagaactgggggtctggacactaggcaaggggatcgcaggactggaacaactggggacaggggtttaggagctggtttttatggatggacaggagtcaggagaccaggagtgccccgccacgggagatcagagacccgcaggtgagcaggggccacgagccgggagtcctgggggccaggggtctggaaaagggagcgactgggagggggtctgcgagggagcggggcgcgaggacgcaggggccggagtgtgca

SEQ ID NO: 506485 - DNA, 627 bp, Homo sapiens
tggacaaggatggaatatgcaaggatcatcgaaatgtaaaagccaggaccggagagggaagccgagtgggtaactgggaagaactggtgatgggaagagcaaagcactgggaacaggggtgggagggatgagagggatggggaagacaaacgggttgcagaattgagctcctctggggaccagaagctcctgggacackggggtactggggtcagcaaactaactgtccagaaagactatgcctgtgtggaaactgcagggactggagaccaggggcctgggtagcggggatgactggggatgggggacctggaactggagctgggacgcagcgggtctaggagttaggagagactgagacctgggaggtctcagaactgggggtctggacactaggcaaggggatcgcaggactggaacaactggggacaggggtttaggagctggtttttatggatggacaggagtcaggagaccaggagtgccccgccacgggagatcagagacccgcaggtgagcaggggccacgagccgggagtcctgggggccaggggtctggaaaagggagcgactgggagggggtctgcgagggagcggggcgcgaggacgcaggggccggagtgtgca

SEQ ID NO: 506486 - DNA, 318 bp, Homo sapiens
ctcccccttacctgtcaaaggacsctggtagaggccatctctctccagttcacgggtatagtccctgtgcctagtgcatagtatgtgctcagtaaacatttactgatgcaactctcatttgttcatgacctatctctttagcttctacttggtaccatgctctgtgctgagccctgagcatactttgttgaacagaaccgacctgtctttgtgcaggttacatgaatgactgacatcgcagatgctttgccattttttcaactggttctgatcacatgtttggtgggggtggggatgagcaatcagagattcacttta

SEQ ID NO: 506487 - DNA, 638 bp, Homo sapiens
gaacaaacttagtttttacacgatttgctatgtttaaccaaaaataccatccatccaaatgactgtgaagtttcaaagagaaaaaggacaagagttgtgttgatacagtatttaattggaggcctgtttggggcttatagtgtttacttcttaatcagcaattggacttgaaattgtggacttgaataagaaatactggaacacagcgaccttagttgaaaccctttattgggttgatggtagaaatgggaataaatcctgtagccatatgaaagacatgtaagccacagaggcaaaatattgccagaaaattctaaaagcaaataaatcagattgtgtgcacgtaagtagaatttcataagagcaaaattcatttctgtggttagcctgattagattgaatggctctaataagtatattccagaattacaactgaaatcaaactttctatacatatatacttttatctgaggggttttatcctcaaatcttgaaaataatacaatattacaaacctaggcataaagctttttctttaaaattataaaaaaygagattatttctttttaaataatctttgcatttccggtaactataatgtttggtactaaaatataattcctccctactagttattg

SEQ ID NO: 506488 - DNA, 525 bp, Homo sapiens
tgcaatggaggtcatggctcactgcaccctcaacctccctggctcaagcaattcttccacttcagcaaccctcacagtcctgcttaaatgtgacatggagtatcasctttgcccaagctggtctcgaactcctgggctgaagtgatcctcttgcctagccccacaaagtgctgagattacaggtggaagccaccacaccctgccaacttttattttcatggaaattttcaggaatctctatggttttaaaagttgtactgaatatgtgaattttattacaatttgcctacaatatttttggaaagtaaaagtaaatattattcacttaaataatcaatgaataataaatttgctgtgggaattgattttagattataattcctcataagcctctttatttgttgttcaaaagatatgaagtgagtacaggtgtgctttatgtgttgcgggacattaactcagaaccaagattagcatattagacaacatattgctagataaaatgttgttttgtgttttgttaga

SEQ ID NO: 506489 - DNA, 653 bp, Homo sapiens
ataattacgaaaaagaagccaaaattatcattagtcacagttgtgaggcaatgacaaccaaaaactattacaactaatgagtacagcaggattgtgtagaataaaaattaaatataagtgtatatgtgtatatatgtacatatttatgtgtgtgtgcatatatacacatacacatatagttttcctatgtgacaaaaattaccacctaaaacataatataaagaggaataaaattgaaactaactaaggcataactaaaacaaaattcttaggccatattagaagaacataaaactttgccaagggatataagaaggagacttagmtattgctataatgaatgtttctttattatttttttagagacagggtctcactctgtcgcccaggttgaaatgcactggtgcgataatagctcactacagccttgaactcctgaactcccaggttcaagcaatccttctgtctcagccttttgagtagctgggactacatgcatgcaccaccacacctggctaatttttaaaacttttttttatagatatgggggtttcactatattgcccaggctggttacaaactcctaggctcaagtgatcctcccattttggcctctgaaagtggttggattacaagcatgagccactgagctt

SEQ ID NO: 506490 - DNA, 542 bp, Homo sapiens
agctgtcacccacgcaagcctctctaagccttactgaaggggatactggtgtgtcctcctggaggaactcattccctgatgtctgtgctcccacagtttaggggaccctgactctgcccgtggcccctcaggtccccatcctgccctatgatagagggttctgcttcttctcaccaccgcccttccccactcccctgcaccccatccaccactcactttctccctgtagctttgctccaccactgactcagctattaagtggcctacactgaaaataagtgcatgttctgggcacagggcgtaccaggaggatgcatgccaaccgcagagctcctgctgctccagggaaaacaggcacatagcaacaggccgggactctgcaggacagaccaggcaggcccaggggcacgtggcaactactcatcctatttgggaaggaaagggatggggaagatccagaggcctgacattgaatttgtttgggggacatagytactagtaatgttcaatgattctaaactttacttgattgcaaccatatg

SEQ ID NO: 506491 - DNA, 638 bp, Homo sapiens
accacaaggagagatccctctattcttaatttataatgacatcctcctttggttttttggttccataaaagctcttattaaaaaaaaacaaaacaaaaagaaaaaaacagtgaaatgttgaacttttttttaaaaaaattttactttaggttctaggatacctgtgcagaatgtgcaggtttgttacataggtatacatgtgccattgtggtttgctgtgcctatcaacctgtcatctaggttttaagccccacatgcattaggtatttgtcctaatgctctcccaccctttgccccccaccccccgacaggccccggggtgtgatgttcccctctctgtgttcatgtgttctcattgttcaactcccacttatgagagtgtygaacattttacgaggttgaataatgttccttcaaaatttatgtccacctgggacctcgaaattggcctttgcacacagggtctttgcagatgtaatcaagcaaagatgaggtcatactggattggggtggatccccatctaaatgactggtgtccttctaaggaggccatgtgaagacacacatagaaacgcagaaacacagaaatatggaacagaaagccatgtgatgacagaggcagagaggggagcaataca

SEQ ID NO: 506492 - DNA, 550 bp, Homo sapiens
tgggggaacgtggcccactacctgctgatatattgagacctgagtcccatcccactcctctcctcagttccagtgcatgtgccggggtgggtcttgggatatctcacccattgccattgtctgtcaagccctggtgacygcttgggctccaagacaactgagatgcagagtccagcaattctgcaggaatctcagggcctgccccacctccactgccctttcctctggactgctgctctctgggggccctgcagagcactttctccatgtcccttatctgacagctttcacagcaggtcttgtggtgtcaggacagggagagctttcatttcctgaatgttttccatccagagagtgagtttaacccttcctttctacccccattcaccctggccagggcctccccacctcctcactttctttcctcttcccaagcatactgtattaattcccaagggctgccatggcaaagtaccccaaacagggtggcttaaggtaacacattgatagtctcacagttatggagttcacaagtccaaaacagaggtgt

SEQ ID NO: 506493 - DNA, 614 bp, Homo sapiens
tgtttaaaagaggataacaaataatacctataactgaaagatataataatttacatttaaaactcatttgatgggttagcgaacacacagagcttaagaaataactagagatttggaaggtaaggacaaaaagtacctaaaatgcaggaaaaaattgtgagatatggataatggggtaaacgtatcccaaaagttggttattgtataaaaggtgtaaatttgatttttcaaaaaggtaggcaaactaataaataaaaaagaaatctcaaataataatatctatgtctacatctacaacaattgatttataggtttaatgaaatttctagaaaaaaatcccagaaagtatttttgcatacttaaagaagcttcctctaaaagatatatggaaagccacaatcctrctagtagctaaaacaatcttaaaagaatgaggtggaaggaattagtacaaccattattataattaagacggtatggcattggtggagggataaatgcataagtcaatcgaacagaatatagaacccagaagtagaagtagacccacacaatactttcaactattttgttttgttttgttttgttttgtttcgttttttgagatggagtct

SEQ ID NO: 506494 - DNA, 614 bp, Homo sapiens
tgtttaaaagaggataacaaataatacctataactgaaagatataataatttacatttaaaactcatttgatgggttagcgaacacacagagcttaagaaataactagagatttggaaggtaaggacaaaaagtacctaaaatgcaggaaaaaattgtgagatatggataatggggtaaacgtatcccaaaagttggttattgtataaaaggtgtaaatttgatttttcaaaaaggtaggcaaactaataaataaaaaagaaatctcaaataataatatctatgtctacatctacaacaattgatttataggtttaatgaaatttctagaaaaaaatcccagaaagtatttttgcatacttaaagaagcttcctctaaaagatatatggaaagccacaatcctactagtagctaaaacaatcttaaragaatgaggtggaaggaattagtacaaccattattataattaagacggtatggcattggtggagggataaatgcataagtcaatcgaacagaatatagaacccagaagtagaagtagacccacacaatactttcaactattttgttttgttttgttttgttttgtttcgttttttgagatggagtct

SEQ ID NO: 506495 - DNA, 649 bp, Homo sapiens
ctggattccagtctcatcatactctcatttcacaggagtgtcaggacagagaacattccacctgggactccagggaaggcaggtaatctcacttgctctcctgtaaagaaagagccagcagaggaggcggggtgtacgggggcagggggktggtggtgaaagtctactaaatgcctgctaaagaagtttgcgtgttatagaaaggtagaagggaagaacaactagtatgctgacgttaacaattgctgctgtggctttaaactttaagaaaattcaacagcagaaatatttaaagcagccttaaagaatgaataaggaaaagcttatatatttgtgatctttattactgcacatatcgtcctaatatattttatattttaagaacaaacaatcttttttataaagaatttggattgttttgcattcctccagatggtaaaatgtctaagtcacacacaccacgctcatctaagggcttccaaaaatggaatcagctttagcaacagttttgagaagtgatctgtaaagcatttgctttttattttggaaagtgttcacacaaagctttcaaattaataacaatcaccattatttactttgttacttcaatgagtaattgttgcagtgtactctagtccacactatatta

SEQ ID NO: 506496 - DNA, 649 bp, Homo sapiens
ctggattccagtctcatcatactctcatttcacaggagtgtcaggacagagaacattccacctgggactccagggaaggcaggtaatctcacttgctctcctgtaaagaaagagccagcagaggaggcggggtgtacgggggcagggggttggtggtgaaagtctactaaatgcctgctaaagaagtttgcgtgttatagaaaggtagaagggaagaacaactagtatgctgacgttaacaattgctgctgtggctttaaactttaagaaaattcaacagcagaaatatttaaagcagccttaaagaatgaataaggaaaagcttatatatttgtgatctttattactgcacatatcgtcctaatatattttatattttaagaacaaacaatcttttttataaagaatttggattgttttgcattcctccagatggtaaaatgtctaagtcacacacaccacgctyatctaagggcttccaaaaatggaatcagctttagcaacagttttgagaagtgatctgtaaagcatttgctttttattttggaaagtgttcacacaaagctttcaaattaataacaatcaccattatttactttgttacttcaatgagtaattgttgcagtgtactctagtccacactatatta

SEQ ID NO: 506497 - DNA, 369 bp, Homo sapiens
ttttctaataacatttccctgcttgggccattgtttttttccattctgcctccctcagttcagccaagtccctccagtggatactgcttttagagaatgtgccttggaaattggcttttaaggaaattgagtttgattctttttacttccattagagtatcccaccaattatatttatatttcacagataatgttttcaggagcatggaactagtttggaagggagggggaagagtatacatccactttaagcagaatctgtggttactataaaagtattccatgtgaactggataatgtgaggcatttcaytatggagattaattgctgataactatttggtctttaaagttgattttcatagagatg

SEQ ID NO: 506498 - DNA, 591 bp, Homo sapiens
atggaggaggatatggggcaactgcgagacaaagaagaccattaggaaaagacaaagaatgaaggtaacagtttgacatgcagaagatacttggagacagaagatacttagttggtggatttttatccattctgccattctatatcttttaagtggagcatttaggtcatttacattcaatgttagtattgatatgtgaggtactattctatgcatcctgctagttcttgcttaaataacttttttttcattgtggtattgttttataggccctctgagatttatgctttaaggaggttctgttttggtgtattttgaggttttgtttcaagatttcaaactcattttagcatttcctgtagtgctagcttggtagtggcaaattcggcatttgttyttctgaaaaagactaactctccttcatttctgaagcttagtttcgctggatactgatttcttaactatcaataattttgtttggggaagctaaagatagaaccccaatcccttctggcttgtaaaggtttctgccaagaaatcaactaatctgattgcttttccattataggttacctaatgcttttgcctcac

SEQ ID NO: 506499 - DNA, 567 bp, Homo sapiens
tggaaaaggggctgcgaggcgacgccctggagctccccgaggacgcagccccttcccggtccccgccgccccgctcacctctcgccctcgcttggcgctccccgggccgggctctggggcgtgcggctccggctgcggggaccccttggcggctggtgcagggggcgccgccattgccaccgcagcgccgcccgcggccgttgccctcggggttatcgcccttgggaggggcggttctgggctaggggcgcggcgcgagtggctgctggcaacgcgggggaaacgcagaaaccgcgaagggcaccccaaagggaaacagcgaagaaccaaaatccgcggggggaaaggcccggcaggccctcaggaccgttctccttggggtggatccccgggggcgtgagcgcccgcagacggcgrccctgcgcgctaagggctccgccagaccgctggggtgaccgcgggcaagcagcagctcccctgcaaaatgaagcaagaggcccgctcgttcaggctggaccatggctgaacaggcattccgccggctacacatgatgcccaacgcctgaa

SEQ ID NO: 506500 - DNA, 581 bp, Homo sapiens
aactattatgaaaacctgccaatgatattgcaaataaaaataaaagaaagctgcagatcaagagctctcgtgaatgtaacaaaacactgaagaaatcaaatcaaacaatttaactgtacaatccatgatgaccaaatagatttatccttgaaatacaaagttcatttaacaattgaaaattaataaatgaagttcagtataggaaaaaaataaaaaaatcacagatatctatcaatacattcagaaaaaaagtatttgacaaaattcaatactcattcgtaataaagactctcagcaaattaggacatatggaaacttcatcaacctgactaagggtatgtggcasattgaatggcggatccataaaagatatttccaattgttaatcctgaaaacctgtgattatcatcttatttggaaaattggtttttgcagatataattcaattaatatgagatcattctagaatatctggttgggcccaaaaatctaatgagaagtatcatcttaagatacacacaaaagaaacacgacacacagaagaggaggaggcattgtcatcatggagacaggaattggaa

SEQ ID NO: 506501 - DNA, 631 bp, Homo sapiens
aacatcagggattgctggcaaagtaccagaggctgggaagaggcaacaaatgattcccttctatgggcttcagaggaaagagctctgctgacactttatttccgactttaagcctccagaactgtgaggcaataaatttatttattcagtttatatatgtatctttacaggcattgtaaagatttgcatgacatttcacagttcctgctctcaacctatgtagcaattgctatagcaaaaggacattttttcctggacccagattatgccttgtgtgtaggaggagattagtagaagggtaaactaagtttctaatggagtcagggaaattttgtctgtggataaaccattttagttgtgagtaaaatgttgaaaagtggtgaattagacagagaaacaatggaaaagagttgtagatggggrttcttgtgccaagtcatgaaagtccaaagcaacataagttgttttggaaaatataagaatttgcatattacaggatattattatttgagatgagaatgaaaggatgtactaataatgactctatcagttacaattgtgaaaacttgcttcaactagatttaagaagaaacagaggaagacttgtactcatataacttaaaatattatg

SEQ ID NO: 506502 - DNA, 631 bp, Homo sapiens
aacatcagggattgctggcaaagtaccagaggctgggaagaggcaacaaatgattcccttctatgggcttcagaggaaagagctctgctgacactttatttccgactttaagcctccagaactgtgaggcaataaatttatttattcagtttatatatgtatctttacaggcattgtaaagatttgcatgacatttcacagttcctgctctcaacctatgtagcaattgctatagcaaaaggacattttttcctggacccagattatgccttgtgtgtaggaggagattagtagaagggtaaactaagtttctaatggagtcagggaaattttgtctgtggataaaccattttagttgtgagtaaaatgttgaaaagtggtgaattagacagagaaacaatggaaaagagttgtagatgggggttcttgtgccaagtcatgaaagtccaaagcaacataagttgttttggaaaatataagaatttkcatattacaggatattattatttgagatgagaatgaaaggatgtactaataatgactctatcagttacaattgtgaaaacttgcttcaactagatttaagaagaaacagaggaagacttgtactcatataacttaaaatattatg

SEQ ID NO: 506503 - DNA, 530 bp, Homo sapiens
gagttcaaaagaagagtcagatctgaatctgaacaagtttaagacacaccttaaaactattttgtttacatgtttcttctcatgattttacaggatatgatgaaaataggaaaaattaatttaaaatctttcagtatcattaaatagagaactaagcaataatgcatggtgtttggaattgttctagatttcaattgtgatagtgccattataactgcatgtgtttatcaaaactggcagaactataggtaattttaccatacgcaaattgtgcattaattaaaaattgtaaagcactgtatcagtttaactggccgtgattgtctttcagtgaaatgtacataacagtgaatctaagatttgatgtcatcctaaatttaatggaataccatgtawctaaagattgactctagttaaagagctagaattccattatctgtgactagcattctatattggattccagtatctctctcaatttctgggctctaagattacttattttaaaatggtattctgacttccagaaa

SEQ ID NO: 506504 - DNA, 564 bp, Homo sapiens
gatggcctaggagataggagaagayattcagcatgctgctcacacaataatatttatttgctctgggataacttttttaatctgctatgattgcaacgaggtaactgtaatgctactgcaaaataaagtaaaaatcagaataaataacttttgattctagttttgctactttactagtatcaaggctttgggcaagtctttgcttcagtttccagaacagtgaaataaggatatgaatgtcaatctctgcaagcctttaagtggctcaaactagattcaataagtgagagtgctttgcaaggggctgtatgtgacatcttgttattaatagtccatatatatgaattcaatcgtttttaacacaatgagcttgattactcaacatagatagtgagaaaactcagagatcacagaatatttatagattcattacagagataaggaaattgaagatcccacagttaagtgatttacccaaggtcactatagagcaagaagccagagctctcagcttggaggaggaaattttctgctttacagatggcagcttgcagagacacagct

SEQ ID NO: 506505 - DNA, 595 bp, Homo sapiens
tagcagcctcaaccttaagtgaatctcctgtcttatcctcccaagtagctggcactataggcacaccccaccatgtctggctaattattttattttattttattttgtagagacaggggtcttgctatgttgcccaggctggtcttgaactcctggacacaaacaatccttctgcctcaacctctcaaacactgggattatagacatgagcctctgtgctaagatgaaggcttttcatcagccgtaaaaacactagttggctgggcaccgtggctcatgcctgtaatcccagcactttgggaggcagaggtgggtggaccacttgaggtcagcagttcgaaactagcccgaccaatatggtgaaaccccgtctctactaaaaatacaaaaattatctgggcatggtggcaggcgtctgtagtcccagctactcgggaggctgaggcaggaaaatcgcttgaatctgggaggcagaggttgcagtgagccgagattgtgccactgcactccagcctgggcgacagagggagactctgtcacaaaaaaaaaaaaaaagaaagaaagaaaaagmaaaagaaaaccctagttacagagt

SEQ ID NO: 506506 - DNA, 568 bp, Homo sapiens
ctggaaaagccagagctgcaagcatagatatgcaagccaaatgcaggtggctaagagccaggtgtacccaatatgacaattccggctcccttttctgtgtcaccatgtgtgcgggtgtcatggcactggccaggtagaggccacatgtgaaggtgtcatggagacagccaggtagaagccgcatttgcataataaagggttagcttgggagactcagtcttttcatgggctatgtgaatgacacacctggtcaaaccagtcccctgggccctatgtaaatcagacaccacctccttaagactctcaatataacctactgctttctgytacaagtggggttattctgtttggagccctcctcccccagtatgggggagctgttctcttctttcttgccagttaaactttctgctccttgatccattctacatgtgcgtccgtgtcactaattttcttggcacgagacaaagaaccttgggtggttccccagacaacagagccatttcaccatttcctcttcaaaatgtacccttaactaaaatccacaagtagattgtctttatttcct

SEQ ID NO: 506507 - DNA, 568 bp, Homo sapiens
ctggaaaagccagagctgcaagcatagatatgcaagccaaatgcaggtggctaagagccaggtgtacccaatatgacaattccggctcccttttctgtgtcaccatgtgtgcgggtgtcatggcactggccaggtagaggccacatgtgaaggtgtcatggagacagccaggtagaagccgcatttgcataataaagggttagcttgggagactcagtcttttcatgggctatgtgaatgacacacctggtcaaaccagtcccctgggccctatgtaaatcagacaccacctccttaagactctcaatataacctactgctttctgctacaagtggggttattctgtttggagccctcctcccccagtatgggggagctgttctcttctttcttgccagttaaactttctgctccttgatccattctacatgtgcgtccgtgtcactaattttcttggcasgagacaaagaaccttgggtggttccccagacaacagagccatttcaccatttcctcttcaaaatgtacccttaactaaaatccacaagtagattgtctttatttcct

SEQ ID NO: 506508 - DNA, 490 bp, Homo sapiens
gctgcttctaccactaataatgtgctttccctcaagaactggtattttgaaaatccatattaatcatcgagaccagtgcttgcgcttatcccgtgggcggccgattgtggaagtcactttcattctcgcccggctgctgctttccaggaggtggtggaggctgcggcagccgcgcagggctggccccggctgcagggggccgtggccggtggctggaccctgactgctccgggtcatcccgggcgagtccgctctcgtgtagactgctcacttacctgccctcggcttttttaggacccacatttcaatyacaggaaagggggagcctaaaaggtataaatagaaacagagaatgctctgtcttcaatggtctgtgctcgccatcctaactttgtgttttttcccgctcccatagctcttcagtgtctgaaaggatggagaagatagggatccgtggccaaggtgtggtcccaaggcccccgtggcctca

SEQ ID NO: 506509 - DNA, 634 bp, Homo sapiens
ttggcagtttcttttagtctggatcattcctcctatcttacgtatttatttttcagtaatatagacatcactggacactttttatgtgtcaggcacagaacccagaacttccagagtgctccacatggagatggcctggtccctgccttcaaagaggcattcgtctgtagggctgagaagaggaagacacgttccccsagatgaactgtgtggtacaagatcaaaggtgttgagtggaccagaaaggcacccatgctgatcgcgttcaaatgagggagaaagaacatcctgctgaaccatctctttggctgaactgtctccttttcagatgaggaaaccgaaggcaggagccacaggaagcttgctggaagcggtgagaagagggccagcgtcagggatagaggtcagctctccaggagaaatcccgcagtggctggaagggacagcacccacggcagtctggagagcagttgaaaagctggatatcaggaatcacaaagtctggtcatttggaaacgtatctttaggagaggtgagaactgcatgtacttccacagcagcaggtcggagcaggaggagcatggagctgagagtcctacaggcctggatgtggatcccggcttgcccgcttgca

SEQ ID NO: 506510 - DNA, 634 bp, Homo sapiens
ttggcagtttcttttagtctggatcattcctcctatcttacgtatttatttttcagtaatatagacatcactggacactttttatgtgtcaggcacagaacccagaacttccagagtgctccacatggagatggcctggtccctgccttcaaagaggcattcgtctgtagggctgagaagaggaagacacgttcccccagatgaactgtgtggtacaagatcaaaggtgttgagtggaccagaaaggcacccatgctgatcgcgttcaaatgagggagaaagaacaycctgctgaaccatctctttggctgaactgtctccttttcagatgaggaaaccgaaggcaggagccacaggaagcttgctggaagcggtgagaagagggccagcgtcagggatagaggtcagctctccaggagaaatcccgcagtggctggaagggacagcacccacggcagtctggagagcagttgaaaagctggatatcaggaatcacaaagtctggtcatttggaaacgtatctttaggagaggtgagaactgcatgtacttccacagcagcaggtcggagcaggaggagcatggagctgagagtcctacaggcctggatgtggatcccggcttgcccgcttgca

SEQ ID NO: 506511 - DNA, 571 bp, Homo sapiens
aaaaatgcttcccaccttgcaaatacaataaaaatgaatattatgccctgctttcaagaaggttatgtagmgtcttataaaaactcactgttaatgcaggagtaaaaattgctagcacattttcgtctctgctctgctaaagatattgtgagcattggttcatctaatgctcatgtaaactctgcgagggaggcactatgattagctacgaatcccagaagaggaaaccaaggcacgagacaggtagagaaacttgcttggggtaggtagctagtgagtgaccggccaggattataatggagtccggtttgatgtcagagccttgcagagaaccacctccctaactattaatacatgagaaaagattaggggatggacggttcaggagttatgacataagctggaaagtttgcaaagttaatcagagtaaatttcctgaaaatgtcaaacttcgatctgtgagtgaaagggagagctggtgctgaaagatgaacaagtaatgagttgacggggaaacctaagccacggggaaacctaaggagaggactcaagatgagagtcaggtccaaga

SEQ ID NO: 506512 - DNA, 579 bp, Homo sapiens
tctgtatttttaactcactgaagtccacttgtaattagagaatcagaattcaaggtttgaatctccaaacccttagaagccaggtttccttttagattttctgcttgggagagcaaacaggactgtccatcagtctatgctacaaatctgagtatgtccagatttctattcttcattattataaaaccatcttgatataataatctttttctggctgggcacagtggctcatgcgtgtaatctcagcactttgggaggctgagacgggcagatcacctgaggtcagcagttcgagaccagcccgtccaacatggtgaaaccccatctctaccaaaaatacaagattacccagatgtggtagcaggtgyctgtaatcccagttacttgagaggctgaggtcagagaatcccttgagctcaggaggctgcagtgagctgagatcacgacactgcactccagcctgggtgacacaacgagactctgtctcaaagtaataataataatggtaatcttcttccattttatgtgagtttctcattctcatccagttcatatttcttttctatgtcctgaaaaact

SEQ ID NO: 506513 - DNA, 606 bp, Homo sapiens
tgtgtgtgtcaggtttttgagaataacctgtaggcctaccaaggccaataaggaattgtaaaatggaaggagtgagcctaatttccagattgtgtgggtgacccctctgttcttccagagggcagtcttggtaaaacacaaagccttactttaaatccttggtctcaagctcttgtgcatgtatttacactttcaaattcaattcatttagcttgctcatctatttattgtgtgtattaaatacaagacactctaggaagctctgagcgatgcatagatgagtgtgattaggaccctgcctcatgaaatttgaagccaggtgcagagattaatggaaatagagcatctgccaaatttaaggggcagaactagtctgttgttaatttgagtttcctcccagtcatagtataaattgcttaatcttacttgatttattatcctgaaggaaaaaatgtcaatctagcacaattagatggtataatgaatgtcttagtttagcttctgagtattcttaaaagcagaagtttttgtctctctgaggacaaatacgaattttattcaaamtattgatatataaaaaattcttcagatcctgggacatgctac

SEQ ID NO: 506514 - DNA, 581 bp, Homo sapiens
gtgttatgatctattgtgtgtcaggcactgttctaggagtacagggaagaacaaaacagatcagtcccttatgtcttggggcttatgaagtaggtgggtgggcaactgacaatgacatgcaaataaattattcaaaataagatcatcttaaagarggataagtgctgtaaaaaaataaaactggttaagttgtagatgacagttgcggtggttgcagctagcttattggagtcactttgtttatctgataaatatgtatatagtgtttgctgtgtgccagaactatactaagttcttcacaaatattaaatcatttggtcttccaaacgttcctgtgaaggaaatatttttatcattgccatttataaatagggaaactaaggcacagaaaggtcaaatcacatgtgctgggtcactgggaactaggctcagatttgaacccagaatcaataattcagagtctatgctacagccccctctgccatctggattgctggtaacgctgactggcatgaccatgaagtcactggaacccagcctactcaatggctattccctcccataaaaatatctccatatac

SEQ ID NO: 506515 - DNA, 581 bp, Homo sapiens
gtgttatgatctattgtgtgtcaggcactgttctaggagtacagggaagaacaaaacagatcagtcccttatgtcttggggcttatgaagtaggtgggtgggcaactgacaatgacatgcaaataaattattcaaaataagatcatcttaaagaaggataagtgctgtaaaaaaataaaactggttaagttgtagatgacagttgcggtggttgcagctagcttattggagtcactttgtttatctgataaatatgtatatagtgtttgctstgtgccagaactatactaagttcttcacaaatattaaatcatttggtcttccaaacgttcctgtgaaggaaatatttttatcattgccatttataaatagggaaactaaggcacagaaaggtcaaatcacatgtgctgggtcactgggaactaggctcagatttgaacccagaatcaataattcagagtctatgctacagccccctctgccatctggattgctggtaacgctgactggcatgaccatgaagtcactggaacccagcctactcaatggctattccctcccataaaaatatctccatatac

SEQ ID NO: 506516 - DNA, 581 bp, Homo sapiens
gtgttatgatctattgtgtgtcaggcactgttctaggagtacagggaagaacaaaacagatcagtcccttatgtcttggggcttatgaagtaggtgggtgggcaactgacaatgacatgcaaataaattattcaaaataagatcatcttaaagaaggataagtgctgtaaaaaaataaaactggttaagttgtagatgacagttgcggtggttgcagctagcttattggagtcactttgtttatctgataaatatgtatatagtgtttgctgtgtgccagaactatactaagttcttcacaaatattaaatcatttggtcttccaaacgttcctgtgaaggaaatatttttatcattgccatttataaatagggaarctaaggcacagaaaggtcaaatcacatgtgctgggtcactgggaactaggctcagatttgaacccagaatcaataattcagagtctatgctacagccccctctgccatctggattgctggtaacgctgactggcatgaccatgaagtcactggaacccagcctactcaatggctattccctcccataaaaatatctccatatac

SEQ ID NO: 506517 - DNA, 622 bp, Homo sapiens
actcttaataggaatgtagattagggcaactactttgagaaaatactttgctctattgaatataagcacactctaggactcagcaattccacccataggtgtttgtgtcagactcatgtgttaggatgttgaaagcaacactctttgtcatagcaccaaaccgagaactatacaaaagactgtcaattgtataatggataaatacatttggtatattcatacaataaaactctacacagcaaagaaaatggacaatctacagtaacacccaacaatatatgcatataatgttgagtgawccaacccagagagaaaaaaagcatacacagtgtgaatttatttataaaaaattacagtttttattagttctaatttttttttagctatcaggaaaatggatttatgatcattttcctcagactcaactcattatctgcaccacccaaataaaagtgtattaaatcagattcaatggggggacctcatcccccagcatcttctttcctgtgactctgctttagttttcttcatagttcatatcaatttcttaaataatattatttatttgcttgtttattgtctcctattattgatccccactcttaacagaatatacaatcca

SEQ ID NO: 506518 - DNA, 531 bp, Homo sapiens
ttggactttttgataagtagtacaaaagatagacttttaaataagtggtgttggcacaactggattgcaaataaaaagagatatacaattggacttttaaataaatgttattggaacacctagataccaggatagggcaaaagatggtctgaaaaaaatagtgttgggacaaaagaacggtaagttagaaaaataaaattgggttcatacctcatgacaaacaaacaaaaaaaacctccaagatgctccaagatctaaatggaaaatcacgaagtcatactagaaaaaaaaaaaraagctataggtgaattttctttataaactaggcatgaataaagacttactaactgtgactcaaatgccaaaagcaataagataaaatattgataaattgactagataaaaataaaaacaaaaacttacaaggcagaaacaacatcaacaacagcaacaaaaaaacaccaaaagcaaaatcaaaagggaaaaaataaaccgggagaacatttttgcacctctagggtacgatagaga

SEQ ID NO: 506519 - DNA, 515 bp, Homo sapiens
tctgtagagaggctagagggtctcggcaggtgcccagacacctggagactggctgctccagggtcacctgggggaaggccataaggagcttcggagcctgcgcaaggtgggaacagggctccctcacatgcttcccaagtcttcctccttccacctcagcctggagctgccttcgatggtgttgggatgccaacccccatcaccaaggtggctcagggagaygcagggagtgagtatgaaccctggcagacagggctagtcaggggcagaatgggtccttgtgttccctggagttggaggtgcaggattagggatccaggagaccctggggttagcagcaagcatggctagggcaagaaggaagacagcccaggatggcacccccatcctggatgggcccccttgggaccagtgtccattgtccagggtgtcctgcagggcctcccctaaggtggcgttggcatgaggaggcagggaggagaggaggttcttggaggaggtgtaaaggggagctc

SEQ ID NO: 506520 - DNA, 598 bp, Homo sapiens
gcctgctatggggcctggagaaaggcccttcctgcctctttccctctcctgttcttccatcccagaatgtactagggaaaagtctctgtagagaggctagagggtctcggcaggtgcccagacacctggagactggctgctccagggtcacctgggggaaggccataaggagcttcggagcctgcgcaaggtgggaacagggctccctcacatgcttcccaagtcttcctccttccacctcagcctggagctgccttcgatggtgttgggatgccaacccccatcaccaaggtggctcagggagacgcagggagtgagtatgaaccctggcagacagggctagtcaggggcagaatgggtccttgtgttccctggagttggaggtgcaggattagggatccaggagaccctggggttagcagcaagcatggctagggcaagaaggaagacagcccaggatggcacccccatcctggatgggcccccttgggaccagtgtccattgtccagggtgtcctgcagggcctcccctaaggtggygttggcatgaggaggcagggaggagaggaggttcttggaggaggtgtaaaggggagct

SEQ ID NO: 506521 - DNA, 635 bp, Homo sapiens
ctactatgtggatttacatacccatatgccttctggaaatgtccatccagatgtcccaagagcacaacagactcaacatgctccaccctgcattcatcctccatagcccagaatctgcttctctctctgggcctcccagtttggtgaatggactcaccatccaccagccatccagcccagcaggctgggagtcatgctgccggtctctgttcccctccttccttatacccagtcagtcaccaagtcayccaaatgtctcacatccatctcctcctcttcagtgctccacagttttggaagctcaggagaatgatttcaaccagaaattgaaggtttagatttagggctttgggctgagaagagattgtccagggagagaatgaagtgtaaaaagaggagaggccaaggacagagcctgggcagacactcctgtttcagggagaacagagaagtcagcaacgaaggctgagcaggaatagtctgagtccgaagtaaagctggagactgtgctgagctgggggccaaaggaggagagaatgtccacagagtccaaagttctgagcctgagtgagatggaaggctgcagagtctcagctagttctcctccaagccctgcccagcccaggcccccactc

SEQ ID NO: 506522 - DNA, 635 bp, Homo sapiens
ctactatgtggatttacatacccatatgccttctggaaatgtccatccagatgtcccaagagcacaacagactcaacatgctccaccctgcattcatcctccatagcccagaatctgcttctctctctgggcctcccagtttggtgaatggactcaccatccaccagccatccagcccagcaggctgggagtcatgctgccggtctctgttcccctccttccttatacccagtcagtcaccaagtcatccaaatgtctcacatccatctcctcctcttcagtgctccacagttttggaagctcaggagaatgatttcaaccagaaattgaaggtttagatttagggctttgggctgagaagagattgtccagggagagaatgaagtgtaaaaagaggagaggccaaggacagagccygggcagacactcctgtttcagggagaacagagaagtcagcaacgaaggctgagcaggaatagtctgagtccgaagtaaagctggagactgtgctgagctgggggccaaaggaggagagaatgtccacagagtccaaagttctgagcctgagtgagatggaaggctgcagagtctcagctagttctcctccaagccctgcccagcccaggcccccactc

SEQ ID NO: 506523 - DNA, 599 bp, Homo sapiens
gttgcaggtaagaccttgctaacatggaacctatgtctgagttccgccttgcattcagtaggctaaagggaaggtcctagaattggagatgtgtctcatcaatgaaaagaaagtgtcctagaaaagaaacctgaccatgaagaccaactaagaaataaagagaaattcgcacatgatatgaaaatgggtgagaatacgcaatcatttcaactgactgctggagattgactttcgggttaaactgatatgttaatgtcctatttgaaaatgcaatamtgggattgcttagatggatacatttactgatctatagattaaatgcagatgtagatttgtgttttctttcttcatcttttccttggaccacaactacactgactgctgcacaaaaactcactgttatttaaatacttccgtaaatgttttctgtactacccctttccgtgctgacatcaaaacattttactaacaataagaagtaaacaaatatttttagaaattgcttaagttatgaaattcagtgaaaatccataggaaaataaactgggttacatccgaccagttaaaaatgatcaatagttaatttcaagggcatattc

SEQ ID NO: 506524 - DNA, 563 bp, Homo sapiens
tgggtcaataaggaatttagcttcagccagtctgggggtaaagtgatagaagatatcatcttagtccatatgtgcttctataacaaagtactttagactgagtaatttataaatactggaaatttatttcccacagttctggaagctgtgaagtctcgatcaaggtgcagattcagtgtttggaaagcactgatttcaccttccaagacggctccttgytgttgtgtcctcatcgtagcaaaggacaaaaaagggatgaattcactccctcaaacccttttataaaggccctaatcccatgtatgagggtggagcctaatcatctgctgaagaccctatctctccatactcttgctttgaggattaagtttcaacacaaatttgggagcaacacaaacattcagaccatagcagatgtcggctccaaggcagcggggaagccctcaaagcagggtcagcaacacactggagtactagggggactccccggccccaacccatgcagttcttccaggggcctggcttgaggggcaggaatccgggggatctgggggcacaatggc

SEQ ID NO: 506525 - DNA, 620 bp, Homo sapiens
ccaaggcagcggggaagccctcaaagcagggtcagcaacacactggagtactagggggactccccggccccaacccatgcagttcttccaggggcctggcttgaggggcaggaatccgggggatctgggggcacaatggccattctccactgtgcacttgccgttccctggagggctctaaacccacaggtacagccttttgtctcgagttcattcggcgcagctcctacgcatccccctgagacttgagggtgctccatattcaaaggcgcagaacttccytgtgcaagcggcagggaaggggcaaaggtcgcttgactgagaccacccaggctgcctcttacgttccatttctctccttgccaatactctccacttagattccgattatacctcacttgtgctgttccagaaacttccactcctatccccttctccaaccaaattcagtgagcaagctgcaagaaagcagatcaaggatactagtgcacagcgggtctgggcactcctctactttaacgcctcccatggctcccaatttccatgtgcacaaagcacacttgtgcagctctctatgtatgaggcactctccacacagcagtgcagtctttttctccaag

SEQ ID NO: 506526 - DNA, 455 bp, Homo sapiens
cccacaggtacagccttttgtctcgagttcattcggcgcagctcctacgcatccccctgagacttgagggtgctccatattcaaaggcgcagaacttccttgtgcaagcggcagggaaggggcaaaggtcgcttgactgagaccacccaggctgcctcttacgttccatttctctccttgccaatactctccacttagattccgattatacctcacttgtgctgttccagaaacttccaytcctatccccttctccaaccaaattcagtgagcaagctgcaagaaagcagatcaaggatactagtgcacagcgggtctgggcactcctctactttaacgcctcccatggctcccaatttccatgtgcacaaagcacacttgtgcagctctctatgtatgaggcactctccacacagcagtgcagtctttttctccaagtgtggcccccacctctc

SEQ ID NO: 506527 - DNA, 584 bp, Homo sapiens
gctcagaaacaaaatccaggtagctatcccattttaagtcttctctgtcatcctgactgaacataaaacaattctcatttcttctcttgacacaaccatatgcgtcctgatgctggtgacaccatcgtcagccacttgtccgagtcccctgggggaccctggtggtgaccaggattccttgtgtgggcagtgggcttggtatcctgcagcagtgcccagggaagggtagaccccacctttggcatcaatgatgatggatggttcatgttgctttgaaaaactggtatcaagtcaggctctatgaatgccacctgtcaactgccatccactgtcatgggaygtgctacccagaaattgggtctcaactcagcatcccatggcctctgtgccagtgtccagagagctattatgaggactctgcagaaagcagaagatagaagtcagagtccagtcataaaacaggaggcaccagctcttatcctggtcccaaaatgaggaacaaaagtcccagcagtcacctgggagacattcacactctccatctgtaattgcttcttgtggcttccgtaactcaggaccacaca

SEQ ID NO: 506528 - DNA, 548 bp, Homo sapiens
gagtcactcgccagcagcactgtccttcttgagcagcaacgttcccagggaacaacctgtgctttctcgcgtcgtgcccctcaccaggcaccatccaggaagaaatgcacagagcagaggtgagtccatttgaaaaaataatgattcttgcttaagatgcagtctggttagtctacctcccgctccccttcctgaaggctcaggatggtgctggggtgggcacagggttctaggatcccaagacaatgaaaaaaagagagaagacagcatgagtgagtgcagaagcccagctcgcacttaaggaccagccagatacctgcttgtgcagggacccgcctacagccgtgccctgggaggggctgctggtgtgaaggggcacccagggcaactgagctgggtcaaggcattggctttcagacagacaaggrgcataggaggtcacgctaaggcaaatggtgccaccagtgtcaatggtgtagacagtgcagatgggagctggtgtggagggcagtgcagggtcgctgggctcctaatagcaaggaaccaat

SEQ ID NO: 506529 - DNA, 379 bp, Homo sapiens
gctaatttaaaaatagcattttgatcactcatcttcctggagtgtcaagccctgcagagctggtggaattgacatgtacttattaccacgtttgggctcctgaaaccaagctgggtaatttgaagccctgtcttgggcagccctgggaaggccatcaatcagtggcataatcaccaacagcgatctccaccagaagcgggcggctgagagccgggagtctcactcctgctgcaagacagttttggggggtcagggtgatgatagtaataataatttattggacactcacaatgtatcagatttagcatgaattactcaattcagcatgaaacaactccagccagtggacrctctgccgatgtacagtgtgtataggtga

SEQ ID NO: 506530 - DNA, 591 bp, Homo sapiens
agcatgaaacaactccagccagtggacactctgccgatgtacagtgtgtataggtgagacaacagagggttggggggcctcgggctgcacactcagaaggaaaagaaacagccttgaacctcgtctgctccaagggctccagaaaaagtggctcctgcttagttttccattgtctctactgtgcctttccaaattaacacaacaaaaatggaggcatctcttcacactgcataagcatttttacttaagagaaagcagggatgaaagagtcaaaagtaacctgcaccgcctcactcaccaygcgccaagtgcattctctcgctccgtccttaaactcacgccacaggcgcgcatgagtctgaaaaggaggacaaggaggcttggagaggttacatgacttacccaggattgcacagcttgcatgtggcagaactcggattgaacccaggacttctgacgccaagctagatggcttcaaagcataagaattatcaaataattataattaatagtgattgagcaatcgctgttggacttccgcacttggctctgttattgttacaactccgtcacccctgcgctttttcagat

SEQ ID NO: 506531 - DNA, 468 bp, Homo sapiens
ggttcttcttaatatgaggtcacctgaacttgaaagtgcaaagattacctcagaggggctgtgtataaataacagggggcagaggggagagaagaggagcagagaccacacacgtgtctctgcagcgaggagcagayattggtgcccccataacgggccaggggctgaagtggacccttccaacctcatttcagggactgcaatgaagaatggtagggaagcttgggggttggagtaaggtcaacccaaagttctgttttccaaataaaaaaatgaaaagaagcctgcaggagaagataagcctcccgttccccagccaggtaggttttcctacaggacaacttgcctccaagcatgttaagcattgcactgaaatgtccctggaggagaaaggtggcagtttttgaaagggaagggttgcagcctggagcatctctcctgaacatggaaggataacagggctgtgag

SEQ ID NO: 506532 - DNA, 574 bp, Homo sapiens
tctaaaaaaatgtcaagttatggagacttcatagagaagggagggggtttcaagttccacagcactctatggctggagagcaattgtaggggcatttgaagaggtcctgcaggctgtgaaagggttggccaaggggaaggattggagagaagctgtctatgacacaacatctaggcagtaggtcgccttatgtgaaagttatgtgaggctgcctgtcatttcttaaatatttcaaagcacaatagactctaggcaaaaaagaaaacgtgcaatgcaggcccacacactcattcattcattcagcaaatcatcattgaatcctatgcgcatgcctggcaatgttctgggtgctggatcacagtgagtgacaccggcatcactctccgccctctagatactcacagtgcagggtggtgtcatccaggaagcaggcracagagctgtgtggccggctccacagaggacaaggatgaggtaggatgcacacttgtgatggggtgttccatggtcaggaagatcagggaaggcttccaggaggaagtggcatctgagctgaggactgcaaaactgtagg

SEQ ID NO: 506533 - DNA, 566 bp, Homo sapiens
gaaagcaagttgcaaagaggctcwcatgtacacgtgaccaggggcccgtctcccacgtgggatcacaaaaactcaatgcccaattattctctgatgcttttagaaatgatttgatggattcagagctagaaagtgtttgctctctccccttgggatggcagcctttctgatattagccaaaatgggaaaaaagaaggatggcgtggcttatgtccccttgctgcaatttctactaccatcaaggaatttgttaccactattggaagaattatgaagatgctcaagaaaataagctgttaagaagaggcatttaggtataataaaatggaaggcagtgcttcttcttgccagaggaattatgcagagggacataaaatgcgatattatagctggaacgttctcgctaacatttcctgctcagtgatgacatgaggacggacagaaaggagcagaaaaacaagctgaggatggactcgactacagcctgaaatttttcaagggacaatgggcctcccttcacccttgcctgaactctgaggaggactctcattgtcactcaggagcag

SEQ ID NO: 506534 - DNA, 599 bp, Homo sapiens
acgcaaggggggctccgtatagaccatgggtgctcaccagggtgggccctgcacaactcagggtggcaggagacactttcgccagggacccagtctcagatctaagcggtattgccatgtgagcccctgacccttgggacccacccagctttgtctctgcacatgtgcacattttctctgtgctgaggctgtcctcacagagactgtgcagggcttccaccagcagcaatggtgcttctgtttctcctcctgagagcagagctgggccccagccccaatggcactggctctccacattggagcatcagtggaagggtgcgtcctctcctctgccctgggtggttcaatgcagaagtgctcagcacacccctctctgtcctcatctgctgaggacacagacactgaagcagggaatccaaagtttctgtggggacaatgccactggagggcccctgaatgacttggctgtcacccataaaactgtgatttgagcaggaaataaatctccatggcgtggagttrctagggtttggagaatgtttgtcactacactcagcctatctgccaggtgcatgagggcatgaatgaacattggaaca

SEQ ID NO: 506535 - DNA, 599 bp, Homo sapiens
acgcaaggggggctccgtatagaccatgggtgctcaccagggtgggccctgcacaactcagggtggcaggagacactttcgccagggacccagtctcagatctaagcggtattgccatgtgagcccctgacccttgggacccacccagctttgtctctgcacatgtgcacattttctctgtgctgaggctgtcctcacagagactgtgcagggcttccaccagcagcaatggtgcttctgtttctcctcctgagagcagagctgggccccagccccaatggcactggctctccacattggagcatcagtggaagggtgcgtcctctcctctgccctgggtggttcaatgcagaagtgctcagcacacccctctctgtcctcatctgctgaggacacagacactgaagcagggaatccaaagtttctgtggggacaatgccactggagggcccctgaatgacttggctgtcacccataaaactgtgatttgagcaggaaataaatctccatggcgtggagttactagggtttggrgaatgtttgtcactacactcagcctatctgccaggtgcatgagggcatgaatgaacattggaaca

SEQ ID NO: 506536 - DNA, 558 bp, Homo sapiens
  misc_feature (1)...(558): n = A,T,C or G
agctgcaaatgttaaattgacttttgttaacctgattgtatctagagtcttctattaggttgaaaacatttatttyggtcgagagcggtgagtcacacctataatcctggcactttgggaggcttaactgggagtgttgcttgaggccagaagttcaggactagctttggcaatatagcaagaccccagtctctataataagtttttaaaaaattagctgtgtctggtagtgcatgcctgtagtcccagctactcaggagtgctgatgcacaatgattgcttgagcctaggagttcagtgtcagcagagtgagacctcatctctaaaaataaataataataataattattattatttgctaaatcagttctatttaaaggctcagatactttatcctaaccagagtcaatctcacaaataagtttactctgtgtgtgtgcattatatgtgtgtgtgtgtgtgtgtgtgtatgcatataggcaagtaattaaatgtttttcatngaagttttaccttttttaaagtcatgtcttgtaaagcaaaggaaataaacaggca

SEQ ID NO: 506537 - DNA, 605 bp, Homo sapiens
cattggtcacccaaccatcatagccattggtcttcagccttcacttctgactggttattctctacctgggggcatttttctttcttttctccctctcttcctcttctttggctggcgttacttttttcagtctctgaagggaagctcactcctaggagacttgcttaatagaatgtttatcgcctgcatgtctttagcaaagaggtgtctggaattcccatctgggatttattagtctaaatattcaggtggtccagtgccggatgttagttcttaacttaaaggaaacaaagtttccaatccgaggatggtgagattgctgctgttctacagtgggcagccgctgctggtgtcttgcttgccctggaaatgccatcaactgaaatggaattttgttcaatccatcttattaatagttcctaaagcaattgtggtggggttgataggtggctagtaaggttgcctctgtaaagataagcacaatccattaattaagtctggagtccactggacttctaccggggatgtttgcatttgctcggcactctgtttataaggatgtcgaaggaagtgcrtccattctgtgcatgttgtaaaacagaagg

SEQ ID NO: 506538 - DNA, 608 bp, Homo sapiens
ctgcttaactcactactctacctggccttgtgaggtsttttgcctttctgttaaatagaaaggtgttcttcctattttccacacagtttgctttttgtgctttctgtctggtgaatcatggatgcttttgcgatatgatatgaagagaaaaaagccagcagatgtaggctcatatcccagcattctgctgaacagatatgttaactttatggagctgggtttccacacctgtaatccgaggataatgacgcccacctcccagggttttggcgaggagtgagtggaccacagtgagagcaccatgcacactgtggacatctccaggtgcttagcagcaggatttccccagccttgtctagacatggaccatgcaagtccatgtccagacaaggtttggggaaatcctgtgctgtgcaaggcctcctttatgtgagaagtgagtctgaccatccgccgtctctgttaggccatctggaaaacgcttctgagcatattgtttatctcagtccctgagtctcctggaataattccttctcagcctgccttcctccctgcttcaccaatgactctttcctctttgaagaagaggagagagacaaagaggagta

SEQ ID NO: 506539 - DNA, 608 bp, Homo sapiens
ctgcttaactcactactctacctggccttgtgaggtcttttgcctttctgttaaatagaaaggtgttcttcctattttccacacagtttgctttttgtgctttctgtctggtgaatcatggatgcttttgcgatatgatatgaagagaaaaaagccagcagatgtaggctcatatcccagcattctgctgaacagatatgttaactttatggagctgggtttccacacctgtaatccgaggataatgaygcccacctcccagggttttggcgaggagtgagtggaccacagtgagagcaccatgcacactgtggacatctccaggtgcttagcagcaggatttccccagccttgtctagacatggaccatgcaagtccatgtccagacaaggtttggggaaatcctgtgctgtgcaaggcctcctttatgtgagaagtgagtctgaccatccgccgtctctgttaggccatctggaaaacgcttctgagcatattgtttatctcagtccctgagtctcctggaataattccttctcagcctgccttcctccctgcttcaccaatgactctttcctctttgaagaagaggagagagacaaagaggagta

SEQ ID NO: 506540 - DNA, 608 bp, Homo sapiens
ctgcttaactcactactctacctggccttgtgaggtcttttgcctttctgttaaatagaaaggtgttcttcctattttccacacagtttgctttttgtgctttctgtctggtgaatcatggatgcttttgcgatatgatatgaagagaaaaaagccagcagatgtaggctcatatcccagcattctgctgaacagatatgttaactttatggagctgggtttccacacctgtaatccgaggataatgacgcccacctcccagggttttggcgaggastgagtggaccacagtgagagcaccatgcacactgtggacatctccaggtgcttagcagcaggatttccccagccttgtctagacatggaccatgcaagtccatgtccagacaaggtttggggaaatcctgtgctgtgcaaggcctcctttatgtgagaagtgagtctgaccatccgccgtctctgttaggccatctggaaaacgcttctgagcatattgtttatctcagtccctgagtctcctggaataattccttctcagcctgccttcctccctgcttcaccaatgactctttcctctttgaagaagaggagagagacaaagaggagta

SEQ ID NO: 506541 - DNA, 415 bp, Homo sapiens
actactctacctggccttgtgaggtcttttgcctttctgttaaatagaaaggtgttcttcctattttccacacagtttgctttttgtgctttctgtctggtgaatcatggatgcttttgcgatatgatatgaagagaaaaaagccagcagatgtaggctcatatcccagcattctgctgaacagatatgttaactttatggagctgggtttccacacctgtaatccgaggataatgacgcccacctcccagggttttggcgaggagtgagtggaccacagtgagagcaccatgcacactgtggacatctccaggtgcttagcagcaggatttccccagccttgtctrgacatggaccatgcaagtccatgtccagacaaggtttggggaaatcctgtgctgtgcaaggcctcctt

SEQ ID NO: 506542 - DNA, 592 bp, Homo sapiens
ctctgatagggtgttgatagtgggggaatttatgtgtgtgttgggggaacagagtgtatatgggaactctgtactttctgctcaattttgctatgaacctaaaactgctctaaaacataaagtctttttttttaagatggtggcttcttttggggggagtcttctcttgctctctcatttkctcaccttgagttgccagttgcaggctgtgagtggccttatggagtggtccaggtggcaaggaactgatgtctccagccaacagccagaaaagacccggggtctgcctattgccacagaagtgaactcagagtgggtcctcccccagatgagtcttgaaatgattgcagttgaagtggacaccttgattgccttgtgagacacattttgagagactgcaagctttaggtatctggctaagctatgcccaaatttccaacccacataaacagagataataaaggagtgtttgtgatgtaagtgtctaggttttggagtgatttgttaaacagcataataactaatatacctgtgaagccacctctcatatccaaatgttgaagagattctttaaaactgagatttagatgag

SEQ ID NO: 506543 - DNA, 398 bp, Homo sapiens
ttttttacctaggtaagctatccttcaagtgtgaaggctataaataaaaaatttaaaacattcaagatattgaggtttatttcttgagcattctaagagaagatgagctttatccaatcaaagggtaacrgacgaaatttcagcaaaaaaaccctgctgatatgtatttagtattttaaattgatgatctgaaactaaaacaagggtggagatgagtaataaaatataatatagtaatatacctttggacagaagaaataatacggctaaaaaggggacaagggagtggcaaaaaggcaagtagaataaattgattaatttttgcgtaggcaataggtatagtcaaagtatagcatcacaaactgaccagccagtaaaaggttagataagaaaatgag

SEQ ID NO: 506544 - DNA, 606 bp, Homo sapiens
aatgcataagttggggagggaataaaaatagccaaaccatagcagccatcaggtggagcatcacaccttttctctgtgaaaatctctagcagaaacaacattggctagaaatgtggaactcttcccttagagtaattttagggaaaacagaatttgccttccccctacctttcttttttatttcttttttttttattttttattttatttatttatttatttatttatttatttatttatttatttatttattgagatggagtcttgctctgtcgcccaggctggagtgcagtggtgcatctcggctcactgcaagctccgtcttccaggttcacgccattctyctgcctcagcctcccgagtagctgggactacaggcgcctgccaccacgcccggctaatttttttgtattttttttttttagtagagacagggtttcaccatgttagccaggatggtctcgatctcctgacctcgtgatccacctgcctcagcctcccaaagtgctaggattacaggcgtgagccactgcacccggcctttccccctcccgccacttttctaagagaatgaaagaagaggttctgttacctggttctcccact

SEQ ID NO: 506545 - DNA, 588 bp, Homo sapiens
tgagtgctatctgtttgccaaggctgaggacccccgctcccccattgtgctgcacttccccctggttaaccgtaccttccgcacacacctggccccaggtaagggaagctccaggcctgggactgacccacagagccctgggatggtgatgggacgctgttctgagggtgggttccctggagaatgtcactaagcacgcctcctggtgggcctgagctggcccctgtggccctctgctccctgggtctcagcgttcagatggggccagcccctcctggggggtctgagagctgagatgtggcccaagcagggcccgcakggagccagccaggtgtcctgcacaaggaagacttctgggctgttccagccagttccacagagggctccatcctggcctctcctctgcttcccccacccacaggtgtggagcgacaaacagctgaggagaaggcctttggggactttgtcatcaacaggccagacaccccctatggcatgatgaacttcacctatgagccccaggacttttatcggctggtggccctcagtcgatacaacgtcctgaacaacgtggagaccttgaagtgc

SEQ ID NO: 506546 - DNA, 442 bp, Homo sapiens
ggtagaaacacaggagcagggacatcattcaycagcttgtcagagctcctcataagaaaaaaaggggccacaagcctgtcacatagggctgcacaggttgtgcactgcacaacttcaggggatcctgttcacatgaactgatggtgtgaatttgtctcttggagttgtgtgacctagcagccctgggagcacagcctcaactgagtatgaggacagaggctggttcaaatatcaggccccctggttccttcgatgcagctcggcattcacaagaatctcctgcagaaaatcgaagagcaagtatcctttccattctttggatggtgcagcactgggagaagggcctcaggtactggcaggtggctggtgggcatgggtaacccccgccttctctgagcccaggccatgcagctaacattgctcagttggtggtggtaatcag

SEQ ID NO: 506547 - DNA, 579 bp, Homo sapiens
cacctggcagcagtgagtgtacrgtggggcacatggtaccagttcagtcccactgggagccagcagtgacagtgtgaaggtctgtgtggtcctgttcagccctgctcaagtttctgtgtatctctcttatcatttgccacccccctctattctgaggtccttcccctgcctggggtgcagtggctgggctgaaccctaggaagagtttttccagatgtcatctaccttcttcatgggataagtgaggagggggaaggaaagcaggtattcccagtggcaggcaatgccttggctctgcgttttcctctctcctgcagaggtgctgatggttggaaaagcttcccagcggcctgcaaggcctgcacgtaggcagtctccagtgctcattagaacagcctcactcagttcatctcattcgatccctaaaactgtgggatggaaggaggacaaagaaaactgagtcctcttgtctccattcttggtccactccattccatcctcaacactatcctcatagtgatttaaaaaaaaattccaaaggacaactctagacccgttgtgccctgcttattagcattc

SEQ ID NO: 506548 - DNA, 318 bp, Homo sapiens
actccctgtcctgagaagctgggcccaccttgccatgagtgggatgcagaggrtttttgtactttgcctcatttcacagaagttacccggtttctcaatataccccggatgcacttgtagacttggtctctacctcctctggtgagcagctctcctagctcctatcacttacctagttccgtcatggtgtgtccagaatcggcggattcttggtctcactgacttcaagaacgaagccgcggaccctggcggtgagtgttacagtttttaaaggcagcgtgtcccaagtttgtttcttctgatgctcgcatgtgttcg

SEQ ID NO: 506549 - DNA, 318 bp, Homo sapiens
actccctgtcctgagaagctgggcccaccttgccatgagtgggatgcagaggatttttgtactttgcctcatttcacagaagttacccggtttctcaatataccccggatgcacttgtagacttggtctctacctcctctggtgagcagctctcctrgctcctatcacttacctagttccgtcatggtgtgtccagaatcggcggattcttggtctcactgacttcaagaacgaagccgcggaccctggcggtgagtgttacagtttttaaaggcagcgtgtcccaagtttgtttcttctgatgctcgcatgtgttcg

SEQ ID NO: 506550 - DNA, 318 bp, Homo sapiens
actccctgtcctgagaagctgggcccaccttgccatgagtgggatgcagaggatttttgtactttgcctcatttcacagaagttacccggtttctcaatataccccggatgcacttgtagacttggtctctacctcctctggtgagcagctctcctagctcctatcacttacctagttccgtcatggtgtgtccrgaatcggcggattcttggtctcactgacttcaagaacgaagccgcggaccctggcggtgagtgttacagtttttaaaggcagcgtgtcccaagtttgtttcttctgatgctcgcatgtgttcg

SEQ ID NO: 506551 - DNA, 458 bp, Homo sapiens
cagctggtcaagcacttgggatgtagaagaagcaagctaagcatggtgggccgttgaaccaggtgatgggctcaaagtgtttgcactgagcactcccatcaggagagtattttgaggatgcagcctgtgtgtgtgtgtgtgtgtgtgtgtgtgtgtgtgtgtgtttatgcaaatgtatatcacattctaccataataataatacatatgcctataaaagaccatcacaaaatagacttttaaaagaatgagcaataaatgaaataaatctattttgarttaatttttattttattaattaacactaaaaattctctctttttttttttgagacggagtctcgctctgtcacctggctggagtgcagtggtgcaatctcggcccactgcaacctctgccacctgggttcaagtgattctcctgcctcagcttccctagtagctgggactacggatgccc

SEQ ID NO: 506552 - DNA, 576 bp, Homo sapiens
tgcccaaccctgttcaacgtcccgagatataccaactctcccctccctgatctttttctgggcctctccaaacctgcacatgtctcactctccctcagcatcaggcccgcccctggcctctttcctttttggtctctcctcctttggagccttgtctcaaaaccaggtcctcagcacttctcactctctgagctttctgcccctgtcctcagctcctcttctcctctcatgctccaaaggatgagacagcctttcccggggttccatctgctctgctcgctctccactaagtaacagggggtccctcagagctcaggtgcaggcactggcttttctagaattagcacttaaattccccctaagctcgggagttagagtttttgcccaattcttcgtatctgcaatgggaggtataygtcctgaaacactctgaaatcactatgtctctattgcaccatttcccccgctgagagccagttcctctatgggtgtcaccactgtccctgttccccgtccccaaacccaagcttctgagtcaccctcaattttcctcctcacctgctatctttctagtct

SEQ ID NO: 506553 - DNA, 650 bp, Homo sapiens
tcaccattctccttcccggcagtcaagtgcagttctctgttttcaaagttctctttgtcttttacttgttttgtctttttcctctttgtgtgcattctaaaaaaagcttctgggaggcactgattttcagctctccccaccatctggctcttggtccagggcactaggtgaaacaaactgtgatggctgcctagtgaagggacaggtggtagctactcagaccctatgtgaggtacatatatrtattggtatcaaccgtccggagtcacaaggtctctgtggccaacactgccctagcttagtgggagctttcaatcaagctggccttgtctggtccttccttcatcagggatgaatattgcccttttatactgtcactaaaggtgttcagggccccaccctcttatcctggaggaaccataagagtaccgggctgctgaacttcctgggattgacttcatggagagaagcagaaggagtagggagggctgaactgggtcctggagcacagacaagctgggatgctgttggtcaaggctgctgtctggtggcgggcctcactagctggccacgagaaggactggatagcagcacaactgggtaaaatcatctggcacttgacttccactctagctccagcttagtttccc

SEQ ID NO: 506554 - DNA, 548 bp, Homo sapiens
ttcactgtagaaaatgtaaaggctccagaaaattcaccagtaccttctccgcttttgtctaaattcatctgtgagaagctttactcacgctttggctgccrgtgactcacggttaaatcatctctctcaacttttttccttttcggttttttaatacagttgcatatcacatgacattctgctttgttttcttccttccccttccccaggaaaactaagcaactctaacagccccattaccttaatgaataaaagccattcagtgaaaagaactggtatccacttcatcaattaaaaagctaacaaccaattcttggaaattttctggagccctatgaaaattcatatcacttagtaacctatgtgagctgaaggttggtgtccaatgactgctaagaagatataaggaatgttgcagaaatataaatagaccagcactgaaatttaattaggcactgcatatgttaataataaattcaattaatttagccttctacctatactagaaagaaaaaaaaaacctgggcaaaataataattcattttaaa

SEQ ID NO: 506555 - DNA, 527 bp, Homo sapiens
cacagaaaggaaaatctggggatttaaaatcagagggtaaaataagagagttttaaattacaaagcygaaccaatgacaaggctaaagatttaacctcattcactagcaaaatggtgtctgctacatttacaaaatgaaggctgactggttggtttctggagaacgaagggggccacacaaacttaggtcactgttaatatcatggtcacatactcagcttttcagcaccagaatcttattttgtcagctgacccagagtggttcaatctctacaaggctcaacacactcaagagttctggcttctcaatacaaagaaatacccctttccagagactgaaaaacatatatcctcttattcagatcacctcctttctaaagtttgttgtaaaacaaagttagcaagcagaaatttggtgaccatgaaattagagcaaaaggaattggataatctcctacgagcagtcacacagactgtcccacagtagaattcatctcccttatgacatgaataggatagatgtcaca

SEQ ID NO: 506556 - DNA, 433 bp, Homo sapiens
aagtgtatccacctcactcaagcctattcagaggtagtcccatcagtgagtcttaatcacccacggtggcttagggatgacagcggctgtggcacatatgtgtctctgataacaggacccatttaactgctcctaatccacaggggtatgattatgttggggtaataactcctgagaatggctttgccacagttacagcatgctgagagggagcgaaatatgaaccctgcataaattagactaccaggtacaaagtttgctattagttagtgctatcatacctctaataagagtgtatctcgccatagacaattgcatttagctgcatgatgagatgacaggcaaatttttcagtctaatgtatatgagttttgtttttttaaaaatacacstataactttatgaaaaccctaatatatttgagagataaaaa

SEQ ID NO: 506557 - DNA, 660 bp, Homo sapiens
aaaataaggataacggtagtctctacctcttagggttttttatgargaggaaatgaggtactgcatgcaaaacatttgcacaatgctcactactttgttgtcattgttactagttcctttctccagcacctgcacttccaggatgttggcacaggtccttccttccccatgggctagaaggaaacttcctcctgtgagagctgtcatagctctttctcttgattgtctatgtggcatttggtttctgctcatgttcatgctgcccaaactcaaaacttctctgtcctagactttcaacccctagaagggaaaggatggctccattcttttcaatgtccttaataagagaactgccatcaacacccatccagtgcatttacagtttccaaagcatttcctcctctgccttttcacctgagccagaatgcaatcctagggagtgggaggggttattattcccacttcacagatggggaaactgaggtccagggaggggcagtgacgtcatggtcaagcagcaagtcggtggacaagaaattaggtgtttctggattgccaacacaagtttctttttgtgggacaaatagttttgaatatagagttcaagcctttggtgaagatcccggggagcctgttctgcacctgtgctaagtgattctt

SEQ ID NO: 506558 - DNA, 660 bp, Homo sapiens
aaaataaggataacggtagtctctacctcttagggttttttatgaagaggaaatgaggtactgcatgcaaaacatttgcacaatgctcactactttgttgtcattgttactagttcctttctccagcacctgcacttccaggatgttggcacaggtccttccttccccatgggctagaaggaaacttcctcctgtgagagctgtcatagctctttctcttgattgtctatgtggcatttggtttctgctcatgttcatgctgcccaaactcaaaacttctctgtcctagactttcaacccctagaagggaaaggatggctccattcttttcaatgtccttaataagagaactgccatcaacacccatccagtrcatttacagtttccaaagcatttcctcctctgccttttcacctgagccagaatgcaatcctagggagtgggaggggttattattcccacttcacagatggggaaactgaggtccagggaggggcagtgacgtcatggtcaagcagcaagtcggtggacaagaaattaggtgtttctggattgccaacacaagtttctttttgtgggacaaatagttttgaatatagagttcaagcctttggtgaagatcccggggagcctgttctgcacctgtgctaagtgattctt

SEQ ID NO: 506559 - DNA, 612 bp, Homo sapiens
atcatttatgtagaatgcttaaggaggcctgaaattattatgtaaatttttaatttaaaataatcacaaatatttaatctcattttcctatatttggaaatattaaaaattacagttactaacttactcttttactcaataattgtatttttcttaagaaattaaaaaacattacagtgtttttacatgttagatatttaagaaatcttaaacaacaaactcatagattccggaagagatatttgcttcatccttcaggagccgtaaaggtattcaatcacccttcttattttctcattctccttaacatttttgttttcagaactaactttcagattcgaagaaacagaagcgatgctgctgacwgatagaaatacaagtgggaccacgttcaccctcttgggcttctcagattacccagaactgcaagtcccactcttcctggtttttctggccatctacaatgtcactgtgctagggaatattgggttgattgtgatcatcaaaatcaaccccaaactgcatacccccatgtactttttcctcagccaactctcctttgtggatttctgctattcctccatcattgctcccaagatgttggtgaacctt

SEQ ID NO: 506560 - DNA, 628 bp, Homo sapiens
attgctaatcgtcttccatgaggtaaactcagtaaagtagtatttttgttacccaagagtttcctgtcactgtgtgcttccctggcgcacatttggaggatgtggaggtgtctctggtcactgtgggrggtgcatggcaacatattcaacttatgtgcatggcatttgaggttggggcatggaaaaatactgaggcactgtctgtatgtattttgtgcatgagaatgaaactccttgtggagtgtttggtgcaataaggaacgctgaaaacagcctcctgagaatgcggtttgagtgcttttacaaggccacaggtgtctcacgaacagacctcaaaaaaaccatctattggatgtttgtgggttaacaagccctttcaataaatacttggcagatggatgctggggcggattctcttagaagagctgtccctcgtcccgctaagctggaattgtctgagaactcattcttggcgttcactgaaagctataagctctgtaggtcaccttcttctaattcctttccaagctcacgtttattgcccatgggtgcttttctccagagataccaaatttccttaagctacactctgtttaggcaggattcagattttaacttcataaacaca

SEQ ID NO: 506561 - DNA, 562 bp, Homo sapiens
ataaaaacataaggaaggagtggttagggcattagttcagaaaacagaaaatctagctctctgctgctgatggactgatgtgcatcttttataatgcacccttatttggaggccaaacacaaggccgtaattctgtgaagggtttggaaggtcattaaaactatgcttatcttttagccaatattggccctggaactgyccacagcagtcctttccagcatgcccctgtatatacaatcacacaatatatcaataaagagggatggaaacacatcacatctcacgaaatccagattattaaaactcagaggtataatctttattcacttaaaaagtaaactctaaaaaacacacacctaatgtacttaacactactttaggctatccattgaagggacaagaggcatatataacttaacaaaataatttttgaatgcctattcagtcccagacacttaatcaagttattaaggctagagagctgaatggcaactagaagacctaaatgaatattaaagtgacgtcctttacactccaacttgaacaagaaaatatttattaa

SEQ ID NO: 506562 - DNA, 562 bp, Homo sapiens
ataaaaacataaggaaggagtggttagggcattagttcagaaaacagaaaatctagctctctgctgctgatggactgatgtgcatcttttataatgcacccttatttggaggccaaacacaaggccgtaattctgtgaagggtttggaaggtcattaaaactatgcttatcttttagccaatattggccctggaactgtccacagcagtcctttccagcatgcccctgtatatacaatcacacaatatatcaataaagagggatggaaacacatcacatctcacgaaatccagattattaaaactcagaggtataatctttattcacttaaaaagtaaactctaaaaaacacacacctaatgtacttaacactactttaggctatccattgaagggacaagaggcatatataacttaacaaaataatttttgaatgcctattcagtcccagacacttaatcaagttattaaggctagagagctgaatggcaactagaagacctaaatgaatattaaagtgacrtcctttacactccaacttgaacaagaaaatatttattaa

SEQ ID NO: 506563 - DNA, 181 bp, Homo sapiens
gaactaaggtcttcgtctattcaaagtggccagtactagagccctaatatttgccttttcaacctatatgtatttatctggaactrgatatagtacctcagttagaatgtacttgtcaccgtaagtaaacaccgatcactataaaataaattactgacttcacctttaaaataaatgcaat

SEQ ID NO: 506564 - DNA, 641 bp, Homo sapiens
tgtatctatgccaaggtgagtgtggaccctcacattctcctccctgagctgtactgagaagcaggctgtaagaagtcctctagtcaatagctttttaccaaagttaagtgttctcaagagtttcaaccttaataagtgccattgacaactgaataaaatgtcagtctattgcaattagaaagcgagtatacttttatttgaacatttttgtcttcctttgtttttataactgatttttgccaccatagataaacataaacttccacatgtaattatatctagattctttttagcaaacaattacttctattgctacttactaaatgtgtacgttacatgaaaacttatgaagttaaaatacttctatcggtacggagaaaatgaaataacattcaaaaaatcccccaattgctgcctgttagaattaactgaacggcttttaaaactcctgaagctcagatcaaccccagaacaattaaatcagaatctttgggattggaacatgaatatcggtgtatwtcaaattttcctgggtgatttcaatgttccttcaagtttaagaaacactgaattctacattattattttcgtttgtaaaacagttttatagaagcgtaattaacatgtaatgaaatgtacct

SEQ ID NO: 506565 - DNA, 641 bp, Homo sapiens
gagccattcacagtaagcttgactcttccttcattctttttcccattttcattcagcagctcatatgtcagcaccctaaataaagccctgaacatctcaagctataaccacagacctcgaactgttcttgttgtctctatgatctcccacgtcataatacatcccatgtgtaatagcttggtaaatctaacacatgattaaacactgtygtactcttccttagagcaagttctgaagtcttctctaatgctccttctagctttatctcccattagatgtatataatcccacattacaagaatattacatgtactccaactttatctcaggaagatgttcctaaactattaatgtttaaatttattgacttaaaatgcctgaaagatttgttagcaaacctagtaagaaaaaaaatgagaagcactttaaaggaaaatactacacaaactatgataagttcatgcaacacaattgctactaaggatggctttttatttgccacttttctaaaagcatggttatttctagagcggggaagggccattatttcttggtgacctttaaatccccatgtgtaaagtctgttctaacactctaagagactgtttcctgtatgatgttggtttacaaaggaaaacaga

SEQ ID NO: 506566 - DNA, 535 bp, Homo sapiens
cttgggatgtttcgttattacaatctgcaagtggtttcctgmaattaatttttaacatacggctcttgcatcttctcagtaatatctaatatcctaatactttagagaggtttgcaagatttaactcattaatcctcaaaaggaaccactggaatactgaaataaaaaggaatcgtactacttttttttttttgtcaacattaattttggcatactttacaaatgctgtcctataggtctaggggaaaattggtaaagatcaagtatttaggcccattctgataaaagtgtagaaaggaagaaacacaggtatatgtcaaaggaattgctgcttgctacagaatgaaagattaacaaactaaaaacatcagtccacttacttctagccttttataggatcaccttgttagagacaaacctaaatctaactaagcacatgaaagtaaacaatcagaaacgaagacaaagacagaatattgaaagcagcaaaaggaaagtaatttatcacatacaagggtccttaataagattaaca

SEQ ID NO: 506567 - DNA, 592 bp, Homo sapiens
ttttgcctactaattgccccttttctatgctcataaaggactgaactcaaatgtcactgcctcagaaggccttctctgactatcctaacaaatattaaactatcccaagcattcatgttttatgtctcacaaaacactgtagctctccaaatggtcttatttatgtgcttactgcttgtctgtatctcctactggaacataagattcacgagggcaggggtgtatttattttgtatttattttgacttcatgatcctcagcacctagcataattcctagcacatrgtaaatacttcataagtattttctggtgaatcaatgaatgcatgaatcctgagcctgacagaatgcatcataatttggtgtcccttaatttctccactgtgaacacctgagttcctttcaagcttatcttcctattataccttaccatgaatcatgattttgaaactttgcataagctcttttctttctttatgctgaaattatacttcttttaaggcctgcttcagatttcatcttctctatgaagcttttcatggaggtcatattgcttttcttttttttctttctgtgaactttaacggtgtat

SEQ ID NO: 506568 - DNA, 592 bp, Homo sapiens
ttttgcctactaattgccccttttctatgctcataaaggactgaactcaaatgtcactgcctcagaaggccttctctgactatcctaacaaatattaaactatcccaagcattcatgttttatgtctcacaaaacactgtagctctccaaatggtcttatttatgtgcttactgcttgtctgtatctcctactggaacataagattcacgagggcaggggtgtatttattttgtatttattttgacttcatgatcctcagcacctagcataattcctagcacatagtaaatacttcataagtattttctggtgaatcaatgaatgcatgaatcctgagcctgacagaatgcatcataatttggtgtcccttaatttctccactgtgaacacctgagttcctttcaagcttatcttcctattataccttaccatgaatcatgattttgaaactttgcataagctcttttctttctttatgctgaaattatacttcttttaaggcctgcttcagatttcatcttctctatgaagcttttcatggaggtcatattgcttttcwtttttttctttctgtgaactttaacggtgtat

SEQ ID NO: 506569 - DNA, 620 bp, Homo sapiens
ttccttcattattggttgacctccctccttagttttctatttctggtttaattcattgaagaaaattctgttaataagacagggtctctacctttaagaggcttataattaagtagaataacaagtgtgacagaggaacacacgaaatcttcattttgattcctgctccccatagacatcaattgtccatgagtcagctccatttccttctcccctggtgttggggcttctattgtgaggtgacctcttggctgctcccttatgggtcccaggacctaaccacagttgrccaatcataatccatcaggcccagtttgttcaaaatgaattgctcatgttctcatacccaattccatgagatttatagttcggttaagaaggcaacacctggtaggaaaaattaaaataataggaggttttaatgctataataatagaacagatcttatgagacacagaacataattttttaatgtgataccatggacattgattgtcatagtgtacaaaggaaggtaagattctttgagctggatcaccaggaagggcttttcagagaaagtagtattttgaccttgttctcaaatgccaaataagattgagatgggccaactggggagg

SEQ ID NO: 506570 - DNA, 629 bp, Homo sapiens
tgtccacagcctccttttatttgttttgttagcaaagatgctttgggttgcaagtaacacaaaacttcttgtggtctrtataagaaggtggattcattggcttatgcaaccaagggtccagagcagagccataatttgatttgggatctgggtctgttcctctagaattttctaagctttggcctcttagagctgacatagtcttcaggccagcttctgcactgtagcaaaacgcctgaagcaattacccagattatttcagcctgccatacaaaagcgagaaaatgaggatgatttttcaagaaattcctaccaaatagcatcttcagccccattgttctgattacaccaagggcaccccatgagtccataactgagcaggacatggggtaaagctgattggctttgggcctgagtcataggctcaacttctgggccaggtgaagttagtctcctccaaagcatatagactgcatggcagaaagatggacatcagtgtaaaatttggaggtattaccaagagaagaatagatagatactgggaaaacagacattgtccactgcaaaaggctatctcatgctagaaccatgagtctcaagccaaatttttcatagtgcctagcatattc

SEQ ID NO: 506571 - DNA, 485 bp, Homo sapiens
tcatagttttccttggaaagcaaactgctgtgtttatttaggggaggaaatgttgcagagataatgtaatatccacttgtcctcccgtcattgataggaaaacacacagaacatatctgcctgccaattgagggtgtccaaacctgacactaacttatacatacacacatgcatgcacacacacatacacacacacrtgtgtgtatatatatatttgacataacttttaagttcaggggtacatgtgcaagtttgttatataggtaaagttgtgtcatgggggtttgttgtacagattatttcatcacccaggtattaagcctagttcccattgattatttttcctgattctttccctcctcccaccctccatcctcccataggccccagtgtgtgttgttcccctctatgtgtccacgtgttctcatcatttagctctcacttgtgagtgagaacatgtggtatttggctttcagttcccgagt

SEQ ID NO: 506572 - DNA, 308 bp, Homo sapiens
taattccttctgataaagatggactcctccactctgatggacaatctgctgaatgcgtttgcttttcctatggttcctgatgactcttccgtattttccttccccttrtagcttctctttactcttttctgtgtaccttttggcttctgtctctaccacctactgtccccttgtactgtaagtccttcacgcaaatctaagagtgggatctgatgagtccagttaattcctgctgcttcttttgttttgccttacaggtaaggtacctacagttggtctttgtggggagtcatgtgttataagccatg

SEQ ID NO: 506573 - DNA, 542 bp, Homo sapiens
ggttattaaagaaagacaatcattggtggaatatagcatgtgccaattatatgttaattaattaagaaattaacctttatctaaccacttaaaatactttacrtctgatatggtttggctctgtgtccccacccaaatctcaccttgaattgtaatccccataatccccacgtgtcaaggatgagaccagatggaggtaattgaatcatgagggcagtttcgccatgctgttatcatgataatgagtgagactcatgagatttgatggttttacaagtgtctggaatttcccctgcttgcactcattctctctcctgctgccctgtgaagagatgccttccaccatgattgtaagtttcctgagctctcaccagccgtgcataatcgtcagtcaattaaacctcttttctttacaacttacccttcttgggtatttcttcacagcaatgtgagaatggactaatacaacatctgtttcaagaaattcattctggatatcctttcaaattgaacctttattcccatgctcctcctcagtagcg

SEQ ID NO: 506574 - DNA, 662 bp, Homo sapiens
attcattcattcattcatttttgttcctaacctcaaggaacatccattcttatatggaaatagtgctcactgatccaaacattgccttagaggagagatttccatattttttcctgaataagcacaccagtgctttacggggctcatatcttatgcagcagtggtccacggtgtgcccacattcttgatttctgtttctttrcctcatcacatagaggattcagctcacctgctctgaccttccagagcccctcagggataaggaagttggatagtcatcccaggaccatttgggcaggttgatacccacctttcttccaggattatgtggatcttagagggccaagctctttccaaaaaaagcagtgctctcatcctcactcaggactttcctttctgggtccctggattctgtctggctcagagagcaaataaattactgtgaagtttcttggtcatggccctggcaactgctctgctcaggaaggaggttggcagatggtctggtgctgtgaggcagagaagcaagtacatgttttaagatcacagggtttccagggtttcagtttgaatctaaagtttagttcatatttttttttactacctaaagattccctccccactgcttcacaaagagctgccttatttgagttcataggtga

SEQ ID NO: 506575 - DNA, 662 bp, Homo sapiens
attcattcattcattcatttttgttcctaacctcaaggaacatccattcttatatggaaatagtgctcactgatccaaacattgccttagaggagagatttccatattttttcctgaataagcacaccagtgctttacggggctcatatcttatgcagcagtggtccacggtgtgcccacattcttgatttctgtttctttgcctcatcrcatagaggattcagctcacctgctctgaccttccagagcccctcagggataaggaagttggatagtcatcccaggaccatttgggcaggttgatacccacctttcttccaggattatgtggatcttagagggccaagctctttccaaaaaaagcagtgctctcatcctcactcaggactttcctttctgggtccctggattctgtctggctcagagagcaaataaattactgtgaagtttcttggtcatggccctggcaactgctctgctcaggaaggaggttggcagatggtctggtgctgtgaggcagagaagcaagtacatgttttaagatcacagggtttccagggtttcagtttgaatctaaagtttagttcatatttttttttactacctaaagattccctccccactgcttcacaaagagctgccttatttgagttcataggtga

SEQ ID NO: 506576 - DNA, 392 bp, Homo sapiens
tattgacaaaatagtcatatgttcaactttaagagttgtacctagcagtttacctaatgtttagactttaaaaatcattaactaggatataactttcagtgattattagctttgtctaatattgcattttttcataaacaatttcagtaaactcctaaaaattaataatgatgaattaggtaaatgaaatgagataaacacttatagatgaactctttgtgtaatttaaaatttttaaattgttttggatgcttactgggtgtctggctcattgacacttgagaggatttttatatgggaaagcttctttttttaattgttaaatgtttcttgtctayaaaatactaacatctaaaagacaatttagaatttctcgtttgcttggttcatat

SEQ ID NO: 506577 - DNA, 602 bp, Homo sapiens
ctgcagcacccaattaaagccttcttccctggcaataattgttatctctgtgattggctttctgtgtggtaagcagcaggacttagaccagccctctgagattttggtaaaagagatagttttcctgtttgaaatgattttagctaaaataagaaaggagagttctagaaagttcctcaaactttcctgtgacatcccagtacctttccccaccatggaccaaatccaaataatccttgaataacatattttgatggtcaattagtcaattaatatctcgtgtggtagccaaaataattgctcaactttgttcatggttctaagaacaaatttctggccatcccacacattttgctcaaaatgttatttttatttcttcaactatagaagtgtaaaaaataaaacacaatgttggaaaaatatgtcagttcaatataaatttttatataaaagttgatcactaaactctatatcaacattcaatggttcatatagtttacttttgtaaaactgccaaatcttattatttcagacattaaaataaccaaagcagattgagcatttaacccsttggtgatgaattcagtctgtaaacgttcaac

SEQ ID NO: 506578 - DNA, 572 bp, Homo sapiens
gtgccacagtggggtggaggtggggaggtaagagatcttagaatggacaagccagtaactgctacccaaaggtccacgcctcaccttgactggcacttctgtgatcaggctcaagattgaacagagcatgaatgacgagaggagctagaattagaaaaaaaattaagagaggccmaagactgagagaaggaaggaaaggttttattctttgatgcaatagccagtgaaggaaaggagtcaggtgaatgttggtggagaaagaatgtacttaagtgagattacaacctggggaccatatttttaaggaagtatccatccctgtatctacaggggaggacaacattgaagatataaatttgaccccttctttgatttctcgtcattttccataggaatcatctgcctttgatgtttctgcaaaaactgaacaaaaactcatatcatttacatatatgtaataccaaaaaaatgagtaaagacagtaaccatcagaagatacaaagaaaagagaagtgaaattaggagacaatgtagccactcagtgtgtgtgtgtgtgtgtgtgcgcgtgtgtg

SEQ ID NO: 506579 - DNA, 545 bp, Homo sapiens
ctgattgattcatttaaatactaaagagaggttcttcatactagtatcgaatgcccaaactttctatttatattatataaaaacttgggaaaaataatgctctagtcatcatataaaaatattagccaaaattcaaacattcattagcattaaaacagtttctatatgtagtaaagcatgagctgcttttaaagtgttaacaattcaataagaagtatgttattaagagttatgcacattgttttactgaaaagttcagtttacaaaaacaaacccaaatcccacttaccaaaggctttggaatgaaacagtagtatgttcctattattgatcatttcatttcagctataaatcctattctaaagacttcmgcataattagcttgaatgtagcgaatgatgtattcaaaaggcatcaaagacacctgtaggtcactagcgttttcacttaataaggacaaacgatcctctactggtctggaaaagttaactggtgtttgaatgataaggccctaaagcaagtcattacataatactttatgtgca

SEQ ID NO: 506580 - DNA, 418 bp, Homo sapiens
taataatataaaaggtgataatatyagttcttgttacctttcctatagcctctttttaaaggaatacataggaaatatttgggctaccttaaggtaggccattagacaagttaaaagtgcttttatatattttggttctttcactataaagctaaaaattgatttagtctatttgattaaaaatggaatgtacagtgcatcaatcattttatctatgtgtaaaagctagtatagtcttccttcttggctcactaaatttatttctaaatgacttaactggatgttctaggtggtctaatccaagaaggaagtctctacttctactcagggatcttctagcctgctggggttggtgtgttttttcctttccttttttttgctgaaacagtatatggtcatttgaaatcctgtatgtaac

SEQ ID NO: 506581 - DNA, 586 bp, Homo sapiens
tgattccactcttaaagtcctgtatctttgagaaactcatatgctagtcaacaaagatatgaaacaacatctgtagaagaactgtgttcaatagcaaaaaatgttcattaatagtgggatatataaatttgtgattattcatttaatggaatattatataagagtaaagatgaataaactaattacatgcaacaatatggatgaatctcaaaaatcgaatgtgtgaaagaagcaaatcatcactggatatatagagtataaaatattattctatatacttaatgttcaaaaccagctattaccaaatagtacatattttaggcatacatacatataataaaaatttaaatcaaagttgtgaaattattggcacaaaaaattcagttacctctgaagatgttgaaatagtttacagaggtacatttagaaaccttcaaggtatttcttaagcttgatgttaggtacagggggctctatttatttatttattwatttatttaatgtattgagacagagtctcactgtcacccaggctagagtgcagtggcatgatctcgactcactgcagcctctatctcacgggttc

SEQ ID NO: 506582 - DNA, 586 bp, Homo sapiens
tgattccactcttaaagtcctgtatctttgagaaactcatatgctagtcaacaaagatatgaaacaacatctgtagaagaactgtgttcaatagcaaaaaatgttcattaatagtgggatatataaatttgtgattattcatttaatggaatattatataagagtaaagatgaataaactaattacatgcaacaatatggatgaatctcaaaaatcgaatgtgtgaaagaagcaaatcatcactggatatatagagtataaaatattattctatatacttaatgttcaaaaccagctattaccaaatagtacatattttaggcatacatacatataataaaaatttaaatcaaagttgtgaaattattggcacaaaaaattcagttacctctgaagatgttgaaatagtttacagaggtacatttagaaaccttcaaggtatttcttaagcttgatgttaggtacagggggctctatttatttatttattaatttatttaatgtattgagacagagtctcactgtyacccaggctagagtgcagtggcatgatctcgactcactgcagcctctatctcacgggttc

SEQ ID NO: 506583 - DNA, 639 bp, Homo sapiens
acataagcagtgtgctgggaggctgaagtactccgaactcagttttaagcagcttgacagaattaatactatttctccagatgcctaatttagtctacagaagtgatctccacctccagtctctaccagaagttgatttggagactggcaggcacatacccttggcaactgagaccatcagcaacaagaaaagagtcttcaactttcccctctgcccagtaaggggtcagaaccttgccacatcattttgggacrattgccaacttttggttttggacaacccatctaaatgccttaacagaactatctgttacttcacagcttagggcctctctagtcagccaacgtggtcagacagacacttgaggagtatgggttgttatgccaaagtcatttttgccctttgttctcagatacttgtgagagtgatcaccagctcagtgcattgaataaatagttgtaaagagggtttccatagatgggaacttgaagttcttgtgaaggcattccggagaagaaatttccacgtggaataatggtataagaaaaggtataataaattaccaccttgatatagcattttatagtttaatacaatggtgaagaggacaggcattggagttagactaaatgaggttc

SEQ ID NO: 506584 - DNA, 594 bp, Homo sapiens
ttgccatttctgccctatcttcctcctattttactacatcaatgagtggaagaattattgtaggaccagcccaggcatcaaattttctgctttgagtgccagagtggaaagaagagtaaatagcagaacacactggcttgtgcaagtctggatggtactttccagagataggaaagtagggaagtggaagggtgcacttcagtttaaactgctctcactcttagtaagtgaaataatcataatttaatgaagtacctcataaactgtgggctatattccaatacagggcactagcatttaatgatatactgttgatcatttctctagacacaaattgataaagataagttcagtggttcagattgtttcccgaaattgagacttcaaaagaaatactatattttaagctgctgttaccaaaagttgggcattttcctaaaatatagttttatatttatataggcaatataatttatcttaagcccctgaccctaaagaaatttaccaaaggattattttcataaaatcacacgcaaacacacataagcaaaacttaamaaggagttagactgcattacaaaagatgaaacagag

SEQ ID NO: 506585 - DNA, 565 bp, Homo sapiens
ttgtacaaatggggatgaagctgaataaatactgtattgtgactattactaatgctagctattctgctttatacaccaggcacccagggctrttgaagccttggaagcccctgttccatatttgcgccactcagcctgtcctcagtcattctatgtacagccatttatttccatagagctcctttaagatggaaagatgaaactgttaagtcgaaccatatgatttccaagaatcagcagtacataataggcttttccatttagtattactgcttccctctaacattttcatgttcacaactgtgattggttcatattgaaatttaaggagaatgaagaatcagcaaattcaaatagacaaataaatccagatcatctaaattcaaattgtattttgggtcatctgtgaaatgtctttgacttgtttttgtttctacggctgtaaaatggataatctacaatcaactctgtaattttaaggaatataaacaaaggactataaagtgcttttaaaattaaattcccgctttaatttccaggtttcagcacaatgttgacacaaata

SEQ ID NO: 506586 - DNA, 488 bp, Homo sapiens
ttgctcccagtgctagtggtgaggacttaatgggagatgtttgggatacttttgctaattttgtaattttaaaaataagagcatgtagccatgtgatgtaattygtattgtattacagatcatttttttcatttgcttcatattcaagcatgacccaatagagttaaacatattgaacttacaatagtaaatactggcaatgaatctgcttattctcattaaagaatcttggcttatcttatgcaaagtgcacaattatgttattcagaaaaaataaatatcaaataaacattaaataatcaacaaataatgtgtacttaccacaagccaggaagttctaagcacattacatattagtgcacgacataacatgaacaggtgaacttgatgtggcatgtggacatgacaacaacaccatgggttctatttatataatttacattttacagaagaaaatgagaaaaaaggaggtgaagtgacttattcat

SEQ ID NO: 506587 - DNA, 582 bp, Homo sapiens
aattttcttattttctatcaatcacacatttttatttttaaatgatccaaaaattgcccatttatttgattaatataagccttccttttattaacataaaggcattatattacacatgtataatgtgtatattacacgtattatacatggtcaatattaaagaaaaaaatattctcagcctgtcaaaaatatttcttaactaaaactaaaatcttccaagtgttagaatggctctgaacaaactgtgctagataaaaacaaaactaaagtttcagcatgaattgtttataaatctgaatttaaaaatggttaaatagggtaataagtgtactaaatacccaagattaatatctgctaattaacatctaccaatctttwtacttgggaatctgaggtgcttgcatttttcttgatttttatgcagtgattagtctaaggctttctaaaagatttatacaaattcacttgaaatatgtctgaaatttaaaaagttatcaaaagaatgtcctcaaaaaaacagtagaaactatattctttcttttcactgagcaagtctagtgctgtcatcgcaaatgattattc

SEQ ID NO: 506588 - DNA, 603 bp, Homo sapiens
aactctttcaaaaagttttgctgcaaagggaagaaaataaatgagcaactgaaagaatggaaatatattcctgccttgggatttagaaagcaaaatgaagaaataacagattataggttaataaagattataaaggttaatagggacctaaacaaagattgatagggacctaaagtaatcctactactggttcatcaccaaaatttcattttatcttatattttttcaatcattaacatgaacaagtatagaaatatgaaaacaactttttacatggtgagaattatgtctacaaatgtatagaaataatcattcttacaagtagcattagttagtgctgtgttggaactaaatgcacagacttcagaggcagactgctgggtttaaatcctgcttccaccataaaccaactccataagcaaccwccatgagcctcagtattctcatttgtcaaatgatgatatgttgtatctacctccagaaccattgcaaaggcaagacagcacctggcaagactgtttaccagtgtctaacaataacataaacgatttatatatgttagaatctgtgaatgataaaaagccttagagaaatgtcaaataa

SEQ ID NO: 506589 - DNA, 572 bp, Homo sapiens
tcggtgtataagtcaggaatgtgtggcttgcagagatgaagggactggctcctggtcacccagtgcctaggcagttggttaaaagttaaacctggccaggcctgcctgactccaaaattcccatcccttctgcaaagccaccttccttattggacaaaatattgcaaaccccggacatgaaggccaaccctgtgagtggcgaacaatggtaagaagccatgtaaagctgtaaaacaaggagaaaaatgaacctctgggctcagatgggaaatggcttcagatatttcaagaaacaaagtgggtttgtttgaggattgaagcacctcagtttcccatttattcctaactcagcaagtggatccacaatgaaatcaagtcccttaacaaatagagctaatgcaggcctaatcccacatggaagatgaaaaatgtgtcttaatcttttgcctggcctggaaaactagaccttggagtgtgtgtgactgccactcccatcagtcaacatatacaggcaggaagacttggggtgaggaayggggtggtgttggatgaaatggcttcagagaaacctt

SEQ ID NO: 506590 - DNA, 617 bp, Homo sapiens
cccacatctccatccactgtcttgtccagcccctgcattactagctcctatcctggcttccctgtcactacactgctcaccaggaatcactctctcccattgtactcctcaggaactgcacctaagacagcgtgggaacattttaaaggactctgatgcggattccttattgagtatgaattgactctgaagatttagtttccctcttccttgatccattgtcaaagcagtctagtgattgccacccccgaccctgagaaaggagtgtctcccagatcagaatgggaggggaagaagcaaagataaaggcaggtgaaaaagcagcaagagacagggagaaaaagagacagaagraaaaagagcagagaggaagaggaagaagagacgaagacaaatagaggatgaatgattatccagaggctaccagagggaagaagtagaagataggaggttggacggaagatgtgcacataccttttcttgtttttgcacatacatttaaccaatagtttcaatatgaaaaaaaaaaaaaggacatggagggtaatgagcaaagggtattaggtaaatgctccagctaatcccaaagtctagggggatgatcgtgaaagatgaaa

SEQ ID NO: 506591 - DNA, 617 bp, Homo sapiens
cccacatctccatccactgtcttgtccagcccctgcattactagctcctatcctggcttccctgtcactacactgctcaccaggaatcactctctcccattgtactcctcaggaactgcacctaagacagcgtgggaacattttaaaggactctgatgcggattccttattgagtatgaattgactctgaagatttagtttccctcttccttgatccattgtcaaagcagtctagtgattgccacccccgaccctgagaaaggagtgtctcccagatcagaatgggaggggaagaagcaaagataaaggcaggtgaaaaagcagcaagagacagggagaaaaagagacagaaggaaaaagagcagagaggaagaggaagaagagacgaagacaaatagaggatgaatgattatccagaggctaccagagggaagaagtagaagataggaggttggacrgaagatgtgcacataccttttcttgtttttgcacatacatttaaccaatagtttcaatatgaaaaaaaaaaaaaggacatggagggtaatgagcaaagggtattaggtaaatgctccagctaatcccaaagtctagggggatgatcgtgaaagatgaaa

SEQ ID NO: 506592 - DNA, 568 bp, Homo sapiens
gctgtggggtttggaccccggcattctggcctcacagtctgcatactgaactactgtacttcacagccccagcccagaacagggggtggcatgcagtacaggggaaatctctgggtgtgaagcaaaagtggattggatttttaaattgtaaaaaggtttttaaaagcctgctttctaaagaatggcttggggcaggggctttagggggaaaacagggagaccagttcggtagtgcctgtggtggagggtatagaactagttcccaggcttggcacaacccctgacttcttgtayacattcccgttttctgggtagttctctcacaatgacatttattatcatatggcctttgttatcagagttgtgctttatattcttaaagcgcttttgctctttgatgtacctattttctcattgatagtctctcttggaggcagatgggtctggggatggcagtgtccatgcacggacaaagccatgagttattataagacaagagataaagctgcaaggtattgatttgacaaggtcacatagctagcttttggaaaaacttgctataggtgag

SEQ ID NO: 506593 - DNA, 580 bp, Homo sapiens
gtggggtttggaccccggcattctggcctcacagtctgcatactgaactactgtacttcacagccccagcccagaacagggggtggcatgcagtacaggggaaatctctgggtgtgaagcaaaagtggattggatttttaaattgtaaaaaggtttttaaaagcctgctttctaaagaatggcttggggcaggggctttagggggaaaacagggagaccagttcggtagtgcctgtggtggagggtatagaactagttcccaggcttggcacaacccctgacttcttgtacacattccygttttctgggtagttctctcacaatgacatttattatcatatggcctttgttatcagagttgtgctttatattcttaaagcgcttttgctctttgatgtacctattttctcattgatagtctctcttggaggcagatgggtctggggatggcagtgtccatgcacggacaaagccatgagttattataagacaagagataaagctgcaaggtattgatttgacaaggtcacatagctagcttttggaaaaacttgctataggtgagtcagctccacccagg

SEQ ID NO: 506594 - DNA, 575 bp, Homo sapiens
cggtgtataagtcaggaatgtgtggcttgcagagatgaagggactggctcctggtcacccagtgcctaggcagttggttaaaagttaaacctggccaggcctgcctgactccaaaattcccatcccttctgcaaagccaccttccttattggacaaaatattgcaaaccccggacatgaaggccaaccctgtgagtggcgaacaatggtaagaagccatgtaaagctgtaaaacaaggagaaaaatgaacctctgggcycagatgggaaatggcttcagatatttcaagaaacaaagtgggtttgtttgaggattgaagcacctcagtttcccatttattcctaactcagcaagtggatccacaatgaaatcaagtcccttaacaaatagagctaatgcaggcctaatcccacatggaagatgaaaaatgtgtcttaatcttttgcctggcctggaaaactagaccttggagtgtgtgtgactgccactcccatcagtcaacatatacaggcaggaagacttggggtgaggaacggggtggtgttggatgaaatggcttcagagaaaccttaaat

SEQ ID NO: 506595 - DNA, 543 bp, Homo sapiens
atgtggtggggtggtgagggctggaggaaggcattaccaagagacataaggaatcttttaagagtgatggaaatgtttcctrtattgattgtggcagtgatttaatggatgtgtacgtgtttgtgtgtgtgtgtgtataaaaatttatcaaaaagtatattttcactatgtgtaggttattatatgtaagttatacctctataaagtgtaaagaaaaaaaagcaggctctggaagcattcttcctgagcatgaattttacattccattcttgcaaagaaaaaaaaaaatgaggctgcaagtccactaatctaaagtgttaattataatgctggactgtagtgatccatatcttctttaaataccaatgtttatgaatttaaacttttaatttgttttcaggcaactactctaagagtgaggaaattagaagaaaacattgaagcagaaagagcagcgcatttggaatcaaaatttaattctgaaattattcaggtaaaatgtaaacaaatattttggcctgcattttcttaatttgtgttata

SEQ ID NO: 506596 - DNA, 637 bp, Homo sapiens
cacattcctggcttcagtgaagactattctaatgtatcccaaagagaaagccctttgccataggttttttaatagatacacgttaccaagataaagaaacttttttttagtttctatttttcttaatcatgtgtgagtgttgaaccttgtgaaataattttctagcacctactagattatttaaagttactagattttctattttgaactattcttccaattctgagataaactctacttacgatggtttcgatttattgacttctctgtgtgttagtgtgcacgcgcgtgtgtgatttttgtatctaaataataatgatattgagctacgattttaattttctyatgctacagtttaaggttttgtaaaattggctaaagaatttttatcttattcaattaaaagtgagggcaaattaaaaattttttcagataatgcaaggacctagaaacatctcttcctctgcagtctttctgggccctcccccagtgaaagaaattacaatggttacttgtattttgtaaaattgactaaataattttttatccgtttcaatgctctagcacattttggatgaaatgggaatttcttagtattgaaaatttggtagaactcccatgtaaaacagaatagttt

SEQ ID NO: 506597 - DNA, 637 bp, Homo sapiens
cacattcctggcttcagtgaagactattctaatgtatcccaaagagaaagccctttgccataggttttttaatagatacacgttaccaagataaagaaacttttttttagtttctatttttcttaatcatgtgtgagtgttgaaccttgtgaaataattttctagcacctactagattatttaaagttactagattttctattttgaactattcttccaattctgagataaactctacttacgatggtttcgatttattgacttctctgtgtgttagtgtgcacgcgcgtgtgtgatttttgtatctaaataataatgatattgagctacgattttaattttcttatgctacagtttaaggttttgtaaaattggctaaagaatttttatcttattcaattaaaagtgagggcaaattaaaaattttttcagataatgcaaggacctagaaacatctcttcctctgcagtctttctgggccctcccccagtgaaagaaattacaatggytacttgtattttgtaaaattgactaaataattttttatccgtttcaatgctctagcacattttggatgaaatgggaatttcttagtattgaaaatttggtagaactcccatgtaaaacagaatagttt

SEQ ID NO: 506598 - DNA, 637 bp, Homo sapiens
cacattcctggcttcagtgaagactattctaatgtatcccaaagagaaagccctttgccataggttttttaatagatacacgttaccaagataaagaaacttttttttagtttctatttttcttaatcatgtgtgagtgttgaaccttgtgaaataattttctagcacctactagattatttaaagttactagattttctattttgaactattcttccaattctgagataaactctacttacgatggtttcgatttattgacttctctgtgtgttagtgtgcacgcgcgtgtgtgatttttgtatctaaataataatgatattgagctacgattttaattttcttatgctacagtttaaggttttgtaaaattggctaaagaatttttatcttattcaattaaaagtgagggcaaattaaaaattttttcagataatgcaaggacctagaaacatctcttcctctgcagtctttctgggccctcccccagtgaaagaaattacaatggttacttgtattttgtaaaattgactaaataattttttatccktttcaatgctctagcacattttggatgaaatgggaatttcttagtattgaaaatttggtagaactcccatgtaaaacagaatagttt

SEQ ID NO: 506599 - DNA, 623 bp, Homo sapiens
aaggcacttgtaaaaagaaaaagtaatattattcttttctgaaagcagtgtaatcagcatattatacctacaatcctcagtctcttcttgctgcagatgcaaatttgctatctactagcaactcagtaaatgcaagggaaagagcatgtgaaagtgctgattgctagattttcagttgaaagatctggtaggggagatgcttataattttggataaaatgaaagaagaggaggggtatggggtccttttcatcaatcttaattttctctgttgccatctcaaccattgtcacaatatgattttgatctagtgattaggaggttggccccttggaatcacagtgcctgactgcaaatcctgttcctgacacttctaatcctgaagccttgagtgagttatttggcccatcttgtgcttcagtttcttcacctgyggcatgaagattactctagcatctaagttataatgtggttgtgaggattaaataagttaacatacagaaagcacttagacctatgtctggcatatgctacttcctcaataaatgttagtgaaaattacagaatagtaaaagtatgatttgctgggttggtgcaaggattatgctattcatgctgccacag

SEQ ID NO: 506600 - DNA, 629 bp, Homo sapiens
gcccaatccaacttttactcattcgttcatccaccaaatatttattaagtacctattatgttccaggcactgttctaagcacttgggacagagtaataaagctttttcttttcatctccatttgcccagtgtctgggttttaattcttcattggggaagacaaaaactaggaaaggaaagaaaaaagtattatgcmttgaccccctcaagtctctacagttcatatatttttattctaattagctcaatatggaatacatatcaaattatcagtatatcccaaatgggattcaacgctaccccatcaccttccttttaaattctagaagatgccagaaagatgaaaatttagaaaggaaggctaaggaatagcaacaacaaaaatgtataagctaaaatcaggacaatccgatattgccatgcttaggggttagcactaacagaaatcaacataaaatgggtaagattagccatctgcagaaatcatcccaggaaataagccacccaagagatgattcacaagcatattgctagcaatttgagggtgctttctaagtctcaccaaggggtctagtatgcttccttaaaagggaagtcgtcaatttaaaatgtaactagtggaagattag

SEQ ID NO: 506601 - DNA, 491 bp, Homo sapiens
tttcccaatcctaatatttatgcccacatgtttttaatatgctgtttaaccacacattttacagatataaacatcaccatatgagctttcaattagcactgattytcttcctgaagacgtgcctattggaatgaaatgttaggaatagctgggaactgatgtatgtggagttaaagtgctgttaattcaattgctttatctgatccaaagtcacttagattatattaaattagccatctgcttggctttcaccttggaatgtctgccagatgctgaatgtgtttgcagagttcattagcagacccaaccttaacaacttttttgtggtgtaacaccagtgaccagaagttttcctgaaaagacatcataggaaaaaagaagtataagctacacttaaataaatgtttttaaaatgaaatgtttacatttattctcaaatttaaaaatcattttattggaagggaatttggacaaaggattcctactaaata

SEQ ID NO: 506602 - DNA, 562 bp, Homo sapiens
aagctatcagggttccttcctggtcaaggaggttcattttgtttgttcccaagtatgggtgggtaccaagtgaccttaaacatcatcatataggccgggcatggtggttcacacctttaatcccagcactttgggaggctgaggcaggcggattgcctgaggtcaggagtttgagaccagcctggccaccatggtgaaaccccatctctactaaaaatacaaaaattagccgggygtggtggtgggtgcctgtagtcccagctactcaggaggctgaggcaggagaatcacttgaaccttggaggtggaggatgcagtgagctgagattgcagcactacattctgatgatgcaattcagtgagagtaagtgtcagtggagggccaggaccagagtgtgaaccccaaaatgtgagcctcaaatgaactggatggatggagaagctagtgtcattcctgcaggaagctgtttggttgttgtttttgttgtggtttttgttctgttattttctcaatgacttctccacaggggtctctatgccccaaaactacactataaattcc

SEQ ID NO: 506603 - DNA, 569 bp, Homo sapiens
caagcggaagctgctatgatagaatttgcaattcacccctgcggagtggaacagacccagatatgtgaagcttgaatatatctacctgagtaaagtgatatttgctggtgagggaattatagacatcagtcatctgtaggggcaggagaaaggcatgtgttttgtttggggtgggatggaattatctggattggccacactgaacaatttttctctgattatgtttgtatagacccagttttattttaaaaattacggttatgtggtatttactgtaaattaattatgaagatgagttcatataaaagtaatttaaacaactatgaatacatttttaaacctttctgtttatatatgtgacttttaaaattagtaaatttatttactgacttcaatgatataaagctaagttgaatttgattctaaagtaaggtaattgcatctcaatcttccttkccactcaatattggattagggtggcaaaattttgttttataagactttctctgtggcatgtggctcaggatcaatacatagtaagtatttaattaattagctttaaaaatgca

SEQ ID NO: 506604 - DNA, 569 bp, Homo sapiens
caagcggaagctgctatgatagaatttgcaattcacccctgcggagtggaacagacccagatatgtgaagcttgaatatatctacctgagtaaagtgatatttgctggtgagggaattatagacatcagtcatctgtaggggcaggagaaaggcatgtgttttgtttggggtgggatggaattatctggattggccacactgaacaatttttctctgattatgtttgtatagacccagttttattttaaaaattacggttatgtggtatttactgtaaattaattatgaagatgagttcatataaaagtaatttaaacaactatgaatacatttttaaacctttctgtttatatatgtgacttttaaaattagtaaatttatttactgacttcaatgatataaagctaagttgaatttgattctaaagtaaggtaattgcatctcaatcttccttgccactcaatattggattagkgtggcaaaattttgttttataagactttctctgtggcatgtggctcaggatcaatacatagtaagtatttaattaattagctttaaaaatgca

SEQ ID NO: 506605 - DNA, 585 bp, Homo sapiens
gatgcttaaagtatggccaaaaagtgaattaatcattacaggtagtgtaaccagaacttggaattacaatcttcttttatttatcatttgttcatagctcctcttatatttgctaagaccttgtcatatgaataaatgccatttttaaccctcatatatgtcaataatctaccatacattttgaatataattaattgaaggttatttattaaagaaggtggtgtttataaatatagtatatatttaatttactctgattcctgcctgaggagttatcttgctaacttaatagcctttactgaatccyaagagaagtgctgactcagtcactgccaggtctgaattaattacagtctattttgcattatctgtggtctatggatttatggttagagaggaagcatcttgcaaaggacctttgagcagatgtgtagaattatttggatctcagaagacaggaaatagcaaagctatccttctgtttacttctgtaaagactggaccttgtccatgcaattatatctgcgtgttaggaaggagtactgaatcctaacttctcatatcaacatgtggaggctctccagc

SEQ ID NO: 506606 - DNA, 614 bp, Homo sapiens
cactatatggaactgtccctttatacgtggctgggctgctcacccagggtacagaaaacacagaaaagtgaactgtccacaccaaccctcacctggggatgtcactcttcctttgttctactctactctcccttctccatctttgactttaagtctttaccctttatttttatttattatttaatttttattttagtttcagggctacatgtgcaggattgttatatagataaattacacgttgtggaagtttagtgtacaaattattctgtcacccaggtaataatctatagtatcccaataggcagttttttgatcttcaccctcctcccccctctaccctcaagtagatcctggtgtctgttgttaccttctttgtgtgcatatgtactcagtgtttagctcccacttataagtaagaacacacactatttggttttctgttcctgcattagttggttaaggataatgggctccagctccattcatccacatgagagcagagcaaatgggctacttctagcctaccatcttgacccaaacccccaggttttactcttcttgtttgcagtgagayataaactctattacctggcagtattttttttaaagta

SEQ ID NO: 506607 - DNA, 345 bp, Homo sapiens
ctgtaaaccaaccttcagtgagtgtgtctgtctctggtagtggttaaaattacacaaagacacacctttattgggagttactgctgtgaacttcctttacactagggatataatacaacttataaagcaggtgtctgccaaattaacragcatagtctgcactgctttctgacaccaacaacaaattctccggctctctagaaaccaactagatatcctacaattcaattctgttctgacactatctacctagagttagcatcagagcccatgagttaagagctcagtcccacaagaccatgcccactttagacaccagtcctaagtcccaggctgtcacctgta

SEQ ID NO: 506608 - DNA, 589 bp, Homo sapiens
agcttcagttttctcacctgtgaaatgagacctgggacaggtgtgaatgaatgttcgtatcttcatcattacctgcccagcagcgcaccaggatgaaggccccctgggagagcctcacagtaagtgcaagaagctccaacctggccctcctttctgtcccttccagctctgtgatgaggcgtttttaggacaagcccccaagttcaccccagcttttcctgccggctccatcccttgaggagtgagcagtctactcgggggagcgggaaccccgccagggaccctgggaagggccagtgaccacccaaggcccctagaagggcctttgggactaagaccatggccrgaaatgggccagatagaggcacttggtagtggctggtttcttagttcccagtttaaatggggaactgcagagaccacccacctaaccacaggtgaaggaacttagcctttctctgctcctgagccttggagttcccagtgtctggattatattcctggatcttaagacatgatgaattaccgcctctgtggaatgaaaagccctctccctatctcctttccttcctgctcctctgcctgggct

SEQ ID NO: 506609 - DNA, 589 bp, Homo sapiens
agcttcagttttctcacctgtgaaatgagacctgggacaggtgtgaatgaatgttcgtatcttcatcattacctgcccagcagcgcaccaggatgaaggccccctgggagagcctcacagtaagtgcaagaagctccaacctggccctcctttctgtcccttccagctctgtgatgaggcgtttttaggacaagcccccaagttcaccccagcttttcctgccggctccatcccttgaggagtgagcagtctactcgggggagcgggaaccccgccagggaccctgggaagggccagtgaccacccaaggcccctagaagggcctttgggactaagaccatggccagaaatgggccagatagaggcacttggtagtggctggtttcttagttccyagtttaaatggggaactgcagagaccacccacctaaccacaggtgaaggaacttagcctttctctgctcctgagccttggagttcccagtgtctggattatattcctggatcttaagacatgatgaattaccgcctctgtggaatgaaaagccctctccctatctcctttccttcctgctcctctgcctgggct

SEQ ID NO: 506610 - DNA, 525 bp, Homo sapiens
gggccccgagagcggccgcgcgggtctcgcctccggattttagaaaataatcacagccctgacggcgagacgggcggttcggtgcggcgccaccgggaggccgggagccgggcgcgcagagccgctcgcagggagggcgcggctgcgcgcggtcgtaggcgccctccgcggcgccgccgagtgcagcggscgccccgggcgcgcagggtgcccgcgccgccctgcggccgggtgttggcggggcacggcgccgggcggggctggcctgcctatttttccctccgtggcggtctgcctaccggttccctttttgttttttgtttttcatgttttcggtcctacagttaattcgttaggagtagccttgaagatgaaattaaccagtcaagacattccggccgccctatacgccgggcaattaggacgcatctaataagagtaatcgggcgtttataagcaaactccagactgttacgaattaaaaaaaaaaaaaaaaagccagcgagagggtgtgccccaacgttg

SEQ ID NO: 506611 - DNA, 503 bp, Homo sapiens
ccaccccctcagaacctgcttcccacgcccaatagagactcggcccttatgccactcaagagtgctcagcctagctggaaatagaaacaacagcaatagcagtaataataaataccatttactctactaactacttcctacattcactccactgtctcccattggccaggcagcatgcaatacattttatattttctttttaaaatggtttaatgtatttttttgtagaaacggggtttcgttttgccacgtctcccaggctggtctcgtactcctgggctcaagccatcctccygccttggctttccaaagtgttgggattacaggcgcgagccactgtgcctggccttcaatgcattttacatccattgtctctgtataactgagagttaggcctctctcagttgaaatagccagaaatccaatcgaaacagcttaagtaaaacagagaatatattggtccaggtaactggaaagtctagtaagtccagtagacttcgtgc

SEQ ID NO: 506612 - DNA, 628 bp, Homo sapiens
actttgtgcacatgtaccatagaatttaaagtataataataataataataataataataataataataataaaagatttattgttgaatgaatgatatgtcaacagaaactcagatccagggatttgcttttgggctgggatcaggcctcttgaactaggatctgggtggggatctatccacaatatgtggctgggttctgaagactgcttgcatatcttttaaaatcctgaaaggtagcataattgctcaagaaaagtatgtctatccttggtatcaggaccaaaacgaaatttatcctgagaaccctcataaagacatcttgcataatgaatacaacccgttttcaacaacatccatgaggaaacaccatggagatgcgctatggtgctttcctttggctacacgcagtaaaggtggatggtggcttctagaagtgcaatcagaagccaccaggcctggccgggmctgtaatcccagcactttgggaggccgagacggctggatcacctgaggtcaggagtttgagaccagcttggccaatatggtgaaaccctatctctactaaaaatacaaaaattagccgggcagtagtggcatatgcctgtaatcccagctactcagaaggc

SEQ ID NO: 506613 - DNA, 628 bp, Homo sapiens
actttgtgcacatgtaccatagaatttaaagtataataataataataataataataataataataataataaaagatttattgttgaatgaatgatatgtcaacagaaactcagatccagggatttgcttttgggctgggatcaggcctcttgaactaggatctgggtggggatctatccacaatatgtggctgggttctgaagactgcttgcatatcttttaaaatcctgaaaggtagcataattgctcaagaaaagtatgtctatccttggtatcaggaccaaaacgaaatttatcctgagaaccctcataaagacatcttgcataatgaatacaacccgttttcaacaacatccatgaggaaacaccatggagatgcgctatggtgctttcctttggctacacgcagtaaaggtggatggtggcttctagaagtgcaatcagaagccaccaggcctggccgggcctgtaatcccagcactttgggaggccgagayggctggatcacctgaggtcaggagtttgagaccagcttggccaatatggtgaaaccctatctctactaaaaatacaaaaattagccgggcagtagtggcatatgcctgtaatcccagctactcagaaggc

SEQ ID NO: 506614 - DNA, 628 bp, Homo sapiens
actttgtgcacatgtaccatagaatttaaagtataataataataataataataataataataataataataaaagatttattgttgaatgaatgatatgtcaacagaaactcagatccagggatttgcttttgggctgggatcaggcctcttgaactaggatctgggtggggatctatccacaatatgtggctgggttctgaagactgcttgcatatcttttaaaatcctgaaaggtagcataattgctcaagaaaagtatgtctatccttggtatcaggaccaaaacgaaatttatcctgagaaccctcataaagacatcttgcataatgaatacaacccgttttcaacaacatccatgaggaaacaccatggagatgcgctatggtgctttcctttggctacacgcagtaaaggtggatggtggcttctagaagtgcaatcagaagccaccaggcctggccgggcctgtaatcccagcactttgggaggccgagacggctggatcacctgaggtcaggagtttgagaccagcttggccaatatggtgaaacccyatctctactaaaaatacaaaaattagccgggcagtagtggcatatgcctgtaatcccagctactcagaaggc

SEQ ID NO: 506615 - DNA, 499 bp, Homo sapiens
ctgattacgcgtttaggccatttgctcatctgctagtcttcttgatatctgcacatgtgagcggtattctccagtatcttttatttccttaattattttttgagacagagtctcactctgtcacccaggctggagcgcagtggcatgatctcggctcactgcaaactccgcctcccgggttcaagcgattctccctcctcagcctcccgagtagctgggattacaggtgcccaccaccacgcccggctaatttttgtatttttagtagagatgggctttcaccatgttgtctaggctggtctcaaactcctgacctcaggtgatcagcttgtctccgcttcccaaagtattgggattacaggcgtgagccaccgcgcccaaccttccagtactttttcaagggaattaaggataatgttgagatgagcacagccagaatggatctttttagaacacagtgagaaacttccctctagrttaatggtattcatccactaat

SEQ ID NO: 506616 - DNA, 591 bp, Homo sapiens
taggtgctttggaatgggggaggggtacaaagaggtaaaaaggctgaattcctctctcttataatccaaataaccataaaatgtggaatgaataccgaagcgcctggtaaacatttaaacggcacgtgctatgcaccaggcaccatcctaagtacttgtcaaatattatgtcattcaatccttaacaaccaccctaagaggctggtaccatcatctccattttactcaccaggaaactagagacacagaaattccagaactggccccaaagtcacacycccgggaaacagccaagtttccaacccgggaaacctggatctggatttccagtctatattcttcgtctactatggaacacactttaaatattcacataccataatggagtatttttgaaagatcacgggtaaaaacaatttttacaattgcagtcaagaacatgcccagagctggaaaacgctgcactcacagctacattcacgcctattcggggctccggcggtcacactgcgatttttccctattgcacgtggtcccgcccaatcttcagatttcacatcaaaacctgaaaaatgagtaacagatgaggca

SEQ ID NO: 506617 - DNA, 591 bp, Homo sapiens
taggtgctttggaatgggggaggggtacaaagaggtaaaaaggctgaattcctctctcttataatccaaataaccataaaatgtggaatgaataccgaagcgcctggtaaacatttaaacggcacgtgctatgcaccaggcaccatcctaagtacttgtcaaatattatgtcattcaatccttaacaaccaccctaagaggctggtaccatcatctccattttactcaccaggaaactagagacacagaaattccagaactggccccaaagtcacacccccgggaaacagccaagtttccaacccgggaaacctggatctggatttccagtctatattcttcgtctactatggaacacactttaaatattcacataccataatggagtatttttgaaagatcacgggtaaaaacaatttttacaattgcagtcaagaacatgcccagagctggaaaacgctgcactcacagctacattcacgcctattcggggctccrgcggtcacactgcgatttttccctattgcacgtggtcccgcccaatcttcagatttcacatcaaaacctgaaaaatgagtaacagatgaggca

SEQ ID NO: 506618 - DNA, 616 bp, Homo sapiens
aaacacaaaatgttcctcacatgtcacttgacttgaactgttcccatcagcaagaaaaattactgcaagaatgaaaggagttcacttttctctgtgactgttccaaagaagcggaagagcattttaagtttctccggtttccttgatsaatgtccctcaaacaacctaaaggacttaaaaaataagagaatggaagatgagttaaaatgccttaatgattcagaaaactacatccatattgctaccaagtaacaaaaagaaataattgttccagaagacaattctgtaatgataagaactagaaaattggtttagattcaaatggcatctggagagaactgaaatcaactagaaccagccttcttcaaagctgttcaaatcagacagcatttgctaccaaccacatttctccaacctatcttccaccacagagaaggcaccatctagccctcccagtcaattggggtcagtcagtgcacagctactttctcaatggctaataacatttataattcataatgttactacgtagtttgataagtaacaataacagtatctgaaaaaaatccttatctgagtgtttttgaggaaatgagagtggaggggaatgggggaa

SEQ ID NO: 506619 - DNA, 616 bp, Homo sapiens
aaacacaaaatgttcctcacatgtcacttgacttgaactgttcccatcagcaagaaaaattactgcaagaatgaaaggagttcacttttctctgtgactgttccaaagaagcggaagagcattttaagtttctccggtttccttgatgaatgtccctcaaacaacctaaaggacttaaaaaataagagaatgraagatgagttaaaatgccttaatgattcagaaaactacatccatattgctaccaagtaacaaaaagaaataattgttccagaagacaattctgtaatgataagaactagaaaattggtttagattcaaatggcatctggagagaactgaaatcaactagaaccagccttcttcaaagctgttcaaatcagacagcatttgctaccaaccacatttctccaacctatcttccaccacagagaaggcaccatctagccctcccagtcaattggggtcagtcagtgcacagctactttctcaatggctaataacatttataattcataatgttactacgtagtttgataagtaacaataacagtatctgaaaaaaatccttatctgagtgtttttgaggaaatgagagtggaggggaatgggggaa

SEQ ID NO: 506620 - DNA, 616 bp, Homo sapiens
aaacacaaaatgttcctcacatgtcacttgacttgaactgttcccatcagcaagaaaaattactgcaagaatgaaaggagttcacttttctctgtgactgttccaaagaagcggaagagcattttaagtttctccggtttccttgatgaatgtccctcaaacaacctaaaggacttaaaaaataagagaatggaagatgagttaaaatgccttaatgattcagaaarctacatccatattgctaccaagtaacaaaaagaaataattgttccagaagacaattctgtaatgataagaactagaaaattggtttagattcaaatggcatctggagagaactgaaatcaactagaaccagccttcttcaaagctgttcaaatcagacagcatttgctaccaaccacatttctccaacctatcttccaccacagagaaggcaccatctagccctcccagtcaattggggtcagtcagtgcacagctactttctcaatggctaataacatttataattcataatgttactacgtagtttgataagtaacaataacagtatctgaaaaaaatccttatctgagtgtttttgaggaaatgagagtggaggggaatgggggaa

SEQ ID NO: 506621 - DNA, 616 bp, Homo sapiens
aaacacaaaatgttcctcacatgtcacttgacttgaactgttcccatcagcaagaaaaattactgcaagaatgaaaggagttcacttttctctgtgactgttccaaagaagcggaagagcattttaagtttctccggtttccttgatgaatgtccctcaaacaacctaaaggacttaaaaaataagagaatggaagatgagttaaaatgccttaatgattcagaaaactacatccatattgctaccaagtaacaaaaagaaataattgttccagaagacaattctgtaatgataagaactagaaaattggtttagattcaaatggcatctggagagaactgaaatcaactagaaccagccttcttyaaagctgttcaaatcagacagcatttgctaccaaccacatttctccaacctatcttccaccacagagaaggcaccatctagccctcccagtcaattggggtcagtcagtgcacagctactttctcaatggctaataacatttataattcataatgttactacgtagtttgataagtaacaataacagtatctgaaaaaaatccttatctgagtgtttttgaggaaatgagagtggaggggaatgggggaa

SEQ ID NO: 506622 - DNA, 580 bp, Homo sapiens
tgacgctggaaaatttgacaaagtactaagggactccaatgaagcagacacctgtgtgtgtggagaaagacagctagaatcaaggaagacttcacacagcattctgagccttttttttttctttttctgttgttggagacaagttcttactctrtcacccagggtggagtgcaatggtgtgatcgagactcactgcaacctcaaactcctgggctcgagggatcttctcacctaagcttcttgagtagctgggactacaggcacatatcaccatacctgtccaattttttgtagagtcaaggttatctatggttcccaggctggtcttaaactcctggccttgaacaattcccccattttggccttccaaagtgctgggattacagatgtgagctattatgcccagcctactttctgagtcttaaaagatgaaaataaatttttcagaatagtaggggaaaacatttgcgatgtaaaaaatggggtgcacactaattaaggtataaacaacaataattttgcaaattattagtaactgccaactcaattagtgtcttgttaaaaagatactgttatgaag

SEQ ID NO: 506623 - DNA, 580 bp, Homo sapiens
tgacgctggaaaatttgacaaagtactaagggactccaatgaagcagacacctgtgtgtgtggagaaagacagctagaatcaaggaagacttcacacagcattctgagccttttttttttctttttctgttgttggagacaagttcttactctgtcacccagggtggagtgcaatggtgtgatcgagactcactgcaacctcaaactcctgggctcgagggatcttctcacctaagcttcttgagtagctgggactacaggcacatatcaccatacctgtccaattttttgtagagtcaaggttatctatggttcccaggctggtcttaaactcctggccttgarcaattcccccattttggccttccaaagtgctgggattacagatgtgagctattatgcccagcctactttctgagtcttaaaagatgaaaataaatttttcagaatagtaggggaaaacatttgcgatgtaaaaaatggggtgcacactaattaaggtataaacaacaataattttgcaaattattagtaactgccaactcaattagtgtcttgttaaaaagatactgttatgaag

SEQ ID NO: 506624 - DNA, 424 bp, Homo sapiens
ttcctcttcctacccctccagccgcgcggcaatcgcaatctccactgmcaccaccaaccatagcgaggcgagctgcgccgctgtgccgtgtctcaagcctccagcatacggccggtgactccttttcctggtcctctaagctgggcactgagcagctcaacagtaaaacaccgaaccctaaaaaaaaaaaaccgtaacagcttttcagcatcatttatatacggaggttatgcgcatgccggttcctagacttcatgttctgattgcatgagagcaagtcttaagataaccaatcacagcatgaaaataaagtccaatcagagtaggcctagaggtttttctctcatccaatcagaacatgtagtccaggatccgtaacttcagtatataaagcgtgctgaggaagtggtgcgtcatttttggg

SEQ ID NO: 506625 - DNA, 533 bp, Homo sapiens
ctgctaggtacctgggttagagaactagaagggtccattagtttttacccgctggagcctggagcctggagcctggggcgctgcctccctgttggtkgtgttggtgacggagcggtaggagggaggctagcagcgggagcttctcctgccgggctggaagacgaggagaaggaagagacaccgctgcatgctggaggctggagccagagcctgcgcctccgtggcttacctcgctgcagctgttggtgacatcagagaccacagctcggctacagtggtagcaatgtggttgcagtgagccaagattgcatcactgctctgcagcctggcgacagagcaagacaccatcttaaaaaaaaaaaattgaacacagtgttttgcatctgtttcagaaaaacaaatgataccattatttaatatgctgcagtaactagaagcctacttataaagttggtggcaaataagtcattggtatatgttaacttcctataatcacttacatgttcctaagagtcactttgtgtatttatata

SEQ ID NO: 506626 - DNA, 533 bp, Homo sapiens
ctgctaggtacctgggttagagaactagaagggtccattagtttttacccgctggagcctggagcctggagcctggggcgctgcctccctgttggttgtgttggtgacggagcggtaggagggaggctagcagcgggagcttctcctgccgggctggaagacgaggagaaggaagagacaccgctgcatgctggaggctggagccagagcctgcgcctccgtggcttacctcgctgcagytgttggtgacatcagagaccacagctcggctacagtggtagcaatgtggttgcagtgagccaagattgcatcactgctctgcagcctggcgacagagcaagacaccatcttaaaaaaaaaaaattgaacacagtgttttgcatctgtttcagaaaaacaaatgataccattatttaatatgctgcagtaactagaagcctacttataaagttggtggcaaataagtcattggtatatgttaacttcctataatcacttacatgttcctaagagtcactttgtgtatttatata

SEQ ID NO: 506627 - DNA, 533 bp, Homo sapiens
ctgctaggtacctgggttagagaactagaagggtccattagtttttacccgctggagcctggagcctggagcctggggcgctgcctccctgttggttgtgttggtgacggagcggtaggagggaggctagcagcgggagcttctcctgccgggctggaagacgaggagaaggaagagacaccgctgcatgctggaggctggagccagagcctgcgcctccgtggcttacctcgctgcagctgktggtgacatcagagaccacagctcggctacagtggtagcaatgtggttgcagtgagccaagattgcatcactgctctgcagcctggcgacagagcaagacaccatcttaaaaaaaaaaaattgaacacagtgttttgcatctgtttcagaaaaacaaatgataccattatttaatatgctgcagtaactagaagcctacttataaagttggtggcaaataagtcattggtatatgttaacttcctataatcacttacatgttcctaagagtcactttgtgtatttatata

SEQ ID NO: 506628 - DNA, 436 bp, Homo sapiens
ttacaacttttctaacttatgttcctttgatggagtttatcctcattgccccaccccccaaatggtttactaataaagtatagtctaaaacaggaacattattctttttatattctttaatctccattgaaataaacacaatttgtagaattattaactaatagaaattaattgaaaagaagcatctttcttttatatgaacaaygacacagttcaaatttatcttgaaaacagttttaagcacaagtaattaccctgaatttgtaaataacccatttataagtaggtcaataagaaaacatttcaacaaatttcaaatgtgatatcatttctagatcttatgaaataatggaacatgttttggaagataagagaagtttacttagccaataataacaggtctcaatcaattattttttaacagctagtttatccc

SEQ ID NO: 506629 - DNA, 583 bp, Homo sapiens
gttgcatgcagtcttatattccatagactaaatgtctagggtaattcagacttataacctaagtttatgttacaacttttctaacttatgttcctttgatggagtttatcctcattgccccaccccccaaatggtttactaataaagtatagtctaaaacaggaacattattctttttatattctttaatctccattgaaataaacacaatttgtagaattattaactaatagaaattaattgaaaagaagcatctttcttttatatgaacaatgacayagttcaaatttatcttgaaaacagttttaagcacaagtaattaccctgaatttgtaaataacccatttataagtaggtcaataagaaaacatttcaacaaatttcaaatgtgatatcatttctagatcttatgaaataatggaacatgttttggaagataagagaagtttacttagccaataataacaggtctcaatcaattattttttaacagctagtttatccctggatataccttactatatcctgtttttagatatggcatttgaaaacctccaagaatatagagataattttaattgag

SEQ ID NO: 506630 - DNA, 436 bp, Homo sapiens
ttacaacttttctaacttatgttcctttgatggagtttatcctcattgccccaccccccaaatggtttactaataaagtatagtctaaaacaggaacattattctttttatattctttaatctccattgaaataaacacaatttgtagaattattaactaatagaaattaattgaaaagaagcatctttcttttatatgaacaatgacacagttcaaatttatcttgaaaacagttttaagcacaagtaattaccctgaatwtgtaaataacccatttataagtaggtcaataagaaaacatttcaacaaatttcaaatgtgatatcatttctagatcttatgaaataatggaacatgttttggaagataagagaagtttacttagccaataataacaggtctcaatcaattattttttaacagctagtttatccc

SEQ ID NO: 506631 - DNA, 436 bp, Homo sapiens
ttacaacttttctaacttatgttcctttgatggagtttatcctcattgccccaccccccaaatggtttactaataaagtatagtctaaaacaggaacattattctttttatattctttaatctccattgaaataaacacaatttgtagaattattaactaatagaaattaattgaaaagaagcatctttcttttatatgaacaatgacacagttcaaatttatcttgaaaacagttttaagcacaagtaattaccctgaatttgtaaataacccatttataagtaggtcaataagaaaacatttcaacaaatttcaaaygtgatatcatttctagatcttatgaaataatggaacatgttttggaagataagagaagtttacttagccaataataacaggtctcaatcaattattttttaacagctagtttatccc

SEQ ID NO: 506632 - DNA, 436 bp, Homo sapiens
ttacaacttttctaacttatgttcctttgatggagtttatcctcattgccccaccccccaaatggtttactaataaagtatagtctaaaacaggaacattattctttttatattctttaatctccattgaaataaacacaatttgtagaattattaactaatagaaattaattgaaaagaagcatctttcttttatatgaacaatgacacagttcaaatttatcttgaaaacagttttaagcacaagtaattaccctgaatttgtaaataacccatttataagtaggtcaataagaaaacatttcaacaaatttcaaatgtgatatcatttctagatcttatgaaataatggaacatgttttggaagataagagaagtttacttagccaataataacaggtctcaatcaatkattttttaacagctagtttatccc

SEQ ID NO: 506633 - DNA, 311 bp, Homo sapiens
tggccctgtcatacttacatataattgatgacatatcccctttgctttgtagggcctcctgcaaaacatccttccttgaaggtaattaattatgtatatttttgaatcactaactccatgttgtataaaatatatatgatttatgaatcrttttcttttaaaacccattcagcctagcactgaagtggaagatcctgctgtgaaaggagcagtacaaagaaagaatgtacagacattgagagcaggtacatttaatggaatactggaaataagtacattcaatgattggaagtactcacattattcttatt

SEQ ID NO: 506634 - DNA, 623 bp, Homo sapiens
taacacacagccaaatcttatcattctgtccctgcctacccagatttcatgtccttctcactttgcaaaatgaaatgatacattacctgccatttccccaagccactatgctttttttacagcctgcagaactataagccaattaaacccctttttgttatgaacacacaaaaaattagtactgtgaagttaagctatgaaatgccttcagtgacttttccccatcgtcttggataagacccccaaggtcttaactcattccagcatttactcaaatgtctgaagcccaaagtctcaactgagacaaagctgcagtctcttctgcccctgagcctctgaaatacaaagcaggttaaccacttccaaggtacgattgtccaggcatttagtaagaatctccacccaaaaggaagatttttgccagagagaagaacaaaacacaaacaggacttacaagtcccacraaattctgaaactcagcaggccacttattcaaacctacagctccaaagtcatcctttttaaatccttgtcccacatccagggcacaagggcatgagggtgggctcccaaggccttgggcagctctgcacctgtggctttgcagtgttcagcccccgcag

SEQ ID NO: 506635 - DNA, 133 bp, Homo sapiens
gaacctgactgccacattccccaaagggaccagaytcctcggcacactagctgaggtttctataggcacagagaaaacactgtcccaactgttgcaatggagctgggaaaaataatgtttgttctcaatgctt

SEQ ID NO: 506636 - DNA, 428 bp, Homo sapiens
ttgcaatggagctgggaaaaataatgtttgttctcaatgcttagacttaccaattgcttcattttatcacatgaaggctgtgtggcactttgaagtagaattagtaatttacataattacaaatcatgtttttttctttttttttagatggagtcttgctctctcgcccaggctggagtgcagtcgcgccatctcggctcactgcaagttccacctcccgggttcatgccagtctcctgcctcagcctcccaagtagctgggactataggcgccaaycatcatgcccagctaattttttgtgtttttattagagacggggtttcaccaagttagccaggatggtctggatctcctgacctcgtgatctgcccgcctcggcctcccaaagtgctgggattacaggcataagccactgcgcctggctaca

SEQ ID NO: 506637 - DNA, 574 bp, Homo sapiens
acaggcatgcaccatcacgcctggttaatttttctgcttttgttttgttttgttttgttttgttttggttttggttttttttagagacagggtttcaccacgttggccaggctgatcttgaactcctgacctcaggtgatctaccgacctyggcctccaaaactgctgggattacaggtgagtctccacgcctggtgaagtaaatattttaaataaactacaatgacaaaattatgatgataaagtcttaccatccattggtattaagagtctctgcttctagaactggttatttgcagcaaaatacatgttattcaattagatgaagtgccttatataaactcttcatggacaactcataaaccacacaaaaattcctttgcaatacacattttgagaacataaatttaaatttctatatttccacaatttatatttttaaatcagatacgatgttgcccaggctgttctcaaactcctgggttcaagcaatcttcctgcctcaaattcccaagtagcagggactacaggtgtacaccaccacactcagttatttttctacaatttttatttt

SEQ ID NO: 506638 - DNA, 443 bp, Homo sapiens
gattacaggcatgcaccatcacgcctggttaatttttctgcttttgttttgttttgttttgttttgttttggttttggttttttttagagacagggtttcaccacgttggccaggctgatcttgaactcctgacctcaggtgatctaccgacctcggcctccaaaactgctgggattacaggtgagtctccacrcctggtgaagtaaatattttaaataaactacaatgacaaaattatgatgataaagtcttaccatccattggtattaagagtctctgcttctagaactggttatttgcagcaaaatacatgttattcaattagatgaagtgccttatataaactcttcatggacaactcataaaccacacaaaaattcctttgcaatacacattttgagaacataaatttaaatttctatatttccacaatttatatttt

SEQ ID NO: 506639 - DNA, 443 bp, Homo sapiens
gattacaggcatgcaccatcacgcctggttaatttttctgcttttgttttgttttgttttgttttgttttggttttggttttttttagagacagggtttcaccacgttggccaggctgatcttgaactcctgacctcaggtgatctaccgacctcggcctccaaaactgctgggattacaggtgagtctccacgcctggtgaagtaaatattttaaataaactacaatgacaaaattatgakgataaagtcttaccatccattggtattaagagtctctgcttctagaactggttatttgcagcaaaatacatgttattcaattagatgaagtgccttatataaactcttcatggacaactcataaaccacacaaaaattcctttgcaatacacattttgagaacataaatttaaatttctatatttccacaatttatatttt

SEQ ID NO: 506640 - DNA, 574 bp, Homo sapiens
acaggcatgcaccatcacgcctggttaatttttctgcttttgttttgttttgttttgttttgttttggttttggttttttttagagacagggtttcaccacgttggccaggctgatcttgaactcctgacctcaggtgatctaccgacctcggcctccaaaactgctgggattacaggtgagtctccacgcctggtgaagtaaatattttaaataaactacaatgacaaaattatgatgataaagtcttaccatccattggtattaagagwctctgcttctagaactggttatttgcagcaaaatacatgttattcaattagatgaagtgccttatataaactcttcatggacaactcataaaccacacaaaaattcctttgcaatacacattttgagaacataaatttaaatttctatatttccacaatttatatttttaaatcagatacgatgttgcccaggctgttctcaaactcctgggttcaagcaatcttcctgcctcaaattcccaagtagcagggactacaggtgtacaccaccacactcagttatttttctacaatttttatttt

SEQ ID NO: 506641 - DNA, 574 bp, Homo sapiens
acaggcatgcaccatcacgcctggttaatttttctgcttttgttttgttttgttttgttttgttttggttttggttttttttagagacagggtttcaccacgttggccaggctgatcttgaactcctgacctcaggtgatctaccgacctcggcctccaaaactgctgggattacaggtgagtctccacgcctggtgaagtaaatattttaaataaactacaatgacaaaattatgatgataaagtcttaccatccattggtattaagagtctctgcttctagaactggttatttgcagcaaaatacatgttattcaattagatgaagtgccttatataaactcttcatrgacaactcataaaccacacaaaaattcctttgcaatacacattttgagaacataaatttaaatttctatatttccacaatttatatttttaaatcagatacgatgttgcccaggctgttctcaaactcctgggttcaagcaatcttcctgcctcaaattcccaagtagcagggactacaggtgtacaccaccacactcagttatttttctacaatttttatttt

SEQ ID NO: 506642 - DNA, 284 bp, Homo sapiens
cgttatacatattggtaggtaattaatgcagtaagaactcttccctttgtatttattagatgcaaagaagaataaatttattaaaatttggtatctacaagtgaactgcagtatgcaagtcatcttagccaaaccctatgaggttgagtaaaaatggtattgttagcagaacaggtgtgatgagtcamcagtgtcaaagagcatgatttctggaccaaaatatgaggcgccattaaaacagagtacacagtagtaccccttatccactatacgtgcagaaagac

SEQ ID NO: 506643 - DNA, 482 bp, Homo sapiens
taattctaaacagggatttaacacaatatgaaaactagactattcatgtaatcaaaataaaagacaatttttattctaatkttaactcagaaattattttgcttatttaatttaacaattttactgaaaggttaatgagataaataggacagattataattacctaacattgctatggtaacttatatacaaatagctgttcatcaccaaaagtcaaaaaagtaacaagcactgcaacttaagatggatcatacaacagaaattagtaccaagttaccttatcttataatattatgttattaaaatgaaattttaaaacaacaccaaaaattaagttggggttacaagtgttgtgcagaaaagatttcatatagcaggcaagaggctgccatccttagaaaggcctgcatgcaaggctggcccttggctggtgtttaggaaattggaaatgggagggtttccaccattccctgagaagagtg

SEQ ID NO: 506644 - DNA, 482 bp, Homo sapiens
taattctaaacagggatttaacacaatatgaaaactagactattcatgtaatcaaaataaaagacaatttttattctaatgttaactcagaaattattttgctyatttaatttaacaattttactgaaaggttaatgagataaataggacagattataattacctaacattgctatggtaacttatatacaaatagctgttcatcaccaaaagtcaaaaaagtaacaagcactgcaacttaagatggatcatacaacagaaattagtaccaagttaccttatcttataatattatgttattaaaatgaaattttaaaacaacaccaaaaattaagttggggttacaagtgttgtgcagaaaagatttcatatagcaggcaagaggctgccatccttagaaaggcctgcatgcaaggctggcccttggctggtgtttaggaaattggaaatgggagggtttccaccattccctgagaagagtg

SEQ ID NO: 506645 - DNA, 482 bp, Homo sapiens
taattctaaacagggatttaacacaatatgaaaactagactattcatgtaatcaaaataaaagacaatttttattctaatgttaactcagaaattattttgcttatttaatttaacaattttactgaaaggttaatgagataaataggacagattataattacctaacattgctatggtaacttatatacaaatagctgttcatcaccaaaagycaaaaaagtaacaagcactgcaacttaagatggatcatacaacagaaattagtaccaagttaccttatcttataatattatgttattaaaatgaaattttaaaacaacaccaaaaattaagttggggttacaagtgttgtgcagaaaagatttcatatagcaggcaagaggctgccatccttagaaaggcctgcatgcaaggctggcccttggctggtgtttaggaaattggaaatgggagggtttccaccattccctgagaagagtg

SEQ ID NO: 506646 - DNA, 482 bp, Homo sapiens
taattctaaacagggatttaacacaatatgaaaactagactattcatgtaatcaaaataaaagacaatttttattctaatgttaactcagaaattattttgcttatttaatttaacaattttactgaaaggttaatgagataaataggacagattataattacctaacattgctatggtaacttatatacaaatagctgttcatcaccaaaagtcaaaaaagtaacmagcactgcaacttaagatggatcatacaacagaaattagtaccaagttaccttatcttataatattatgttattaaaatgaaattttaaaacaacaccaaaaattaagttggggttacaagtgttgtgcagaaaagatttcatatagcaggcaagaggctgccatccttagaaaggcctgcatgcaaggctggcccttggctggtgtttaggaaattggaaatgggagggtttccaccattccctgagaagagtg

SEQ ID NO: 506647 - DNA, 618 bp, Homo sapiens
gacattctattccctctccctgggaacatgaagccctcttcttgtctatatgaaaaactcttgttatcttttaatctcaaagtcttcctcaacgcccccagcccttctgtgcagttaatcaatcattggctccttggacacctctgcacccggrttgcgtgctgtgctgtgctgtgctgtgctgtgctgcgttacccactcatgcagtgctggtctccctcacaagactatgagattccatgagcaggaatttggttcttggatgtttttatcatctttgcccttccctatgcccagcacccacccctgaccccaccaacctcagctctgagtgctctgctcacactgttcacaggaatggggacttgcaagagccacagccgggctacagggacggatgacatggctggctcttaagccctcctagtcctcacccccaacccactgtctacatctcaggggaaaagggatgttctctgcttctttccttttctccttggcctgcactatggtgaattagtttctttcactctagcttcccatctgtacaaagaggaagagactggcctgccactgccaggacccggtccagctttggtggccctacagggccatgaa

SEQ ID NO: 506648 - DNA, 618 bp, Homo sapiens
gacattctattccctctccctgggaacatgaagccctcttcttgtctatatgaaaaactcttgttatcttttaatctcaaagtcttcctcaacgcccccagcccttctgtgcagttaatcaatcattggctccttggacacctctgcacccgggttgcgtgctgtgctgtgctgtgctgtgctgtgctgcgttacccactcatgcagtgctggtctccctcacargactatgagattccatgagcaggaatttggttcttggatgtttttatcatctttgcccttccctatgcccagcacccacccctgaccccaccaacctcagctctgagtgctctgctcacactgttcacaggaatggggacttgcaagagccacagccgggctacagggacggatgacatggctggctcttaagccctcctagtcctcacccccaacccactgtctacatctcaggggaaaagggatgttctctgcttctttccttttctccttggcctgcactatggtgaattagtttctttcactctagcttcccatctgtacaaagaggaagagactggcctgccactgccaggacccggtccagctttggtggccctacagggccatgaa

SEQ ID NO: 506649 - DNA, 618 bp, Homo sapiens
gacattctattccctctccctgggaacatgaagccctcttcttgtctatatgaaaaactcttgttatcttttaatctcaaagtcttcctcaacgcccccagcccttctgtgcagttaatcaatcattggctccttggacacctctgcacccgggttgcgtgctgtgctgtgctgtgctgtgctgtgctgcgttacccactcatgcagtgctggtctccctcacaagactatgagattccatgagcaggaatttggttcttggatgtttttatcatctttgcccttccctatgcccagcacccacccctgaccccaccaacctcagctctgagtgctctgctcacactgttcacaggaatggggacttgcaagagccacagccgggctacagggacggatgacatggctggctcttaagccctcctagtcctcacccccaacccackgtctacatctcaggggaaaagggatgttctctgcttctttccttttctccttggcctgcactatggtgaattagtttctttcactctagcttcccatctgtacaaagaggaagagactggcctgccactgccaggacccggtccagctttggtggccctacagggccatgaa

SEQ ID NO: 506650 - DNA, 565 bp, Homo sapiens
ttttactttcagcataaaaataaatggcctttgaaactttttagagtactagataaatagtatgtttgcatttgggagtcctgttataaaaaatgtatcttataacttgagtcacactaaattatgtgagattctcacattataaagggtaaggaagtgaatcagaagcattgaaaagggattgtgtgtaacatgttatctcttgcaaaaggaaattaaattttgggaccccaaactgatttagccaaagggaaaagtcacgctgggactggtcacgcaaatctgcctcccccttttggttcctaaataagattgctgcaagatgaaaagctacatctctcccccrtattttgcccacaaggaaattcttagtgtgctgttaaaacttcatggcaatgcaaattgatagcttatctttacaggtggccaccccagcccgccagacacaaatgcctatctgattgttcccctaccccattttgtctgttatcttatgaaaaatgcagactcccacattcttcctctgcccattttatgtcatcttatgtaaaaaatgcagattcac

SEQ ID NO: 506651 - DNA, 661 bp, Homo sapiens
tacagctactttctaagtgctgaggaatatacctcttgctgcttcaaataagatgaaggaaaaccaataccagagtaagctcccatttgcatggcttgccacagctctagattaaggtttcaaaaatawaagtctcagaaatcaatatgagaaatactgagaaagcatcatttattggtgttttaggatcagcaatattagctgcaagataatttccacatatttgtcaaacttactcaatatatttagggttctaatttttcaatccttacagccaggacttaaagcagaaaggataacatattttgaaagattttttttttcaacgctgaaaggaagttttattatcttaacttgacccaaattataatattatttataaaagttatataaatgcagactgatggttttgtaagagtcgaaaagccaaatataagtaaagcactagaaatacattcagttataaaaagttgacattcttctaaatgttatgtggaatcataggaagaaacatcattgtaattattattcaaagtaatgttaaagataacataagagacgtttggtcttaaatgtcaatttgaatgtgcagtgtctacaataatagatcagagagaatatacagagtatatctgtaattaaaacaggaaaaaatgagtta

SEQ ID NO: 506652 - DNA, 614 bp, Homo sapiens
gtgcactgcacatccaggtagctccatttacagcactacaatgcaaagggcgcccctagggttgtgcactgtggcagcctaaattcatggatcttatttttaaatctccatggaattttctctgttcacttatggcctctttatcataatatacacttttcattttatgagtacgttatcttgaataattcacattcttcataatccttttaaagttcccttattttccctaaattgtccccattttctctggggtcagttctgtttgttcattctcattttatgctgctcaccctcttcacgagcctggtgagcactggctctccattcacatttctgcagaatggtctataggtcaagcttgttcaacccccgcmgcccgcagcccgtaggatgcatgcagcccaggatggcttcgaatgcagcccaacacaaattcatcaactttcttaaaacattatgagatttttttttttgcaattatctttttttagctcatcagctattgttagtgctagtgtctttcatgtgtggcccaagacaacttttcttccaatgtgggccagggaagccaaaagataggacatccttggtaggttaatcaatgaagagag

SEQ ID NO: 506653 - DNA, 614 bp, Homo sapiens
gtgcactgcacatccaggtagctccatttacagcactacaatgcaaagggcgcccctagggttgtgcactgtggcagcctaaattcatggatcttatttttaaatctccatggaattttctctgttcacttatggcctctttatcataatatacacttttcattttatgagtacgttatcttgaataattcacattcttcataatccttttaaagttcccttattttccctaaattgtccccattttctctggggtcagttctgtttgttcattctcattttatgctgctcaccctcttcacgagcctggtgagcactggctctccattcacatttctgcagaatggtctataggtcaagcttgttcaacccccgccgyccgcagcccgtaggatgcatgcagcccaggatggcttcgaatgcagcccaacacaaattcatcaactttcttaaaacattatgagatttttttttttgcaattatctttttttagctcatcagctattgttagtgctagtgtctttcatgtgtggcccaagacaacttttcttccaatgtgggccagggaagccaaaagataggacatccttggtaggttaatcaatgaagagag

SEQ ID NO: 506654 - DNA, 161 bp, Homo sapiens
ctttcattgtttcacctttactcctacgacagtaattttccaaaacaggtatcttgtcattcctcctgttgttatcagtaaataagtgaaatgaaragctagattatgtaatttatctagaacaagaaagtagaattgaatctatattcattaatgagact

SEQ ID NO: 506655 - DNA, 613 bp, Homo sapiens
caagaatacaggtcctgcaagatcatatgacccaagctgcagggctgttcacaatggarcctggacatgctgtggagccctgtcctgccctgcactcttcaaaccctgtggtcttcctatctccctgacttgtcttgtggcttacttgtgttatgttgcttagggtttcttgagtttcatgagtttgtatttttataactgtatagatatagatggatatatatagatatggtcaaagaggaagagtaagagagaagaaaaagaattttacaaaagactttactggacatgtagaaaaaaatatcaaactccacctctatttccagcactttggaaggccacggtgggtgaatcagaaggtcaggagatcgagacaatcctggctaacacggtgaaaccccgtctctactaaaaatatacaaaaaaaattagccaggcgtggtggtgggagcctgtagtcccagctactcaggaggctgaggcaggagaatggcgtgaacccaggagtcagagcttgcagtgagccgagatcttgccactgcactccagcctgggtgatagagcgagaatctatctccaaaaaaaaaaaaaaaaaatcaaactccatagtgag

SEQ ID NO: 506656 - DNA, 613 bp, Homo sapiens
caagaatacaggtcctgcaagatcatatgacccaagctgcagggctgttcacaatggaacctggacatgctgtggagccctgtcctgccctgcactcttcaaaccctgtggtcttcctatctccctgacttgtcttgtggcttacttgtgttatgttgcttagggtttcttgagtttyatgagtttgtatttttataactgtatagatatagatggatatatatagatatggtcaaagaggaagagtaagagagaagaaaaagaattttacaaaagactttactggacatgtagaaaaaaatatcaaactccacctctatttccagcactttggaaggccacggtgggtgaatcagaaggtcaggagatcgagacaatcctggctaacacggtgaaaccccgtctctactaaaaatatacaaaaaaaattagccaggcgtggtggtgggagcctgtagtcccagctactcaggaggctgaggcaggagaatggcgtgaacccaggagtcagagcttgcagtgagccgagatcttgccactgcactccagcctgggtgatagagcgagaatctatctccaaaaaaaaaaaaaaaaaatcaaactccatagtgag

SEQ ID NO: 506657 - DNA, 282 bp, Homo sapiens
cttttataatttattagattctaaaacattaatttgcttccatccattatatttgttcacaaatccyacaatagtatgttttggaagacctgtaatagacacagtaactggcatattcataaaggaaatttccttatgtaggatagtttttaggggaaatgcctgaaacaaaaaaatctgcatctgcttatcataattcgctgcataaaagatctaaatgtgtaactggcaatcagctttagctttgattatctttcatagcagcatggatcaattttgttt

SEQ ID NO: 506658 - DNA, 446 bp, Homo sapiens
gtagctgtttcctacaggaaatgggatagcgattctgatattgatagagaataaatgtatattggaactagacagttaagcaaatggatgacaaatgacaggagcctggtttctcactattaaagtgggaggttacawgtaagcaaggggagaaggccagaatgatcatgtgataaaagaattgagtcgtagacatcagtatgaactaacacttatacacattacatttagaaatatttatagttatgtgtatacacagctttgtatacacacatttatttctttgctctgtaaactaagacggtctagaaccaatgatatcacagcagaaatgagcatatctaacactcaagtcttcaattcgtgggtttttgttcatgatccgggatccaggagttgggccctggggctgggcattgtgtagcctccgggatggtgctgagcat

SEQ ID NO: 506659 - DNA, 446 bp, Homo sapiens
gtagctgtttcctacaggaaatgggatagcgattctgatattgatagagaataaatgtatattggaactagacagttaagcaaatggatgacaaatgacaggagcctggtttctcactattaaagtgggaggttacatgtaagcaaggggagaaggccagaatgatcatgtgataaaagaattgagtcgtagacatcagtatgaactaacacttatacacattacatttagaaatatttatagttatgtgtatacacagctttgtatacacacatttatttctttgctctgtaaactaagacggtctagaaccaatgatatcacagcagaaatgagcatatctaacactcaagtcttcaattcktgggtttttgttcatgatccgggatccaggagttgggccctggggctgggcattgtgtagcctccgggatggtgctgagcat

SEQ ID NO: 506660 - DNA, 498 bp, Homo sapiens
ttatgctgttaacagtgagaatttgtcagtggtggcaaaattgctgtcctgtggtrcagacattaaagtgaagaacaaggtagacattaaccaatgttattttcaaaatatttgaaatccatttgttttaacattaacatatgtaaattgttttatatttggaagctcaaacattcctatttttctatgaaaatagtttgacaaaacttaattgtctaggattttgctttaaatattaatatttttacaagaactattagtatggcttttctgtgcattatgataaatatttaaatttgttaaaggtaaaacattttcaaatattctttcccacccaagtttttttttttctttccagttagtgtaaaactacaagaaagtaaaatttgcctgcataaattgagtcaacatgtaaaatttaggagacatgcagaaatctggatttcctcttaaaggattgaatcttgtgtctcttgagcccgtatgactgtttggtat

SEQ ID NO: 506661 - DNA, 498 bp, Homo sapiens
ttatgctgttaacagtgagaatttgtcagtggtggcaaaattgctgtcctgtggtacagacattraagtgaagaacaaggtagacattaaccaatgttattttcaaaatatttgaaatccatttgttttaacattaacatatgtaaattgttttatatttggaagctcaaacattcctatttttctatgaaaatagtttgacaaaacttaattgtctaggattttgctttaaatattaatatttttacaagaactattagtatggcttttctgtgcattatgataaatatttaaatttgttaaaggtaaaacattttcaaatattctttcccacccaagtttttttttttctttccagttagtgtaaaactacaagaaagtaaaatttgcctgcataaattgagtcaacatgtaaaatttaggagacatgcagaaatctggatttcctcttaaaggattgaatcttgtgtctcttgagcccgtatgactgtttggtat

SEQ ID NO: 506662 - DNA, 498 bp, Homo sapiens
ttatgctgttaacagtgagaatttgtcagtggtggcaaaattgctgtcctgtggtacagacattaaagtgaagaacaaggtagacattaaccaatgttattttcaaaatatttgaaatccrtttgttttaacattaacatatgtaaattgttttatatttggaagctcaaacattcctatttttctatgaaaatagtttgacaaaacttaattgtctaggattttgctttaaatattaatatttttacaagaactattagtatggcttttctgtgcattatgataaatatttaaatttgttaaaggtaaaacattttcaaatattctttcccacccaagtttttttttttctttccagttagtgtaaaactacaagaaagtaaaatttgcctgcataaattgagtcaacatgtaaaatttaggagacatgcagaaatctggatttcctcttaaaggattgaatcttgtgtctcttgagcccgtatgactgtttggtat

SEQ ID NO: 506663 - DNA, 579 bp, Homo sapiens
ataaagagctgtaactcactcgccttatattgggaggggcataaaataaagtactcaccttgttttaaaaagttattttggcacacttttaaatatatttaggagaaaaatatttttgagaagtacaatattttatattaaaacattgattgtttccaacatgaatattgttaaatagtgatttattccaggaaaccatgaaaaggtgtcaacaaaatagtaaaaaaattgtatcctgcaagctcaatttttagtgaggctaagagatagacattatttacaaacacgaaaataaatgtgtcttttatgtccctgctgacagacaatgccatttctgaaatattctatgctttctttgtatcacagaggttggaagtctgtaaactatttttcctagaatcccctattatttttgtttcagtggaaactcttctagtgagaggcctgcatgtgagatatggaaggcagagcagaatttttccagacagaaaaaggaagatatgaatgccracctcagcatgggaccttttcatctcttctgcaaactcccctagaaatttcttaagtcactcctaaagg

SEQ ID NO: 506664 - DNA, 559 bp, Homo sapiens
atcaagtcaaacttgaccaacttcacaagctctccaaagatcaggtttttcagtagggattgccaagtatctatacgtcctcatttaggtgtgcgacagtcatgtttaatgtcaaaatctaatgtcaaaagaccatagaatgtgagaactgatagaaacttgaaataattcatattttcatcttgcaaataaataagaaattggggcccagtaatgatcaataaactgtcttaaaccatgcagagaactcttatctcagactgttggccttgaatcttgtcaaagggtcctcasacttacctgttcctcttttttgctatctcccctatagttcagggcttcatcacctggtacttgatttactgcaatggcctatttcttgatatttcttcttcttgcagtgttttgtaatgggagtatcaattggcattttaggtaggaaagttcttcattgtgggaaactgtcttctgcattgctggacatttttttccaccttgacaccaaggtaataaatgattttcttattgctcctacctcggcatatggcccccccacctt

SEQ ID NO: 506665 - DNA, 438 bp, Homo sapiens
tgaatttttcaccaactttgtttctttcagagctggagtccaccatttatatccaagcaacaaaacgactgcagcatttgaacagcagaaaattgagagtaggaaaattgaattctgaagctgaargacaaagtacagaatcaaaggccttttcttgtaaatgagttatgttcaatcttgctttctcatttatcttctctttgttgttgtcagactattttcccaactagatatccatactgggaagttttgctttaaggcaatttgatatctagagataaaaacaacatacaacttgcagaagtggtgggttttcttagaaattaaaagaattatttgttgcaatggcttttaaaaatcctgtggcaaggatcttatattagtacaaacagtccccaacatataaatggattgtgggccaaaagtttatttgtgagt

SEQ ID NO: 506666 - DNA, 637 bp, Homo sapiens
tctgaaagcattctaaggaacagtttttcacttatctgattcctttgaaaataggggtatcttatgtgatatctgctatcccagagtctttggtcctctgttccttctcaagtcttggctcccgtgtactacttcaaagccctatagatattttattctaaagaaaagaaacttggttcctttaagttgtttaaacatttctttctgggtataaacttgggtttgtgtctgggagctctgttaaaaaaaaaaagtctttagtaagccaaagctgttagaagcttataagtaagtgacattacaattgacygtcagtaaatagtggaaagattgcatgactagctactccttcagatctgagacaacctggagctagatttttgtactctctactcagaaaagcatatagtgacttggggtttgatgctgtacaaaaatgacatgcttatgcacaactttaactttctgcaacacttttacaacttcttgtgaatgaagtaggcagggctcgcatttgacagatgagctatgtccagcgtgaggcagagttaaaacccttttcctggctcaggaacttcaggctggggcctgtgtctgctctccctgcatccctgtcctctagcagatacctctctgc

SEQ ID NO: 506667 - DNA, 596 bp, Homo sapiens
ttttttaaatctgctaacctgaagattacacttctcaggtcgtaccactggcaaattgcacaactatgggaatttggtttgcttttaaagagcaatttttraaaagtatgtcagtaatgaaaataacttatatttcttaatgtgtttatgtgtgtccatacaagccaatactttttcttctttaaaaagaaccctataatttctgtggtaattatttaaatattatgagcattcaaatctcctaatcaccttttcaatcttcaattgataagaatcgaagtttggtaagactggagtcatccctcagccaattgtgtaaacaagacagtacagaatgtctttctggcaagtaatttttttcaacctgaaacagataatataaataatatgtcccataaaagaattacttaagatgataattactttagaggtaattatctggtgcatgaacctctatctgtgaaaatggtctagtctatctcttattggaaataatcagttggaaatctccctttttcattggtcagtccattctaggaaagattcatttctagaaagttcttatactgaatcaacattttcttccatccacttgc

SEQ ID NO: 506668 - DNA, 534 bp, Homo sapiens
tacaacaacaacaacaacaaaatccagtgactagtgtctttcttagaagaggagaggacacagagcgatacagagagcataagaggggatgtcttgtaaagatggaagcagagcttggaatgatgcagctacaaaccactgaacacctagggctgccaggagccgccagaactaggaagaggcaaggaaggagttcttccccagagccttcccagggagcatggtcytgctgacactttgattttggactctggcttccagagctttgagagaataaatttctgttgttttaagccacccggtttgtgatttgttacagcagccctggggagctaatacagtaggtaatgatcattactatttttgaagatgagaaaactcaggctaaagaagttaagtaacttgcccaaggtcttgtagttaatttaacaccagagatgggattcaaccccaggcagactccagagctgtctttctttcttagtcattagatgatacatagcaggtgcatataaatcctattttttcccaggt

SEQ ID NO: 506669 - DNA, 534 bp, Homo sapiens
tacaacaacaacaacaacaaaatccagtgactagtgtctttcttagaagaggagaggacacagagcgatacagagagcataagaggggatgtcttgtaaagatggaagcagagcttggaatgatgcagctacaaaccactgaacacctagggctgccaggagccgccagaactaggaagaggcaaggaaggagttcttccccagagccttcccagggagcatggtcttgctgacactttgattttggactctggcttccagagctttgagagaataaatttctgttgttttaagccacccggtttgtgatttgttacrgcagccctggggagctaatacagtaggtaatgatcattactatttttgaagatgagaaaactcaggctaaagaagttaagtaacttgcccaaggtcttgtagttaatttaacaccagagatgggattcaaccccaggcagactccagagctgtctttctttcttagtcattagatgatacatagcaggtgcatataaatcctattttttcccaggt

SEQ ID NO: 506670 - DNA, 608 bp, Homo sapiens
ctatgggtctaagtgttacctccagactgaagcatagaagagtagatatgaggcyctcattctctcttcactctttgaggcaagcgttgaggtggaggctttatcagatctaagctgtctggattgccagggagagctgtcccagagaggcatgggaatttcatgagaacaagaaacaaatgtggccgggcatggtggctcatgcctgtaatctcagcactttgggaggctgaggtggatggattgcttgaggccaggagtttgagaccagcctagtcaacatagcaagacccatctgtacaaaaaataaatagattagtcaggtgtggtggcatgcacctgtggtcccaagctactcgtggggctgaggtaggaggatcgcttgagccggggaagttggggtgaggacgctggggagtgctggtgatttcgggtgtgtggacaggtgaaaaatcctgaagggggatcaggaagctgtgggaaaggtgagagcaacagagcacccacacttctcctcctccgggcctctccgacagcacccaggccgcccctgctggtggcagcaagaactcccaggcagtcttcccttgttctcccaaaatcaacag

SEQ ID NO: 506671 - DNA, 608 bp, Homo sapiens
ctatgggtctaagtgttacctccagactgaagcatagaagagtagatatgaggccctcattctctcttcactctttgaggcaagcgttgaggtggaggctttatcagatctaagctgtctggattgccagggagagctgtcccagagaggcatgggaatttcrtgagaacaagaaacaaatgtggccgggcatggtggctcatgcctgtaatctcagcactttgggaggctgaggtggatggattgcttgaggccaggagtttgagaccagcctagtcaacatagcaagacccatctgtacaaaaaataaatagattagtcaggtgtggtggcatgcacctgtggtcccaagctactcgtggggctgaggtaggaggatcgcttgagccggggaagttggggtgaggacgctggggagtgctggtgatttcgggtgtgtggacaggtgaaaaatcctgaagggggatcaggaagctgtgggaaaggtgagagcaacagagcacccacacttctcctcctccgggcctctccgacagcacccaggccgcccctgctggtggcagcaagaactcccaggcagtcttcccttgttctcccaaaatcaacag

SEQ ID NO: 506672 - DNA, 608 bp, Homo sapiens
ctatgggtctaagtgttacctccagactgaagcatagaagagtagatatgaggccctcattctctcttcactctttgaggcaagcgttgaggtggaggctttatcagatctaagctgtctggattgccagggagagctgtcccagagaggcatgggaatttcatgagaacaagaaacaaatgtggccgggcatggtggctcatgcctgtaatctcagcactttgggaggctgaggtggatggattgcttgaggccaggagtttgagaccagcctagtcaacatagcaagacccatctgtacaaaaaataaatagattagtcaggtgtggtggcatgcacctgtggtcccaagctactcgtggggctgaggtaggaggatcgcttgagccggggaagttggggtgaggacgctggggagtgctggtgatttcgggtgtgtggacaggtgaaaaatcctgaagggggatcaggaagctstgggaaaggtgagagcaacagagcacccacacttctcctcctccgggcctctccgacagcacccaggccgcccctgctggtggcagcaagaactcccaggcagtcttcccttgttctcccaaaatcaacag

SEQ ID NO: 506673 - DNA, 570 bp, Homo sapiens
tgctaaacaatggcagtatcatagacagcaactggaactgaccctctgccccccaagcctggtccacttgctcagtcatcagcactagggttctggccggctcaaccatcctgaaaacatacagcagagtccgggggtcaaacagtagccaaggtggattcattgtacaaaggtgagtggctgagaagggaaccaataacactcttagcctcagcaagcctcaggcaacaagggctacctgtcccatatgctctgaagttcaggttcaagagatgccttccgggccactcagccagggcaactgggcccaagctctgcagtatstcctcttcccctccagccttgactacggaggcctagaatccaattccaaggcactccacagtgctgccttataaatgggtaaggagattcccatttacacatgctgcaaaccccaggccagcagaattggttttgccataatgccttgcccagcaagctgaaggacaccactgtatgtgagaaatagagagagaggaaggaaaataacccaatagccccgacacttggaatttcaaagaccacatg

SEQ ID NO: 506674 - DNA, 601 bp, Homo sapiens
tcaaaattttggggtcatagattatctctgttcttcaaaatggtattttcaacatagttaaaagtaccatagccttctttaatttcttcttcctgatgtaatattatttttacccaaatctctttgaaaaccatgtgaatgtgcaattaaagaagataaagactgggcatagttgctcttgcctgtaatcccagcactttgggaggtcgaggtgggaggattgcttgagtccaggagttcaagaccagcctgatcaacatagtgagacccccatctctacaaaaaaawttttttttaattagctgggtgcagctatttaggaggctgaggtgggaaggatcacttcaactgaggacattgaggctacagtgagccatgattatgccacagcactcaacctgggtgacagagaaagactctgtctctaagcaaataaagatacaaataaaaaagtgaagacaaagacaaattctctccaagtctactaaaaaatttgttgtgagatactaggaatttttaacattccattcctactgtacaatgggaaactctccaaattgcaaaagatcacagattttaactgctcctaactgccaaacag

SEQ ID NO: 506675 - DNA, 598 bp, Homo sapiens
agttagcataaacagaatatgctttccctaygcacagcaagtctacttcaagctctgaaaatactctcactgattgtctggagatcaactgatgcgcacggcgggggtaagagaacctgatctaatagaaggtaattttagcaatagtctccaagaatttattacagtagcaagcagccatgaatgggccatgtttcattagatcctgatataactttgaaataacactaaaaccaggaatacagattcctattgtgttaataagaaaacataatgccactgctaaaccaaaagataaggatccttaactatccaaaggaagttatagcattttctgctcttaaataagatttcctgtaaaacttgttctaatactatgtttccatgtcatagagaagttgactcatgaccaaaaaagacatttgccattcatttcccaaaatattctcaaatattgatcagctatagcatcacctaaaagtcttgaaataatgtatttaatagttctctcattcatttaatacattacttgctatagctgctggctgaatagcacttttcaacagcatcataagaaatattatttctgctgttatat

SEQ ID NO: 506676 - DNA, 585 bp, Homo sapiens
tgaggtgcaggaacttggagccgccagcagggtgggtgcggcgacagagtcgcttgccaggtctgggaagcgggcgccactcccgctttccaccccacacccctgaagtacggccccactgtgcgttcaggcccacctcccttcactctgtgcgcaactgcagcacccctgggtccaactctgccttgagacccctccatgccagaccgtgctcttcccccgcctgcaggtaggtcagcccggccccacctgagtggatcccagggttgggcttccagggcagcaggccccaggtaccgttcgccttggagtccacctgaggatccacagcctgcaaccccacctgcacccacacccgtgccccaccacagccggtcccggctgccaaagtggcagtgactactttggatggcccgctgctgccatcaatttgaatggtttatattttgccgtccttgttgagaagaaaaacatggatgtatagatatacagtgatggatggactagcagcttaagaatcattttggggacattttwtaaaaaattttttgagacagagtcttgttccatctcccaggctggagt

SEQ ID NO: 506677 - DNA, 597 bp, Homo sapiens
atatacagtgatggatggactagcagcttaagaatcattttggggacatttttwaaaaaattttttgagacagagtcttgttccatctcccaggctggagttcagtggggcaatcgtggctcactgcagccttgacctcatgggctcaggtgatcctcctgccttagccacccaagtagctgggactacaggcgggtgccaccactcccagctaatatttaaatttttatagagacagggtcttgctttgttgtgcaagctggtctccaactcccaggctctcacagtcctcctggcttgacctcccaaagtgccaccacacccaggctattttgaggacgtttctcttttcagaaaagttataagtattttgaccctgcatgaaagtttggaatgatggaatcatataaacaaaaacaacagaaagcctcaaaagatttttttaaaccaaacaaaaattattggaaccagcttttacctcaagcagtgaatgagctacacagaaagttgatttttcttttattaatgattgctagtaatgagaattttacactttattcttctcaacctccctccaggtcagttttggttgttaca

SEQ ID NO: 506678 - DNA, 536 bp, Homo sapiens
ctttttcttcgtggctggtgatttttgtagctagcttaagaaatctyggtcaaatctactgttaggtatattttctcttaccttcttgatgcttttattgtttttcctttcatgttgctatctttaattgcttcactttttttcatatagatgtgttataccagttattgaaatgaccatcaatttctgccttgcttctgtgttacctttgttgtacataaatcaagggtttgtgttcattttagattctctgctctgcctcaatggtcttttatccttgtccacaatactgaaatgtcttcaatactttcagccttataaaaagtcataatttctggagggtaagtgatatttttttaaaaaaatggtcatcaaaattttcttgactattgttggcactttgcattcccatagaagttttaaaatcaatgtgtcgggttcttcccttctccccacccagtaaactggcttgcattttgattggaattattaagtctttcaatcaatttggagagatttgggaagttaataccttg

SEQ ID NO: 506679 - DNA, 567 bp, Homo sapiens
agggtttcccttctgcccttctcaatggaaagatctgtcccaggaccatttattccaacattttcaattatgagaaatctgggaagataaagttattttcacatttctcaagaaatacatacttattcatactcatgacaggaaagtcagaatctacagaaaaccaagaagatttttaaaaatccatgataccaccatcaaaagagccacacttagtatgttggtccacaggtttcctagcacccttttctgttggtgtatgcacaaaatacacaatcacattctgtctacatttwacaatttgccattttttgattaacactatatattgaccaatttttaagacctgcaacatatgtcgacaacattatttcagaataatatatttataaataaacgcacacacaaactgtctgtcttatatacaacacgtcttactttctaattctccactctggaagatttaggttttcctaactttttaatatactcaccaggaatcagtaaactttttttataaaaggccaaagggtagatattttaaactctgcaggccataggtttctg

SEQ ID NO: 506680 - DNA, 643 bp, Homo sapiens
cacgtagggcagggacaatcaaccctatttacagatgggcaaactgagactgacccttagaagagtgcacaagcaagggtgcaccccggggcgtccagcctcccccaggccctccagaggcctgtgccagtcctgcttcagcttgctcaccctgggcccctccccacaccccagtcccagctycccacgacccagccccagctccccacgccccaggaccccggctcttccgggaaaggcaccacatccccgtccctgcaaagctggatttacacagagaaagaactggggactgggggagccaccatggctcagggcctcccatctgcacttccaatgcctgagggatacacccctaagtggacccctaagcagacccccaatcctggagagatgggggggtcttcgctccggggggcactggtcatccccaccttcagcttccggtggcacatttgatgctagggaaactccagactggcagcctgcaggccctggtgagtgcccaggcccagcgcagacacccctgttgctcaggggagaggccctggaaaagcctgaacgggactctccccaggcaaggtccacatcccaggcagggctggggtttgacgctggttttctgagtgacacggcgggggcc

SEQ ID NO: 506681 - DNA, 599 bp, Homo sapiens
ttggtggcgcacacctgtagtctcagctacttgggaggctgaggtgggaggattgctcaaacccagggaggttgaggcttcagtgagctatgatggcactgctgtactccaacctgggcaacagagtgaggccctgtctcaaaacaaaaacaaagacaaaacaacattcataatagtagcaatagctactatgtgccaagcccaggcacctcttcgagtctttgctgkcaccctatcaggtaagcgtgcttagaagttacacgaagcacacggctcagtgtttggcccatggtaagggcctaaaaagggatagccccagtggtggggatgctgctgctgctgaccattaaccccagtctgctccaccttcttccaggcagtctgtgagatgtttgatgtccgaggcaaacagcacattcagatccccaagctctacacctccagtgtgaccaggcacctgcaccacttcaggctcatgcaggactcacagcctttggacctcagctaaaggacttgcttctcttcagcacacggggcttgtttgtgttggggtctgagccctgagcccatggtcaaggagacccccaggtctttctgaa

SEQ ID NO: 506682 - DNA, 378 bp, Homo sapiens
ccagcagctctgtctgaaatcataayggcggaaccaagggccctctacgtccaggtccgttgggaggcggggcatggagttccactgcaggaatctccaggaaccctgaggtcctccctgagccagggccgggctgggcacaccctgagtgcccacagggtaggtgtcttcccggacagccccaccaggacagggtgtggaagaacgaggtgcccgtggcggggaagctgaccaaatgggccgcgggaaccgggctggtgggcctggaggggcctgcctgtcccccttgcagagggtcttcccgccacgtgaagccggcacaggcctggatgccgacgacccttgctcgggtttggctgaaaggaaaacagacgcggt

SEQ ID NO: 506683 - DNA, 378 bp, Homo sapiens
ccagcagctctgtctgaaatcataatggcggaaccaagggccctctacgtccaggtccgttgggaggcggggcatggagttccactgcaggaatctccaggaaccctgaggtcctccctgagccagggccgggctgggcacaccctgagtgcccacagggtaggtgtcttcccggacagccccaccaggacagggtgtggaagaacgaggtgcccgtggcggggaagctgaccaaatgggccgcgggaaccgggctggtgggcctggaggggcctgcctgtcccccttgcagagggtcttcccgccacgtgaagcyggcacaggcctggatgccgacgacccttgctcgggtttggctgaaaggaaaacagacgcggt

SEQ ID NO: 506684 - DNA, 478 bp, Homo sapiens
tgggcaaaggtccgcggccctggagaacgccacggcggggtccacggacaccagaggaggaaccgccaaggtttttccaaaggacaagcggcccggcccggcggtcctcctagttcttcggcccgcgcgccacccgggaggccgaaccggccccagcccggggccccctctccaacccgccccagccccgaccctccgctgcggggccctcacggagcggccggccagcggggagcgactaggctgccggctgcaaggygtgtctccccgggacgcagctccgcccttcccaggaacacaagcggctgcccgcgcctgagctcccaaagggctggcgggcagggagcgggcgccgcgccggctccccggagcccagccccggaaacgggacacccacagcgggtgcccccaaacttcccacctctctggtccggtctggggaggggtcggggccggggccggtgggcagggcgcggag

SEQ ID NO: 506685 - DNA, 454 bp, Homo sapiens
atccctcacattactgcatgagccctgmcacctgtcagatgagtggtgccattagattctcataggagcatgaaccctactgtgaactgcgcatgccagggatctagattgcgtgctcctaatgagaacctaatgcctgatgatctctgactgtctcccatcacccccaagtgggaccacgtaattacaggaaaacaagctcagggctcccactgattctatgttatggtgagttgtgtaattatttcattatatattacagtgaaataatcatagaaataaagcacacaataaatgtaatgggctcgaatgatctctgcaccatcccttccccttctcccaggtccgtggaagagttgtcttcaagaaaactgctctctggtgccaaaaagtttggggaccgctggtgtaaatgtttctaagaatagttaagcaacttaagcttcacgtgcta

SEQ ID NO: 506686 - DNA, 562 bp, Homo sapiens
gaaggttaatttcactcaaatataaagaccacgttttaaaaaatcaataacaagaataagaataacactgaaattwaaaatggacaaatatgaataaattacagaaaaaggaaacataaatggtttttaaaatataatgaagagattctttttttttttacaattaactaaactttttttaaaattaactaaagttggtatttcactaggacgatttagcagatgaaatgggttttaagtttagaacaccatttcttcttccttattacatttccctttttaatgttagccctctacaaacacacacgtatatacacacacacacacacacacactctgcatcaaaaaagccttcctacattaatacttgagcatgataaccttacaatgaaaggtaaatcattagttgaatcatgaaacattttcttccccttgtggagaaaaatcaaattgcttttcctctgctcttacaccacaatcatcaacacagtagacttctgtgaccaaatgtgtggggatttctccccaccaacaagaagcaatcagttctgcagaagatacc

SEQ ID NO: 506687 - DNA, 562 bp, Homo sapiens
gaaggttaatttcactcaaatataaagaccacgttttaaaaaatcaataacaagaataagaataacactgaaatttaaaatggacaaatatgaataaattacagaaaaaggaaacataaatggtttttaaaatataatgaagagattctttttttttttacaattaactaaactttttttwaaattaactaaagttggtatttcactaggacgatttagcagatgaaatgggttttaagtttagaacaccatttcttcttccttattacatttccctttttaatgttagccctctacaaacacacacgtatatacacacacacacacacacacactctgcatcaaaaaagccttcctacattaatacttgagcatgataaccttacaatgaaaggtaaatcattagttgaatcatgaaacattttcttccccttgtggagaaaaatcaaattgcttttcctctgctcttacaccacaatcatcaacacagtagacttctgtgaccaaatgtgtggggatttctccccaccaacaagaagcaatcagttctgcagaagatacc

SEQ ID NO: 506688 - DNA, 670 bp, Homo sapiens
ctggtctctggtctcagcctccaggaagaactgtggctatgtcaccatcctcagctcatcttgctccyttgatccctgcctctgcttgctcggctcctggcctccttggaggaaaatgcctgtgtcaatgggagcatgatggagggttccaggttgaggtgggatgggggataaagacatgtttgcatgaacatgtcctaaaggaacatgtacataaggaaatggactcccatctggagagtgagctgggggaggtgggcactgcaaggagtaggaaaataggccggatgcctagaagttgctccataatccatagttcctttcgagtgtcctgctttgtctgttctggcttttgcccccacccggaaacctggagaaacctcaactggaacgtcaagtaagcagattccagctctctgggcccagggtgagaaaaggaagttgtatgaaaagaggagaaaggaaaaaaacagtctcatattgtgcaacaggtgaagtcccacattgccccttcgaggattccattctgctgtttgtaattcctggtaagcatttcttcatgaggctgccctggcctcctgcagccttccctggtggccttgcctctgtggagctgagctcctccctttccattagctgaggggcagggaggattgggaaagggactcca

SEQ ID NO: 506689 - DNA, 670 bp, Homo sapiens
ctggtctctggtctcagcctccaggaagaactgtggctatgtcaccatcctcagctcatcttgctcccttgatccctgcctctgcttgctcggctcctggcctccttggaggaaaatgcctgtrtcaatgggagcatgatggagggttccaggttgaggtgggatgggggataaagacatgtttgcatgaacatgtcctaaaggaacatgtacataaggaaatggactcccatctggagagtgagctgggggaggtgggcactgcaaggagtaggaaaataggccggatgcctagaagttgctccataatccatagttcctttcgagtgtcctgctttgtctgttctggcttttgcccccacccggaaacctggagaaacctcaactggaacgtcaagtaagcagattccagctctctgggcccagggtgagaaaaggaagttgtatgaaaagaggagaaaggaaaaaaacagtctcatattgtgcaacaggtgaagtcccacattgccccttcgaggattccattctgctgtttgtaattcctggtaagcatttcttcatgaggctgccctggcctcctgcagccttccctggtggccttgcctctgtggagctgagctcctccctttccattagctgaggggcagggaggattgggaaagggactcca

SEQ ID NO: 506690 - DNA, 616 bp, Homo sapiens
ccagggtttcccttctgcccttctcaatggaaagatctgtcccaggaccatttattccaacattttcaattatgagaaatctgggaagataaagttattttcacatttctcaagaaatacatacttattcatactcatgacaggaaagtcagaatctacagaaaaccaagaagatttttaaaaatccatgataccaccatcaaaagagccacacttagtatgttggtccacaggtttcctagcacccttttctgttggtgtatgcacaaaatacacaatcacattctgtctacatttwacaatttgccattttttgattaacactatatattgaccaatttttaagacctgcaacatatgtcgacaacattatttcagaataatatatttataaataaacgcacacacaaactgtctgtcttatatacaacacgtcttactttctaattctccactctggaagatttaggttttcctaactttttaatatactcaccaggaatcagtaaactttttttataaaaggccaaagggtagatattttaaactctgcaggccataggtttctgttgcaacactcaactctgctgttgcagggaaagaagccatacacaat

SEQ ID NO: 506691 - DNA, 415 bp, Homo sapiens
acggctgacccccaaagcccaaatcagacgcctstcatccccatcagcagagggcatctcatcctccccgtggccaccctctgtgtcctggagccacgccctccggctctgattctgtgcagctgactctcccctccctgagagtcctcctgccctccagctgcccgggctcctgctgccatcggtgcccacgaatgggccgaccaagcccaggtggcagcatctccccatcccctgttccctggcccgaccccactaccaggagatgaccgggaagcccagcgcccacccagttccggccaccctgtcgtggcctgaaagtcaggcttgccctttttgcaccctggcccaggaggcctccaggggaacctccagccaggctccagggaatgttcccgccccacctccccagggt

SEQ ID NO: 506692 - DNA, 415 bp, Homo sapiens
acggctgacccccaaagcccaaatcagacgcctgtcatccccatcagcagagggcatctcatcctccccrtggccaccctctgtgtcctggagccacgccctccggctctgattctgtgcagctgactctcccctccctgagagtcctcctgccctccagctgcccgggctcctgctgccatcggtgcccacgaatgggccgaccaagcccaggtggcagcatctccccatcccctgttccctggcccgaccccactaccaggagatgaccgggaagcccagcgcccacccagttccggccaccctgtcgtggcctgaaagtcaggcttgccctttttgcaccctggcccaggaggcctccaggggaacctccagccaggctccagggaatgttcccgccccacctccccagggt

SEQ ID NO: 506693 - DNA, 600 bp, Homo sapiens
ggctgggggcttctcaggatttcacagcccaaatggcgggaccgtccaggggctccaagaccaacaggagcatgtggtagccacgtcacaayccaagaccatggggcatcaggtgagtttatggtcccctcagctcttcccagaggccctgcctcccgtggggctgtaggagcaggggggctggagcccctcgtggggctggtgactggctgagtcccagccagggcctgacctgggacgtcgggttctccatgggctgggagttggtttcctttcctgccctggaggagacagaggcacagggatgggggcccagctcccgcagagcagggcaaagggcagtgtgtccaccgggagtgtgggaaggtgacagtgttgtggggagctctggacaccgcccagtgttctgcactaggggaagggtcttcagaggccctggaagagggaggtttttagggcagcccagtggcctgagcacctctgttgcttccatcaggacaagaaagatctatgtgggcagtgttccccgttaggctgcctcatccggatattgattgacggggtaaggaggcatagggagaccctggctcagggaccttc

SEQ ID NO: 506694 - DNA, 424 bp, Homo sapiens
ccacatcttgggggaaggctctgatttcatgatgggctgggggcttctcaggatttcacagcccaaatggcgggaccgtccaggggctccaagaccaacaggagcatgtggtagccacgtcacaacccaagaccatgkggcatcaggtgagtttatggtcccctcagctcttcccagaggccctgcctcccgtggggctgtaggagcaggggggctggagcccctcgtggggctggtgactggctgagtcccagccagggcctgacctgggacgtcgggttctccatgggctgggagttggtttcctttcctgccctggaggagacagaggcacagggatgggggcccagctcccgcagagcagggcaaagggcagtgtgtccaccgggagtgtgggaaggtgacagtgttgtggggagctctg

SEQ ID NO: 506695 - DNA, 600 bp, Homo sapiens
ggctgggggcttctcaggatttcacagcccaaatggcgggaccgtccaggggctccaagaccaacaggagcatgtggtagccacgtcacaacccaagaccatggggcatcaggtgagtttatggtcccctcagctcttcccagaggccctgcctcccgtggggctgtaggagcaggggggckggagcccctcgtggggctggtgactggctgagtcccagccagggcctgacctgggacgtcgggttctccatgggctgggagttggtttcctttcctgccctggaggagacagaggcacagggatgggggcccagctcccgcagagcagggcaaagggcagtgtgtccaccgggagtgtgggaaggtgacagtgttgtggggagctctggacaccgcccagtgttctgcactaggggaagggtcttcagaggccctggaagagggaggtttttagggcagcccagtggcctgagcacctctgttgcttccatcaggacaagaaagatctatgtgggcagtgttccccgttaggctgcctcatccggatattgattgacggggtaaggaggcatagggagaccctggctcagggaccttc

SEQ ID NO: 506696 - DNA, 600 bp, Homo sapiens
ggctgggggcttctcaggatttcacagcccaaatggcgggaccgtccaggggctccaagaccaacaggagcatgtggtagccacgtcacaacccaagaccatggggcatcaggtgagtttatggtcccctcagctcttcccagaggccctgcctcccgtggggctgtaggagcaggggggctggrgcccctcgtggggctggtgactggctgagtcccagccagggcctgacctgggacgtcgggttctccatgggctgggagttggtttcctttcctgccctggaggagacagaggcacagggatgggggcccagctcccgcagagcagggcaaagggcagtgtgtccaccgggagtgtgggaaggtgacagtgttgtggggagctctggacaccgcccagtgttctgcactaggggaagggtcttcagaggccctggaagagggaggtttttagggcagcccagtggcctgagcacctctgttgcttccatcaggacaagaaagatctatgtgggcagtgttccccgttaggctgcctcatccggatattgattgacggggtaaggaggcatagggagaccctggctcagggaccttc

SEQ ID NO: 506697 - DNA, 424 bp, Homo sapiens
ccacatcttgggggaaggctctgatttcatgatgggctgggggcttctcaggatttcacagcccaaatggcgggaccgtccaggggctccaagaccaacaggagcatgtggtagccacgtcacaacccaagaccatggggcatcaggtgagtttatggtcccctcagctcttcccagaggccctgcctcccgtggggctgtaggagcaggggggctggagcccctcgtggggctggtgactggctgagtcccagccagggcctgacctgggacgtcgggttctccatgggctgggagttggtttcctttcctgccctggaggagacagaggcacagggatgggggcccagctcccgcagagcagkgcaaagggcagtgtgtccaccgggagtgtgggaaggtgacagtgttgtggggagctctg

SEQ ID NO: 506698 - DNA, 424 bp, Homo sapiens
ccacatcttgggggaaggctctgatttcatgatgggctgggggcttctcaggatttcacagcccaaatggcgggaccgtccaggggctccaagaccaacaggagcatgtggtagccacgtcacaacccaagaccatggggcatcaggtgagtttatggtcccctcagctcttcccagaggccctgcctcccgtggggctgtaggagcaggggggctggagcccctcgtggggctggtgactggctgagtcccagccagggcctgacctgggacgtcgggttctccatgggctgggagttggtttcctttcctgccctggaggagacagaggcacagggatgggggcccagctcccgcagagcagggcaaagggcagygtgtccaccgggagtgtgggaaggtgacagtgttgtggggagctctg

SEQ ID NO: 506699 - DNA, 619 bp, Homo sapiens
tgaattctgccagtaacgaggatgagctgggaagtgaattttcccccagaacctccaggtgaggactcagcctggctgaccacataacctcagcactgtgtcccagagcagaaagcccactgtgccacactgcactaracttctgacccacagacctgtaagcaacaggtgggtttgttttaagccactaagtttgtggcagtgggttatgcagacacggaaaacgaatacaatggagaagtaatatgaatatgttaaggttaatgcaaatagattaaaaatctacatgaactattgccgttgtatagaacttaaaataaaaagatgtttttatagggaggaaaattttatcacagactttgtttagaattgccaaagcacagtgataattaaaagtggacttttagtcagttttattattactctaaaattctttatggacagtggccccaactccctacagctgagggctgctccctttgctctgcccttggtaagctcctggaacccaaagagaggaagaaccttctagcccaggcagctattttgtagcagagcagaaacctaatccgaggccctttgactcccagcccttcctttattaggtggcccttcatta

SEQ ID NO: 506700 - DNA, 548 bp, Homo sapiens
attcagcttcttgttaccccatgtgtcttgcaacacaaatgctggcgtattgctctgaagaaacagtgtactaagaaaaatgaggaagaggctgcaaaatacgctgaacttttggccaagagaatgaaggaggccaaagacaaactccaggaacagattgccaagagatgcacactgtcctctctgtgagattcaacttctgagtccagccaaaattaggattcttttaagtaaccaataaataagactagactcccaaaaataaaataaaataaaattgaggaactcgagagtttttgtgtatgtgycctccatctaatgctatttactttatgatatggtttggctgtgtccccacctaaatctcatcttgaattgtagctcccgtaatttccacgtgttggaattatgggagggatccagtgggagataaatgaatcataggggcagtttcccccatactgttcttgaggtagtgataagtctcatgagatctgatgttttataagggctttcccctttctctcttgcctgccgccatgtgagac

SEQ ID NO: 506701 - DNA, 593 bp, Homo sapiens
cctcccaattaatgaacgatttttagcttttccgcgttaaaatagggagtgaagaatacacatgatttttgaaatgccacagcaataaatttccaaatcagtttagtttggaagagaaatcagtgtgcaygtgatctaacttccagcactcagcactaagcctttatgagaagacctcgggaaaggtccaacacactggtgtgagcagttaactggaaaccactggttaaagggaaagaaaactgcagccacagggagatgtggatactggccaaggaaagagtgagagaaagacgcttgtcagaaacttctggcatccaatgtcagcatcagccatctaaacaagatatttctgtctctgttggccatgagtaaatattcgggttagctagcagctattcatgagcttattgttagttaagagttagaaacttagacatggcatgtgtttgtaaacacatgtgcggtcatagtttacatcatctctttaaatagaatcgtgttccctatctgaactatgcagccatgaaggctgggaaagcaatccttttttattctgcacttcaagtaacaatctgaaaaaaaaaaaaatt

SEQ ID NO: 506702 - DNA, 459 bp, Homo sapiens
tgttatctttagaaagcttataggaaaaatgtccaattacctgtcttccatgtcatttactttctatctcataattgtcattactttatattttagtgctatatttagggagaatttcttgggtcaatcttacacttttactgaatccatccttccattcagcccaattatgtaagtttttatttcatcaatcattaacccatttatgcctgaggttgcaatttttttgaatttttgcaatcaaaaaacaaccttgagcagtaggatataaataattcccacatgcttagcgttccaataatggaacactaggcataaatgggttttaataggtattggaactaggattcaaatctagaacccatgctattaaacactatgctgctagtatatrgtatcaagactttttttctttaagccaattagagtctttgtcttctaatggaggaattttaacct

SEQ ID NO: 506703 - DNA, 551 bp, Homo sapiens
gctccccatcactgactttactgcctgagctctgcctcttgtcagatcagcagcagaattagattctcacagaagtgtgaaccctattgtgaactgcgcatgcgagggatctaggttgcttgctcctcgtgagaatctgatgcctgatgatctgtctctgtctcccatcacctccagatgggaccatctagttgcagaaaaacaagctcaaggctcccactgattctatattatggtgagttgtataattatttcattatatattgcaatgtaataataatagaaatgaagtgcacaataaatgttatgtgtttgaatcctcctgaaaccatctcccctccccaccagttcatggaaaaattgtcttccatgtaaccgatccttggggccaaaaagttgtggaccactaacttaaaagatacgtaaactctgtaggccttctcagttcatgttgggagtacaaatcagaaaatacaactttttggaggaaaatttggcgttatctaccaatgtcaartgttcatgtccctagactcataaattccacgtct

SEQ ID NO: 506704 - DNA, 517 bp, Homo sapiens
gctcagtggcaggcttgggccgtctctcagtaccatctaagacttctgtctaggttcctgtttttttagactcctgaactgccattctgattagacacaattttaatggaatttttggatttaatratagttgataatcaccttatgtatttgcacaatctctttataattaaaaactcgctaagcttcacttgctactatctactatatagaattagagacattccattggattctaagcatcagacactcctggatctcaaaatgaccttttctaaataagcacaagatttatttttgtcctagcactgttgataacactctgaaatatgttattgaactggaattgtttctttatgcttgcattccaaaaccaactgaaacagattgtagtttcactttaaattctaggcctgttctatattatgtgaaggaattctctgtaacgctgatactatgttgctaatttgtgtacttacagacactttagaaaatgtttagactgcaacatgcacta

SEQ ID NO: 506705 - DNA, 540 bp, Homo sapiens
ctccagggaggggccaggcacgatggcacacacmtgtaatctcagcactttgggaggccaaggcgggaggatcgcttgaggccaggagtttgagaccaccctgggcaacatagtgagaccgcacctctacttttatttaaaaaaaaaaaaattctgttttttaaacccaggagggctgggcatggtggctcatacctgtaatcccagcattttgggaggccaaggtgggtggatcacctgaggtcaggagttcgagaccagcctggccaacatgaggaaaccccatctctactaaaaatacaaaaattagccaggcatggtggtgcatgcctataatcccagctatttgggaggttgaggcaggagaattgcttgaacctgggaggcagaggttacagtgagccgagattgtaccattgcactccagcctgggcgacaagaatgaaattcagtcttaacaacaacaacatccaggaggataagcaaatttgtgagcagtctccttctaagatgggggtttctgaggttcaatgttcttca

SEQ ID NO: 506706 - DNA, 560 bp, Homo sapiens
gccaccaaaaatctgagtgatgccaatgcatgtagttctggcattctttccctctcccagcagtgcccggcaatccaggtaaaggcctatagaatgtgggttactaccctggtcccaggttgaggtataagrcaacagggcttgggtcttgagagtgctggcaagcatggctgaagcaatggacctggagcctgcactaaaaggttagggctgtgtggccaagaggttggctaaggaagaagaaagagtcctgcagggtgaggatcctaatgaggttagggggaacaaaagcaagaccagtgacctggcatccttgagcatgagaatttggagccataagagatggtggcattggcatattagtgtctacaatgaaggacatggtccaggatgtggccatggaaagtgaaatgtagtggaagtgaggatgactagagtgcagaaagtcagaaaggctttgggcctatggtattgaatgatctagagccactgggaagtccccagataaaggcaacaagtagggaaaaggacagaataggccaatggcatgaaccttaaag

SEQ ID NO: 506707 - DNA, 670 bp, Homo sapiens
cccagaggtacataagcaaacccagccaggatttgcaggtctgcgtagcaaggcttccaatgaacagcagatgcaggagctggagtaggaagtgattgttgttttaagtctctcaatttttaggtggtttgctatccagcaatagcaatgaggtcatgctctctgagacttacgatgattacctgagcaactagaaacaaaagcactttgcaaatgtacagccatgggaacttggagagtggactgaacaggctctggagtctgaaaacctgagttacaattcaccctcactctcagctcactctagacttgggcaaataatttcactttyctgggtcttactataaagttacagagctgacttgcggattcaaaacataagagcttcagaggatgccaaaaaattaatatgagtcctagaacttcattggcagaggtgaggaagggatgaggaaggtaggagggagtttagagggaattttgagtataaaatattatagcctgtagtcccagctacttggggggctgaggtgggagaattgcctgagctcaggaggctgaggctgcagggagccaagatcgtgccactgcactgcagcctgagtgacaaagtgagaccctgtctcaaaaataaataaaataaaatactatactcaaataaaaggggcag

SEQ ID NO: 506708 - DNA, 575 bp, Homo sapiens
tgggtgggtggacaagcaggcgcgaaggaagacacaggaccaagcttctcctccacccctgccccggctgaccctgctgccttgttctctgtgctcgggatcagaggacttgccctggctgctctggctgctgcacgcacatctctccggaaccccgtctcaacatcccaaagctaaatatcacttagtcctcacaaatgggacccttccacttccagatgtggggggccaaaaggggagcttagatccagggattgcaaactgatggttcagtgcaatctgacagatcaagccttggattattgaggagaaaactatcatgtatgaagcatctactccatgcaagccaacacacaaggcctgcagactgatyacatttcagttccttttcagtcttttgagagaggtgttattatccccactgctcaaatgaggaaagtgagacacagccaggattccagctgtttccttaatgccaaggccattctctgattaccacaccttgacacctcaaggttggagtcttctgagacttacaatagaatgctcctttttttttttgagacggagttttg

SEQ ID NO: 506709 - DNA, 382 bp, Homo sapiens
attgtatttttcacatatttttggcaatttaagttctgttttcttttttttgtttttgttttttgttttttgagactgagtctcgctctgtcccccaggctggagtgcagtggcgggatcttggctcactgcaagctctgcctcccgggttcacgccattctcccgcctcagcctcccgagcagctgggactacaggcactcrccactatgcctggctaattttttgtattagtagagacggggtttcaccgtgttagccaggatggtctcgatctcctgacctcgtgatccgcccgtctcggcctcccacagtgctgggattacaggcgtgagccaccgcgcccggcccactaaggagctattatttaatatctgatttag

SEQ ID NO: 506710 - DNA, 634 bp, Homo sapiens
tcatagaccacaggatgtcattcagaaaatgaaaatgtgtcattttatcttttcaaactgtcaaataaaggcagctagttaacagagaaccacttagctcgtgttaactgatgtagaaagctgcctcgccatggatgtaacgctgtggctgtcactggtgtgccgagcgttttcacgaggcactcccctctcattttctgtcatttcactctagagtcactgccaattcccttctcaatggagagcttctggtgttctgtccattgtcactataaccagaattgctgggtgactgcggactcccccccactcataagccctagttcagatcagaaaagcaaaaatgtttttcaagtgaaattcaaccttgagcattttggaaaaacaaacagttcatttcagtgagtcatctcccttcccattggcagggttgtccagaacagtagattgtgccrccagctgcacctgaggccacagggcttcccatttgtgtcttgctggcttcagtcttgctcatcatatccatggttgacttttgcaggtgtgaaagctgtggagccgttttccattctgaatgcaaagaaaagtctgtcccctgcccgaggtgtgttcgccgagagctgcagaagaagca

SEQ ID NO: 506711 - DNA, 634 bp, Homo sapiens
tcatagaccacaggatgtcattcagaaaatgaaaatgtgtcattttatcttttcaaactgtcaaataaaggcagctagttaacagagaaccacttagctcgtgttaactgatgtagaaagctgcctcgccatggatgtaacgctgtggctgtcactggtgtgccgagcgttttcacgaggcactcccctctcattttctgtcatttcactctagagtcactgccaattcccttctcaatggagagcttctggtgttctgtccattgtcactataaccagaattgctgggtgactgcggactcccccccactcataagccctagttcagatcagaaaagcaaaaatgtttttcaagtgaaattcaaccttgagcattttggaaaaacaaacagttcatttcagtgagtcatctcccttcccattggcagggttgtccagaacagtagattgtgccaccagctgcacctgaggccacagggcttcccatttgtgtcttgctgscttcagtcttgctcatcatatccatggttgacttttgcaggtgtgaaagctgtggagccgttttccattctgaatgcaaagaaaagtctgtcccctgcccgaggtgtgttcgccgagagctgcagaagaagca

SEQ ID NO: 506712 - DNA, 584 bp, Homo sapiens
ctgcagtgcccttggaagagcacgtggcagtcactgtgaccaaaacggcaggtaggacagccctgggaccctgacagctcccattccttccccttaactctccctagagcaagaaaaatatgtttataatggaacagttctcagtagactttatgagaagattctgtagctttcgcrctgagcagatgccttctatgtcttcatggtttagtagttttgctgctattaggatcagtggctcacaacatacttggtacattcaaccccattgctcctttcccccacacgccgcttccccaagaccccaactcatgatacttccatccatctagagatgtgacatttcagactgacttttgtgcagttagatgtaagcattttacctctcaacccacaccagttcctttggccccaggccacacatttcaccttaatagctcaacaccatacatgcatttattttctgactatacagtagccgcaaccaaggcttgaaaacttgttaaaaggccagggccctattcatgagacgcctgacggtgccttttacccttagaaaagcaggttgacttttcccccactct

SEQ ID NO: 506713 - DNA, 420 bp, Homo sapiens
cgtgggcacagaactactgaactgagcctgcctggattcctaaccagtagaactgtgagcaaataaaatggtggttagttttggttttgtttctctgacaaaaatgccattygggggaaaaaaaatggttgttttaagtcactgtatttcatggttgttttaaaaaattattttaaataacttttcatagataacagggtctcgctatgttgcccaggctggttgtgcaaactcctggccttaagtgatccccactgccttggcctcccaaagcactgggattgcaagcatgagccatggcatctggtcttaggattgttttatgctgtgatagacaccctataaagcacttagaatggtacttgccataaaataagcattcaataaatgttggtgtgatggctaatattaggtgtccac

SEQ ID NO: 506714 - DNA, 420 bp, Homo sapiens
cgtgggcacagaactactgaactgagcctgcctggattcctaaccagtagaactgtgagcaaataaaatggtggttagttttggttttgtttctctgacaaaaatgccattcgggggaaaaaaaatggttgttttaagtcactgtatttcatggttgttttaaaaaattattttaaataacttttcatagataacagggtctcgctatgttgcccaggctggttgtgcaaactcctggccttaagtgatccccactgccttggcctcccaaagcactgggattgcaagcatgagccatggcatctggtcttaggattgttttatgctgtgatagayaccctataaagcacttagaatggtacttgccataaaataagcattcaataaatgttggtgtgatggctaatattaggtgtccac

SEQ ID NO: 506715 - DNA, 172 bp, Homo sapiens
gtcatatcctctataaaagccattccttagcctcttctgtcacccaacccatcttcccaccccaaaacagatcccatttcttctaggatccctttgtccatactcatcaatacccgcctggtccactgcatggtagccagcagtaygtgtatctccccttcaagggtgaagc

SEQ ID NO: 506716 - DNA, 563 bp, Homo sapiens
tggggttcaaatcaaggcagagtggcagcagggctggagctctctcatgcctggcatgcctggtgctccacaaaggtttgttttcccctcctctgatccccagtttttcagcccctcaagggcaggaagcccccatacccgtgattacacacacacacatctctctctgtctcatataaacattcacatacacataaggattcgtggttaagtccctttagcaagtagaatggtggaatgattgccatttcagtgaataaatattcagctttggttttcaggctgtgtcctgtctggttattaaagttttcttatgatttctctctacctgggttctgatgcatccacctaactgctacactcttttcgcttttttttttttttttttttaataggttctcgctctgtcactggggctggagtgcrgtggagcaatcatagctcactgcagcctcaaccccctcggctcaagagaccctcctgcctcagcctcctgagtagctgggaccacaggcacagtgcacggtgccagctattttggcttttccactcaaacccgcttg

SEQ ID NO: 506717 - DNA, 519 bp, Homo sapiens
gccgctgaataagtgcagtgtgctcattgctcagggctcctctgcctacacaggtggggacaggacccaccctagctaaaaggaaaagggagggactatattgtctcatgtaactgctctgaggaaagtgccacactagagctggccctggggagccctggcaggccagcgacttaaactctatctgtccatctgtccctgcctggctttcttcagcatggttttctctttctttctctcaagctggctgcccactaaggccagaatatggccttggggcactcctagttctccccttacaaccttgtaaccaatggaagccacttttcctctcctggctgatggctttagaggtaacatctcagcgagggactctggcttagcctgaaccacgcttgtaccccaggggccagggtggtgaagtctgagtagaatttggagggggtggtgccgggaagaccagggcagtctgaggcacacrttatgatgtcatatcatttgctagttgttgcaggtgtt

SEQ ID NO: 506718 - DNA, 630 bp, Homo sapiens
attggactcagcaatgtgcaatagtaaatgaatcgtctcttccttccaattcaaatatttatgttcctgaaaacagtagggaaactcagctctcaatttcctgtttagaaaactaaacaatggtgaataaagttagaaagacattgaagatgttatgcagggtgataactaagctaaaaacttgcaaaggcmcaattaaaaaaaaaaaaaaaacaaaaaaatctgattttttggctttaggaaaaacatgaaatgataataatcatctcactaatgattcttattttattaaatcagttattgattgtgatgtttgatttcttatttcatttaataatttgataaatattcaatggcaacgtattgtaacagagaaagaatttaattcaagtaaagttggctgaatcagagggaattttattactactcaaatcagtctccctgaaaatctggagactggggttttttaaggataatttgacaggtagggggccagggagtagggagggctgattggttaggtaggagctgaaatcatagggagtcaaaggtgtcctcttgcgaaactgagtcagtgcctgggcgaggaccacaggaccaaatgagccagtttatctatctgggtggtgc

SEQ ID NO: 506719 - DNA, 600 bp, Homo sapiens
ctttgggaatttgaaatcagtctgtgcaacatagaacccatctttacaaaaaattaaaaaaaattagccaggtgtggcggcacrtgcctgtagtcctagctacttgggaggctaaggtgggaggatcacttgtgcccaaaagttagaggttacagtgagctatggtaatgacactgaactccaccttgggcaacagagcaagatcctgtctcaaaagaaaaaaaaaaaaaagaactacaactatttataagtatttctatatttgataataattcaatataaattcagttatcttgaagacttggcgtaaggagagcctggctaaattactgggttcaattcctatggggagatgatgtcgcagagaagtcaattggttaatatataaggaactcctacaaatgcaagataaaactgtaaacaccccattagaaaaataaggcaaaggcttaaactggcaactctaaaagaagtaattcgaggatccaataaacatttcaaaacatgttcaaatgaagacagcaatgagataccattttcctttcatctgattggatggcaatgacagaaccatagagtgtcagaacctacaaggaccag

SEQ ID NO: 506720 - DNA, 600 bp, Homo sapiens
ctttgggaatttgaaatcagtctgtgcaacatagaacccatctttacaaaaaattaaaaaaaattagccaggtgtggcggcacatgcctgtagtcctagctacttgggaggctaaggtgggaggatcacttgtgcccaraagttagaggttacagtgagctatggtaatgacactgaactccaccttgggcaacagagcaagatcctgtctcaaaagaaaaaaaaaaaaaagaactacaactatttataagtatttctatatttgataataattcaatataaattcagttatcttgaagacttggcgtaaggagagcctggctaaattactgggttcaattcctatggggagatgatgtcgcagagaagtcaattggttaatatataaggaactcctacaaatgcaagataaaactgtaaacaccccattagaaaaataaggcaaaggcttaaactggcaactctaaaagaagtaattcgaggatccaataaacatttcaaaacatgttcaaatgaagacagcaatgagataccattttcctttcatctgattggatggcaatgacagaaccatagagtgtcagaacctacaaggaccag

SEQ ID NO: 506721 - DNA, 602 bp, Homo sapiens
gctgcttctcccatctactggctgagtctggggcacaggatggagggtgggatgggctgtaggtagttttggaaaaggcaatattcagttggtaaaaagacattattcagaaagagccaattgggaaagagtgggcacacagggatagaagttytcattttgggccatgagtttcatgcttttcagcttgaatatcgagctttgccagggaccctcccctgcttgcttatagattctatacttcctgtttctaagtatatattaatcctgatattttagggaagtttaggaaaatgcccccacctggatgctgctatggggcctgcacggagttggctcctgcctgcgccaaatggctggctggttctagcactcgctcacctatgcactccctcccatgaagcgtggggcgcagtgggtccgagtaaatggagtttgattctgctggcactgaagcagcctgcacttgctttcctacatgctccctcccatgaagggttgagcatggcaggctgagtaaacaagacacccctgtcatgggtcccatgtaggggtcaagaaaacagcctgtgtcaatattatgcccctttttccttctctta

SEQ ID NO: 506722 - DNA, 246 bp, Homo sapiens
acacattttaccagctagttcttctctctccatgtggttatttaccctcccaaagatctccagtgagttaaatgtattttatccrggtggaaatactgtggcctttcctccggtaggttagctttgcctagcacaaaaacaggcacatgacagtttctcaacaagtgcttgttgaatgaaaaaaaaaaaaaaatgaaaaggaaggaaggaaggaggaggaagggagggacagactaacagatcctg

SEQ ID NO: 506723 - DNA, 501 bp, Homo sapiens
cactagctctgttggggaggtgtggggaagcctccagggagttggagagcagttttctagggagctgcagaacttctcggtttttctgcttggaagtaaaacaactgatsgcattagcttagccatgttagaaaccttcattgtgcttcccccccggaatcctctggaggagacccacaaggctgtcttgtggagggcccaccagaggcagagaaaatctggcaagagtttgacaagtcgtcatagagcctggggaaagataagggaaagctcattagttccaacctttcgaaggcagctggactggaggaatggcatgggcttgccccccagctctgctgacatttggttccattagggagcaatagctggttccaatgtcctgagctcaattactgaagctaagctgaaccatgtgaccacagcactgtgttttcaattattctctctcccttcctccctctcgatgccaggcctggagggaaggcaatctcccacaga

SEQ ID NO: 506724 - DNA, 541 bp, Homo sapiens
tgtgaagatcaagaaattattttcccttttccaaccatagaattttactgatttgatgtgatttcctcctgtctgtttcactctgagcatgaagaactggtcacccactgttctctgaataaacccattttaaatgcgtgaaggcgagtgtgatgagattgttcctcattctttccctcaggctaaaataccacttttcctttagcctcttcaaagcttctattttccaccccttgaattgtgtttactcctcttcttgggaccctgctcagttgttccgtcacattgctgttttttaagtaaagaggtccgaatcagacacaaatcaaacaagggtgtgaccaatgcagggtattagtgaagaaattgcttcctgggctctgcaagtcctacctgtcttggcacacaaatagtgagccattgtagtcaacagtcatctttaaaaagaagagaaaagttcgtcctactcataaatagacygcagtagagagaaaaataaatgcctttggtggcttcacccagtctggctacttgccatgag

SEQ ID NO: 506725 - DNA, 611 bp, Homo sapiens
cacattagaagtgctgaaaattctattttacaccagagcaatggtccttcaaactttgtatctttaaactttcccctttgattgttttgccctcttacctactttccttctgaattcaccttcctgcctcctcccatagacccatattagtgctaaatataaccgcagggaaacaaaacacgctaggatytcatcatagctgatacaatgactttaaagtagcttcctctcctgaaatacattttatgagcaccattttttttttttttttttttttttttttttgagacagagtctcactctgtcacccaggctggagtgcagtggcgcgatctcggctcactgcaagctccgcctcccggattcacgccattctcctgcctcagcctcccaaatagctgggactacaggtgcctgccaccacacctggctatttttttttttctgtatttttagtagaaacggggtttcaccgtgttagccaggatggtcttgacttatgagtacatttatccagcaaagaaagcaaatgttcttttggaatttgcttatgatgcccaaaaaccagtgttaggagcaaaatgcattgccttttcatgggcatcacagca

SEQ ID NO: 506726 - DNA, 594 bp, Homo sapiens
tggaagccagcagaataaaaacaaaaattcagaggaagacaaaaggctttcaaagagaaaaaaaaaatcattccaaaggattggagtaaaagaatactaccggacttctcaacaacattaagagctggaagctaatggaataatgccattgaaaatcttagtaaaaatgatttttaacctagaattctatactcacccaccaaaacaaacctttgattatgggtgaggataggatatacacatttttataaaagtaacatcacacaaagacgttcttttcacatatcctttctcaggaaactactggatgatttgttccaccaaatgatgaaataaaccaagaaagatccaaggaacagggrattacacacaggagtcaggtgaagggcatctccagaatgatgaccaaaggaagtccctgaagaccaacagataagactaggccaggtggcaagcccagaaaataacctgtgtgaattaggtgggactgggggctccaggaaggatggtgccaggaggaagaaaatggaactactattagattatctaagaggttggtcatgtgaaagtttttgttgagaagcattttacaca

SEQ ID NO: 506727 - DNA, 594 bp, Homo sapiens
tggaagccagcagaataaaaacaaaaattcagaggaagacaaaaggctttcaaagagaaaaaaaaaatcattccaaaggattggagtaaaagaatactaccggacttctcaacaacattaagagctggaagctaatggaataatgccattgaaaatcttagtaaaaatgatttttaacctagaattctatactcacccaccaaaacaaacctttgattatgggtgaggataggatatacacatttttataaaagtaacatcacacaaagacgttcttttcacatatcctttctcaggaaactactggatgatttgttccaccaaatgatgaaataaaccaagaaagatccaaggaacaggggattacacacaggagtcaggtgaagggcatctccagaatgatgaccaaaggaagtccctgaagaccaacagataagactaggccaggtggcaagcccagaaaataacctgtgtgaattaggygggactgggggctccaggaaggatggtgccaggaggaagaaaatggaactactattagattatctaagaggttggtcatgtgaaagtttttgttgagaagcattttacaca

SEQ ID NO: 506728 - DNA, 479 bp, Homo sapiens
gaagtcatggagatagccatcctagtactacaagagcttccttctctctctctcctggagtgttccctttctgtgcaaaaacctggaattccacacaagttccaaccagaaagaacaatgttggctcttccaastggaatggttcatgatacaaagcaagtagggaaggttgtaagaaaagatgaaagcaaaaaattttcccctttaattaaaaaaaaaaaaaattttgagagaggatctagcattgttgcccaggttggagtgccctggggtaatctcggctcactacaacctcgacctcccaggctcaagcagtcctcctacctcagcctccagagtagctgggactataggcatgtgccactatgaccagctaatttttatatttttttagagatggggttttgctatgttgtccaggctggtctcgaactcctgggctcaagcaatccacctgcctctgcctccccaggttttag

SEQ ID NO: 506729 - DNA, 652 bp, Homo sapiens
aaatctgaaaaaaaaaatcaatgcccaaagtgggatggttactgccattaccctgaaaaattatcagacttttactctttatgaaaactattataacactgtacttttcatcaatcttaaagtttcactcatcacttaaatgaccaaaaagagaaattaaaagaaaaaaaatgtttacatctgagtcatgtctagagctttgtttggctatgattttggattactataataaataatttaattcccaatattcccaaccttttccttgactacttgtccacttaataaagccatttccscccccccctcttttaaatatcttaagtgtacagtcttgcttacagtgaaagtccgtatttcttggtttatcaggaaaacagtgcaaggttttatatttactcgaaacctttcaaatactcctacctgttcttacattttctgagtctttattttcacagataactttagaagtgattgctttgagctcactataaagcaagcagatcatgttaaatatcaggtggggtttagtgagctcctataagacgatgtcatttcttgatgctctgtgctttgcaatgaagtgattaaagaatcttcttgacccagagttcctccacttaatcaagaagagaggattttggaagcagag

SEQ ID NO: 506730 - DNA, 565 bp, Homo sapiens
atgcatttgcttaagcatgttttagtaaaacatctttaagtctcagctggaaatagggttttcacttcgtactagatttatccaatataaattcattcaagcggaataagtaatgcagctttcaacagggggtgttacaggcaccttatttccctgtctgtttgtatagttcttcctttttttaataatcaacaaatttagtatcagtggaaggtgctatattgaaagctggaaagacaggaagctctatttttgagaacaggtgcagcatgaatttctatggcatcccatcaatgctatccttctctacaaatccttgtgactcttttagccatgggttgacagtgagttagcctgccagagtaaaattagaagtccattctgctgacatagttgaaggtttgggcaygcatatatctcaaatactttagtgactgccataccaggcaaacaaactctggatcacaccaacaacaatggatatttttgacatgatacacattatatcatagataatataggtaaactctaaaatgtccaaatacatcttggtaaagagaacaat

SEQ ID NO: 506731 - DNA, 603 bp, Homo sapiens
ctatgatcattccatagagaacttgcccttttttttttttttttttagacagagtctcgctctgtcacccaggctggagtgcaktggcacgatctcggctcactgcaggctctgcctcccgggttcacaccattctcctgcctcagccttccgagtagctgggactacaggcgtccgccaccacacttggctcattttttgtatttttagtagagatggggtttcactgtgttagccaggatggtcttgatctcttgacctcatgatccacccgcctcggcctcccaaagtgctgggattacaggtgtgagccaccatcccagccgaacttgcctatcttaagggcaggacactgcagcccaaggtgaatgtgaaccctggaagtatagttaattttcttcagtttacggaacaaggtgttcctcaaaatataaaatattatgacagaaaagatttcatgaaaaatcacatcaagcattcagacactgcacagaactatttaatgatagtaggagtctagcttcagtctaaggggtactatctatatttggtcatctttgatcaaacatatttgagagagcttttgagaagctcctttgcaag

SEQ ID NO: 506732 - DNA, 603 bp, Homo sapiens
ctatgatcattccatagagaacttgcccttttttttttttttttttagacagagtctcgctctgtcacccaggctggagtgcattggcacgatctcggctcactgcaggctctgcctcccgggttcacaccattctcctgcctcagccttccgagtagctgggactacaggcgtccgccaccacacttggctcattttttgtatttttagtagagatggggtttcactgtgttagccaggatggtcttgatctcttgacctcatgatccacccgcctcggcctcccaaagtgctgggattacaggtgtgagccaccatcccagcygaacttgcctatcttaagggcaggacactgcagcccaaggtgaatgtgaaccctggaagtatagttaattttcttcagtttacggaacaaggtgttcctcaaaatataaaatattatgacagaaaagatttcatgaaaaatcacatcaagcattcagacactgcacagaactatttaatgatagtaggagtctagcttcagtctaaggggtactatctatatttggtcatctttgatcaaacatatttgagagagcttttgagaagctcctttgcaag

SEQ ID NO: 506733 - DNA, 641 bp, Homo sapiens
actaactctgagtcacaatttaaacttgaaaagttattctaggttatctgaaaaaccttcacacagcttaaatttcagctggtaaattgctaaaatatcaagaatatggtaatagttaatggcatgaggtctggaattgcagttcctgagcttttattcccagtctaccatttgcaactctgacagtgctctagttaacctttttgtgcctcaagttatcatctgtaaaatagagataactaatagtgttattgtgagaactaaatgagctaatgaatgcaaagtttaatagaatatctagtataaactgagtgcttaataagtkttagcttttttttagtattgtccatttaatatttcccataaatacttgcaagcaatagaaaaatgcactgagatacaacaaactcattagtggattaatacagtaaaacttagctttagtatatattccacctttgtccccagctttttgagggccttcccgttctttaaatcctttctttaaattttaagtaatttaagcagtttacaaggagagagtgtgtgtcaaatattttgtgatcttctgacttctttgtaccttagaggccaggagatgataggactttattatcttctgacaaggtaaatcttattca

SEQ ID NO: 506734 - DNA, 641 bp, Homo sapiens
actaactctgagtcacaatttaaacttgaaaagttattctaggttatctgaaaaaccttcacacagcttaaatttcagctggtaaattgctaaaatatcaagaatatggtaatagttaatggcatgaggtctggaattgcagttcctgagcttttattcccagtctaccatttgcaactctgacagtgctctagttaacctttttgtgcctcaagttatcatctgtaaaatagagataactaatagtgttattgtgagaactaaatgagctaatgaatgcaaagtttaatagaatatctagtataaactgagtgcttaataagtgttagcttttttttagtattgtccatttaatatttcccataaatacttgcaagcaatagaaaaatgcactgagatacaacaaactcattagtggattaatacagtaaaacttagctttagtatatattccacctttgtccccagctttttgagggccttccckttctttaaatcctttctttaaattttaagtaatttaagcagtttacaaggagagagtgtgtgtcaaatattttgtgatcttctgacttctttgtaccttagaggccaggagatgataggactttattatcttctgacaaggtaaatcttattca

SEQ ID NO: 506735 - DNA, 541 bp, Homo sapiens
accaggccagacccctctccaggggcatctcagccagttcacctggctccaggaggcctgttcccatcaggaaaagcccctgcatccattgctgggatggtcatttcttttttctttttctttttctttttttttttttttttttttgagatgaagtctcactcccatcgcccaggctggagtgccatgctgcgatttcggctcactgcaacttccgcctccggagttcaaacgattccactgtctcagcctcccraatagctgggattacaggcgcctgccaccatgcccagctaatttttgtatttttagtagagacggggtttcaccatgttggccaggccagtctcaaactcctgagctcaagtgatccactcgcctcagcctcccaaagtgctgggattacaggcgtgagctaccacgaccacgccgggatggtcatttctaaccacctttttgggtgaacagcaggtttttcttctccatcctgaatgtttgatgtcactaggaaatggaagaccccggggtgtgggaaaggcac

SEQ ID NO: 506736 - DNA, 541 bp, Homo sapiens
accaggccagacccctctccaggggcatctcagccagttcacctggctccaggaggcctgttcccatcaggaaaagcccctgcatccattgctgggatggtcatttcttttttctttttctttttctttttttttttttttttttttgagatgaagtctcactcccatcgcccaggctggagtgccatgctgcgatttcggctcactgcaacttccgcctccggagttcaaacgattccactgtctcagcctcccgaatagctgggattacaggcgcctgccaccatgcccagctaatttttgtatttttagtagagacggggtttcaccatgttggccaggccagtctcaaactcctgagctcaagtgatccactcgcctcagcctcccaaagtgctgggattacaggcgtgagctaccacgaccacgccgggatggtcatttctaaccacctttttgggtgaacagcaggtttttcttctccatcctgaatgtttgatgtcactaggaaatggaaraccccggggtgtgggaaaggcac

SEQ ID NO: 506737 - DNA, 298 bp, Homo sapiens
tgtgagctttccacagccaacactcgcagcagatggggcatgggtgcctgccctagaggaggggctctaggtggagcaccagtagcatcccctacatgttcaatgttctcacattagttttttcctgaaggttgttcctgataaaagccaatttgtcctgtaataatatgctataaacctcaagtggctggctgaatcaaggtgtcagcttagtcatttgcaaaggcaagggataattatggttgctgttttataagrccccatgaatcttattcaccatcttcctgtctgggccctg

SEQ ID NO: 506738 - DNA, 627 bp, Homo sapiens
atatattagaaatgtaaatatatttgtatatgttattacttctgaagttttaaaattcttcacatatgtgtgtgtgtgtgtatatcttttctcttgcattcaacatgatccctcaaaacaacaagaaaaaattaccaatgcccaaagctgtaacaatttgagcaagaaaataaataacatagtattgactcataycccaacgtgtaaaagaaatatgcatgatccatactgatataaataaatgattgaatatagataaatggaagataagggataaattttcttcacagaacaaaaagtacaaataatgaatgagaacaaataatgtacataggtacctcctctcttcctggaggtggagcttcccctcccctgagtatgggctggacttaatgagtggattctaaagagtaaagcatgaaagggatagaatagtaactttacagtggagaaaactggcagacattactttaaccaagtgatcaagattaacatcaccaagtgataagtcaggttgatattgtcacaggatctttggggtgtcaatttgccagccagaagcctctgtggccagcggcgccttctgcctgagtattgctcaggtccactgggatcattctgcccact

SEQ ID NO: 506739 - DNA, 627 bp, Homo sapiens
atatattagaaatgtaaatatatttgtatatgttattacttctgaagttttaaaattcttcacatatgtgtgtgtgtgtgtatatcttttctcttgcattcaacatgatccctcaaaacaacaagaaaaaattaccaatgcccaaagctgtaacaatttgagcaagaaaataaataacatagtattgactcataccccaacgtgtaaaagaaatatgcatgatccatactgatataaataaatgattgaatatagataaatggaagataagggataarttttcttcacagaacaaaaagtacaaataatgaatgagaacaaataatgtacataggtacctcctctcttcctggaggtggagcttcccctcccctgagtatgggctggacttaatgagtggattctaaagagtaaagcatgaaagggatagaatagtaactttacagtggagaaaactggcagacattactttaaccaagtgatcaagattaacatcaccaagtgataagtcaggttgatattgtcacaggatctttggggtgtcaatttgccagccagaagcctctgtggccagcggcgccttctgcctgagtattgctcaggtccactgggatcattctgcccact

SEQ ID NO: 506740 - DNA, 580 bp, Homo sapiens
tgaagttttaaaattcttcacatatgtgtgtgtgtgtgtatatcttttctcttgcattcaacatgatccctcaaaacaacaagaaaaaattaccaatgcccaaagctgtaacaatttgagcaagaaaataaataacatagtattgactcataccccaacgtgtaaaagaaatatgcatgatccatactgatataaataaatgattgaatatagataaatggaagataagggataaattttcttcacagaacaaaaagtacaaataatgaatgagaacaaataatgtacataggtacctcctctcttcctggaggtggagcttcccctcccctgagtatgggctggacttaatgagtggattctaaagagtaaagcatgaaarggatagaatagtaactttacagtggagaaaactggcagacattactttaaccaagtgatcaagattaacatcaccaagtgataagtcaggttgatattgtcacaggatctttggggtgtcaatttgccagccagaagcctctgtggccagcggcgccttctgcctgagtattgctcaggtccactgggatcattctgc

SEQ ID NO: 506741 - DNA, 487 bp, Homo sapiens
atttttaatgtacttctatttcttcttgtatatcctgtaatttgttgttgggttttttgggacatagatgttcacaactgttatatcttcattgtgaattgtagcatttaacattatgagggcccacctctgtcttatttcataattttttggtttgaaatatttttctgtgatatcaaaattctggctttttttttttttttttttttttttttttgagacagagtcttgctcagtcccccaggctggagtgcagtggctcgatctccgctcactgcaagctccacctcctgggttcacgccattctcctgccccagcctcccaagtagctgggactataggcgcccaccaccacgcccarctaatttttttgtattttttttagtagagacggggtttcaccgtgttagccaggatggtctcaatctcttgacctcgtgatccgccctcctcggccccccaaagtgctgggattacaggcgtgag

SEQ ID NO: 506742 - DNA, 577 bp, Homo sapiens
  misc_feature (1)...(577): n = A,T,C or G
nnnnnnnnnnnnnnnnnnnnnnnnnnnnnnnnnnnnnncttaaaagcctcagtagtccctggagagacatagagctaaaaattccagaccatttggcaggaggcatccagccgcggacacatgttcctgggattgcaacaactttcttttctcctatccctactccccccacccgcctctctccttgacaaaaatcacaggaatgggatgtagaacaggcagttagggccacgggtctcaaaagcacaagtaatgtgtttctctgagtggcactgggcccgtgtctgcacattctgcctctatgtgagtcattgttcaccttgttcagagcaaatctactctgtatgaggatccagcaccttccctcctacactacsctgcagagggctggaattattcccatggggatttcctcctgggccccataagccccctggtcacaacagtgagtctgtagcctggtcagggagagaacaagctttcttcactttcccagccaacacgttgcatactagggccatacatcccggcctcctctcaaggggcctgtgttgggcctgacgcctctctctccaag

SEQ ID NO: 506743 - DNA, 614 bp, Homo sapiens
tccacattaccacttttaaaattaaacttaccccaagtttctattttcagtgtttttaaatgaactcttcatcttaaagtcacaaagaattacaaagaatttttctatgtcttcatcttctgttttaaagttgtgcttttttttttaagtttttaagttttaaagttgtgcttttttttttttttaagatcacccaggaatgatctgatgtagaaatctactattttccatatggataaaggttgctcctagcactcatttatcagatagaataccctttccccactggcgtgtaacatcatctctgccccatcttctttccaaacatgggcaggccagtgactgggccctytattctgctcccttacttatccttgtgcgcagactatattgtcttcttttctaaatattttgataataaatcttgatatctggtagggcaagttcttccaccttgtactttttcaaaattgtttctcagttattcttggccctttgtgcttccaagggaattttgagatcagattgtctagttcaaaacaaagcagaacaaaaccaaacacaatccaaacccaaccaaaaaaaaaaaaaaaaaaagctgtgttagacttcag

SEQ ID NO: 506744 - DNA, 505 bp, Homo sapiens
cttggaagacctgaattttggtgaccactcaacaagtcagtctgctccagggacccattaacattgcaacctcattcctagtggtgccaagatgcagccatgatttgtactgcagtgtggggaggccagatttgggccctcctggaagtccacagcaattccgtccctggaaagttgttgcacagaggaaaatacagcgccacgtcccaagacaaactgaaggcctccaaagaagacataagtaattttgttctttayattttacatctttacagaaagtatccgagtttacaaaaaccacataaaatagaacaaagtttaaaaaatagaatatagagggaaaggaaaaataatagataacagaggacaaagcccagtgtggctgctaccttattgctgtaaggtcctgtacactttcaaatcaaactctgacttcccaacccacaaagcaaaagttaaagaaatgcacgtacagcactgcacccatgataagaaaaaccaggca

SEQ ID NO: 506745 - DNA, 194 bp, Homo sapiens
tgccagctggtagtatgactsgcttgtaccttttcaaaaataatcccttatcccaaacttgtaatttttagtgtgcctttttattttgtttattgtttcctttgttggtcacaaatgcttcagcttgacgtggtcccacatgtgcataatttcttggtggctgtgctgttggttactaatcaagaaaaaacaaa

SEQ ID NO: 506746 - DNA, 606 bp, Homo sapiens
aaaagtatgtcttgactgaagagctcagtcagccagtcaaagcaattaatcagtcccttgagtttttaaagtagaggcggaaaaagcacttggtgacaatataatagactttaagcctctttaaggtggcaaaactaataatttttgaggtcctatcctgagattctgtgatgatcatatagtgtatatttattactgccatttaagtttattggattacttgtcaacttctgttccaaatcttttgtcactttgttttctgtcctatggctcatgttggcttagaatttgtcccaggtgctaaacaggctagtctcatggttctggtgtggattagtcagtttgttcattcatttattgaccaggcagttgctaggcatcaccatacagtggtgaataagaggtcaacatgttctattagttttttccaagaggtttgactatgcaggggaatggagagagagagagaggtgcttccaggcgggagatgtgaaattgagtgggttggtgttttcttttttaaacataatacagacacataaaggaaagttgtgmtaaaaagctttaaaacaatagtcccccacctcactttccctttcctgatcc

SEQ ID NO: 506747 - DNA, 431 bp, Homo sapiens
ctctcgggccttcccaaggcagaaggtggagctgaaaagcagacttccctgaatgctgaggctaagttgaaaagtggtgtaggctctgtgcagcccacctgaagaayagaggaagggagcaccagaaagctgcttgggagctgggtctcaggatgccgggcagaggcgtttgagctttaccccttgggtggtagagcatggaccactgcaggctctccaggtcgtgagtgggcgtgggtggacccgtgggcctatttgatttagtttctctctcccacaccatgggagccatcttctccctcttgcgactccctgtcttataaaccagagaagatgactagtgcttatgaaaagcacttttgtgctgacaggtgccctaaggccaccatcatcatccgtgaggatttctctttttgtcagagtgctgcagc

SEQ ID NO: 506748 - DNA, 528 bp, Homo sapiens
cacgccctaagttcaacgtttaaccatttactgatattattttatcattggtaaatatctagtcacataaagattattacttatraatactcctattttagtgctattccctagttctgtccctatctgtccctatctcctagcaaatatccaactgatgtaaacttttaccatccctgtaagctgaaatagtgattctaatccaaaatcttgccattgtatttttttttattttttaattaattaaaaaaattgtagcgacagacaccagctttcacatcaccataaattgtcatgtataacaaaatgatatttcttgtcaccaacatcagaaaggactttgaaggaaacctgctacacatcatttcacgtaagttgtggtttccaaaaatctgtgaatggcattaaataagggcttactatacacaaaaaagacaacttcctttggagcaactgaatcaacttacatagcagagaattacataaacagtcagaagggaaggcacagacagtatgacagagcttcca

SEQ ID NO: 506749 - DNA, 528 bp, Homo sapiens
cacgccctaagttcaacgtttaaccatttactgatattattttatcattggtaaatatctagtcacataaagattattacttatgaatactcctattttagtgctattccctagttctgtccctatctgtccctatctcctagcaaatatccaactgatgtaaacttttaccatccctgtaagctgaaatagtgattctaatccaaaatcttgccattgtatttttttttattttttaattaattaaaaaaattstagcgacagacaccagctttcacatcaccataaattgtcatgtataacaaaatgatatttcttgtcaccaacatcagaaaggactttgaaggaaacctgctacacatcatttcacgtaagttgtggtttccaaaaatctgtgaatggcattaaataagggcttactatacacaaaaaagacaacttcctttggagcaactgaatcaacttacatagcagagaattacataaacagtcagaagggaaggcacagacagtatgacagagcttcca

SEQ ID NO: 506750 - DNA, 528 bp, Homo sapiens
cacgccctaagttcaacgtttaaccatttactgatattattttatcattggtaaatatctagtcacataaagattattacttatgaatactcctattttagtgctattccctagttctgtccctatctgtccctatctcctagcaaatatccaactgatgtaaacttttaccatccctgtaagctgaaatagtgattctaatccaaaatcttgccattgtatttttttttattttttaattaattaaaaaaattgtagygacagacaccagctttcacatcaccataaattgtcatgtataacaaaatgatatttcttgtcaccaacatcagaaaggactttgaaggaaacctgctacacatcatttcacgtaagttgtggtttccaaaaatctgtgaatggcattaaataagggcttactatacacaaaaaagacaacttcctttggagcaactgaatcaacttacatagcagagaattacataaacagtcagaagggaaggcacagacagtatgacagagcttcca

SEQ ID NO: 506751 - DNA, 595 bp, Homo sapiens
tggaggggtaggatgatttkaaagttgttaattttctttatttgatggagatggtaaatagccgttgcttctttgaaattttgacctaagagacatagtaatacatatgttttcttttaaatttaatgacagccataattagaattaaaagcaatgtgtaaaccttaagggaaaaataaataaaatcagacataacatgcataacagtggaggttttaaaaagacaaaacaaaacagaagttaaagtttctaaaatcaataaacaaaatgacagaaaagcattaactattgtaataaaaataaaacagttaaatgtcatattaaaagacctttgggttaaaatattcaaccttatgctttctttaagggagcctgttaaagcatgattaaggttaaatgcaaaaaggaaatctgcatttgtatctacatctacatttaatctatctatataaatacgctgttatacaaaacaaaatacaaaagcaaaaattaattcagcatatagtattttcaagcaggaactcaaaataaaaatggtatattaaatcctttttatattgataagtaatctaatggttatttctgaaatgttatt

SEQ ID NO: 506752 - DNA, 595 bp, Homo sapiens
tggaggggtaggatgatttgaaagttgttaattttctttatttgatggagatggtaaatagccgttgcttctttgaaattttgacctaagagacatagtaatacatatgttttcttttaaatttaatgacagccataattagaattaaaagcaatgtgtaaaccttaagggaaaaataaataaaatcagacataacatgcataacagtggaggttttaaaaagacaaaacaaaacagaagttaaartttctaaaatcaataaacaaaatgacagaaaagcattaactattgtaataaaaataaaacagttaaatgtcatattaaaagacctttgggttaaaatattcaaccttatgctttctttaagggagcctgttaaagcatgattaaggttaaatgcaaaaaggaaatctgcatttgtatctacatctacatttaatctatctatataaatacgctgttatacaaaacaaaatacaaaagcaaaaattaattcagcatatagtattttcaagcaggaactcaaaataaaaatggtatattaaatcctttttatattgataagtaatctaatggttatttctgaaatgttatt

SEQ ID NO: 506753 - DNA, 520 bp, Homo sapiens
ctactcaaagtagaatggaaagggagaattctatttctaatgtgacaatgcacaaaccatggacagccaattttcttttcacagtttatcaccacatatgtaaaactactctgtgcaaggatagtggcatacaaaagctggaaacaaaactgaggggtgaagcctggagactgtgagacagcttgatgtctctctgcatsagggattttggattataatatcctcagtgcctaatcattcgtaatttagactgggtagttcttaaaaaggtctaattgctcatccgcacaataattttactttatctaaagacgaaatattctgttttctgaaacttgtactgtgcagaaaattttattttatttttctgagtaaagaagaaaaatctgttttttcattctggattctgagcgattcagtcccagagatgcaactgatcttgagaaattcaagcttagatatcacgtacaatttttataagtagttaattccaaatgaaaggctgtaatattctttattt

SEQ ID NO: 506754 - DNA, 621 bp, Homo sapiens
acgttttgcctagattttagccttcacaattttttctacctcttgaaagagaccctcttcttcactctactttattcaggcttctctacatcctttctcaaagaggctctctctttaggtcttatcttccagggcaacaatcctgctaattcagtttagcaacaatctcccactcagatcatcctgagctgtctccagcaagaatcttgtcaagttgatttatccagaatcctcccttacccctgatatatcctcttagtaattttccattcaataacttccaccctgctacttggcaaaaraaaaaccactttctcttacatgcagagttgagacagacatgcccagtctgtctcccctgttgcaaaatttcattgcagtagtccctataataaagtcttccttacactctctttaagaaatggcagaataatttttctttgacactccccactgtgtcaaccaaataaactatttaaattcaaatctgtgtatattatgctttcacataaaattatttaagtttccccacttcccatgatggtttctaaacctttctagatgtaaaatgagttactcaaataaaaatgtattgggaagtttagtgggttggtggaggac

SEQ ID NO: 506755 - DNA, 621 bp, Homo sapiens
acgttttgcctagattttagccttcacaattttttctacctcttgaaagagaccctcttcttcactctactttattcaggcttctctacatcctttctcaaagaggctctctctttaggtcttatcttccagggcaacaatcctgctaattcagtttagcaacaatctcccactcagatcatcctgagctgtctccagcaagaatcttgtcaagttgatttatccagaatcctcccttacccctgatatatcctcttagtaattttccattcaataacttccaccctgctacttggcaaaagaaaaaccactttctcttacatgcagagttgagacagacatgcccagtctgtctcccctrttgcaaaatttcattgcagtagtccctataataaagtcttccttacactctctttaagaaatggcagaataatttttctttgacactccccactgtgtcaaccaaataaactatttaaattcaaatctgtgtatattatgctttcacataaaattatttaagtttccccacttcccatgatggtttctaaacctttctagatgtaaaatgagttactcaaataaaaatgtattgggaagtttagtgggttggtggaggac

SEQ ID NO: 506756 - DNA, 578 bp, Homo sapiens
tatgaatttcagtcaaatagaagcaaatagaaggcataaatgagtggacaaactataattaagtaatgcaaatgcaagggaaagagtcattttgtattaaatactcacaaagccataataaaattccaaatcttgatcagaaaaagtcaaaatcaaaacctgagaagaaaacaatgttgccactttattttattccattaggggatatatcaaattatcatgtctatgtctaagttacatctaatatttataaataaattttcaaataaatctgttrcatttttcatggtagtttgtactgcatatttagatagtgcaatgggtgaatctgaatgtcaactttatgggattagggatattcagatagctaataaaacactattatgcttgattcttcagtatgtgctgagcccgtttctcttctgctgaaaggaaaacccaggggatttggcatttcattcaaataataaagctgccccatgtgtgtctgtgagggtgtttgcagaggagattggtgtgtgagttggtaaacttagtgggggaaaatctgccctcaatatggataggcaacattcaaa

SEQ ID NO: 506757 - DNA, 637 bp, Homo sapiens
agcgctctggcgcagcgctccctcacatccctccccgcgttccctcacagcgctcccctcacagagctcccccctcacagcgctcccctcactgccctcctatcacagtgctctggcaggtctagagtcaaggtgcccaggacattccagcctccaatgtgttcctttttatttatttactytttgagacagggtcttggtctgctgcccgggctggagtgcagttgcgtgatctctgctgactactgcctcagccgccagggtagctgggaccacaggcaccgccgcgcgctcctgccttatgttcttttatcctcctctgcagtactctttcctcttctccctctcaaacccagatagattacaacccttgttctctctgctttcgttcgggatatctcctgtctccaaaatcgtagaactgactcataaaatatgagagccaggaaagactttaaagacaacctcatcctgtgaattttggcaccagatatgaacctgaaaccttaaagttcccaacactgcaatgggtcaggccctgctgcgctggtggagataaaacgtactgagcagaggagagaagctaacagcatcggagaagctgactgggcttcagggctacgtgctgaggggagca

SEQ ID NO: 506758 - DNA, 452 bp, Homo sapiens
gagcatgtattcattttattagacaccmtgaaccatggaaaagccagatcagtgagaatgcacatagtgctcaccttttccccaattcccccagttcctcagtttgctgcttcgtttatgccttctatgtcatgaacgattaggtttcacttctaatactttcttcccacagcatcaaacatgtcttgttttgttttcactttttttccttcagattcaacggtttctgtcaatatactgataaaaacaacagcacaaacactagctgtataagtaaatatacagttaagattttaccttaaagcaatataccttctaaattgtccaaggagcaccttttggcttaaagtagattacattaccacattgtccccatagcagagggaggagtataaactcttagcccattagagctggtttggaattgcacctctaggactgactgactgtgt

SEQ ID NO: 506759 - DNA, 486 bp, Homo sapiens
ggcgtgtcataggcgaaggcctctgggaaggtggaggccggcagggcggaggcggagcccgggaaggaaaggtggaaccagagggcagaaggcgggacctaaggagaggcgatttttacaggcagggaaagatcagamgggcggggcttgggagagatggagccggaagaaagacgagcgagaaaggggtggggccatggattccaggagacgcttggagtggaagagtgggtgtggaggggcgaggctatcacgaaaagagaggaggaatcagtaggtgggccgggcctgcggaaaagtggagccctagagagggctgactgcgggcactctagttcattttgctccatcgtcgtgcatagcttggtctctactttagtaccccagcggtgactgcccctggctcccccaacaccgctgtgctgtgctgctccgtcaccccttgagcacttagtcaaggaacacggaataagtgcctgcatgccc

SEQ ID NO: 506760 - DNA, 619 bp, Homo sapiens
attcagtctcagtaaggtcttaacatgtccaaaactaaactgcctccagcttctggaatttaatttcaaacattaactgctcctaccttgcagtatacctgaggtgcccattattgctccrccacttgaccaacaaagggtactgctcatggaaccaaggaagattagcctccaggacccttcctcacccacctgcccaccgcagttctacaatcccatttcaaagacctcaagagaagatgttggaatcagcatctcagattccaaaagccaatacttaaactgggccctgttcacatacaacaaaagcataaaagaaagctatagtttggtattcctatcacctaattagactctctgcaatgttcagaacaagacaaagaaaaggttaaaatcaccaccctctcatggtgtcctttcctcccatagcaaagtccaaaaaaaaaaaaaaaaagcagaacctgccactctccagatttaccttcaggctcagccacagagtaaaaaggggaacgagctgatctctcagacccaaaatggccaagatcaggcactcaccttatagcccaaaatacagccttacagccacacacagcaagggtgacaaccaacctcggaa

SEQ ID NO: 506761 - DNA, 619 bp, Homo sapiens
attcagtctcagtaaggtcttaacatgtccaaaactaaactgcctccagcttctggaatttaatttcaaacattaactgctcctaccttgcagtatacctgaggtgcccattattgctccgccacttgaccaacaaagggtactgctcatggaaccaaggaagattagcctccaggacccttcctcacccacctgcccaccgcagttctacaatcccatttcaaagacctcaagagaagatgttggaatcagcatctcagattccaaaagccaatacttaaactgggccctgttcacatacaacaaaagcataaaagaaagctatagtttggtattcctatcacctaattagrctctctgcaatgttcagaacaagacaaagaaaaggttaaaatcaccaccctctcatggtgtcctttcctcccatagcaaagtccaaaaaaaaaaaaaaaaagcagaacctgccactctccagatttaccttcaggctcagccacagagtaaaaaggggaacgagctgatctctcagacccaaaatggccaagatcaggcactcaccttatagcccaaaatacagccttacagccacacacagcaagggtgacaaccaacctcggaa

SEQ ID NO: 506762 - DNA, 629 bp, Homo sapiens
gtacatggaagtcctcagtaggggatgacactcacagccttaacacgrctgctttgcatatttgtcggaacaggtttctcaaatgtcctggggaaggggcacccttttctaacccacacgaaggcaccatatgccctttgccatgaaggctccctgccctcaacccacatgtatcccctgcccagggctcagcccttcctggttttcacaggctcatcaaagatactggagctctggcttccagcctggtgccagcggcctctgagagcaaaggagggggctgtcactgtgggagtggacaggtgggaggggccaccctggggctcccagcagcatacccctagggacctaggagcagggagggagagaggcagccctgggaggggaggagaaggctctagacaatcgccagtcccaacaggcctcacagccctgaaccccgctgcagggcccccgggtcctcacctcactattgaggaaacagtagaacacagacacaaagaagccctggggaggagagaggaggcgtcaaaggtcggctgcaggtgttgcccacccagcctctgggctgccccttgcttctccctggcctcctgccctccaggcctctgcttggcagaatccccacc

SEQ ID NO: 506763 - DNA, 629 bp, Homo sapiens
gtacatggaagtcctcagtaggggatgacactcacagccttaacacgactgctttgcatatttgtcggaacaggtttctcaaatgtcctggggaaggggcacccttttctaacccacacgaaggcaccatatgccctttgccatgaaggctccctgccctcaacccacatgtatcccctgcccagggctcagcccttcctggttttcacaggctcatcaaagatactggagctctggcttccagcctggtgccagcggcctctgagagcaaaggagggggctgtcactgtgggagtggacaggtgggaggggccaccctggggctcccagcagcatacccctagggacctaggarcagggagggagagaggcagccctgggaggggaggagaaggctctagacaatcgccagtcccaacaggcctcacagccctgaaccccgctgcagggcccccgggtcctcacctcactattgaggaaacagtagaacacagacacaaagaagccctggggaggagagaggaggcgtcaaaggtcggctgcaggtgttgcccacccagcctctgggctgccccttgcttctccctggcctcctgccctccaggcctctgcttggcagaatccccacc

SEQ ID NO: 506764 - DNA, 629 bp, Homo sapiens
gtacatggaagtcctcagtaggggatgacactcacagccttaacacgactgctttgcatatttgtcggaacaggtttctcaaatgtcctggggaaggggcacccttttctaacccacacgaaggcaccatatgccctttgccatgaaggctccctgccctcaacccacatgtatcccctgcccagggctcagcccttcctggttttcacaggctcatcaaagatactggagctctggcttccagcctggtgccagcggcctctgagagcaaaggagggggctgtcactgtgggagtggacaggtgggaggggccaccctggggctcccagcagcatacccctagggacctaggagcagggagggagagaggcagccctgggaggggaggagaaggctctagacaatcgccagtcccaacaggcctcacagccctgarccccgctgcagggcccccgggtcctcacctcactattgaggaaacagtagaacacagacacaaagaagccctggggaggagagaggaggcgtcaaaggtcggctgcaggtgttgcccacccagcctctgggctgccccttgcttctccctggcctcctgccctccaggcctctgcttggcagaatccccacc

SEQ ID NO: 506765 - DNA, 629 bp, Homo sapiens
gtacatggaagtcctcagtaggggatgacactcacagccttaacacgactgctttgcatatttgtcggaacaggtttctcaaatgtcctggggaaggggcacccttttctaacccacacgaaggcaccatatgccctttgccatgaaggctccctgccctcaacccacatgtatcccctgcccagggctcagcccttcctggttttcacaggctcatcaaagatactggagctctggcttccagcctggtgccagcggcctctgagagcaaaggagggggctgtcactgtgggagtggacaggtgggaggggccaccctggggctcccagcagcatacccctagggacctaggagcagggagggagagaggcagccctgggaggggaggagaaggctctagacaatcgccagtcccaacaggcctcacagccctgaaccccgctgcagggcccccgggtcctcacctcactattgaggaaacagtagaacacagacacaaagaagccctggggaggagagaggaggcrtcaaaggtcggctgcaggtgttgcccacccagcctctgggctgccccttgcttctccctggcctcctgccctccaggcctctgcttggcagaatccccacc

SEQ ID NO: 506766 - DNA, 613 bp, Homo sapiens
tgtaggcggctgtcaccaacctgcaccagccctgccaccccacccccaaccagagatgatgatgggggrcaggggaggcaccaaaccctgggcctgggcctccccagggcaggacagggcataccctgggatcccactcctgttctgtgggctcctcctctgcagggcaggcgggcccctcctctgacctgggtttggcctgacctgctccccgctcccctgccaggacgtaccacgttgctctggtggacctcggggctcatggttagctggaccacgaaccaggtggcgttgcgcaggatgaaggcggagatgaggttccagtggatgatgtttcgcaggcaccggatgctcctggtgcagcagggcgggtggatgatgggagcgataggagagagaggatgaggggtaggccacctccatcaccccagcccagatgtgtagatgaggaaactgaggcacagggtggggctgactggccaagtcacacagggaggtgacagccaggctctcctaatgccccatggagcccttcctgcctgcagcccacccagacataagccccaggcagagcctggcactccatggagcctgtgctccatggaccagggca

SEQ ID NO: 506767 - DNA, 616 bp, Homo sapiens
attgctttatcgaattcaaggatttagctcagtgtcattttattgagatcccctgaaaggaattgtccacagtctcctagcacctgcactaatatcatttacataaatcctccacattatgcagtgggtacagatgaagccaggctctgcttgtcagcacacaagcacagcagtgagagcaacgctacatcttttaacatcctgggaaattttataagtgaggatatttgccttttcttaataggccctgttgaatacaagcttcattaactataacataatccctcattttagaaaatcatttcaatgattattcctaatgagtatcaagatatttatatgaaaagtagagcttctttccttccaaattgaaactcatgaactctagtatatcctttaattagaatacccttcaagaataagtctcatgaataatcatgttaatgttccattatttgctaagtaagatgaagatctktttggaaactttacattttgtttttccatttctgatagaggttttaataaatattatttgtaaaaagccaaatgatttatttagattatagtgaacatcacttttgaccctgtagaccccttttaatgggtaaaataa

SEQ ID NO: 506768 - DNA, 460 bp, Homo sapiens
tcatttcacataggcagggtgatttagaaataacatactgatggccattcaaggattgtttaaggacgtaagatgaaacaccaggtattgagatataatcaggtttagagacctaggactgaatgggctggcttttcctgtacttaagcactgagactacctatacttaagcactgagactagctatacttaagcactgcctgctcagcttagcccagtccttgaaccaatcacaggctaacatgtgatattattaagagtcatatcccaataacttgatgtcattgaacagtagcaycacctactaaccctcacctttggggttaaggccacatgctcaactgtgcttgtgcactatttcgaatgccaaataaccttgggtggtgttacctgttactagaatcggtgtatggcacagtaaaccccataccccttactctagaccccagactagggccct

SEQ ID NO: 506769 - DNA, 439 bp, Homo sapiens
cacctgcaacccagaaagactcctccgaggattgcactcccagcacctgaggtaggcagttgagtgggagtttctttgctgctcggttaaaatgacaagttggtacacgagtgcttaatgaaagatgctggaaacctccttggagatcagaaaaatcgcctctccgagctgacagccaggccatctgcattcccgcattcctattaattccttaacaataaacgacaggagcgcctagagggttaacagcttaatttaatctctgagattccttcctggagcattgagaattagaaaggcatttacacaacgtaatctgcacacstgatttttcctcacttgatgtgtctgggactagtcacacccatttctgacacatctccagacagaggctctgcctctctggctgatgactgcatagtcgccacaggttgctgtg

SEQ ID NO: 506770 - DNA, 659 bp, Homo sapiens
gctgttcgttctgcttctccagcttcttcaccagctcctgcagcttccgcacctcctggtccgcgttcacgttggagttaacgtcctccatcccggccccgccgccgccgccgcctccgccgcccgctcgctctcgcagcgacagggaaagagayggaggaaagaggcgtcgccgccgctcactctagccgaggcgccggcatatagcaggaccaggccccaccgccagggtccccccacctcgggttccaaagcgccgctggccccagccgaactgcctcatctgcgccggctccgggattgggggaggcggcgccaatatccggcccctgccgccatcttccctccgtccctccgccccccgcgggccggcccagtcggtgacctcagagcgtcgggggtggacgcggccgccggcgggcgctgagaggacccggcgccagctcgcggcggggcggggccacggacggggcctatggggcggggccggtgcttgaggggcggggattaggccggaaggggcgtgtcggcggatgtgggacgcggccgggctggctagggagggtccctgcagaacgggaggccagcagaaggctcgcggcgggcggggctgaggtggctaacaaggtcctcgaacagcctcgcctgttggtctgggc

SEQ ID NO: 506771 - DNA, 534 bp, Homo sapiens
cccaataatctgccctaggatttaaaatacattattctgagtattgacttagagatrcagtggagagagtagattatacatagagacttgtatcaagcaaaagtaaattaagctgccattgagatacttaaataattagtcttctaggaagctgtagagaattccatttctgagtctttggaaaactcctggagtattaccccgactgacatcatcaactattcaatttgcccaagtatgtctacaaagttactttctattcatcatccttcttatgtaaacagttatatgtgccctggaagtttaattctataaatatccagttctccaaattggcccaataataatagtagctaatagttgttaaccacttttatgacatgtgataattcatttaaaactcacaatagtctttggaggtagctgctattctcatcatcatctccattttacaaatgaagaaactgagatatagagaggttaaataatttccaatactatagccaggaagtagtggagctaaattagacccag

SEQ ID NO: 506772 - DNA, 534 bp, Homo sapiens
cccaataatctgccctaggatttaaaatacattattctgagtattgacttagagatacagtggagagagtagattatacatagagacttgtatcaagcaaaagtaaattaagctgccattgagatacttaaataattagtcttctaggaagctgtagagaattccatttctgagtctttggaaaactcctggagtattaccccgactgacatcatcaactattcaatttgcccaagtatgtctacaaagttactttctattcatcatccttcttatgtaaacagttatatgtgccctggaagtttaattctataaatatccagktctccaaattggcccaataataatagtagctaatagttgttaaccacttttatgacatgtgataattcatttaaaactcacaatagtctttggaggtagctgctattctcatcatcatctccattttacaaatgaagaaactgagatatagagaggttaaataatttccaatactatagccaggaagtagtggagctaaattagacccag

SEQ ID NO: 506773 - DNA, 477 bp, Homo sapiens
ctggtatccacggcagaactgattgctcacttgctggggagaaatctactggtcacagaagtcttctatgctgattgttttgtggtgtgagaacagaggaaaaatagtttgagcgctttccactcaactattaaggaattgaatacataattttaaaactcccccaaaagaaatctccagacccagatggttcactggagaattctaaaaaatgtttaaaaaagaattaactcaaatttttaataatctctaccagaaaacagaataggaaaggatacttcccagttcattatataaggcagtattaccccgataccaaaaccagaaaaagtacygaaaaataaaactgcagaccaatatccctcatgaaaatagatgcaaaattccttaccagaatatttgcaaataatattctgctatagataaaaataattgtatactatgtgatatagtttggatatttgtccccacagttca

SEQ ID NO: 506774 - DNA, 628 bp, Homo sapiens
ctgcttacagcttccaggtcttttccataaaccactaaaagcagaaccctctaggatacacctggagctttgtgggctggctttccaagtctgagtttttgctgccacctacaggctcaatctgggcagcacactttgcccttaatgccacttttgactcataccaaaaggtcccttaaatagcgtctacgttgcaaattgcccaaggaaccaaagtaagtatccagccyccatgaatatggcaagtatccccagacaggagctacagggacacgtcctctacatataagggacagcggtaaagcaattaattctcaccaggaatatcttcccttgccggaccctgagatgaccactgagcgtggaatcccagaatcatgccatctttccagcctggaaattcatcacttctcactgcaaacacccacatttattccatgcatcctatgtgcccggcatcttccccatgcattatctcatttattattcacaacaatactatgagataataactctcatcacctctttttacagacaatgaaacaaaccgagtttcagagaaaccaaataacttgtccaaaaaatacagctagtaaatgatagattctgggtttaaacccaaatcttg

SEQ ID NO: 506775 - DNA, 628 bp, Homo sapiens
ctgcttacagcttccaggtcttttccataaaccactaaaagcagaaccctctaggatacacctggagctttgtgggctggctttccaagtctgagtttttgctgccacctacaggctcaatctgggcagcacactttgcccttaatgccacttttgactcataccaaaaggtcccttaaatagcgtctacgttgcaaattgcccaaggaaccaaagtaagtatccagcccccatgaatatggcaagtatccccagacaggagctacagggacacgtcctctacatataagggacagcggtaaagcaattaattctcaccaggaatatcttcccttgccggaccctgagatgaccactgagcrtggaatcccagaatcatgccatctttccagcctggaaattcatcacttctcactgcaaacacccacatttattccatgcatcctatgtgcccggcatcttccccatgcattatctcatttattattcacaacaatactatgagataataactctcatcacctctttttacagacaatgaaacaaaccgagtttcagagaaaccaaataacttgtccaaaaaatacagctagtaaatgatagattctgggtttaaacccaaatcttg

SEQ ID NO: 506776 - DNA, 631 bp, Homo sapiens
ttttcagggtacatgtgatattttgatacattcatatagtgtgaaagatcaaatcagggtaattgggttatccatcatcttaagtgcttatctttttttatgctaggaacatttgaattactgtcttctagctgttttgaaatatacactagattagtgttaactatagtcccctgccgatctattaaacaccagctcttattacttctatctaactgtattaatgtatccactaatcamcctcttttcatgccccctcctcttcctggcctctggaaaccactagtctactctttatcttcatgggatctgcctttttagctcccatagatgaatgagaacacgcaacatttgttaaatgttcatttatatggtttcagaggttcatatgtttccttagctaaattccaagctgtacatgtatagggtgggatttcatgaggccaggcaaagaatgactactgaagagttataagataaacaactcatggatcttaacaggtttcagagacgtttgagttctgagccattactgaacacctgggatattttgtaggttcccggaagcctactggctctagaataaaggcttaagaattattaaggcctgggcccattggtgtatgcctgt

SEQ ID NO: 506777 - DNA, 463 bp, Homo sapiens
ctggtgagatttgagggcaggatcttatgttacatgagtgaccttcttatagatattggcaagaatcattttcttcttctgatggagcagaaaggggtgtgtgtgtgtgtgtgtgtgtgtgtgtgtgtgtgtgtgtgtgtgtgaaagagagagaaagagaaagactttcattgccctttaagccctcaccctagcactgcatctgagccagaagactctgaaatggcctgcagtgttccaggccatttaagggagactggatcttttctgaggctaaatgagggctggttttcctgtgctggagtgggtaaggactccggggtaccctgtgtgcttggagggaggcagtcctgtatttcttaagatgcttaagaagatgcaagatgtgagatgcttagatgatggaaggtgaggagagrttggcctccaggcatcctgctccccgcagagcccctgagaaggt

SEQ ID NO: 506778 - DNA, 624 bp, Homo sapiens
ggattacaggcactcgccaccatgaccagctaatatttgcattcttggtagagatggggtttcaccatgttggccaggctggtctcgaactcctgacctcgtgatccacctgcgtcagtctcccaaagtgctgggattacaggtgtgagccaccatgcttggccctctgatccttctttaaatcaaaaccattagaatttgaactgcaaaattaagggatacacctttttaatgcttttaatacacgctgccaattgccctctaaaaatrtatttattaattacaaacccaactgtaggctaggagtgcctgtttcccaaaaactcagactaaattttgtaaattttcattattttttataagtaggatggggtattatttcatatgtctgttacttttaattcttctgtgacctttctgtttataatcattacccatttctatagagtatttttaattcatatgtgtaatttagatagacctacatttgcttaaactttactttcctcataagcttgtaatgccacctttattatctgcaggttcttatatattgcaaggtcatttacagggctttttactgactttgtcccttggttcaatgtgttagtcatttttgcaagt

SEQ ID NO: 506779 - DNA, 577 bp, Homo sapiens
actttaaattttcttcagaaactttttcccttgcattagcaatttggctcactgtttggcgcaagaagcctaactttatgcctatctcagctttcaacatgccttcctcactaagtttaatcgtgtccaatttttgattgaagtaagagacatgcaactctcctttcacttgaaacttagaggccattttagagttgttaattggcctaaattcaatattgttttgtctcagggaagaggatggtcccaggtaagggaataagaaggagaaatggttggtagttgcagtcagaacacacacatttattcatcattgcagataactgaaagtcaaagaatttgtagctttgtaacataaaaaaaattctgtaaagttgaaaggtgagtcaaacaattagaatgtatttcattcacaaccactgytgtatgtatctacattgatattttttcctcatttttctgattgaaatatgttttaagacctaaaatatgggttacaaagcaacttccttgccctataaagttataccatatcacagagtatttacagatcattgcataaccaacatagatcata

SEQ ID NO: 506780 - DNA, 601 bp, Homo sapiens
tttatttccatctgaaataccaaaccaaatatttcttaattactgttaactgatgatggaagtatagacagtataaaccttattaataaacttactacacatgaaaaaagataatttagcaaaacctgttggcaggttcatcctctagagatacattacattttgattatttttttattgatactccttcatatctaatagtttataaggacattttacacatatagttgaaaacatatcaacatattaactttaatagaatacaagatatagaatatgatgtttaaaaatagaagactgtaaataggatttttatacctaagttagcttaaatatgtaagtaactatttaaatatcttataagaatgttaacacatttttagaargtcttgaatccttggtccagatcttcttatatctaatctgcttataacttttacctagaaaatcagccttagatgattttaaatgacttagcttacctacagccatctaaaaacttgttttggacttctgattctggatagatatagtttcagataattgaagattaccaaggtactgtctgcttacgacacggaaaagcttaatgtttggctaa

SEQ ID NO: 506781 - DNA, 450 bp, Homo sapiens
taaaattaaataggtataaacaaagaataattcaatgaggaagactaagtaacacaagtatagacatgtcaggccctagtgtatacctttttggagattagaaaaataggttgaagaacacaaatgaaactagcttagaaccaggataactgatgcaaattttcaaacatgtatataaatataatagccagtattacaacttaaggcatttttgaatactttggagaaggctcattaaagatgatataaatgtaggaaactacactgtacacaagactattcaatattagaaatattgagccggataaaggctgaggtgagagttacagtttgagttagatagctgtacagtttgggttacataaaggaatatcaaatgcatagaaatagagtgtttttrttgtaagcttttacttaaagaaagtaatgtaatgatatatctctacaagt

SEQ ID NO: 506782 - DNA, 620 bp, Homo sapiens
agtctgagttgttcaggcagcagatgamgggaatacacaacacacaaagaacaaagtactcaataggggaggaaaaagttctttgattatattgacaataatggtggcccaccgtgccttcagaggttaacgggcaggtgaggagtctgtgctgtgtggacttacatgttctagtgtgctgtgcacagagatgtggcatttcacagttctccctctaaaattcctcaggtcctgaaactgaatcttcaactggctattagttagggatctttcaatctcaagtgacagaaattgtattcaaactaactgaagagaaaagaaagacttttttggttcatctatcgaagggatgaaaaatagaaagagtagagctagctggggtgattctggaaacaaaagctcttccagttcttgttccttgcttggtggctttagtctgcccttctggagcctgactttatccaatcaatgggggtctaacttagcatataaatagtggtcctcaactaggtacagatacagggcacaatcacggtggaagcccttgtgaagccttcacttcacaagagtcaaacaatggacatgtaacccgtgtatcaggtagtgccaagttctgtgaa

SEQ ID NO: 506783 - DNA, 535 bp, Homo sapiens
ttggacaacatcattccctccctgaaaaccagagctgaaggccttctctcctcaagaagctgtcctttatcagcacyagtaattctctcttcttttgtaatctctaacatttttctcttctgaaaaaagtatggtgaaatggaaagaaattggattaggacttagaaaacaggttcttctttctgtttctaaaacacatgctaagctccctgctagtactgtgaacttgggtaccactcttaacttctctgaggttcaatgtcctcatatggaagatggcaataatacctgcttcccctagttcatttgaatcatttaaactcaaatgatgttatatatgtgaactgtgaactctaatgcattgtactaaagtggcgtagatgtaatataacaggagacttaagtggcaagggtaactgtaattccttggccgggtggtcataggtgaatctcttaaacttctgattctcagtttcaaagttttatgagaatgattaaatcttctctacctactttatagagttataataagtag

SEQ ID NO: 506784 - DNA, 622 bp, Homo sapiens
tggtttaatacatcaacctgagtcacttcagttttaatgaaataaaaatgtaatatgcctagaaatttttcttgcatataactgtttttggttttctacatttaacttcctacatttgaaaacacacaaaaaaaggacagtgactccaaaatgtaggatttttctaaccaggataccctaaacccacatgaaactgtagtattttttcaataaatggtaaataagttatttttaaaacttaagttctaggagcaaatttcatgttgtgcaaagtctgtatcctctgtttaagacactttcatatgttggagaaaaacattggaacaccaattagctttgtgatcactgaattcaatctgggacattttatcttaactcagcatctcaagtcatctaggacagttcattttacatattgattgcccttcaaggaaatactatagctttcaactcagggcaggaatgtagaagtataaactaaaaacttgagttctaacaagttagaaacactaaaaattattagggtaaattttaaaaggaagcaamaccacaggaaaaaaaaaaactcccaaagcatagacaatttgttatattatacaacatgaaaaatgatactcttctc

SEQ ID NO: 506785 - DNA, 234 bp, Homo sapiens
ggtgtcatttcttccatgatcttttcctgaactatgactttccagtgctcmttcacatattccacggcaaccaccaggctgtgtcataatttctcatgtactcacctatatacttactacccctagactgtttcttgaaggcaaatatcagtcatgcctttctaacctttttataaatctagcttttcataggataggtgttcactgtatatttgttgagtgagtgaatgaatg

SEQ ID NO: 506786 - DNA, 606 bp, Homo sapiens
ttctgtcccctgtaccatgaaaacatctcacctcctgagctgagtagccacagagacaaagagggtaaggaagggaaagaaccttaggcttggggctgtttcctatacctgtggtttttaaaaggaatctggcattcctaggcagacaagaatgcaaactggccaaggtacagagacacctgaatcctgttcctcagacccagagagacgctgggaggtcatatttcctgctttgttttctgctgtaagattccgctgtaactccttgcctaacagaagtgggtgagtgaaggcagcaacgtttcctacagcggacctccgtgtgactccagctcctccctaaaacataaagcctgctagagcatggggctgaagagagtgaagagaaatcactgygtggctttgggtgtcagtggcaggtgttcttactgtatagaggggagctgaagactccctggacgcaagtctccaccccagttagagggaggagttggtaaactgggggaggcggcagagaaaaagtttcaacctcaacactgaaaaacagcctggggatcttggcagggttttagccctcacatctgccttcgaatgagggacttccag

SEQ ID NO: 506787 - DNA, 504 bp, Homo sapiens
cctggttcctcttttccagttgctctgccatctctacggtgctgcccttgttggcattctccaaactggcttccccgtccccacaatgttctaggcaacaggatggaggatgggatagaaaaagatcacaccccttcctgttaaggatatcgatctagaagttacatccaatgatttcactcacagtcttttggccagaactgagtgtgttaccacacccagagacaggggcatctargaaatagagtcttgatcctaggccacccaaatgcaaatcctatcactatcaaagaaggaatggatggatattggggctccaccaggcagtaaccactacccatagcacctcacttaaaacaacacatcacatcattttcaagcagtgtacaaagaatggcccaagataatgatagtattgaaaaaccacctttgcaaaaattataacagtgagaaaattatgacagtgaaagagatctgatctaaccaatccccatcttgtcttta

SEQ ID NO: 506788 - DNA, 504 bp, Homo sapiens
cctggttcctcttttccagttgctctgccatctctacggtgctgcccttgttggcattctccaaactggcttccccgtccccacaatgttctaggcaacaggatggaggatgggatagaaaaagatcacaccccttcctgttaaggatatcgatctagaagttacatccaatgatttcactcacagtcttttggccagaactgagtgtgttaccacacccagagacaggggcatctaggaaatagagtcttgatcctaggccacccaaatgcaaatcctatcactatcaaagraggaatggatggatattggggctccaccaggcagtaaccactacccatagcacctcacttaaaacaacacatcacatcattttcaagcagtgtacaaagaatggcccaagataatgatagtattgaaaaaccacctttgcaaaaattataacagtgagaaaattatgacagtgaaagagatctgatctaaccaatccccatcttgtcttta

SEQ ID NO: 506789 - DNA, 487 bp, Homo sapiens
tatatatgaagtaatacacagagtgaccactgaaaaagctatgagcagagatacattccacagcactcttggtaaatcaaacagaattctttaaaatggccagtcaaggcaggctggaaaagaaaactgagaaataaaatggcaaacctgagtcatacaatatcaataattacaataatgtaaatggaataaatacatcaattaaatgacaaagattggaagactgacttaaaaagcatgacctaatcatacaccgtctacaagaaactcacttcagttataatgatatggactgctgaaagaatggaaaaggatgtatcatacaaacattaatcaaagaaaaacagggctggctgtattaatatcagataaartagacttcagaacaaagaaaataaccagagacagaaagggtcattacataactattaatacataagggtaaacccaccaataagatataggtatcttgaacgtgtatatgcca

SEQ ID NO: 506790 - DNA, 293 bp, Homo sapiens
gtcctcgtgatacaagccagtgttcccaaagtgccctgccattaaacattattggaaaataacgaaagaaaacagcccttgccacataccacacattatctaaagcaatgtttccaaactgcaagtcataacattttcttgagaaatcacttttgtagattgaaactaggattttattaayaaaaatataacatggaatagaaaacaccaaagtgagtacagtcagtcctccacatctgcaggtcacacgtccgtggattcaaccaaatagaggtcaaaagtattgggagaat

SEQ ID NO: 506791 - DNA, 590 bp, Homo sapiens
gccgtcatctaatgcttgagggccwgagcagaacaaaaaggcagagtatggcaaattcactctctctgtctgagctagggcaaaaatcgcctcctgcccttggacattggctcccccagttctcaagcactcaaactcatattgggagttgcaccatctgcattcccggttttcaggcctttggactcaggctaaaatttcagcactggctttcctgattctccagctttgtggatggcagattatgggacttcttagcctccataactgtgtgagccaattccttaaaatctctctctttcattctctctctctctcctattggtctgtttctctgaagaaccctaattaatacatccatacatacgtatgtcttacacacacagatgtgtttgtggtcatttcatctacaagaggaatggagtcataggaataagctccttcacttctgtacatacatacatacatacacacgtgtacgtatgtataatactatacttattcatatgtggttcattcatccctaaaacatgagaaggggcttctggaaagacagcaaacttaaaataatgcaaaaaaagaaaaaataa

SEQ ID NO: 506792 - DNA, 671 bp, Homo sapiens
tcatctaatgcttgagggccagagcagaacaaaaaggcagagtatggcaaattcactctctctgtctgagctagggcaaaaatcgcctcctgcccttggacattggctcccccagttctcaagcactcaaactcatattgggagttgcaccatctgcattcccggttttcaggcctttggactcaggctaaaatttcagcactggctttcctgattctccagctttgtggatggcagattatgggacttcttagcctccataactgtgtgagccaattccttaaaatctctctctttcattctctctctctctcctattggtctgtttctctgaagaaccctaattaatacatccatacatacgtatgtcttacacacacagatgtgtttgtggtcatttcatctacaagaggaatggagtcataggaataagctccttcacttctgtacatacatacatacatacacacgtgtacgtatgtataatactatacttattcatatgtggttcattcatccctaaaacatgagaaggggcttctggaaagayagcaaacttaaaataatgcaaaaaaagaaaaaataaattaaattacatcaatacctcaaagaaatgctaaaatagaaatttactcaaaccagagaaaaattgtattagtgaattagaaatg

SEQ ID NO: 506793 - DNA, 573 bp, Homo sapiens
tttgttgggtgagtgtgcatcacataaacccacatatgcaactgtgggaaatgaagaggaaaatgatgtcacaaagcaaaggaaataaggctgctgcaaaccacaagtcaatacagaagcatcagctaaccatttacraccaatcattagtttttgtgtgcaggtggaacagataagatatggaaaagatagagagttctcttcctgtctatgaatcaacttaccttggtcaagatttcttttgggaggaaaaagaattttttttaatgggcaagaacctctttctgtttaattttctttaggcagtctctacgtgactcttcataaaatcacaaataatgtttaccattgctcatacagatgacaacacaagctttctcaaatacctaagagttattcagaaaggtttctgatacagttgaaatgtgccgtcttagtctgttcaggctgccataccaaaataccatagactgggtgggttttaaacaacagaaatttatttctcacggtactggaggctgcaaagtccaagatcaaggccccagcagatttggtgtctggtgagagcctgct

SEQ ID NO: 506794 - DNA, 612 bp, Homo sapiens
gcgacattcctctgcaataaggctaatgcttccccttgcaactgatgcttggaayataactgtttagtcaccttacatccagtaatgcaggggcggtatcagagctttgcttcaaagctgaaatgaagatcaaaactaatataaagtatagggggaagcagcattaagtaggcccagggtccgcatcttttcttttaagttttgtcccagtggatctgaattgcttttatccaatgattttttccccaggctttaatcccattggcttttttctcaggtgaaaaacaaatcccaagtgtctgtgctgtgtgcctactggtaaggtaaagaaatctgtctgaagagtgaaatcttgacatagacccagccattctgaggaaggggaacagtaccaaggctgagaaaaaaaatgggattaatgggaattggaggggcataggtgttacacacaaagccttgggagagtatctcctctgagaagcctcctttgatttacactccccaccgcccccaccttaattctcaaactgcctaagacttaatagaatatatgcattttttttccaacttaatctcagccagattgaagccaatctccaccagattgaaggg

SEQ ID NO: 506795 - DNA, 637 bp, Homo sapiens
ccgtgacatggcaggctcatgcctagaaattaggaggataagatccctccaactcaagcccatggggattgcttactcttctctggtgccagaagagggcaacacatgaatctctctgggaacttagatcaacctaggagttgacaatagagatagggaaagggaagaaacctccaaagactgaagatgctccccaaagtggctaagaattggaaagcaactgaaataataatctgattttaaaggtcactgattgctgtagatttattaaaattactctgtggagattggagctttaggaaagagttgaatttagatacaaaaaaaaataaagaataaagttatatttaggcaactcaattgttagtgcgtaagttttgrtcctgctattatatatgcatgtgtatatatgtcatcactaatttctattacaactataaataactagctaacatttccattttatggttaacgagtgtgaggcttaatgagataagtaaattgtccatgtacacatcgtacatggagacagacttcaaatcttcaaatcctggtccacccaactccaaagtctgtgccttttccattgttaacacattgcctctgatggagaaaccaccatcaaaaacctgttagc

SEQ ID NO: 506796 - DNA, 614 bp, Homo sapiens
gatgccccgtgacatggcaggctcatgcctagaaattaggaggataagatccctccaactcaagcccatggggattgcttactcttctctggtgccagaagagggcaacacatgaatctctctgggaacttagatcaacctaggagttgacaatagagatagggaaagggaagaaacctccaaagactgaagatgctccccaaagtggctaagaattggaaagcaactgaaataataatctgattttaaaggtcactgattgctgtagatttattaaaattactctgtggagattggagctttaggaaagagttgaatttagatacaaaaaaaaataaagaataaagttatatttaggcaactcaattgttagtgcgtaagttttgaycctgctattatatatgcatgtgtatatatgtcatcactaatttctattacaactataaataactagctaacatttccattttatggttaacgagtgtgaggcttaatgagataagtaaattgtccatgtacacatcgtacatggagacagacttcaaatcttcaaatcctggtccacccaactccaaagtctgtgccttttccattgttaacacattgcctctgat

SEQ ID NO: 506797 - DNA, 614 bp, Homo sapiens
gatgccccgtgacatggcaggctcatgcctagaaattaggaggataagatccctccaactcaagcccatggggattgcttactcttctctggtgccagaagagggcaacacatgaatctctctgggaacttagatcaacctaggagttgacaatagagatagggaaagggaagaaacctccaaagactgaagatgctccccaaagtggctaagaattggaaagcaactgaaataataatctgattttaaaggtcactgattgctgtagatttattaaaattactctgtggagattggagctttaggaaagagttgaatttagatacaaaaaaaaataaagaataaagttatatttaggcaactcaattgttagtgcgtaagttttgatcctgctattatatatgcatgtgtatatatgtcatcactaatttctattacaactataaatarctagctaacatttccattttatggttaacgagtgtgaggcttaatgagataagtaaattgtccatgtacacatcgtacatggagacagacttcaaatcttcaaatcctggtccacccaactccaaagtctgtgccttttccattgttaacacattgcctctgat

SEQ ID NO: 506798 - DNA, 654 bp, Homo sapiens
ctggtatttcttattaagtgattgtggtgggggtggccaggaggggggccgacaacaaaggggtctggacttgagatccagttgggagaagcaagtgaccattccagcaagctgccagagtagtctaaccaggacatgaaatgtcaatttttttttgactgattttggatgctaaggrcatccctatctttattcgtgaaaaaataaggaagaagaattcctacacaaaaagctcttaagtgagggatagtatttatcttccatgaatgaaaacaggatcagcctatggtgaagtttttatatcttgcttaataaaaattgttgttacgtttctatttatctcataagctcttgtaagaagaacacttcattacatattggtatccagagtgtcagccttgattttttttattttcctaagtgctgtgagtgcaactggctgtggctggtgtcgtgggaggtaaaagaatttaccaagacagacagtcatgggtaaggaaaggcagatttattagggaaagtacaaagattgcaagaaagcaatgggcagtgcagcagagagaagtctgtccgccaagaggcgggggctggagggaagttttataggatcatgctggagggggccacctgcacaatgaggtcctgctgctgggc

SEQ ID NO: 506799 - DNA, 654 bp, Homo sapiens
ctggtatttcttattaagtgattgtggtgggggtggccaggaggggggccgacaacaaaggggtctggacttgagatccagttgggagaagcaagtgaccattccagcaagctgccagagtagtctaaccaggacatgaaatgtcaatttttttttgactgattttggatgctaaggacatccctatctttattcgtgaaaaaataaggaagaagaattcctacacaaaaagctcttaagtgagggatagtatttatcttccatgaatgaaaacaggatcagcctatggtgaagtttttatatcttgcttaataaaaattgttgttacgyttctatttatctcataagctcttgtaagaagaacacttcattacatattggtatccagagtgtcagccttgattttttttattttcctaagtgctgtgagtgcaactggctgtggctggtgtcgtgggaggtaaaagaatttaccaagacagacagtcatgggtaaggaaaggcagatttattagggaaagtacaaagattgcaagaaagcaatgggcagtgcagcagagagaagtctgtccgccaagaggcgggggctggagggaagttttataggatcatgctggagggggccacctgcacaatgaggtcctgctgctgggc

SEQ ID NO: 506800 - DNA, 522 bp, Homo sapiens
ctggctggctggctggcaaaagcaacacaagcttttcatgaaatggtgagaaaaaggasaagtcccaaatggcacatgtggctgatggtggaggtcagggttcaagccacgcaggcatccttcccaggcaggggcctgagcgtccctccccaaggacccaagccctcgagtgccgccctcaggtcagcagcactcagaagacctggcaaccccagccctggaatccggagcctgctcagtgctgaaagactgcggcttctcccacagaggcaaacccgtcgtttcacggacttccaccccatcaccggctgtttatgccagtgtcgtgctcagccattttatgtaggattatgtgctgtacgtaccagaaagctcataaaaaaaaaaaagaaaaaaattgaatgaacattgtttttaaaaggcccttaaaaggctataaagtgcagtgactttcatacccttgggtttttccatcttatattagagtccctcaatcaaagccaactctgggcataaggaggt

SEQ ID NO: 506801 - DNA, 526 bp, Homo sapiens
gcagcagtttcagatgtcacttgagaaaaatatttgttgttgtttggttgccctcttcagttgtgatgcttttaggaagttaggaaacagatgagacagtctggctggaataagagggtgggtaaccactgatctgagatcatccctgttgattaggtttgcagaattctaaatggagattgtagcttcacatgcgcactgagggggttgtgcrttttcataggcttatgttccatcgggcttctgcatgatcttggaagagagagactaggtgtggttcttggctctgttggctggtgggtttagctgtggatcacttaagagacccataatccttgcttttgtaccgttctgtattccgtttgtcaggctgcgagggaagggggtttgtgctaatttgtatcttactgaccctgactggaaaagagattaagattttggttgtataattaacataaatgaccaaaaatatcaagcccactcctcacacaggtgacccaggcatccaaatatttactccaatgat

SEQ ID NO: 506802 - DNA, 630 bp, Homo sapiens
tcagtacaggtaacagggacacacagtgacatgccgaggcacgtctcagccttgtccaccccagcactgaggaacaattccgacatagaacaagtaactcccagcatcaggggtacagtgtggcatgctccagaaacacccagcaagagtgccccatggaccctgcaagtggatgggaaatgtcccctgaagaaacaacatgtaaatggcatgtaagctggggtcccaagggaaccaaggtggagggcgaccatcattctaagcagaggcaacgacatgtctaagggagctgagagtgttgaagggactcgggcaagaaaccggtggctggaacagaggacaaggcgagaggggyttggcaggagatgagagaggtgacaagagacgagcttaagcaggcctggcagactgtgtctagaaggtggggtggtatctcaagtacaacaagaagccgctcaaaggcttgggaacaagagtaccactgaccaactggcatttgaaaaggaccacattggcatctgggtggagactgggctggagaaggcaagggcacaagcagggcatgagtcagaagatcgctcaataccgtctgcgcacaggcaattgtggcttggactgcagcagtggctg

SEQ ID NO: 506803 - DNA, 594 bp, Homo sapiens
ctgcttgggagctgaggtgggaggatcacctaagtgcaagagccagaggttgcagtgagctgagattgcaccaatgcattccagccatggtgacaaagcaagacactgtctcaaaaaaaaaatctatttttttttttgtaacagaacacaattggagacactggttgttttamcaaggtattgcctggaatgtcatgctttcagatacagacccctttaaggtatcatagttggcttatagaaataatataagctcttcgaacaagctggccttacacctcttctacacagttcctgtgcaggttccttacctgtggtaagtaaagaattccactttctgacaggccaaggagcccaagttttttgtaacctgggggtgttttgctgaaagatttactttcatcataggtttgaggattcatgagcaaaagaaaccacaatattacactcaaatgcagttaggagaaaagtttaatgattaatgtagtaaaacagtataatggtaaacttagcaaaggctaaagtgggagaaaaggaaaatatgtacgtatatacacatatatattcaccaagttcgggaggatacctacatcc

SEQ ID NO: 506804 - DNA, 567 bp, Homo sapiens
gaggtgggaggatcacctaagtgcaagagccagaggttgcagtgagctgagattgcaccaatgcattccagccatggtgacaaagcaagacactgtctcaaaaaaaaaatctatttttttttttgtaacagaacacaattggagacactggttgttttaacaaggtattgcctggaatgkcatgctttcagatacagacccctttaaggtatcatagttggcttatagaaataatataagctcttcgaacaagctggccttacacctcttctacacagttcctgtgcaggttccttacctgtggtaagtaaagaattccactttctgacaggccaaggagcccaagttttttgtaacctgggggtgttttgctgaaagatttactttcatcataggtttgaggattcatgagcaaaagaaaccacaatattacactcaaatgcagttaggagaaaagtttaatgattaatgtagtaaaacagtataatggtaaacttagcaaaggctaaagtgggagaaaaggaaaatatgtacgtatatacacatatatattcaccaagttcggga

SEQ ID NO: 506805 - DNA, 580 bp, Homo sapiens
ctctggtcaaacagttataggcaggtttggggtagggggttttatttttggcctttggggcttagtctatggaagggggaaacagtccagttgggtggaccttarcaatggtgtatctgtaagtggctggtggcagcgacaacattcttacgctgcatgtgtattgttcagttgtcatctgtgttggggaatctagccactggcccacagagagttaaccagagcttgggagtgtgagaggtgggaaagagggaaccatctactccagcttcctgtctaatttcttcaaggggaggggccctggggaaacaattctgtggaaatgtataaaggaggatagagaaagaatctctgtagggattccttgggcagaggaaggcaagaggagatgcaggccacgtctgggctcatgatagggaaatctgtgctatggggagatgggactgggagtgaagggtgggtgcggcagatggctgggccagcaggtttcctgccacctgttaaaagggggtgggggtcgggtaaagagagtgccttgcagagtaggctgctgcctcccggtggtcagccgcggccttgc

SEQ ID NO: 506806 - DNA, 580 bp, Homo sapiens
ctctggtcaaacagttataggcaggtttggggtagggggttttatttttggcctttggggcttagtctatggaagggggaaacagtccagttgggtggaccttagcaatggtgtatctgtaagtggctggtggcagcgacaacattcttacgctgcatgtgtattgttcagttgtcatctgtgttggggaatctagccactggcccacagagagttaaccagagcttgggagtgtgagaggtgggaaagagggaaccatctactccagcttcctgtctaatttcttcaaggggaggggccctggggaaacaattctgtggaaatgtataaaggargatagagaaagaatctctgtagggattccttgggcagaggaaggcaagaggagatgcaggccacgtctgggctcatgatagggaaatctgtgctatggggagatgggactgggagtgaagggtgggtgcggcagatggctgggccagcaggtttcctgccacctgttaaaagggggtgggggtcgggtaaagagagtgccttgcagagtaggctgctgcctcccggtggtcagccgcggccttgc

SEQ ID NO: 506807 - DNA, 580 bp, Homo sapiens
ctctggtcaaacagttataggcaggtttggggtagggggttttatttttggcctttggggcttagtctatggaagggggaaacagtccagttgggtggaccttagcaatggtgtatctgtaagtggctggtggcagcgacaacattcttacgctgcatgtgtattgttcagttgtcatctgtgttggggaatctagccactggcccacagagagttaaccagagcttgggagtgtgagaggtgggaaagagggaaccatctactccagcttcctgtctaatttcttcaaggggaggggccctggggaaacaattctgtggaaatgtataaaggaggatagagaaagaatctctgtagggattccttgggcagaggaaggcaagaggagatgcaggccacgtctgggctcatgatagggaaatctgtgctatggggagatgggactgggagtgaagggtgggtgcggcagatggctgggccagcaggtttcctgccacctgttaaaagsgggtgggggtcgggtaaagagagtgccttgcagagtaggctgctgcctcccggtggtcagccgcggccttgc

SEQ ID NO: 506808 - DNA, 605 bp, Homo sapiens
cagacatggcgggtagaataacagcccccaaagatgtctatatcctaattcctgaaatctatgaatatgttagattacatggcaaagaagaatgaaggttgcagatgaaatgaagatgtagatattatactggattatccagrtaggtccagtataattacaaggatccttataaagaggaaggcagaagggagagggtgtcaatgacgtaatgtaagaaagattcaactttgaagatggaatggggccatgagccgaggaaggcaggcagcctctaaaggctggaaaagacaaaagaaaaaaaaagtaaaaaaaaaaaacaaacccagaaaaccaacagaaacaaacaaaatagattcttcccaagaacctccagaaaggaatgcagctctaccagcgtcttgattttagccacacaagacccatttcagacttctgatgcctagaactataagttaatacatttgtttaagacagttttagcatttgcctaaaacataagccatgaaatttgtggtaatatttgtgagagcagctatcagaaaccaatgcagcaggctatcctcttgcaactaggagaatggctcccttggttctgaaggaag

SEQ ID NO: 506809 - DNA, 605 bp, Homo sapiens
cagacatggcgggtagaataacagcccccaaagatgtctatatcctaattcctgaaatctatgaatatgttagattacatggcaaagaagaatgaaggttgcagatgaaatgaagatgtagatattatactggattatccaggtaggtccagtataattacaaggatccttataaagaggaaggcagaagggagagggtgtcaatgacgtaatgtaagaaagattcaactttgaagatggaatggggccatgagccgaggaaggcaggcagcctctaaaggctggaaaagacaaaagaaaaaaaaagtaaaaaaaaaaaacaaacccagaaaaccaacagaaacaaacaaaatagattcttcccaagaacctccagaaaggaatgcagctctaccagcgtcttgattttagccacacaagacccatttcagacttctgatgcctagaactataagttaatacatttgtttaagacagttttagcatttgcctaaaacataagccatgaaatttgtggtaatatttgtgagagcagctatcagaaaccaatgcarcaggctatcctcttgcaactaggagaatggctcccttggttctgaaggaag

SEQ ID NO: 506810 - DNA, 396 bp, Homo sapiens
tttggtattgggcaaatcacttaacctttcaaagtctcagatttctagtcagtagagtaaaaatactaacaactagctgactccaaacaactagttgggaggaatactaacaagcaacaatttgcaatagcatgaaatacctgcgtgaagctgcraggaccatgcctgatgcagacgaggcaggagctcaatcaatgctggaacatcaatagcaaatctcagcttccgtctggaagctggcagcagcagcagcagccagatggcctctcttggaagctgtacactgaagcctgtactttccaagttcaactggcccctacttttgaagatctctcttggataccaggaatggagctttatggacgatctcacaactagcaattcacaatgagtaag

SEQ ID NO: 506811 - DNA, 396 bp, Homo sapiens
tttggtattgggcaaatcacttaacctttcaaagtctcagatttctagtcagtagagtaaaaatactaacaactagctgactccaaacaactagttgggaggaatactaacaagcaacaatttgcaatagcatgaaatacctgcgtgaagctgcgaggaccatgcctgatgcagacgaggcaggagctcratcaatgctggaacatcaatagcaaatctcagcttccgtctggaagctggcagcagcagcagcagccagatggcctctcttggaagctgtacactgaagcctgtactttccaagttcaactggcccctacttttgaagatctctcttggataccaggaatggagctttatggacgatctcacaactagcaattcacaatgagtaag

SEQ ID NO: 506812 - DNA, 625 bp, Homo sapiens
tatagttacaaatggttaaggtgataaattttatgttatatatatacattttataattaaaaaaagaatttaatggcttgatgaattctttaaaaatatctgttgaacttcctatatacacgaacacacatatgcacacacacataatgcaggtctataataatagaaatcataaattttatctggtatatgacaagttaaaattatatgcaatatgattatgtaactcatagccaaaattatgaaaataactataatgggattgttttgcatagcaattgtgtatattatgtcattacattagaatgcaatttgtaataatattttctttgattgctctcaggtatgctatttaaaagttattttatattaaaacgccagtacttataaaccagcttaatttgtggatttatytgaaaatcattattttaaactcaaagtcaatacagtaaaatggtcaaaattatttgttcaaaaatatttaaaatccaacatgtaggtggagtaatccaagtatttaagaagcaacagctttatactggtccttagcatagacgatgatttgctcctgccttagtctcctgtcgtgtttcctgctacatattccagctactctcatttcttg

SEQ ID NO: 506813 - DNA, 631 bp, Homo sapiens
tgtattgtagttttcaacttttcaatgtctttgcacatgctaggctttcacaacacatttttctccctttgtatatctgggaaaagactccaaataatgctttacatttcaktccattaatgcctcctttgggacatctttcctgaactagcctttgtctcattctccataactctgaaatagcattatttacctttggaatgaggactctttgaggatgggaattattatcatttattattttactgattttttttctaatgcctactaaagtactctccacattagaaattcaattagtcttgagggattaaaattagtcaacggcccatatttgaaaatcacattaattcatcttgaagtataagttaatatctattattgaagtaattgtctaaccacctagttccttttatggtactgtttttatgattgctgcaacataatttttaataagaatagttaggtagaaaagctacatttagagaggaatgttatttctgcagtggcagtgttttatggcaagtgcatgggattagaaggtaagaaagcatgattcttgcccctccacttttacctctactttctacgaatttctatttccttatctgtgagatgaagcagttcagtt

SEQ ID NO: 506814 - DNA, 640 bp, Homo sapiens
ctgtttgtgaactctgatttactaagatttactacatttaatgagagtacaaaagcgggttttcaactaccaggatatatttgaggccaagagaagaaaataaaagccactgagcatgtgaagcaataatttcratgatactttccaatttcgaatgatgcataaacttccattacaaggagaaatttgctgtttgctttgagaagtcttgtcactactcttgaagaaaagggagaaagaaaattagcatttatatctttcctcctttgtggtaaactgtattctaggcacttcacatatattaattaactcagttaatcctcacataatccttagggaatggctgttatctgcgttttacaaacaccccagggagaactggtaacttgtctaatgttatatggctaatatgtgcaagacaacggttagaacacaggctaatttgactctaagacctgtgctttttaaatgtcagttatcttctgtttatatctgtattgcagattataattaatgtgttaacatacattcactgtagaaccagcggttttttttttccctgttgttgttacttgtggaatctacatatgagggttgtgacctaacttgtttcctgggaagcatcataacattctatcat

SEQ ID NO: 506815 - DNA, 640 bp, Homo sapiens
ctgtttgtgaactctgatttactaagatttactacatttaatgagagtacaaaagcgggttttcaactaccaggatatatttgaggccaagagaagaaaataaaagccactgagcatgtgaagcaataatttcaatgatactttccaatttcgaatgatgcataaacttccattacaakgagaaatttgctgtttgctttgagaagtcttgtcactactcttgaagaaaagggagaaagaaaattagcatttatatctttcctcctttgtggtaaactgtattctaggcacttcacatatattaattaactcagttaatcctcacataatccttagggaatggctgttatctgcgttttacaaacaccccagggagaactggtaacttgtctaatgttatatggctaatatgtgcaagacaacggttagaacacaggctaatttgactctaagacctgtgctttttaaatgtcagttatcttctgtttatatctgtattgcagattataattaatgtgttaacatacattcactgtagaaccagcggttttttttttccctgttgttgttacttgtggaatctacatatgagggttgtgacctaacttgtttcctgggaagcatcataacattctatcat

SEQ ID NO: 506816 - DNA, 640 bp, Homo sapiens
ctgtttgtgaactctgatttactaagatttactacatttaatgagagtacaaaagcgggttttcaactaccaggatatatttgaggccaagagaagaaaataaaagccactgagcatgtgaagcaataatttcaatgatactttccaatttcgaatgatgcataaacttccattacaaggagaaatttgctgtttgctttgagaagtcttgtcactactcttgaagaaaagggagaaagaaaattagcatttatatctttcctcctttgtggtaaactgtattctaggcacttcacatatattaattaactcagttaatcctcacataatccttagggaatggctgttatctgcgttttacaaacaccccagggagaaytggtaacttgtctaatgttatatggctaatatgtgcaagacaacggttagaacacaggctaatttgactctaagacctgtgctttttaaatgtcagttatcttctgtttatatctgtattgcagattataattaatgtgttaacatacattcactgtagaaccagcggttttttttttccctgttgttgttacttgtggaatctacatatgagggttgtgacctaacttgtttcctgggaagcatcataacattctatcat

SEQ ID NO: 506817 - DNA, 513 bp, Homo sapiens
tactctcattttagaaaatatcaaatacattaatccacaggaagcaaattaactaccatttgctgagcatcatatagctattcatatatatatatatatatatatakagagagagagagagagagagagagagagagagctattcacattcatattttgtaattggcagaatggctgttagagattatataattataaagtgagaattgtttattgatcaggaatctgaggttgaaagatgttaaattctttgcaagatcatacaaccgttatatgtttgaattactcctattctggttcagtctgttaacacatgaacctacctcatacccacttcagccatatcacatatgctaatagaagcactataaattatttctcctatgtaaaactaaatctaaaaatacttcccacacaattacattggttacaatgttcaaagaacgtgaacattaaagagaatatgaaaatatttttctatatcttaataatttttctagttccattgattac

SEQ ID NO: 506818 - DNA, 533 bp, Homo sapiens
cttgaacccaggaggtggaggttgcagtgagccgaaatagtgccactgcactccagcctgggcaataaagagagagtctgtctccaaaaaaaaaaaaaaaaaaaaaaaaaaaaaagwctatgtcaatttaaaaactaactctaacttgatttggggcaataaaactaacaaaacttaaggaaatgttcaaaatatgtaaaattgtattttcagtaaatgattatctaataaaccaacaataagacaaatatccatggaactctcccaaatgtatatccttaccttattttattttatcgtatctttcattcttaaccctaaatttcctgtccaattttgggtgagttgtgggtctccatacatactggactccaaaaattaattctctatctaactatctattagaaaattacataaaatcaaatgttgattcactttcctgtttaaacattgtgaaaagggtaagcatatgtaatgcttatttttcataaatattaaaacttcctaaatagtgtaaaatatatattatccca

SEQ ID NO: 506819 - DNA, 533 bp, Homo sapiens
cttgaacccaggaggtggaggttgcagtgagccgaaatagtgccactgcactccagcctgggcaataaagagagagtctgtctccaaaaaaaaaaaaaaaaaaaaaaaaaaaaaagtctatgtcaatttaaaaactaactctaacttgatttggggcaataaaactaacaaaacttaaggaaatgttcaaaatatgtaaaattgtattttcagtaaatgattatctaataaaccaacaataagacaaatatccatggaactctcccaaatgtatatccttaccttattttattttatcgtatctttcattcttaaccctaaatttcctgtccaattttgggtgagttgtgggtctccatacatactggactccaaaaattaattctctatctaactrtctattagaaaattacataaaatcaaatgttgattcactttcctgtttaaacattgtgaaaagggtaagcatatgtaatgcttatttttcataaatattaaaacttcctaaatagtgtaaaatatatattatccca

SEQ ID NO: 506820 - DNA, 159 bp, Homo sapiens
ggcctggccttgtaggtggcttaggccctgggcttaattaagggaaccacatgggaaaatgatcttggtggctcactgcagattatggcggctttgcctacaggcaaaaggatatttttatatagraaagggtggttttccatacagacagcgttgtgt

SEQ ID NO: 506821 - DNA, 640 bp, Homo sapiens
tgtgaattgttaatgccaggcctaactcatctgctattgaactggctgcctcaaattccattaactgcactcaaggacaaaagggaatgggggcagagcaatttccagtgttctttgtcttttataatttattttaaaggccacagcacctgatattcccaggcagtctcccatccaagtactagacaggcccaaccctgcttaacttctgagatcaggtgtgttcagggtggtatggccttagacaagtgttctgtcttaagagtgtctcctggccgggtgtggtggctcatgcctgtaatcccagcactttgggaggccaaggcaggcagattgcctgaggtcaggagttgaagaccsgtctggccgacgtggtgaaaccctgtctctactaaaaatacaaaaaaattagccaggtgaggtggcatgtgcttataatcccagctactcgggaggctgaggcaggggaattgcttgaaccagggaggtggaggttgcagtgagccgagatggcaccactgcactccagcctgggcggcagagcaagactccgtctccaaaaaaaaaaagtgacccctgtgatgctgcctcactgggaggtctctaggcttgctttgtgtcttagtttgctttcctccaa

SEQ ID NO: 506822 - DNA, 504 bp, Homo sapiens
tgctgtgatagtttacgtgtcttgttaactcttttgattcctttgaagtggaacatatgcaaagcctgtcatttaacctaacttgggagggtctgaaaaaactaaattcacacagtggacaagaacccaggcagcagctactgaaaaactcaaaatctacccaggcattgtataacattcctacctgagactgagcagaattaaaatctagggagattaattatggattttaaattatttggattttggattttaaaaggcaagataatctgatttcaaatttaaacttgcaaaaagattcatttttttaacagtaatttttttctctgaaaattcataatttaagataatttatatttaactttgggggcacttactkttggtatcctattaatggtgtacagtatttgtatgttgttatttaatagcattacagaatctctgatgagctgcattaaatttcatggctgggcaaatttgtgataggaaatggaatacagactg

SEQ ID NO: 506823 - DNA, 635 bp, Homo sapiens
ttaagataataatttgtttcaagtagctacatggaatagtaagaaatctatatttttctctaatttttctctgttgttgggtatatgaattgttacaccatgaattaactttgtgaatactgaaagtctgaacgaaaccaagatactttcttcttgcagtcagttttcaagatccattttgtatcccacagactatctgcctgtgcacaataggcctccaataaatgtttgatgaatttaacttaatgtaatacaacctacatgagcgccatggtgagtgcagaacagacatacgatagtgagccagcactcaaaaaaggcagctagtttattaacaataatttgccaccagccatacttagcagtagattatttttcatgctgtttcttgatcttatcattaaaacatactcatgagctcccttttgaagcaagctcaggttaagatatgtctctattctctgaaattttacatttaaagatatatcacacagattggctcaaaggaaataggtaatagaggcaatcaagccagcaytggctaggttcatgcattacccatgtcttctcaatgtataaaaatgactatctccatacatgtatacattgtataatgatcaaatcatgttaattac

SEQ ID NO: 506824 - DNA, 506 bp, Homo sapiens
ccttgcttcttcaacaaaaaagaattatacagttttacaagctctttgcattgcttagcatctttcaatagtcttttacatgatattaataaaatgtaggttgtccattacatatattttattatgataaaactcaaccaatcctgttttgttggacattcatagtatttccaaattctaagcctgctatgttgaacattttatttctatacttgtcagattatttccattggataaatgcctagaaataaaatttctgggtcaaaaaatatacatttttaaggctttggtactatttactctcctgmaaaattgtacaaattcacacttataaactcagtcttgaagtcttatccagtagttcacctagccatttactgctctaaataacccttctccatcaggggtcctctgtagcttgccttaattcttaatagaagcggtgagggtgagggtgagggtggatgtttataaaccatttctttattaaggaacttgactatcag

SEQ ID NO: 506825 - DNA, 506 bp, Homo sapiens
attaaaaatgttctctttccttgctcacctcctgtcctttcttatcttgaggcctttgtcggtgctaattcctctactttgtatgccctgccatcttgagacacccttgtctgtcatctttgtttgttcttaatactaaacacaggkgctccaccctccacaaagcttcccttgacacttaaactccaagtttgctcctagaacctcctctgtatagttttctaccaccccagaagatgctgcatcttgttttttggctgtgtctcctatcaacttgatgtggggaaaagcaaagcaaaataaaacaaaactttattagtgccagaaaaaaagaatcatcaaaaggatcaccctttagaactatatattatacttcctgctaattcattccacttttccctgaggaaatgctatgtacacatgcatgtgtataaacccattgttatgttaattcaaccaattagtttttttttaatttatcagtctcctttttcctcatgaccatc

SEQ ID NO: 506826 - DNA, 544 bp, Homo sapiens
ctttatatgtaaaaacacctttggaagaactggcacattaaaattgtttcacacagagatgtaaatgggtgccaatcttcattaagtttgctgtgacataaacaaaattatactttttctatatcatgactaaaaagtaaaagagcgaaagtagactaacaaaatggagagaaagatgccataagatttcgcaagaaacacaggaaaaggggggcaagggatattaaaccaaaatatgagattaattcccactttttctaaggcacaacttcagatgtttaatttttcattactaaagaagataacgatcaacctttaaaaataattgtttttccatattatctttatatctgttttttatagtgagacattcatgttttgttcattcacttccatgaygcacaccttgcactgataaaatgaccaaggcacccccaggactcatcatggatggtgacgaaaatcaagcctgaaaacttggattcagtgtgtcatcctttatagtagcacaatttagaaacaagttagactattatgaataagt

SEQ ID NO: 506827 - DNA, 589 bp, Homo sapiens
caatgattctgactcataagtggtgggccattaattatatacatatatgcagagacacacacataaactttaagaaaataaaattttaggaaaatagataaaatgtcaactagtattttattgttctgctaaatgaatttgttgtcattcatgacagtgtaatgattccatcttgtgtctttgtgtaggcacatgtgtgaaccactttaatccccctctttttaattttctaacattaaaaaaactatttttttgtgtccatgagacatacagtttcaaaattattttatgaaattgaatggatagtataggaattaatgtcatgtatatcacagtgtgattccttttaaaactgaatgagaggaagttaaggcatgcctactggttttcaggggcatctagtaactttgagttattaagtaatgaaatgtgagtgacggagttcaagttcctattaaacataaggagaaaaacattcatatagtaggtttaatcactgttactttacactttgatgtrcaaattaaaatcgagaacgtgtcatttaagtaggcttaagagttattcagaggtagaaatatgacagcag

SEQ ID NO: 506828 - DNA, 391 bp, Homo sapiens
catcccaggttggcccctcatcctcagagtaacatcctggagagctgtcatcatccaagcttgcctcayatcttctgtcctaaatttttatgcgccaccttctgcccgcaaacttcttgacatcttcagcctgatttcctcttttccttttttttcctcttttatccatttctcagttcattctcttctgctttcattgtttttctgaacatacctagacctcatggtcaatcatcgcattgatcatttctttctaatattagaaatgtcctgactttcttgccattattcttacacacagtcagaataatccaatctaatcattcttttctctttgacttccacataacaatcattgctaggaaaattaatggttagactgccattggaa

SEQ ID NO: 506829 - DNA, 391 bp, Homo sapiens
catcccaggttggcccctcatcctcagagtaacatcctggagagctgtcatcatccaagcttgcctcatatcttctgtcctaaatttttatgcgccaccttctgcccgcaaacttcttgacatcttcagcctgatttcctcttttccttttttttcctcttttmtccatttctcagttcattctcttctgctttcattgtttttctgaacatacctagacctcatggtcaatcatcgcattgatcatttctttctaatattagaaatgtcctgactttcttgccattattcttacacacagtcagaataatccaatctaatcattcttttctctttgacttccacataacaatcattgctaggaaaattaatggttagactgccattggaa

SEQ ID NO: 506830 - DNA, 549 bp, Homo sapiens
aaaattctttcagaaaatggaaaaagatggaatgttattcaattatcttatgataatagcataaccttgacaaccaaaccsaacaagaacaatattagaaaggaagataataggcccgttttattcataaacataaatcccaaacaaaatattagcaatatggatccaaattggatttatgctaggaatgcaagtttggcttatacattagaaaactgatataatttatcacagtgacagactgaaggattatacatattggctgtcctaagcagtgcaataagatgagaaaaagaaggaaaatatgtaaggattgaatatgatgaaacaaactcattgtatgtggaagatatgatggcatagatagaaaatccaaaggaatttatatataaattattagaatttttaaaatttttcaagcttgctgaaaacaaaataaataccaaaattaattgtatttctgtatacctgaaacagttggaaaaatagttttaaatagcatttaaaaattccaagcaggagttgcacattcctgtcagataatggcag

SEQ ID NO: 506831 - DNA, 665 bp, Homo sapiens
tctctctaatctatctatcatctttctatatctatctcaatccatccatccatccatccattcatctatatctatcatctatatctatctatcatctatatctagctatctatccttctatctctctaatctatctatcatctttctatatctatctcaatccatccatccatcmatccattcatctatatctatctatcatctatatctatctatcatctatatctatctatctatctgtatctctctatctatctatttatctttatggttttattcctaattgaaaacacaggtgcatctctatcacattacaacagttatagatacttcaaaatatttgcgttcattgttactttaaagttatggtagatatgacactcaaagaaagatctcctataatgtgttaataaagatgcatgggtaccactataaaatatttgttctttgtatttacctacctggatttcactatggttggcttcttttgtaagcctgtgggttttgttatatgtatatataaacattattcatacacgaggtaaataagcttcagcagaactttcagggaggtcatgttataaaaaggtggaggactcatcggtatttccagtactagagctcagctttgttagcgtagctgcaggtaatctgggactgtggtc

SEQ ID NO: 506832 - DNA, 665 bp, Homo sapiens
tctctctaatctatctatcatctttctatatctatctcaatccatccatccatccatccattcatctatatctatcatctatatctatctatcatctatatctagctatctatccttctatctctctaatctatctatcatctttctatatctatctcaatccatccatccatcaatccattcatctatatctatctatcatctatatctatctatcatctatatctatctatctatctgtatctctctatctatctatttatctttatggttttattcctaattgaaaacacaggtgcatctctatcacattacaacagttatagatacttcaaaatatttgcgttcattgttactttaaagttatggtagakatgacactcaaagaaagatctcctataatgtgttaataaagatgcatgggtaccactataaaatatttgttctttgtatttacctacctggatttcactatggttggcttcttttgtaagcctgtgggttttgttatatgtatatataaacattattcatacacgaggtaaataagcttcagcagaactttcagggaggtcatgttataaaaaggtggaggactcatcggtatttccagtactagagctcagctttgttagcgtagctgcaggtaatctgggactgtggtc

SEQ ID NO: 506833 - DNA, 616 bp, Homo sapiens
ctatctatcagaacttctttttctccatgcatgctgcgggctagatctttagatgtcccccaaggttttctgtgccatgacacacacacgtgccatcagttcyaggggctggggattcaaacagattttactcctatgatcaggttatatcttaaggcaccattgagcatacaacgcagagagtatctgtgtggactggacctattcccatgatccctttaaaagataagttttctctgactggttgcagaaggagagctgggcgtgcaatttctgattctctaattggatttaattgtagacatgacctataagaaataagagcagaagttcatgctgggaagaggctgagatggaaattgagtaggcaagatgagaaaatgtttcatgggactaaatagctgagcaaacagcaatggatgatgtagagcttacagattaaccttggctaaattctataatcattacaagtgtacactattgatgcaagttcaatggatccaattagataatcaggaattaactttaggatatataagggttggctgggtgaggtggctcacacctgtaatcccagcactttgggaggccgaggtgggtggatcacttgaggtca

SEQ ID NO: 506834 - DNA, 616 bp, Homo sapiens
ctatctatcagaacttctttttctccatgcatgctgcgggctagatctttagatgtcccccaaggttttctgtgccatgacacacacacgtgccatcagttctaggggctggggattcaaacagattttactcctatgatcaggttatatcttaaggcaccattgagcatacaacgcagagagtatctgtgtggactggacctattcccatgatccctttaaaagataagttttctctgactggttgcagaaggagagctgggcgtgcaatttctgattctctaattggatttaattgtagacatgacctataagaaataagagcagaagttcatgctgggaagaggctgagatggaaattgagyaggcaagatgagaaaatgtttcatgggactaaatagctgagcaaacagcaatggatgatgtagagcttacagattaaccttggctaaattctataatcattacaagtgtacactattgatgcaagttcaatggatccaattagataatcaggaattaactttaggatatataagggttggctgggtgaggtggctcacacctgtaatcccagcactttgggaggccgaggtgggtggatcacttgaggtca

SEQ ID NO: 506835 - DNA, 616 bp, Homo sapiens
ctatctatcagaacttctttttctccatgcatgctgcgggctagatctttagatgtcccccaaggttttctgtgccatgacacacacacgtgccatcagttctaggggctggggattcaaacagattttactcctatgatcaggttatatcttaaggcaccattgagcatacaacgcagagagtatctgtgtggactggacctattcccatgatccctttaaaagataagttttctctgactggttgcagaaggagagctgggcgtgcaatttctgattctctaattggatttaattgtagacatgacctataagaaataagagcagaagttcatgctgggaagaggctgagatggaaattgagtaggcaagatgagaaaatgtttcatgggactaaatagctgagcaaacagcaatggatgatgtagagcttacagattaaccttgrctaaattctataatcattacaagtgtacactattgatgcaagttcaatggatccaattagataatcaggaattaactttaggatatataagggttggctgggtgaggtggctcacacctgtaatcccagcactttgggaggccgaggtgggtggatcacttgaggtca

SEQ ID NO: 506836 - DNA, 551 bp, Homo sapiens
ttatctcctgactagaacacagaggtgctttgaacatttactgtgggagtgtaatgttgctaaactctgttctggagagtggtctrgtggctttaaactgtaaggagaggcagagggagggcttcatctctggttctattagataaaaaggtcgccaaagctaaggctttgagaactcactgaggcgggttgtgtgggagtaatggtgccaaccagctccaaagtcgaagcctgggctctgtggcccccttatttcatggccaatttattcactggagcttttcttcttagttttctcacttgggaaacaagaattataatactactttccttctaggattgctgagaagatttaatcaaataaggaaaataaagtccagggcctggattaagtgagcacttaacaaatgtcacttatttggtgttattgtcaatcttgacaaaatttgtcaagtagaaatcaaactttttttaatttggtgattgtaatcaaggaatggcttgaaattatggtgtttactaatgttgtttgccaaatatcccaagtcttc

SEQ ID NO: 506837 - DNA, 551 bp, Homo sapiens
ttatctcctgactagaacacagaggtgctttgaacatttactgtgggagtgtaatgttgctaaactctgttctggagagtggtctagtggctttaaaytgtaaggagaggcagagggagggcttcatctctggttctattagataaaaaggtcgccaaagctaaggctttgagaactcactgaggcgggttgtgtgggagtaatggtgccaaccagctccaaagtcgaagcctgggctctgtggcccccttatttcatggccaatttattcactggagcttttcttcttagttttctcacttgggaaacaagaattataatactactttccttctaggattgctgagaagatttaatcaaataaggaaaataaagtccagggcctggattaagtgagcacttaacaaatgtcacttatttggtgttattgtcaatcttgacaaaatttgtcaagtagaaatcaaactttttttaatttggtgattgtaatcaaggaatggcttgaaattatggtgtttactaatgttgtttgccaaatatcccaagtcttc

SEQ ID NO: 506838 - DNA, 551 bp, Homo sapiens
ttatctcctgactagaacacagaggtgctttgaacatttactgtgggagtgtaatgttgctaaactctgttctggagagtggtctagtggctttaaactgtaaggagaggcagagggagggcttcatctctggttctattagataaaaaggtcgccaaagctaaggctttgagaactcactgaggcgggttgtgtgggagtaatggtkccaaccagctccaaagtcgaagcctgggctctgtggcccccttatttcatggccaatttattcactggagcttttcttcttagttttctcacttgggaaacaagaattataatactactttccttctaggattgctgagaagatttaatcaaataaggaaaataaagtccagggcctggattaagtgagcacttaacaaatgtcacttatttggtgttattgtcaatcttgacaaaatttgtcaagtagaaatcaaactttttttaatttggtgattgtaatcaaggaatggcttgaaattatggtgtttactaatgttgtttgccaaatatcccaagtcttc

SEQ ID NO: 506839 - DNA, 564 bp, Homo sapiens
tcgcttctcacaccaacttcaacaatttcctgtcccttcatatcatgtagcattggagtgaccaggggcactttttggatctgattgaggagaagttaattatggacacatttagtttaggttttrtgggacacatccatgtgctttataacccatctaatgcaagaattgcccccagaaatattcctgctacctatcaaaggtgcgttccctaaggcgtgatcaagacataattgtgttctacagcaccaagaaccggaagtgtggagatgatccaaaagaggccatatttgaaatggatggaatcagaagctggtctttgaaaaactcagtcatcagacatgtaaaatttcaaatgggagattcggttttcactgatgccaattgaaaacaaagctctctttttaggaatggactcataatatagcatatacaattataaacacactgcttttattttgttttggggaaaactttccaaaatagaatttctcattattcctatgtttgtagggcaaaaactcgtagcagcactacaaaacaaatgagtatttctgtgtacag

SEQ ID NO: 506840 - DNA, 357 bp, Homo sapiens
ttctcattatttttataccaaaatgtatggccaattcacaaataataagattacatcaagatatactgtaggaaattctgttcagaatcaggcacatcagaattttctaaggcacgaarctatcattatggatatgaattctggtaaattcggaaatatcgtagatagaatttcctactgttagaatgtgagataaaccagttctcacgataaggaatagaaattctcctatcggtcttatataagatggcacaaataaagcaataagattgataatcccaatgttgttgccatttctgttttatgtgaaactgaagtccatccccattgcgtgctggctcctttatcttgaactgt

SEQ ID NO: 506841 - DNA, 357 bp, Homo sapiens
ttctcattatttttataccaaaatgtatggccaattcacaaataataagattacatcaagatatactgtaggaaattctgttcagaatcaggcacatcagaattttctaaggcacgaagctatcattatggatatgaattctggtaaattcggaaatatcgtagatagaatttcctactgttagaatgtgagataaaccagttctcrcgataaggaatagaaattctcctatcggtcttatataagatggcacaaataaagcaataagattgataatcccaatgttgttgccatttctgttttatgtgaaactgaagtccatccccattgcgtgctggctcctttatcttgaactgt

SEQ ID NO: 506842 - DNA, 536 bp, Homo sapiens
agctgcacacaggaaaaaaaactaaatgtcatgtttcaatagtgtttaaactatcctgcacacatgcaaaaaaaataccacatgcacatttaagtaaaactctttcaaaataggcaaaacaggatggtgtagcasaaagagactacatttactccaatctgtaatgaaatcctggttttgcctcgctggctgggtgggtttagcaagtcacttattcaacttatctcagcctcactttcttcatatgtaaaatcatataaacttcagttttctcatttgtaaattccctcactttcttcatatgtaaaatcatataaacttcagttttctcatttgtaaattccccattcagtttccttctggaaaggtttgtgtttatgttcggtatctacacataacgtgctcaaatggcacctgtacgggtagaatggtatttgatcagtacagtagaaattaagataaaagtgttattgagtatcagcaagatggcagaatagggctctctaatgcttgtctctcccacagaaacatcaatt

SEQ ID NO: 506843 - DNA, 685 bp, Homo sapiens
tggcctgccaactcggcagagagggtgctggggagcccacgctcctgggaaacgctgcactctagacggcttcgtttccatttggttgtgtttttcaacgtctttgtgttaatcatagttctgatattagcagttctcttcatttttggttttatgtccctcatggggtccaaaagcagccctgcacatgattaggagtaacaacacaggcagatataaagggtatgagtgtttctgttttcttttgtttgtaaactgtccatctacattgagggtctaatacattcatgtcaactgggaatttctcactgaacgcytttcaacagttcaaatcaagaacaattgtgaaaaaatgtgctcattagtattattgaaaaccaaataaatttcttattggtggcaaatagataatgtctcctgcatttgatcaaacagcagatgcgatccacactttgacttttcctatatgcagctccgtgttctcaatgttccctgtctcctgagctattcctgtgtgtttgtttgctatgaacatacattacactctactttctaaaatgtgaatagagtctctatacacaagtcatttcacattatgggaggcaagaaccagtgtgggtctgtttgtgggtgggaaagggagagaggcacctgtgagaagtccgatgcagtccatccccagaag

SEQ ID NO: 506844 - DNA, 574 bp, Homo sapiens
caatataaactttttttctgcttatttccccaggtgtataggtaataatgataatcaaaacaattataaaactagaattagatacacatacatacayacacattatattttaattcagagtgatgtaggtcactaggcttgctaaagtagtctcaagaagtatgtatatatgtgtatgtgtgtgtatatatatacacgtatatatgtatgtatatatatttgtatttgtattcatttttaaatattaaaatgtctgtagaagagtcatgagactttagaataaagataactgaaacaaataccaatgtatttattgctaagtctgcaagtcataaaagagatccattttcatgagttctgctgtgctaacctgtggaaaacaaaatataagcagggtttaacttctgcagttataattaatctttctaaatttaacatcattctacaataataaaatttttatctagtccctgttaagtgtgtaaataaattcaatgcaaagtaatgtttaaacatttttggctgttgcttttctaaattcatctaaggcattttcatttaggtctcagttcat

SEQ ID NO: 506845 - DNA, 252 bp, Homo sapiens
gaaggaaagaaagaaggaaagacagaagaaaggaaagaaagaaagaaagaaagaaagagaaagaagctgygaagtgtagtcccttcatttgttagtcatctcctcactacctgaccagttccaaccagaggccacatttttctaggcagtctccaaatgcacattatgaggtagactttaataatggcagtgaagctccaggaaaacttacattgttattaacatgtaatacaaccagccatgaaagctgtc

SEQ ID NO: 506846 - DNA, 463 bp, Homo sapiens
tacccctacaaatattgaaataacaaaatatattcaatgttttcttagctctgctgtgacctcgggtcagcaggtcagtgaggtcaaagctggcttctcaggacctcgtggcattcccatcatgggcaacggcaggatagctcagctcaggtgtcccttccaccttcataggggaaaaggagcttgagggggctgagggggagcaccagcgacagtcacgtgattcttttctcaggaaagctttggcttatccggagccaaacctgctggaggctacgagaagattttcacgagtgtcacttttggggagaaaatgtcagaggagaatccctgacagagaagtgaccatttcaaatttttcaaatttccatacccccccgcccaccccgctccmggaacacttcattctcaaaggaactgataaaatctcatgatctcatgcattggtgttttgaagcagatg

SEQ ID NO: 506847 - DNA, 561 bp, Homo sapiens
ttgtggtcacaataaagcagctttgatattcgtatctattagaaakatattattgttttcctagacatatgttctgatttttaaaaacttaattatcaatattccttcaacccttttttcccctggaattttcaggcgtaacattcatggggtaagcaaagaaaaaataacaagaatgttggaacattatcaacgttttgtttcagtgccaataattatgagttcttcggttccagagaaaattgaacgtattgagttgtgtgcatattcttgtgaggatagaagcactaggtaggttaaaatgccttatgtacaaaattcaatttgaaatataatttttaaaaggtataattttggagcttgtggaatcattgctgataaactttaaaaataaggtggacttggctgggtgtggtggctcacacctgtaatcccagcagtttgggaggccgaggcaggtggatcacctgaggtcaggagttcgagaccagcctgaccaacatggagaaacccgtctccactaaaagtacaaaattagcctggctggtggcgcatgcctgc

SEQ ID NO: 506848 - DNA, 515 bp, Homo sapiens
tcagctaactgggttgtaaaatgtaaaaggcgccaaagcactcagtaattaagtgataaataataatagtaaawaatacaagtaataaaataattttttttccaacagaattttgctcttgtcgcccaggctggagtgcaatggcacgatcttggctcactgtaacctccgtctcctgggttcaagcgattctcctgcctcagcctcccaagtatctgggattacaggcccatgccaccacgcccaactcatttctgtacttttttttttttttttttgagacagagtctcgctctgtcgcccaggatggagtgcagcggcacgatctcggctcactgcaagctctgcctcccaggttcacaccattctcctgcctcagcctcccgagtagctgggactacaggcgcccgccaccacgcctggctaattttttgtatttttagtagaaacggggtttcaccatgttagccaagatggtcttgatctcctgacctcgtgatctgcccacctcagcc

SEQ ID NO: 506849 - DNA, 642 bp, Homo sapiens
ccgttggaaccaagtttgtgttgggaaacagattttttctaggctctttctggttggacgctcttgtggtgtgtttctcgctgctgttcatttaccaacgactagaaaaggtgggctcggagggaaaggagacccaggcttgctcctttttacatgggtttgggaaagaaatcaggaggtttgtgctcttgggatggtcgttgaagatgggagggtgccggaatctgcaaatgtgttcgtgtaatcagagcatggtcgctctgccaaagcaacttcttgcctcactacaacagatagggaaaaaaagaagaacaagaaactcagttcttctgtactctaggggctgacgctttggaggtggagggcaggagtttgaaattaaatattgggaagagaaatcggcaagagaccaaatctccagcaacagaatgtccattaaatctcagtgatgggattcccartaaaaactgttccaacccctctccctctttcctttgccacctccccaccagcacttgggagttcaataactcccccagagggatggtgccctattctctccgggtctgtgtaatccttggctgctgagctaccaactgcagtccccagggattgaaaattaatttctttccctgccccaca

SEQ ID NO: 506850 - DNA, 650 bp, Homo sapiens
ttgttttaagatgtaacgtaaaatcttctagataaatttgctaatggttttcaaggcaaggttcctaatgtctcctaatcgaacactgttaaaaagctattattcccacataaaatagactgcctcctccagtgttttgataagtaaaatgctaccttgcgccagtgttyagacagtctaaataacgtaaagctctgagttgtataagaaactaaaactgattcaaccccataaaatcacagtgttaataccttctcctcccattatgttatagctttccaagtatcacttattcataactgccgttttattaccaagaaatgcattcacaaatacaataaaaatatttggtgttgtatgtcaaagcaatgtttacataattatatgtagatttttatgttactttgtgccccatgttatctttccaaaaaatgacactctttaggaaacacacattatatttctttaactttgttcagcatgagaaaactgcatgattattacaattagttagaactttaacatcttattttgttaaacgtcattctccagtatacgtatgggctgatagctaacactggttagataggatcaggatttgggacaggattaggttcagttatctataccccaaaaaagaaaacagaagt

SEQ ID NO: 506851 - DNA, 650 bp, Homo sapiens
ttgttttaagatgtaacgtaaaatcttctagataaatttgctaatggttttcaaggcaaggttcctaatgtctcctaatcgaacactgttaaaaagctattattcccacataaaatagactgcctcctccagtgttttgataagtaaaatgctaccttgcgccagtgtttagacagtctaaataacgtaaagctctgagttgtataagaaactaaaactgattcaaccccataaaatcacagtgttaataccttctcctcccattatgttatagctttccaagtatcacttattcataactgcmgttttattaccaagaaatgcattcacaaatacaataaaaatatttggtgttgtatgtcaaagcaatgtttacataattatatgtagatttttatgttactttgtgccccatgttatctttccaaaaaatgacactctttaggaaacacacattatatttctttaactttgttcagcatgagaaaactgcatgattattacaattagttagaactttaacatcttattttgttaaacgtcattctccagtatacgtatgggctgatagctaacactggttagataggatcaggatttgggacaggattaggttcagttatctataccccaaaaaagaaaacagaagt

SEQ ID NO: 506852 - DNA, 604 bp, Homo sapiens
aaagaataatcaattcaggaattatgtactgagtagtttctatgtatcagacattgtatatcaggaaacaggaytgctttctgctgaaagatgttttgtagaaaattgaaaacctagtaaatgtattccctagatagttttacatagctggatgaaatcttcaaaattattttctaattcctttgttctatagatataaaaaccaaatatctaagtaagccaagatcatctcattattcttgagttatttaatattcgatctaaagctgttagtagacatcagtatagaaatataagttctgaacaattactgcatttcaaatagaaataattgtgtaaatgatggaacaactagtaaagaaactaacaattacacaaatcaaactcaacacttaattttggctgaagcattttcttataacttggtctaaatatgcctacaacataaattttacaaaataaaatggctaaataattagacaacattcattctaaatagcaaatactgttaagaaaatgtaaaaaaaaatcatcatcagtcttctttgcacaacgattatcattgcaacaaaaccatcttctaacatgctgacagaacaaacaa

SEQ ID NO: 506853 - DNA, 604 bp, Homo sapiens
aaagaataatcaattcaggaattatgtactgagtagtttctatgtatcagacattgtatatcaggaaacaggactgctttctgctgaaagatgttttgtagaaaattgaaaacctagtaaatgtattccctagatagttttacatagctggatgaaatcttcaaaattattttctaattcctttgttctatagatataaaaaccaaatatctaagtaagccaagatcatctcattattcttgagttatttaatattygatctaaagctgttagtagacatcagtatagaaatataagttctgaacaattactgcatttcaaatagaaataattgtgtaaatgatggaacaactagtaaagaaactaacaattacacaaatcaaactcaacacttaattttggctgaagcattttcttataacttggtctaaatatgcctacaacataaattttacaaaataaaatggctaaataattagacaacattcattctaaatagcaaatactgttaagaaaatgtaaaaaaaaatcatcatcagtcttctttgcacaacgattatcattgcaacaaaaccatcttctaacatgctgacagaacaaacaa

SEQ ID NO: 506854 - DNA, 641 bp, Homo sapiens
cagcagggaaaggcagtctyccagtagacagaaaacacctgaagctcgtgatcagccgcttcccattaagatctcaggagctgggcaagtgggcccaagcatgtgcatttagatgcaaaattgcagagtttaactggtatataaccttcctctaaaaatgttcaacttagcaagggggaaatgcctcaaatagcatgcgcacaacttgagtaaacacactgagcatatggcccctcgagtgctggcaggccactgcacatgtggacagcccaccccaaggaaaaatcaagggagaagaaactcaaaccccggaaccacgccagtgtataaaaccccaagtcaagggccaaacagaacacttgaatctctcaagttgcttgcttggccctcttccaagaatactttacatcctattgttcctgttctaaaactttttaataaactgtcactcctgctcaaaaacttgccttggtctctcactctgccttatgccccttagacaaattctttccttcaaggaggcaagaatcaagttgcttcagacctgtacggatccaccactaacaagcccacacttcagctctctacagttgaagttgcaaactggtgccatgctgccagtgggtcaacagttctagaat

SEQ ID NO: 506855 - DNA, 641 bp, Homo sapiens
cagcagggaaaggcagtctcccagtagacagaaaacacctgaagctcgtgatcagccgcttcccattaagatctcaggagctgggcragtgggcccaagcatgtgcatttagatgcaaaattgcagagtttaactggtatataaccttcctctaaaaatgttcaacttagcaagggggaaatgcctcaaatagcatgcgcacaacttgagtaaacacactgagcatatggcccctcgagtgctggcaggccactgcacatgtggacagcccaccccaaggaaaaatcaagggagaagaaactcaaaccccggaaccacgccagtgtataaaaccccaagtcaagggccaaacagaacacttgaatctctcaagttgcttgcttggccctcttccaagaatactttacatcctattgttcctgttctaaaactttttaataaactgtcactcctgctcaaaaacttgccttggtctctcactctgccttatgccccttagacaaattctttccttcaaggaggcaagaatcaagttgcttcagacctgtacggatccaccactaacaagcccacacttcagctctctacagttgaagttgcaaactggtgccatgctgccagtgggtcaacagttctagaat

SEQ ID NO: 506856 - DNA, 628 bp, Homo sapiens
cccataaagtcctcagctcgttgcatacctcacaggcatggaaatccagattgtgcaaagaggtcaagaacctaaataattattccactcgtaaccaaacagtaatagacactccctttgaaattgtggaaattctcatttccacactaaagccaagggaacgcagccgggatgtgatgtcagcaggcaagaagactgaaagtggactttgattaattacctgattggttcctgccccacttagacctgaatgaagcaagtctgccacattgaaaggtttggggaattttaggtggaagaggggtgggatggracggagaggctttatctagtctgaaccattcatagtttgggaaagtgcccaagtgaaaacaattgaacaccaaatcattttcccacgaggctggcagagttcttcatagactatcaagtttcaactgctttgtaaactctatgaagacatctttaaggccctacatttttccccctggagaaatgtcttcactccaagaggttagcctaggaagatatcattatcttcaagccacaacaaccaatcccctaggccccccatcctgaaattcttgaaccctgtgctccaccctaactcagctcaggaaactgataa

SEQ ID NO: 506857 - DNA, 493 bp, Homo sapiens
accgcaaaacctaaacacaaatataaaaaatgttaaaattagtgagattttaagaaggcataatttatcttcaaatagcaacgaaagttagcaaagactgacagctaacttgtccaacagaaacgatggacaccaggagatgatgcaatggcatcttcaaagagtaggaaaaaaattactgcaaactgagaattctatacccagcaaaataatggtgaaatggagaagaggtggggggagttctatacctttaaaaataaagatgaaatagagacattttcataaaaataaaaacctagagttttcattgtcagcacacatgtactaaaagaaatcrtaaagggaattcttcagatagaagtaaaagaaatcccagctagaagcccagaaatgcaagaaggaataaaaagcaccaggaaacggatgtctaaagtaatattgattgtttaaaacaacaataataatgatgtcttgtgtttaaaatgctcttcct

SEQ ID NO: 506858 - DNA, 468 bp, Homo sapiens
tgtccctttttgatgctgacttctctatagtcaactggcctgcttaccattccccctctccccaacattttcttcctctgcagaacaataagttccccagccctcctgcctttatcttcatgattgacgtctcctacaatgccatcaggactggtcttgttaggctcctctgtgaggagctcaagtcactgttagactttctacctaggtgagagttacagaactgaggtgtttcctgrggttaatgatagggtgtctgggttgactgaagaaatgtagcttggtgtcatgaagttgtgggtggtggaaaaggtggcaagtctaggtaacaatgtcaccttctacagggagggtggggcagaagagtcagcaatccgcgttggctttgtcacctacaataaggtgctccacttctataatgtgaagagctcattggcccagccacagatgatggttgtgtctgatgtg

SEQ ID NO: 506859 - DNA, 186 bp, Homo sapiens
tggcacgtgagcaaactgacgctcagagaagcaaagcggcacggccagaaaggggcaggccacgctcctcctcaggcttcccaacccctgagcagggctccagccccgcctcggcacacagcaccacctgaggcatttatcgtcagggcctgtttcacaatgmaaatggccacgaaggaggttctc

SEQ ID NO: 506860 - DNA, 542 bp, Homo sapiens
tagcccgtgcaaatcatttctacagaggaaaacgcaaccctcgccagggatttctcaccctggaagcaaaaccaaggctcattgtaaagaatgcctgaaaagcaaattgaccctcaccagctgaagagtggtcggtagttaaaaagttgtcacacacaattaacagtccaaatactgttttaagggagggcaggacacaaatggtgacrggacaatgctcccctctcatctagagcctgatgaaggcctgcggcaacatgaatcgctgtcatgatcatcaccatcccacagggggcttccttcctgcttagagatgagaaactcaaggctcagagaggtggagtaacttgtccaaggtcacacagccagaagcccccacctcccatgacaaggctgctccctagggaaacagacctgcccccagtccctgtcctggccctgtgttcaccctgttctgcccccagcagccacccaggccgtctctctgcaccctgtcccaggtccctggtgctgcaccgcccctggcacatcccagaagtgtc

SEQ ID NO: 506861 - DNA, 614 bp, Homo sapiens
acctctcaccatagctaccgtgttagggttcttcagagaaacaggaccagtaggatatggagatatayagcacatatattaatatataaaggaaatagctgtcacagttttggagatggatgagtccgcaggctggaaacccaggaagagctgatgcttccattcaaatctgaaggcagcagaaagccaatgtcccagctcaatggccaccaggcagggagaattctctcttacctgggggagggtctccaatagcattttgttctatttagaccctcaacggattggaggaggcccacctgcattgggcaggaccaactgttttactcaatccaccaactcaagcattaatctcgtccggaaatacccttgcccacacagccagggtaatgtctgaccacatatctgggtgccccatggcccagtcaagttaacacagtaaaatcaaccagcacagccaccaggggcccaagtgagagcccagcatccacgcgcctgcttacctggcacaggagactggcttttgctggcctgcactttggcgtcatggcccagcccacgtcaagggcagcataagacgctgctgggaaggttcctggtgtcgttgctagact

SEQ ID NO: 506862 - DNA, 549 bp, Homo sapiens
cccagtggtcaaatgagtgagcatgtcaaagggcatatccaacctcccccaacgggcacagtgctccaacaagttcccacacccctgcctgggaccggcccctggggtcgggcaatgtcagaagcaacctctgagatcagggggcctaactcctcatttcacacatgggaaactgagtccagagagaaaggagaggggagagaatgagcactcccattcctaagtgcctaccaggtcatgccgcatgcaacagctcattcgtcctcacagcaaccctaatgaggtgggtttccttagctccatttcacagatgggcaaactaacatgtccaagttgtgaagacaaactctaacccaaaactgtctrgcttcaaaatcagggactaagccaagatcagtagcaaagagagggccaaccagacttccaaattttcattctgtgcttctgaccacctctggattagcccccgagacagagtcccctcaccaaaagcaagcagccatcagccatttgggcctccccgagccccaggcctgtctcctcctgaag

SEQ ID NO: 506863 - DNA, 572 bp, Homo sapiens
cttcaaggtcaaaactgccttctggtggactgaggatcggtgactttgtttccctctatgtccagccagggctggaggaagcttgttgtcagcaggccccttcccagaagacaccacatccacacctgtcactgccsacagtgactggaccctcagcctcaagttccccggtggtaaaacccctgtagatctcccaaccctccaggctcctgtaagcccagccctttaatttctttatttccctttctttctttctttctttccttctttccttcctttctttcctttctttctttctctttctctctttctgtctgctacaagtaaactttatttgatgtaatgtaatacaacattttcaagtttcacaatgagcgtttgacataaataatcatttaaattaggaatataagtatgcacggtcacttgagcaaatttgcagttcaggggttggtacgagctttgtctgaaagcttttttctcctttaggaaaaagtagcccttcccttcacctggtaagaagcactatcaatgggagttagaagaagtccataatccaccttggaattcca

SEQ ID NO: 506864 - DNA, 303 bp, Homo sapiens
ccctgggctcaatccagccattggaagctgcaaaggccaaacccaggctctggttcctgggttctgggtgaggccacgacacagccagcaccatttatcactactgagaaaccagcagaagcagctcgaggcctggtaagggttgtcccaggtgctaagaagctgactctgtctccgtggtgggaggaaccgttgcagagcaggtagaaaacaggcatctggccacacccttctcctggaaacgtccaaggtggggctcagaccagggtctgtaaaggygatgtcacacaccacacgttgttc

SEQ ID NO: 506865 - DNA, 659 bp, Homo sapiens
ctgcacctggccagattctggaaacattatttaagaaataactagtatgtttccttttcccttttttgaaacactctccattctgttgctcagaacatggatgccaccttggactaggaggatgaacctgcctgggcgtgccacagtggtgggccaccaacagtgtaaaacaggctacagtaaccaaaacagcacggtactggtacaaaaacagacatatagaccaatggaacagaacagagagctcagaaataacacagaaatagcatcacacatctacaaccatctgatcttcaacaaacctgacaaaaacaaggaatggagaaaggatcycctattcaagaaatggtgctgggaaaactgactagccatatgcaggaaactgaaactggaccccttccttataccttatacaaacattaactcaagatggattaaagacttaaaggtaaaacccaaaaccataaaaatcctagaagaaaagctaggcaatactattcaggacataggcatgggcaaagacttcatgacgaaaatgccaaaagcaattgcaaaaaagccaaaattgacaaatgggacctaattaaactaaagagcgtctgcacagcaaaaacaaacaaacaaacaaacaaacaaacaaacaaacaaacaaactatca

SEQ ID NO: 506866 - DNA, 648 bp, Homo sapiens
aaaaaaatttatactctttgggatttgttaggcttcatgaatctgtgggttgatgtccttcattagttccaagaattcttaggtatatattttttcaaatgttgcttctgcctcattctttgtcttttcttcttctaagactcgggttaaatatatactagaccttcttccattatcctctagatctcctctcaagtcttgtgtgctttatgtctttttgtctttccgcgctatatcctggatagtttcttctgacctatcttctactttatgaattatcctttcagttgtatcaaatatgtttattccatctgctatggactgaattgtgcacccctatattcatatgttgaagccctaacccacaatatgactgtgtttggagacaggtcctatataaggaggtaattaagattaacttcagttataagggtgggtacctgttctgataggattcatgcacttaaagcagagacaccagaaagctcactttctctctctctgccatgcagagagaaggtggctatttgcagcctcattagaaaccctagcagaaccttgatcttggactttccagcctctagaatggagtctccctcagaaytattgtctgataaaataatttatgtttttaaaccacacaatcag

SEQ ID NO: 506867 - DNA, 604 bp, Homo sapiens
gggtgacagaatgacttagtcacttgccactcatcatccagcagggtagcctgggcttgttcacgtgatggcagaagagcttccagcaacaagaggctaagcctcaatgcacaagtgtttttcaagcctctgtttgcatctcatttgctaatgtcctgttggacaaagcaagttacttagccaagcctagattcaaaacaccaaaaaaatttgactctatttctggatggaagaagctgcaatatattgtgggcttcctcccaaactaactcattgtgtggtgagggtggtggtaaagcaatggtggagatgttcaagagaagtgccacagacaagccacctaatgttgacaatataaatgaactgaatctaccctataattatcttagacttcccacttggcgttagcaataagtgcataaccaccaaagacggtggtatataaagttataaatagagatatcatggaatggtagaatgcatttaagtgaccagttaagcccatccagcttaccagtttgcagttcatgagaagattatycgccctttacatatttctggtatgagcattatcccaggttttatctcagaagcttggcagctt

SEQ ID NO: 506868 - DNA, 110 bp, Homo sapiens
tcacaagatttgacctactggctcacactacacctgcccagccrcatcggaagacagccttcccctggatttcccaatttgtgagccaatatgtttactcttaggctagt

SEQ ID NO: 506869 - DNA, 631 bp, Homo sapiens
ctgtcccagaaaactgttcctccaaaggaggaattacttacaccctttttttttttaatggaagagatcatggcctggccaaatgcaaggccatgtcaagcgtctgttcattcacaaagggcgaactgagtatcctcaacatccaactggcaatagcttgaaaaaacaaaaccggaaaccaagaaccaacaaaccctaagcttcattatagccttttttgactttcattttattcaaacaggtcactgactgtttatattttagcaatgtttatccatggaagaggagatgaaaagacttaaggacttaaacctaggacgaacaaaacttaaaaaccaaaaaactctaaatccatcaatcccaaaatgtgtatttcaaaagatagggagccagcctaatttaacaatatgctaaacaggtaaaatatttcatcttagaatttaactctgcagcagtgaaacagggagcttctccactgtgtctggaaaagacaacgctttggttctattgtaagagytgtgaattcagcccagggcaggcagggatccaaatgacctgaatatgccacttcctacgactaattcagaggaaatgaatcttctacctttcctggatactgggctgactttac

SEQ ID NO: 506870 - DNA, 476 bp, Homo sapiens
gactggactgaaacatatataagaaataatttttggcccaaggaatttatagtataattgaggaaacaaatacaaatcacttctgcaaagtagcagagacacagatgaggaattgtaatgtttgtaaaatcaaagtggtgggagtagtcaaaaaagtgtttacagaatggtattcaaaatgggcctgaaggcagaaatcagactggttgttacctggaaaacaaggagagaaaggacaaggcaggagaagagaacaagtacaaaggcatgtgggggtaggaaggcatggcatgggtagaaaatgccagttaaattgacattgtgggaaaataacgagtttagygtatgggggcatagcaaataatgactctggtttcggcaaaaccccaggggaaagaaaatgagatcctgaactatggcagtaacagaggggagtgggaaaagaggattaactagagaaatatttagaaactaag

SEQ ID NO: 506871 - DNA, 609 bp, Homo sapiens
cgccaaaacaccaaatatgtttgattagtgtctgaaagcaaagatcagtcatgatccaaggctgaagacctktgtaccctgggcatgactggcagaatctctgtgacagcagaagaggggcttcactttagttcaagaaacaaaaataataaacaaaggctgcccctgctgtaaatcaggctatacatacacacaaacacacacacacacacaccaaagccaagcacctacctgtgttctccatgttcccagaagagttcctctcaaggaggaattttccaagtttcttagcccctgattaattttgagatgatgcctgaaacaagagagtctgtagagaacccatcttctgctctgtctgcctgtctgtccaccccaggatgacatgagacctggaggatattacaatcttaaatggaggcaaaagctagagaatcagaaattacatctaaatatctgccaagagtgggaataagaagacaaagtttagacttgggaatcagtgaggtttgagttttagcctaactctcccactcagggtcggcttcgcgagtgtgcagcttgtgcagtcccaaaaggaacccatgcttgttttaatgttctgctatt

SEQ ID NO: 506872 - DNA, 563 bp, Homo sapiens
gggagggggtggattggaggtggtggagtaaattgctatctgtatccttcctaaaaatggctctcatgggggaaaattactaatcactgccattattctgcatctggtgttaattattccaggtacaggacacyataaatggaatgttaagttcttaatttagggtgttttggggtggaggaattgttcattttattagtcactattcaaggcattaaaaagaacaagaagttttgatgttaaagaaagtagctaagtcagaaaggttacgagacttttcttttgagtgctggtagctttctattaaaaaatacctgagtccttgcctgatttataggtgtttggcatactctaatatgaaaagagggcagcatcagatgaatgggtgtaagttccagggataactttcactctcacctggacaattgcagtaaccttctgactggtctcctgctttcacttccctcctcttcaatccattctccacatggattgtggagccagagtgattctcttaaaatcacatgtcatcgcttacctcagcaaaagcaagttcccgttac

SEQ ID NO: 506873 - DNA, 670 bp, Homo sapiens
tgtgaccacaaacatgaggtcttgctcaattcccacacatgggcttgtgtctggtggagacaagagccacaaccctgagggggtcccaagatgtgtcagcatcatgggtccagtacagcatggcctcctgatggctgggaatggcctggctcagtgcaaagattggctttggaggcaccagacctcacctggaccagggacttgctcctactaaagatcagtgttctcatctttgcaacataaactgttgaccgccacttagatgagcagacccttcaggacaggagctgtgggttactctgttttccctgagcaagcacagtggctggtaccactaaggctgtctgttgtgtcaataaatgtgtgaatgtactaatgagtaatgaaaacttgactaagatggctgtggttagatattgatataatgtcctttaagtgcttagggcactgatcagcatgtaagacacagaatgtggctgtgcattcagtgacttagttgttaagatacatgtgcayttatatggtttggggtcatgcttagattgccccagaacactacagacctctctcatggcacaccacatggtgaactggacagccgcagtgttgcaccacctcatatggatcatgtcgggccaactccgtggctacatgtctgcctgttcactgg

SEQ ID NO: 506874 - DNA, 647 bp, Homo sapiens
gatagtattccatctaccttgcttcttgcttctctcattcttcttttcttaagagaagcacttcaacaagaattcttctcaggctctgcttttggggaaagcaacctaagacacaggtttgttatagaaattatatttktactcatatatattaatattttaggtatatgtgtattttgataagagcagcaagaatggcagaataatttgaaaaaaagaggaataagaggagaggaacttttttattagataacatgaccaaataaaccttatagtcattaaacagtgttttagacatagtgatatcaactctaagaaacaggatggaaatgcagaatgagaatcaggtgtaattattttgttactgatacgtaactagtgcttagaacacagttgaatacatggtagacaatgaaaacatattgatcagatggaaaattgacgtgcaacagagctggcattacaaagcagttgggaagaagggatcattccagtaaaaggttctgacatagtagcttatccatatgaaaaaaaaattgaatcccatctttatactgtaaaaacagatcaattccagtcggttaaagatgtaattgtaaaaagtaaaattttaaaatgtttagcagaaaatatagcaaatatcttta

SEQ ID NO: 506875 - DNA, 647 bp, Homo sapiens
gatagtattccatctaccttgcttcttgcttctctcattcttcttttcttaagagaagcacttcaacaagaattcttctcaggctctgcttttggggaaagcaacctaagacacaggtttgttatagaaattatatttgtactcatatatattaatattttaggtatatgtgtattttgataagagcagcaagaatggcagaataatttgaaaaaaagaggaataagaggagaggaacttttttattagataacatgacyaaataaaccttatagtcattaaacagtgttttagacatagtgatatcaactctaagaaacaggatggaaatgcagaatgagaatcaggtgtaattattttgttactgatacgtaactagtgcttagaacacagttgaatacatggtagacaatgaaaacatattgatcagatggaaaattgacgtgcaacagagctggcattacaaagcagttgggaagaagggatcattccagtaaaaggttctgacatagtagcttatccatatgaaaaaaaaattgaatcccatctttatactgtaaaaacagatcaattccagtcggttaaagatgtaattgtaaaaagtaaaattttaaaatgtttagcagaaaatatagcaaatatcttta

SEQ ID NO: 506876 - DNA, 647 bp, Homo sapiens
gatagtattccatctaccttgcttcttgcttctctcattcttcttttcttaagagaagcacttcaacaagaattcttctcaggctctgcttttggggaaagcaacctaagacacaggtttgttatagaaattatatttgtactcatatatattaatattttaggtatatgtgtattttgataagagcagcaagaatggcagaataatttgaaaaaaagaggaataagaggagaggaacttttttattagataacatgaccaaataaaccttatagtcattaaacagtgttttagacatagtgatatcaactctaagaaacaggatggaaatgcagaatgagaatcaggtgtaattattttgttactgatacgtaactagtgcttagaacacagttgaatacrtggtagacaatgaaaacatattgatcagatggaaaattgacgtgcaacagagctggcattacaaagcagttgggaagaagggatcattccagtaaaaggttctgacatagtagcttatccatatgaaaaaaaaattgaatcccatctttatactgtaaaaacagatcaattccagtcggttaaagatgtaattgtaaaaagtaaaattttaaaatgtttagcagaaaatatagcaaatatcttta

SEQ ID NO: 506877 - DNA, 647 bp, Homo sapiens
gatagtattccatctaccttgcttcttgcttctctcattcttcttttcttaagagaagcacttcaacaagaattcttctcaggctctgcttttggggaaagcaacctaagacacaggtttgttatagaaattatatttgtactcatatatattaatattttaggtatatgtgtattttgataagagcagcaagaatggcagaataatttgaaaaaaagaggaataagaggagaggaacttttttattagataacatgaccaaataaaccttatagtcattaaacagtgttttagacatagtgatatcaactctaagaaacaggatggaaatgcagaatgagaatcaggtgtaattattttgttactgatacgtaactagtgcttagaacacagttgaatacatggtagacaatgaaaacatattgatcagatggaaaattgacgtgcaacagagctggcattacaaagcagttgggaagaagggatcattccagtaaaaggttmtgacatagtagcttatccatatgaaaaaaaaattgaatcccatctttatactgtaaaaacagatcaattccagtcggttaaagatgtaattgtaaaaagtaaaattttaaaatgtttagcagaaaatatagcaaatatcttta

SEQ ID NO: 506878 - DNA, 605 bp, Homo sapiens
cgcttaggcacttactagagagatgcagcaggagatctgaagatgaagcaggcagttccggggagcaattgattccttccagcttccccctagcagaggacgtggttgcagagctcaggaagctccatgctgtaaggacacagaagaggaagtgaacagagaatgcactcttaatgtgggtttcataggcgaaggtggtggtgcctataatagtaggagagggagcaagactcctttagttataaaaatacaactctgattctcatatattctgaatgagattctgtagtctcattcagagaggatagggaatgaaagcaggaaggcaaagatcacttacatttattatctatgtgccagcactgatttgggcattggaatagagaggactggaacccatggtgtgttacaaaaaasagacaaaagatgaataaataaatatataatgtaatgtttcagaaggagactgaagttgggtaaggagatcaagcataaaagatggttatttttgataaaccagggaagcatgttctgagacatgtcctttgagcagagaccttaatgaactgagggaatgaaccatgtaaatatctggagaagggctt

SEQ ID NO: 506879 - DNA, 601 bp, Homo sapiens
gcttgttttcctcacttgtttaatctgacttttgttttcaggagagtgtctcaacagcatctctttaagaatctaaaaagggaaaggacagaaattatgtttcctcctttacaatttggcacccaagatggggccacagagacaccctgactgctgcaggacctataggtgaaatcctgggagacctggcagttgcagcagcaaagagtaagatttctcaccaaggtcagcttctctcaggtctctatctgttgtacctggccaagaaagaaggtaaaaaattttcctcatccttccctttccaggttcagattgataggaggaaaacatttacaaataataataaaattaattctttgaatctgtgactcttgtagatttgtttaagtacctatttggttattgatctttagttttgtaaggatgatctttgttttcctcgtctctgactttctgagtggtttgtcataggaggatcacagyaagattcttctttcatcttgttttatttcttgggaagcttggctttgtaagcagcaaattttttctgtggtctgtgccaccttgagggcataaattgtctggcttatgtcaggtagcc

SEQ ID NO: 506880 - DNA, 494 bp, Homo sapiens
tgtggctcttaaaccatcacttstaatcttgtgcctaatttgttagtcctataaaggcaacctagtccctaggcaagaaggcagcttgattttggaaatggctattattgtctttgttttaaactataaactaagttcctcccaaagttagttcagtctatgcacaggaatgaagaaggacagcttaaaggttagaagcaagatggagttggttagtttagatctctttcactgtctcattcataattttgcaaaggcagtttcaacgtggtcacttaacagagagaggaaggcatagacagcaggtctgacgtcagggactgatcaggcaagatgcacatttaaagcatctgctgggtgcagcactgaacaaaatcaaatcagatcttgtctagaaaatcaatccttgtggcatcaccaggaatttggaaatgtaaggaccaagttcagtagagtcaatttgctttattttaacctcttcaccaggactctca

SEQ ID NO: 506881 - DNA, 630 bp, Homo sapiens
cacagcttgtgtgaagtgcaggctttccttcctcctagttcaagggcatacaggcagagcttcctaacatctgaaaatgggaaaaaatttgcaaagattattcaccagcagcctcaggggtgagggattgtctgatttggtgcctgggagagtraaagggcgggtgctctaaaacttcccctaactctcctaataagggtgtcatttttctcctccctgagtgggagggaactgagaataatgaaggaagctgtgcatttgtaaaaacttaccccacccggtctaccctacttttgctgattctctctctgagattgagcccatggaatcaaaattctcccaggagagcctacattttcactctttttcccaagtgttctttcatagttggctttctggatgagaatgatccctaacatctgtaaaataatttctcttcacatctgtgtaagaatctcttacatctgtagaaggtttgcatattcattatctcatttgatccttacaactgtcatgtataattatgctaatgatgacaaaaataatttaattcttattctgttccatgtagcactaaggttatttacaccactaaatttgatccgtccaaaccctatcatggagaaattt

SEQ ID NO: 506882 - DNA, 597 bp, Homo sapiens
acccagacatcatctgcttttctgagagcagctccaagtgataacctggaggactttatctgcaaaataaaacaacctttgtccctgtacagygccacctctcccattctagtagtgtctgactccctctgcctgggtccattcattctttctaatgattgactgctcctcaaaagaattgtctacattttccatctgttccctcttgtgtgaagaaggatgcataagctcttatactacactggcttttttgggtgattaccctgtgattcccccctgtacatgttaataaatttatatgccttttctcttattaatatgccttttgtcagtttatttttcagcgtactttcagaggacgaaggcaaactgttccctttgcccttgcattaacaacagactgacacagattcatggagatcagccaataggagggaaagattgttgttttctttatacaaaagaacagaaagctcatttcacttgattcttaataccgctgttttaagtcagtacaattatccctatttacctgattaagaaactgaagctcagaagatgttgagaaaattacacatgctcacacagttatcaaca

SEQ ID NO: 506883 - DNA, 547 bp, Homo sapiens
tgagatctgaggggacaatttctgcactcaaatgaccatgttctagcacacagaaaccgacaaatcagtgtgtgtggaatacaagaatgaacttcaatttttatgttttagtgatacatgctaactgagtcttccccccttgtccccacctgggatgccttgaactctggggcaaaatgggctcttacaaactcctcccaccaaatcagtatccattcttcatagactggggaaccaaggtctaagctcggattgctttatgtgacaaggagactagcagcaggagaggtttttcagacagaggtgatgtgatagaaacaaaaagaaaaaaaaataaaatgtttacaggttttgaatagaccatagacatgtttcctaacctccttccaccttttctggtcycttatttgtaaaatgggaataataatacctgccatccaggggcatggaaaaaattaaatgaaagtacatttttaaaacatctgtcactgtgccatcaaggtttaaagaagaaatgctccaccttgcagaatgagtctaaaatcta

SEQ ID NO: 506884 - DNA, 630 bp, Homo sapiens
tataccaattaacatatgagcaatggtatacttctaccaaataaaatggaaggtaaactgtctggaatagtcagtgtgtatatctggaacctaggggcatgactggagcacccatatctaggagtaaaagttaatagaaggcaacagcaatccagcagagacaggtctactgagagctcacacttttatttaaatggcaggtttacattaccccaccagataaagaatcccaaccagacaaggtgctggccggggtaaaagagaacttgaaatgtgttttagaagaagaaactccagcccatgaccagacacagaaatgaagactgtagccactatgcacatttttgttaaatatatcagtatgtatccatccactatttattttctacttttctccttcccctgttatttccagtgagggaatacctggtgcttatgtttacatttcacttcccaggccaaaatctcataccaggccacatctagaacgaacagggaagatggtctattacctgcagatgggaggtgccgagaygggcgcagtggatgagaggacgttttgtatcctcttgtgcctcctgaagttgctgttgtatgcaagttaaacaaaggtagagtgtaagaatagca

SEQ ID NO: 506885 - DNA, 557 bp, Homo sapiens
tgctgtggtggaccctgcaagtcacatctgtgtgctttcagacccattcataaccagagttcagaaaggaagcaaggagaaaggatgggaacagggtcaggaagaagcagagctatggacagacagaaggaaagttttcaaacataggacatggactgaggagaaagggccagggtttaaatttcagtaagattttcarggcagaatgagacttccggcaactaagccaagaatgcatacgtcagtccaggcagaagactcagatccctctttttagacaactatgactgacattctaagctagatagacaataaataccagaaagaagcatggtgtgtgatggggtgaggtggagaaggcttggcacagtgggaggtggctgtagggagggtgtcatcatggtgggatggagaaagaatggaattggggtcacgtaggtctagaatggagttaaaagcagccactctgttgttgcttaccttacttgcctgcattctgtcttattcatgttcagatgggctcaatggtgtgtgagtaaaaacgaagtattgggtat

SEQ ID NO: 506886 - DNA, 557 bp, Homo sapiens
tgctgtggtggaccctgcaagtcacatctgtgtgctttcagacccattcataaccagagttcagaaaggaagcaaggagaaaggatgggaacagggtcaggaagaagcagagctatggacagacagaaggaaagttttcaaacataggacatggactgaggagaaagggccagggtttaaatttcagtaagattttcagggcagaatgagacttccggcaactaagccaagaatgcatacgtcagtccaggcagaagactcagatccctctttttagacaactatgactgacattctaagctagatagacaataaataccagaaagaagcatggtgtgtgatggggtgaggtggagaaggcttggcacagtgggaggtggctgtagggagggtgtcatcatggtgggatggagaaagaatggaattggggtcacgtaggtctagaatggagttaaaagcagccactctgttgttgcttaccttacttgcctgcattctgtcttattcatgttcagatgrgctcaatggtgtgtgagtaaaaacgaagtattgggtat

SEQ ID NO: 506887 - DNA, 524 bp, Homo sapiens
tgcaacctccgcctcccaggttcaaacgattctcctgcctcatcctcctgagtagctgggactacaggcatgtgccaccacacctggctaatttttctatttttagtagagatagggtttcaccatgttggccaggctggtctcaaactcctgacctcaggtgatccaaccgcctctggcctcccaaagtgttgggattacaggcgtgagccacccaccacactcggctgctcatttcttatacaaacatatatgacccttycctaattatcagggtaaattggtttgcagaaagcatggacaaaaaaagattctaaaacatgtattaagcacacactgtcctggtatgcacacaacatataaccatgatccaacaaatcccactagtcacgttttcccaaaacttcataagacacagccagtgttcactgggttgtggctctgctctctaggaagaaaacattttccagtgcccttgcagttaggtggggttcaatgactagctctagccaatgaagaagagt

SEQ ID NO: 506888 - DNA, 568 bp, Homo sapiens
ccgtcccggcgtctgcagctctgcagggctggctgtcaggcctgctgctgggatcatctgggagctttgaggatctccagaggtctggctcccccaaggattttggtgtgactggggagtcagtgcggccatcagctttctcggtgccgcccacgtgattctcctgtgagccagggttgaagacttctgcagcaaagcggcacatttggagccaacacagtcaggtaccagttaggtcgtgatgctggtcagtggggcctcccttgaccgttctcttgctgctctgagcgactgtcttctcagtggacctcaaagtgggatgtctgggccagccatggagcatcacctgagaagttgatagaaatgcagattcctggctgcaccccggagctgctggctcttgaactctggggtgaggcccggcagtgcaagttctaaggaggctccaggtggctctgaggctgctcagttcgagaaccaccgtctccgtgttggttctggggtcacagtaactgtatctacctttcayggcattggaagagcacagggggacagttgaatctctggc

SEQ ID NO: 506889 - DNA, 483 bp, Homo sapiens
tgaaatagggaggctgtcctggatcatctgggtgtaccccatgtaacctcaagggcccttacatggaagctggcagaagaggcagagggagactggacaagggaaggatggggtaggtggggccatctgtggctgtgaggatgggagggacctccaagggggtcccggaggctggaagggaaatggcatctccccagagctgccagaaggggcccggctatcactgagcggacaccgcgtcggactctaacccacagactgtgaaataacaaacctgtgttcagcctctgagtctgtgttcgtgacagcagccccaggaaactcacacagcagctttcgccaataaatagattttcctatttctcagaaaattctataatatcctgtataagtacakattttcctgtactgctcaggacactgtcctgataagaagctatcgatagatagaaaatcaataggtagaaaaagttaaaatactgg

SEQ ID NO: 506890 - DNA, 654 bp, Homo sapiens
cagatggatgtgggaagccccagatttactgactcatcccaggggttgtggccacacctggctcaccaggctccagcgcccgggaggaaatgaggaatcgtggaggaactccgtggactcagtccctccgggtccaggcctttgtgaataactaagagagcccaatgctgctctcaggatacagcctcactgctctactggtgcttctcatagagaacattttgtgaaggtagaaaatgatgctgcaygcccacctcggccttcacagactcggctggtccaccccatcttctcctcttcgatcccatccttcctcactctgccctcttccttttttctgtgaccatcaacctccatctctgaccctccctctaggacacctggtgctccggggcctcttctcccccagggctccctcttgtctcatagacctttgcaaatttcaccacaaagtgcccaggcccacctcagcgctgccacttgtcacatagtggatccgttggccctccatgctcagcagcacacgcacccagacgtccgcacgcacactcgctcaagcctgggcgtctgtccgtcacgcccctctgccctgggctgaggcagatactggattgactatttccgtgaatcacaaccacaccatcaaagcggggg

SEQ ID NO: 506891 - DNA, 654 bp, Homo sapiens
cagatggatgtgggaagccccagatttactgactcatcccaggggttgtggccacacctggctcaccaggctccagcgcccgggaggaaatgaggaatcgtggaggaactccgtggactcagtccctccgggtccaggcctttgtgaataactaagagagcccaatgctgctctcaggatacagcctcactgctctactggtgcttctcatagagaacattttgtgaaggtagaaaatgatgctgcacgcccacctcggccttcacagactcggctggtccaccccatcttctcctcttcgatcccatccttcctcactctgccctcttccttttttctgtgaccatcaacctccatctctgaccctccctctaggacacctrgtgctccggggcctcttctcccccagggctccctcttgtctcatagacctttgcaaatttcaccacaaagtgcccaggcccacctcagcgctgccacttgtcacatagtggatccgttggccctccatgctcagcagcacacgcacccagacgtccgcacgcacactcgctcaagcctgggcgtctgtccgtcacgcccctctgccctgggctgaggcagatactggattgactatttccgtgaatcacaaccacaccatcaaagcggggg

SEQ ID NO: 506892 - DNA, 654 bp, Homo sapiens
cagatggatgtgggaagccccagatttactgactcatcccaggggttgtggccacacctggctcaccaggctccagcgcccgggaggaaatgaggaatcgtggaggaactccgtggactcagtccctccgggtccaggcctttgtgaataactaagagagcccaatgctgctctcaggatacagcctcactgctctactggtgcttctcatagagaacattttgtgaaggtagaaaatgatgctgcacgcccacctcggccttcacagactcggctggtccaccccatcttctcctcttcgatcccatccttcctcactctgccctcttccttttttctgtgaccatcaacctccatctctgaccctccctctaggacacctggtgctccggggcctcttctcccccagggctccctcttgtctcatagacctttgcaaatttcaccacaaagtgcccaggcccacctcagcgctgccacttgtcacatagtggatccgttggccctccatgctcagcagcacacgcacccagaygtccgcacgcacactcgctcaagcctgggcgtctgtccgtcacgcccctctgccctgggctgaggcagatactggattgactatttccgtgaatcacaaccacaccatcaaagcggggg

SEQ ID NO: 506893 - DNA, 443 bp, Homo sapiens
tgagctaggaaggctgagaacagtttccaaagatacctgtgattcaggtctccatttgtgtcccaaatgaaagcgagtgaaatgaaatatatatatatatagtttttgaggttttgacagaccctaagtcatagtagtttaaagtagacaaaaactattttcctccccaatgtgaaactgttttaattagtgaggattagtttcaatggtgaatgatagaaaaccccaaataatagagrccaaaacccttgccatttggagtgtcgtcagcatttcagcaggagatgatgtaagtcacaagcccgggctctctggtcagagcttgcattttgacaagatctgcaggtgacttataggcatgctaagctttgaaataaaaggggggtttacttctctctcatatttaagtctggaaatgatctcccaacactcagtatttgccc

SEQ ID NO: 506894 - DNA, 645 bp, Homo sapiens
atgctaagctttgaaataaaaggggggtttacttctctctcatatttaagtctggaaatgatctcccaacactcagtatttgccccaggaagtcagcaagccaggatttttttttttcattttccagcttcgttctgcgtgtcctgtactcaacagtcatctcatgctgcagggtggctgcgtgtgctccgtacatcacacccatatttcaggtagggacggttcccggaggrtgctcagcaccatgccgactactgctggctggcacgttcgcacgtggccatgtcagctccaaggaggatgctgacatcctgctggctggcacgttcgcacgtgtccatgttagctgcgagggccatgccgacatcctgctggctgggcacttccacaggtagccatgttagctgagagggcgatgccaacatcttgctggctggcacgtttgcacgcggccatgttagctgcgaggacaatgcttctgcaacttttggtttcttccctttcatcctcccacccctgaccgtttttgcctgggagcaagtgcctaataaattacctgcactcaaatctttggctcagagactttccgagagaacccaagctgaggcagacaatgaaatcaacactaccagccacttagctgcc

SEQ ID NO: 506895 - DNA, 473 bp, Homo sapiens
ctcacatgggatgctggcccagaaacattcctcctcctttttgcggacttccctccagccccactgctttccctttgggatggctggatayggttctctgtaagtggatcctctggcatggctggatagggttctctgtaagtgaatttgaatttgggtagtatttccacaccctttggaaattaaatgagagaatcccgtcaaactgggaatgaagaaaaggaagcctgttcaacctcagggacttttaaaggaacttcctgcagtagggagagagaggcaggggcagcctgagtacctgagaagtggacacagccctccccagagggaagggagcccagtgtggccccacaagatcacacagggcaccccccactaccaggccaactcaggaagagagagacagaaaaaccaccaggagtggcttcattttcactggacatattcagcaagccagagctacatgataccag

SEQ ID NO: 506896 - DNA, 496 bp, Homo sapiens
tgcaggataatgaattttaatggccttataatccagcatcatcactatcatcatcatcatcaatcaaatatggcaaagtgcacccacgtggmcacatggtaacttctgtggatattattattacaatgaatactaggttgcttcacaggcagactttctgggatatgccttttgaagacagtttgaaaatctaaaatttatttggtgtttaaaaatattttcttcttttctcatgcctgtggtttgtttcatttttggtgctctctctcccccttgtgatggtagcaaccatgcatcgctttttagataaatctttagctccccaggggacaaacctcttgttgtttgtctccaattccttttgattctcccctaaaaataaaagattcacttgaacaattttctaaagcacatcctcatttagaaatgaggatctagggggaggagccaagatggccgaataggaacagctccggtctacagctcccagcgtgag

SEQ ID NO: 506897 - DNA, 496 bp, Homo sapiens
tgcaggataatgaattttaatggccttataatccagcatcatcactatcatcatcatcatcaatcaaatatggcaaagtgcacccacgtggacacatggtaacttctgtggatattattattacaatgaatactaggttgcttcacaggcagactttctgggatatgccttttgaagacagtttgaaaatctaaaatttatttggtgtttaaaaatattttcttcttttctcatgcctgtggtttgtttcatttttggtgctctctctcccccttgtgatggyagcaaccatgcatcgctttttagataaatctttagctccccaggggacaaacctcttgttgtttgtctccaattccttttgattctcccctaaaaataaaagattcacttgaacaattttctaaagcacatcctcatttagaaatgaggatctagggggaggagccaagatggccgaataggaacagctccggtctacagctcccagcgtgag

SEQ ID NO: 506898 - DNA, 613 bp, Homo sapiens
tctctacaattttgacttcaaygctctaccgggaaagtatctgtttcaaaaaaggaaatgggttaacactcttaactctcagggaacccaggctggctcctagtgatgactatttccaattctaagtaagagctcatgaggcacctacatgattcttcttataattttgccagagtcaaaactagaaggtatctgtcaccagttctctgcctcattctacgtccccatagttccttcaagattaactgaatgtgcatgtttggaatggagactcagttatttcaagcggccaggtgctttgcatgccatatttcacccaccttgaggttaggatagaattactttcgggagccctatttctcaatcatgatggctactcctctcattttctaagaatggagataacatgggaatttcatcagccagtattataccagttgccttatcaagtccccttttaaaattctttgtcatactgctactactactaccacaaaacaaagccacattgattgccctttgcatttcttgagtctgcaaacattttcacttttcttagagaaccatattactaattggtgttgcccatggttttatgcactgtatcttttaa

SEQ ID NO: 506899 - DNA, 576 bp, Homo sapiens
tgttcaggaggttggggcaggaggatcccttgagcccaagaggttgaggttatggtgagccatcacatcactgactgcactccagtctgagcaagagagcaagaccctgtctcttaacaaaaaaaagaaaagaaagaaagaaagaaaaaagattcactgctttggtccacaaaggaaacattgctttggtccayattcagtatttctaatctgtatttcatacttatgcccataattaaaaattagtgaaatgaaaaaagacttcttacttgaaaataaggcaagccatttcttcatcgacttttttttagttcctatatgcaaggtgaggaattacttttgctgttaaagaaggcactttaacaaagaggtatgatcatacacatttggcatgtacatttgaaagcactgctttcctccattcctccagccactgataggctatctgtcttatgtggtgggtctgcgcagttcccaggtgtgctggagtttcctgttctgaatctctgccaataaaaacatccacagtccctgcgtgggtggcaccaggccaaggcaggtgctcagaactgtggt

SEQ ID NO: 506900 - DNA, 623 bp, Homo sapiens
tgtgagtgccaagtctcagggccaggcacctaggcacctgtgagggtctgcacctgccctgtgagtatttccatgctcgaggaaggataatattgaatagcaaataggtggagacagaaagagacagagaggaatagagaaagaaaactttataactttaatggtgcctttttctgctttttgaacaagggatgcttcatattcattttgcagtggccctagcaaatcatttagggtgtcttgactctaagccaccagcagaagtgattcgtggggaaaagagaacagaatagatgtagagagagaaactgaaatgctacaagaggaagaggtarcccaggaacctgatgagttctcaattccagtccaagggtgtcttataatcaacacttctttcttgaggtaatggaagaagttctctgcatcttgcaaccaaacaaacttgcttaaatgattgaagtaaacactctctgagagacaggtgctaaaggggatacagaggtttgcaagtcacagctcttgtctcagtgagatttcaatgaggtataaaaacacaataaatagtaatagtaagagcaataacaggtaacccaaagggcactgatgccatgctaagcactttg

SEQ ID NO: 506901 - DNA, 534 bp, Homo sapiens
aaagatatttatttttgactgctgttgggaacagtatgcacttacwggcacatatgcacctctggtctatttacacataattattgtttgaggaataaatgttaagagagtttcattgtaagaaatcgaaacttgaacatttatgccagtaagcagttaaaaaaaaaaaaaccctgaatacaagagaaattctttaatgaaggaagtcattagttttgatttgaatttaaatgttgtagcaactttccttttggtaactaataaataataacttagttgtacgtgatgatgaccattttctttctaagaaaatgttctttggtaactggtactaatagaggacagtctgaaaagaagaaatcaatcattggtttcttgaatctaaattttatagcattggaaaatgttctaaaggaaggattcttggatggcatgaagtacctggctcctaggacagcgtatcagaataagaaaggatggaacagggtttcagtgatccaagcttctcactccagcccttcctccctataagaa

SEQ ID NO: 506902 - DNA, 667 bp, Homo sapiens
atacattaaaatgttaatattagtcaacacacrcacatgtagaaacaattcagagagtcagtggcatttatacttgataagtataatatttctttaagcattatactcaatgaaaaatatttctattttaaactggaaggcaatgtttttaagcatctgaaaaaaacaaatgaactcattttcattaacaaatagaaattgagcaatatttcactccttttttttaatcactgttttctttactcaagagaattatttgaccctaaattttgctcagtttctgagtagattctcaatatgtaagcattttccttacaattgaactgatttttcaagagtaaatttcttggagtctgcagattttcatctgcaaagtcacaagacactcaattcagattccctttttactgaattttgatgaaaaacaaaacgtttttatgtggagacttctactaagctatctctacaatacagttctactaaaaattgtattctagagaacactattattcttgattaacatatacagctgtctgattaggctggtttcttaaagtcacgcttctctttggtaagagacagcaagagagacattttcagtgtattgcacagttaaattgggtagaaggaggatacacaagcaggaaaccctaaattttggatcaat

SEQ ID NO: 506903 - DNA, 667 bp, Homo sapiens
atacattaaaatgttaatattagtcaacacacgcacatgtagaaacaattcagagagtcagtggcatttatacttgataagtataatatttctttaagcattatactcaatgaaaaatatttctattttaaactggaaggcaatgtttttaagcatctgaaaaawacaaatgaactcattttcattaacaaatagaaattgagcaatatttcactccttttttttaatcactgttttctttactcaagagaattatttgaccctaaattttgctcagtttctgagtagattctcaatatgtaagcattttccttacaattgaactgatttttcaagagtaaatttcttggagtctgcagattttcatctgcaaagtcacaagacactcaattcagattccctttttactgaattttgatgaaaaacaaaacgtttttatgtggagacttctactaagctatctctacaatacagttctactaaaaattgtattctagagaacactattattcttgattaacatatacagctgtctgattaggctggtttcttaaagtcacgcttctctttggtaagagacagcaagagagacattttcagtgtattgcacagttaaattgggtagaaggaggatacacaagcaggaaaccctaaattttggatcaat

SEQ ID NO: 506904 - DNA, 512 bp, Homo sapiens
ctcaggctgctggtgcgttgactgcactttgagtgacaagacagtggagagaagaagagaaagcaaagaagcagccccgccttcaaagaaatccctgacttgtagagaaaacaaaattggagcaaacacctgaggggcagagatgtttgttcatgcctctgaagttaacagaggcctgtgccatgggccattgtttaaggttgttggctgaacaaatgagaaattataagaaagcagtgcctacttccaaaccaacatgagtaaactggcaggagccaagtccaaggagctcagaaatcactagggattaagaacaattcaattcaacaatgaaacgtgtgatttcttatattattcaatatagttatttattttattcatttaatgagtgcctactatttgacatcatgtgaggaaccggagtacaaggrtgagtatcagagggtcatgtactctcaaagtgctaagtggaggggaaaccaacagtaaggccgatgcccgccatttagaac

SEQ ID NO: 506905 - DNA, 672 bp, Homo sapiens
ggactacaagcatgcgccaccatatccagccaattttttgtatttttagtagagacagggtttcaccatgttggccaggctggtctcgaactcctggcctcaagtgatccacctgcctcatcttttacaattttatactagacatatcctttaagaaaaaatcacagttatcactttttaaaataaagatatttgattctttcaacccagaatatttactacatacatttattttgtcayttaatcatatactgccttgtttcattatttaatcatttcataggcatctatataataaccttaacaaaaatgtaatctccccaagagcgattatttttcatcagccatgtgtctaaagagggtgctatctgtgcactcccagggactcaataaatactagctgacttatcaagtacttaatctgaaaactcttcttttattttgtgctttagtttccaaattcttatttcccattccctgatcatttacttaatctgtcctattctcttttacttcattaattggactatatattttatttctaaacaagagggattttttaggctttttattctttaaaaaacaataaactgaacaaaatcaagttttcttatttaacaaaagcattttaaaaaggagcttacccttctcatacgcaattcttctaatgcc

SEQ ID NO: 506906 - DNA, 437 bp, Homo sapiens
cattaacatgagcatgcaaatgctcatttggtcactggatgtttttaaaatatgtactggaaatttaaatcttgtctagaaaaatatttttttgttttcttgtttaatttatcaaatgctgagttaaagaactaggcaaaactgtaagcactgtaatctggccttaacaatggaactgagaaacttgaggccagttgtaatcttttgtattaagaatcagagaaggccgggagtggtggcttacacctgtaatcccagcactttgggaggctgaggcaggcrgatcacctgaggtcaggagttcgtgaccagcctggccaacatggtgaaaccccgtctctactaaaaatacaaaaatgggccagacatggtggcaggcgcctgtaatcccagctacttaggaggctaaggcaggagaattgcttgaaccttgcagt

SEQ ID NO: 506907 - DNA, 588 bp, Homo sapiens
agctacatgggacagtgacagagcaagactctgtctcaaaacaacaacaacaacaamaaaaaaaaaaacctcttctgagatttgatttactactttatgtgatgcacacacacacctagatgtacccacaacctattattttaggaaataaagcataacattggagcctcttctttatctttccctgattacatcttctctcccttgctcagaagttaactagtcactctcctgaaatttcttttctatcatttctttgcttatccttatagttttattgcatgtgaatgtactcctaatcaagacattgtttagttttgtgcatgcttcaaacataataaacatacatgttcctaactttcattttcactcaatatttcatttgttaagaattgttatatacattgatgcatactgccttagcatatttgttttcagtactgtattgcatgccattaggtgtgtgttagtctgtttgcattgctgtaaaggaataccttagactgggtaatttatatagaaaagaggtttatttggttcatggttaggcaggctatccaagcagcatggcaccagcatctgcttcag

SEQ ID NO: 506908 - DNA, 282 bp, Homo sapiens
agacccctctggtctctaaatagtatctcttctctttgtctttttctgtttcaggcctccagttaccaactcctgtctggtttcatgtccttttctatctggcagtgggaataatgtttttagtgaacactgttctctgggtgacaatacgtaaagaactgaaaagaaagaaaaagtggratttagaaatctctttggattctggtcatgagaagaaggtaatttccagccttcaagaagacagacatttagaagaagagctgaaatgtcaggaacaaaaag

SEQ ID NO: 506909 - DNA, 353 bp, Homo sapiens
gcaggaaggggtgcaccggaaggagccccagggggccacgtagcagcggctcagtkggtggccatcgatctggaccgtcccctgcccacttgctccccgtgagcactgcgtacaaacatccaaaagttcaacaacaccagaactgtgtgtctcatggtatgtaactcttaaagcaaataaatgaactgacttcaactgggatacatttggaaatgtggtcatcaaagatgacttgaaatgaggcctactctaaagaattcttgaaaaacttacaagtcaagcctagcctgataatcctattacatagtttgaaaaatagtattttatttctcagaacaaggtaaaaaggtgag

SEQ ID NO: 506910 - DNA, 515 bp, Homo sapiens
aaaggcaagcacaggtcttgggaattccatagtacagaggaatgtaaaaaccaaaggtaagggaaatgatgggcaagcatgtagtcaaagacctaatcctgctggggttaggaggggaaggtatagggggtgggaatgtctcttgagctgtaaatgcaggacagggccaaggcccttccctgcaaaatcttaagtcatccatgggtraagaggtcccctggtttctccacccaagaacccctcagggacacattccaaggcaaagaatgcaagataaagtcccctggagagtggactctgtgaggaaggcaggcagtcaaacaggatcaaatcaaactccagttggtgtttgaacacagaagcccctgctgccgtccacactccacagcccgcaccccaccccaccccatgcagctcagccccatcacctctaggaagaaacgggggctctcaggctgcgtggtcagagccccaatggcaaacacagaaggaaaggcgcagacgaggacgaagac

SEQ ID NO: 506911 - DNA, 624 bp, Homo sapiens
gacatcagtagtttcactggtacacaggatctgaaagaatatctctaacgggaaacttaacatttcataatsttcaggttgttatctatagaacagttcaggagaactataatctagggcctgcctgattctagcacaaacagcaccaaacaactgtgaggaagcaggtccaagagcaggctgctctcaagagtaatgcaaaattgctgcaagcttgtttatttttgtttctccccttcccttcttccctgattaattttataaagtttatagggacagtttcaatggcttcaacacagtattgccaggtaaggacttgaacccaagaggcggaagttgcagtgagtcaagaccaagccactgctgcactgcccagtctcaaaaaataaaaattaaaaaaaaatcaggccaacacctgttgacacacattgctaggaatccctttgggaaagcaaatgggctcacggaacacacggaggccatggtgggtgacaatgttaactaattctgttcatggtgtccagggtacaggcctgagggtccactcgccacctctgcccaaagccacgtctccactgctcccctcatctccgcacggattcctccccacgtgcctcccctttt

SEQ ID NO: 506912 - DNA, 624 bp, Homo sapiens
gacatcagtagtttcactggtacacaggatctgaaagaatatctctaacgggaaacttaacatttcataatcttcaggttgttatctatagaacagttcaggagaactataatctagggcctgcctgattctagcacaaacagcaccaaacaactgtgaggaagcaggtccaagagcaggctgctctcaagagtaatgcaaaattgctgcaagcttgtttatttttgtttctccccttcccttcttccctgattaattttataaagtttatagggacagtttcaatggcttcaacacagtattgccaggtaaggacttgaacccaagakgcggaagttgcagtgagtcaagaccaagccactgctgcactgcccagtctcaaaaaataaaaattaaaaaaaaatcaggccaacacctgttgacacacattgctaggaatccctttgggaaagcaaatgggctcacggaacacacggaggccatggtgggtgacaatgttaactaattctgttcatggtgtccagggtacaggcctgagggtccactcgccacctctgcccaaagccacgtctccactgctcccctcatctccgcacggattcctccccacgtgcctcccctttt

SEQ ID NO: 506913 - DNA, 669 bp, Homo sapiens
caacatatgtgctgctatcttactctttatttctgctatgtctctgaatttccatatgtaatcatggtccttctgcctgagaaacatcatttagaatttccttttgtgttggtctgcttgtgaaaaactgtttcagctatttttctctgaaagtgtctttatttgctttaattattggagattatttttactaagtatgtaattctggaggcagttattttctttcagcatattgaagatatttrcatttgattgtttcttttcagaaggcagccaattgtctcgctgctgcttatttgaatgtaatgttcctttttttcctctgttttttgtctttactatttttgtctttgtttttttttttttattgtctgcagttttactactctgtctttaggtatggagttccctttatttatcttctttgattggtaggccttctagaatctgttgacttttgagtttcattttgtctggaaaactctcaagtattatctcttcagttattgcctctattttctctctcttctacttttgagcctctaactaaaaataaagtagactttctcactctatttgttatatttttgtgtttgtgtattaaatattattttttctccttgttatatattctgaatttttttcttcttcctcatctcccactttact

SEQ ID NO: 506914 - DNA, 497 bp, Homo sapiens
atttttactaagtatgtaattctggaggcagttattttctttcagcatattgaagatatttacatttgattgtttcttttcagaaggcagccaattgtctcgctgctgcttatttgaatgtaatgttcctttttttcctctgttttttgtctttrctatttttgtctttgtttttttttttttattgtctgcagttttactactctgtctttaggtatggagttccctttatttatcttctttgattggtaggccttctagaatctgttgacttttgagtttcattttgtctggaaaactctcaagtattatctcttcagttattgcctctattttctctctcttctacttttgagcctctaactaaaaataaagtagactttctcactctatttgttatatttttgtgtttgtgtattaaatattattttttctccttgttatatattctgaatttttttcttcttcctcatctcccactttactagttctctttt

SEQ ID NO: 506915 - DNA, 634 bp, Homo sapiens
gctgagcaaataaaggaacccttccaggaggaggtgatatctgagcttggttctaaagaatatttaggattcgggacatgtttagattgggggtttggagaagatgatgtaatccaggcaagaggggacagcaaaaacaaagacagaagaattgttcctggaccacatgcagcatrggcaaaggtcagtcatgagaagtaagctttagcaatgggggccagtttaggggaccccaaatgccaaagtagggagggagtgctctataaacaatgttggagcaaaggatatgaacaggcaatacacaggagaagaaatccgaaaactatcaagctcaggtagagatgcttgaactcatgaatacccagaacaatgaaaacgaaagcaatgctgagataccactttacaccaggcagtctggcaaaacttagaaagttggatgacccgaggactgggcctggatgtgggctcagagtccagctaccttggtattggaagtccgggacaagcattctggaggggagcctgacactccttagttcaattagatgtaaataaaactctgaacagaactgctggtttctggcttctcagcacttctgttcctgagtttttatccaaaagaaattcttatata

SEQ ID NO: 506916 - DNA, 634 bp, Homo sapiens
gctgagcaaataaaggaacccttccaggaggaggtgatatctgagcttggttctaaagaatatttaggattcgggacatgtttagattgggggtttggagaagatgatgtaatccaggcaagaggggacagcaaaaacaaagacagaagaattgttcctggaccacatgcagcatgggcaaaggtcagtcatgagaagtaagctttagcaatgggggccrgtttaggggaccccaaatgccaaagtagggagggagtgctctataaacaatgttggagcaaaggatatgaacaggcaatacacaggagaagaaatccgaaaactatcaagctcaggtagagatgcttgaactcatgaatacccagaacaatgaaaacgaaagcaatgctgagataccactttacaccaggcagtctggcaaaacttagaaagttggatgacccgaggactgggcctggatgtgggctcagagtccagctaccttggtattggaagtccgggacaagcattctggaggggagcctgacactccttagttcaattagatgtaaataaaactctgaacagaactgctggtttctggcttctcagcacttctgttcctgagtttttatccaaaagaaattcttatata

SEQ ID NO: 506917 - DNA, 634 bp, Homo sapiens
gctgagcaaataaaggaacccttccaggaggaggtgatatctgagcttggttctaaagaatatttaggattcgggacatgtttagattgggggtttggagaagatgatgtaatccaggcaagaggggacagcaaaaacaaagacagaagaattgttcctggaccacatgcagcatgggcaaaggtcagtcatgagaagtaagctttagcaatgggggccagtttaggggaccccaaatgccaaagtagggagggagtgctctataaacaatgttggagcaaaggatatgaacaggcaatacacaggagaagaaatccgaaaactatcaagctcaggtagagatgcttgaactcatgaatacccagaacaatgaaaacgaaagcaatgctgagataccactttacaccaggcagtctggcaaaacttagaaagttggatgacccgaggaytgggcctggatgtgggctcagagtccagctaccttggtattggaagtccgggacaagcattctggaggggagcctgacactccttagttcaattagatgtaaataaaactctgaacagaactgctggtttctggcttctcagcacttctgttcctgagtttttatccaaaagaaattcttatata

SEQ ID NO: 506918 - DNA, 634 bp, Homo sapiens
gctgagcaaataaaggaacccttccaggaggaggtgatatctgagcttggttctaaagaatatttaggattcgggacatgtttagattgggggtttggagaagatgatgtaatccaggcaagaggggacagcaaaaacaaagacagaagaattgttcctggaccacatgcagcatgggcaaaggtcagtcatgagaagtaagctttagcaatgggggccagtttaggggaccccaaatgccaaagtagggagggagtgctctataaacaatgttggagcaaaggatatgaacaggcaatacacaggagaagaaatccgaaaactatcaagctcaggtagagatgcttgaactcatgaatacccagaacaatgaaaacgaaagcaatgctgagataccactttacaccaggcagtctggcaaaacttagaaagttggatgacccgaggactgggcctggatgtgggctcagagtccagctaccttggtattggaagtccgggacaagcattctggaggggagsctgacactccttagttcaattagatgtaaataaaactctgaacagaactgctggtttctggcttctcagcacttctgttcctgagtttttatccaaaagaaattcttatata

SEQ ID NO: 506919 - DNA, 541 bp, Homo sapiens
aagcgcgcgctccgcgcgcaacacttcagcgcgttgggtactgcccgcggcgctggtgtttgtgactgtgtggagcggaccgtggcggcgcccaggacgtttggtgcctgcacctgccctgggaagtcctaggactggggacccactcatcgaagagccaaggcagttacgtgctccagatggaagacggcgcgcacacacacacaccccgccccgycccgccccgtcccgtcccgtcccgtcccgtcccgtcagctccaggttcgctattcactactgaggaacgctggactgagagtggccagcattaacaactcttttatttgaaaacgtgggtggctctgaaaagagccttttgagttcacaggtgccccttcgagacgcgggccgggctgggcccacttgggccggacgtcagcctcacttgccctttgccttgtggtgactctccgtcttcttagggagcagtacggcctggatgttaggcaagacgccgccctgggcgatggtgactttgcccagcagcttgttcagttcctcg

SEQ ID NO: 506920 - DNA, 621 bp, Homo sapiens
aagaactttattacaacaaacctttttatctccagtttctcacctccaaatttctcctaaatctaatcctaaaattgtatttaaaacattttattaaaactggttgtgacaaggttatcaatgacctttttttcatatcgaattatcaattctcagttctcttcttatgcaatccactgctgccatttgatactgttatcacttccttcttatttgcatttttccttccactgaattttgtgatttcatactttactaggtttcattttacgtccatgtttactttttctgtctccgttgctggctcctgtcttccatatattgaagtgctggattttcttctgtcatcatttatgtttatgccagtctaatgactttacaaacctcctaaacttagaacatctcaagccattccctgggtccaaatatgaaaatgcaaccttttacttggttgtgtgagaagggctgaagaatgtggaraagagagatatgataaagggcagacaaaaacttgttaaagggcatttcgcagacagaaagaaacaaatacccgcttgctgagggacaggatgctcaactttcattacaaagatgttagtgtttgaaagatgtgacccctgc

SEQ ID NO: 506921 - DNA, 581 bp, Homo sapiens
tggggttggtgatcctatcaggttgtagagcctctttgagagcatcagcctttacacatgtcccctctctctctggagaaataattggtgtcccttcatcccctgccacttccctgctgttccttccaagatgaagcatgaagccttggtgatgggtagtaccagtagagagatgcccccaataagacaactagtgctgtgtttgcctctggacctaaggtatgctgctttcctgacagccagatgcaatggggtgcacagtgtaagtgaggggtgcacagtataagtgtggtgagagtggactgttctgyagtcgaggagctgacaaaaagcaaatagcttcagcctgtttgtgtctggggtttccttggtcccaggttctggtaaaggaggaaggcttcttggtcaagagcccacctggacactggcctgaggtgcacaatgatcacaattgtcattgccggaaaaaaacaacttcataatgggtttctggaatggttaccgccagatttttattaaagaaatcaaagccaaaagtttccctttaaaacatgcatggtgaagggaaaattttaaaaaca

SEQ ID NO: 506922 - DNA, 584 bp, Homo sapiens
actattataatcatagtttattattatctcccattgccagatgacaaaattgagaccctgagagattaggcaattttttcaaggtcacatagcagtaagtagcaatgccaggaatccaatccagggagtttgttcccaaataccaggtatttaaccactgtcacactgcactatcctgcctggcagcgtggaaacatgtatcaacgtgaatcaacgtatatcaacgtgaatggtgcagttagcagttacaagaaaaagagaagggagctctgttagtgttatgtgaggaaagcagaaaccackctaggtatttcaaacaagtgtatttaatgtagggaattggtttcaaaggtagtggaaaggcagaaggaacaaaggagaggatgttacccagagttcagtgactgcaaaaggccgctactgcccttaagactagagaagcaaacagggaaaaggaatgtggcctaaagtccacatcacactcacctcagaggctgctgctgctactgctgagtgggactctaggagccacaatcccattgatgctgccagagtctgcagtcatctgcagccatgtgcccctg

SEQ ID NO: 506923 - DNA, 584 bp, Homo sapiens
actattataatcatagtttattattatctcccattgccagatgacaaaattgagaccctgagagattaggcaattttttcaaggtcacatagcagtaagtagcaatgccaggaatccaatccagggagtttgttcccaaataccaggtatttaaccactgtcacactgcactatcctgcctggcagcgtggaaacatgtatcaacgtgaatcaacgtatatcaacgtgaatggtgcagttagcagttacaagaaaaagagaagggagctctgttagtgttatgtgaggaaagcagaaaccacgctaggtatttcaaacaagtgtatttaatgtagggaattggtttcaaaggtagtggaaaggcagaaggaacaaaggagaggatgttacccagagttcagtgactgcaaaaggccgctactgcccttaagactagagaagcaaacagggaaaaggaatgtggcctaaagtccacatcacactcacctcrgaggctgctgctgctactgctgagtgggactctaggagccacaatcccattgatgctgccagagtctgcagtcatctgcagccatgtgcccctg

SEQ ID NO: 506924 - DNA, 409 bp, Homo sapiens
gccaagtgccggagaagttgtactcatgaasagggaaggtgctgctaagcattcagagttcttcaggtctatttctcaagctgttgttccaggcaaactgggtctcctaggtccagttggtagaagaccctacaattttctgcagcaaccacttcttttcatccaggtcatacctttccctggtgtagccccaaattcttgtacttcttccagtttactactactaatagctaccatttaataacattaaattattgcctaacttaatcctctcaataaccctataacttacacataacccattccatggatgaggaacctctggtttgaagaacttaaatgactttcccaatatcgggttacttggtggtgtagctgaacatcagtcccaggaaggtctggctgctca

SEQ ID NO: 506925 - DNA, 631 bp, Homo sapiens
aaaatataaaaattagtggggcatggtggcgtgtgcctgtactcccagctactggggaggctgaagcatgagaattgcttgaatctgggaggcggaggttgtagtgagccaagattgtgccacagcactccagctggggtgacagcgagactctgtcccccccccaaaaaaaaaaaaatcttctttttgggaatatttttgatcaaaagaygggtgactatagagagaaattttgtgtttcaatggaaaactatgtgtcatttacagcacatccttcctggttattagattccagcccagttcatgatctttgaagtctttttcatgtctctttgtaactgatagataactgatagacatgcaaactctgtcttgtctgtcagagatttaagtgacttccaaccctcaccctgtggaaaaaaacagttctggtacctacccacaaattggactgaatttggttaccttgctcagttaatccttaccaaatttttaattcttctggtttccttcaatatctggccacagtcctccaaactaatgtttctaatttttcttccttttgcctgactcggagtcacggagaactaaacctgactgcccaatctctgggactttaggctgccttgca

SEQ ID NO: 506926 - DNA, 631 bp, Homo sapiens
aaaatataaaaattagtggggcatggtggcgtgtgcctgtactcccagctactggggaggctgaagcatgagaattgcttgaatctgggaggcggaggttgtagtgagccaagattgtgccacagcactccagctggggtgacagcgagactctgtcccccccccaaaaaaaaaaaaatcttctttttgggaatatttttgatcaaaagacgggtgactatagagagaaattttgtgtttcaatggaaaactatgtgtcatttacagcacatccttcctggttattagattccagcccagttcatgatctttgaagtctttttcatgtctctttgtaactgatagataactgatagacatgcaaactctgtcttgtctgtcagagatttaagtgacttccaaccctcaccctgtggaaaaaaacagttctggtacctacccacaaattggactgaatttggttaccttgctcagttaatccttaccaaatttttaattcttctggtttccttcaatatctggcyacagtcctccaaactaatgtttctaatttttcttccttttgcctgactcggagtcacggagaactaaacctgactgcccaatctctgggactttaggctgccttgca

SEQ ID NO: 506927 - DNA, 553 bp, Homo sapiens
tgtatggcctgctagtgagaggaagaatatattgctactctttagctcctacacatgaaaggtggcaatgaatgcctgctgcttatgataatggtagataagatcaaaagagatctctttcagttttcttaataataagatatatattaaggttttcaaactgaaaatattgagatttaataagcttaaggataaatatgtgagatacatataggtatttgtttggtaatatcacataccctctgtacctagatgactagtactccatagcagtttgtcayttaaaggacttgccccttgccatatcacaacatgcaaaggttcctgtagtttctaaaatctcctctcaagggaaactaggattctgtttccaggctggcataaactgctaatgatttatgtgatacttttcctatgcaagggcaatggaaacaactagctttgccacaagactactgtctcatttttctgagaattataacatctggagaaagaacagtaaacctaatataagacttactgtttttatcagaattttttttgaaggaagcag

SEQ ID NO: 506928 - DNA, 585 bp, Homo sapiens
ctgctgacccactgtctaagtttatggcttaaaggaatgtgtaaagatagaatcagcttcaaggctaggaccttagccaaccaccagttaacttgttgctctgatttgtgaatgacataaaaatagaaaaagagaaaatagctgattagaatcttggaaataaaaaatatgctagtggaaataaaacaattgaaaataataaaaatctggattagagagagagagtcagagagagtattattaaatgggaatatggcattaaggaatttaccagaatgtagcacagacagaaaagatgaagaggagatggaaatgaaggaggagacaaaacaaaagcaaaaaggaagttcacttaagagacatgtggatagattgagarttttctccaactctttaaataagagttccagaagcaaaaaaaaaaaatggagagaataatagagaaacattatatgaagagtaatacttgcaaattttatcaagacaacctgagatcaaagttgatcaaagggtacacagtttcagatagacataaggaataggttttgagatctattgcacagcagggtgaccatggtcaaaata

SEQ ID NO: 506929 - DNA, 569 bp, Homo sapiens
ggaatgattaagagcatggattctggagtcaaactgagtttatattccagttctaccacttactagttttaaattttggacaaactagtttgacttcagttttctcatctaaaagtgggtataataacaattcctgcctcatagagttgttatgagcattaaatgtagacgataatatgtgttaataatagattaactattaatccactgaattgtcttttcatctttgtcaaaagttagtttcccatatttgtgtgagtctatttctagactgtcaattattttctactgatgtaggtgtctctgtttatgctaatatcacactgtcttgataactagctttttaggaagtcttgaaattaggtactggtctgtcytggtaacgttcaatgtgcacttgaaaagaatgtgtgtcctctgtaaatggagtgttctaagaatgtcatttatgttaagttggttgacattgtcaagtcttgcaaattaggggcctaggggtctgcaaatgttttctataaagggccagatactaaatattttcagttttgtgctatacattctgtcgcaac

SEQ ID NO: 506930 - DNA, 584 bp, Homo sapiens
tttttttttttttttttttttttggagacagagtctcgttctgtctcgctgaggcatgagcttggctcactgcggcctccttccaggttcaagcgattctcctgtcccagcctcccgagtagctgggactacaggtgtatgccaccacacctggctacttttgtatttttatagkgatggggtttcaccaagttggccaagctggtcttgaactcctgacctcaggtgatctgcctgccttggcatcccaaagtgctgggattacaggcctgagccactgcccctggcccacccaggctagtcttgaactcctagcctcaagggattcttctgcctcagcctcccgaagtgctggaattacaagtgtgagccaccatgcttgacctctactgtttaattgtttctagtttttcattgttaaaagcaatgcatcattttacattattgaaattcagagtttttattattatgtatgctaaatattctgctcatttttttgttgttgctattcaaagtcatcaagacagttttagctcttgttggtaggtgaggcacgggtcaaaagaactaaagataagggagca

SEQ ID NO: 506931 - DNA, 566 bp, Homo sapiens
cccttttccacgcagagaatatgcgtgcagctttggccaggctcatgcacacacactttgtgtctacacgtctaataaaggactgtcctcactgcgtggtcccctttgagctgagcgagaggaacagtcagaatgacagaggccaaaggggtcatagagggacctgtgtttgtttaggcttgaggaggtttcgttttakcatgaaacactcaagaattattccctcggccttccatttggtcttggaaactgactaaaggttaccagcccaatccagaagtcctgcgacaggcagaagagggcatgactttgtttttgtttgtcttttttcctatcccagctcattggggggttttaaatcagatcccacttcccctctgcttccgaggccaggcgtgagctaggatgggaggacatgcagtgccttcccggcaggaagaatgggaagaatggcatctcagcaggctttgggacaccccggctcccctgaggggtccctctgggtgcggccctggattgaggaaaaggggaggagggaggagaaaaggctccagggaagagctggc

SEQ ID NO: 506932 - DNA, 560 bp, Homo sapiens
ccaatgccagctcagcaatacaaaggtgagactgttcaacaccaactcagggtagaggtgacactgtccaacagtgagcaaggtagaggtgacactgtccaacactgactcaggtagaggtgacactatttaacacaaactcaggtagaggttacactatacaatactgaccccagtagaggtgacacggtccaacaccaacccaggtagaggtgacactgtccaacactgacccatgtagaggtgatactgtccaacaccartccagagagaggtgatactgtccggtgctgaactggtagaggtgacactgtccatcatgttaccgagccaggtagaagtgacgctgtctgacactgactctgtagaggtgatactgtctgtgactgatttgctgaaaatgacaacttcttccaaagcagcattttgagaagttaataataatgataatttttgatttccatcacaacttggctcttttttcactccctgtccttggtgtgaccgtgtagctgggtggaaacccaaaggctgaatgcaccttcctcagaggtgggtgt

SEQ ID NO: 506933 - DNA, 620 bp, Homo sapiens
tgagcatgtctgagtgtggcgagggaaggtggttgggtagagagtgctgtgagggagtgaggtgggaatccccctagctaggattgagtcatttttttcttccatgcaaaatgcatattccccattgtggatttctgagtgtgtgagtgatgaagaaatagggcatgtgccttgacccagttgcagctattgcctccatgtgcctgaggtgccttcctcatactctagcatgttactgggcagacagtcagtattagcacatgctgctggtccttgtgagcacagcacgaagacgagaaatggctggcagaattttggcttgagggccaatagatgtaataaatgtaatacagttagttttagaacataattccatratttgattcgggtcaaataaatcattttaaccaaaatttctattgtggaagaaaatctttcaagaattatgaaatttgtgtctcagaattggctcatttaagaaaaataatactgttcaaatgtgcgaaggctgtcaaagggtttgttgtatagctttgcattggctgagttttcaatgtttagacatttgagtataagaaaactgctacactaaaagtaatagacataaaaataaaaaataa

SEQ ID NO: 506934 - DNA, 505 bp, Homo sapiens
atattccccattgtggatttctgagtgtgtgagtgatgaagaaatagggcatgtgccttgacccagttgcagctattgcctccatgtgcctgaggtgccttcctcatactctagcatgttactgggcagacagtcagtattagcacatgctgctggtccttgtgagcacagcacgaagacgagaaatggctggcagaattttggcttgagggccaatagatgtaataaatgtaatacagttagttttagaacataattccatgatttgattcgggtcaaataaatcattttaaccaaaatttctattgtggaagaaaatctttcaaraattatgaaatttgtgtctcagaattggctcatttaagaaaaataatactgttcaaatgtgcgaaggctgtcaaagggtttgttgtatagctttgcattggctgagttttcaatgtttagacatttgagtataagaaaactgctacactaaaagtaatagacataaaaataaaaaata

SEQ ID NO: 506935 - DNA, 620 bp, Homo sapiens
tgagcatgtctgagtgtggcgagggaaggtggttgggtagagagtgctgtgagggagtgaggtgggaatccccctagctaggattgagtcatttttttcttccatgcaaaatgcatattccccattgtggatttctgagtgtgtgagtgatgaagaaatagggcatgtgccttgacccagttgcagctattgcctccatgtgcctgaggtgccttcctcatactctagcatgttactgggcagacagtcagtattagcacatgctgctggtccttgtgagcacagcacgaagacgagaaatggctggcagaattttggcttgagggccaatagatgtaataaatgtaatacagttagttttagaacataattccatgatttgattcgggtcaaataaatcattttaaccaaaatttctattgtggaagaaaatctttcaagaattatgaaatttgtgtctcagaattggctcatttaagaaaaataatactgttcaaatgtgcgaaggctgtcaaagggtttgttgyatagctttgcattggctgagttttcaatgtttagacatttgagtataagaaaactgctacactaaaagtaatagacataaaaataaaaaataa

SEQ ID NO: 506936 - DNA, 586 bp, Homo sapiens
aacctgtgtgagtgttttattggtacaaacgtatttaacactaggggttttgtacaattttttgccttttctactagaaaacaatgtaaagtgatttcacaatgtgaagagaaaaaaaaattgccgctgtgaccaaacgcacagtctgttgtgcagcaacaatgggcttygatcaactcagtcgtgattcagctgtagaaatgcttttccttcaccttgtttgagcttttcctttctttcctgttttgatttgcaaaagaaaatgtcttttttgtgtgaacttgtgttgtactctgtagaaaattacgggttttactttaatggtttaagaaaaaaagcaggaagagccctcgtcgcttttcttacctcatcacagagtttgtgtagtgaatttaaaaagagaaaaaaaattgttacatatttggagcaagggagtatgtttttcaaaagaacctccttcctttttttgtgtgtttttccttttgtcccaatggggaatctaaatctgttttaactgcacagacacatagtcaaaaagtcattttttatctgccaagtgtggtacctttgtttatttgttattaaa

SEQ ID NO: 506937 - DNA, 586 bp, Homo sapiens
aacctgtgtgagtgttttattggtacaaacgtatttaacactaggggttttgtacaattttttgccttttctactagaaaacaatgtaaagtgatttcacaatgtgaagagaaaaaaaaattgccgctgtgaccaaacgcacagtctgttgtgcagcaacaatgggctttgatcaactcagtcgtgattcagctgtagaaatgcttttccttcaccttgtttgagcttttcctttctttcctgttttgatttgcaaaagaaaatgtcttttttgtgtgaacttgtgttgtactctgtagaaaattacgggttttactttaatggtttaagaaaaaaagcargaagagccctcgtcgcttttcttacctcatcacagagtttgtgtagtgaatttaaaaagagaaaaaaaattgttacatatttggagcaagggagtatgtttttcaaaagaacctccttcctttttttgtgtgtttttccttttgtcccaatggggaatctaaatctgttttaactgcacagacacatagtcaaaaagtcattttttatctgccaagtgtggtacctttgtttatttgttattaaa

SEQ ID NO: 506938 - DNA, 586 bp, Homo sapiens
aacctgtgtgagtgttttattggtacaaacgtatttaacactaggggttttgtacaattttttgccttttctactagaaaacaatgtaaagtgatttcacaatgtgaagagaaaaaaaaattgccgctgtgaccaaacgcacagtctgttgtgcagcaacaatgggctttgatcaactcagtcgtgattcagctgtagaaatgcttttccttcaccttgtttgagcttttcctttctttcctgttttgatttgcaaaagaaaatgtcttttttgtgtgaacttgtgttgtactctgtagaaaattacgggttttactttaatggtttaagaaaaaaagcaggaagagccctcgtcgcttttcttacctcatcacagagtttgtgtagtgaatttaaaaagagaaaaaaaattgttacatatttggagcaagggagtatgtttttcaaaagaacctccttcctttttttgtgtgtttttccttttgtcccaatggggaatctaaatctgttttaaytgcacagacacatagtcaaaaagtcattttttatctgccaagtgtggtacctttgtttatttgttattaaa

SEQ ID NO: 506939 - DNA, 410 bp, Homo sapiens
ttgtccttaatggtgtgtaaccatgagaaagtgggacttcaaatacgggccaatgttaaggacctggtgggtctagaattgagtcctgctctttatctgatgctatttaacaaactgaagaatgccatcagcaagttttttgactcccaaggacaggtaaagtgtgctcttttttatttttcaccttgtttgaaataaggaaggctttttctttccaattatttaaattaggtgctcacagtttttaaaaattgccaaaaaattgcagaaagaagagtcatctcaatgtaggggtcagcttscttcttaggaactctggtgtgtatgtgtgcctgagggtatacctgccttgtgtatgggtatgagtgtctgcatgtatctgtatgcttgtttggctgtgtgcctgtggg

SEQ ID NO: 506940 - DNA, 435 bp, Homo sapiens
gtaaagatactaatctttattactacttttttttgactgatagactttctgtaaaaataaatgtgcgagagcggtatgtttgggaagttagtgttgtcagtttatgaagaatagtctaccgttattgggaaataaggtacataaagcctcagattgcatttatgttatgattagatagaaaaaggtattatttgaggaactcattgtgttggtctttctaaaaaataattgatttcctgattcaggcaccagagacagaaaaaaaaggaagtaattaagtgtaattaagtctgctttaatgataaatgcttattgacacatatcagaaagtgattaaacactatggactgtataataagcctttacatatgtttctttgaccaarcctagctttataatatggtcgtctctcagtatctgtcaggaattggttcc

SEQ ID NO: 506941 - DNA, 599 bp, Homo sapiens
cacaaacaggtggcaggaaacgtggcatgtctcggaggttggcatcacggaggcactgtgcagtccttgcaatgtcaaacttactyagtgccagcatagacggtggtctcatgcactccataggtgagatcaaatgaaagtttcatatagaaatacacagcctagagaactggcttgtaagataagcaaaaattacttcagtaaggccatgttagtaaatttgcatccatttgtccacatcaggtttagggtactacaaggatctccagacagctacatttatggaagttctgatgaaaatccctcaacaaggcacagaatttgacacacttcaaaaacggtattggctgatgggtttgagcaattggtggaactggtcacagtgatgggtgatcaaggagagctccctatagcgatggctctggccagtgtggttccttgttctcagtgggtaagtgcatagagtaagtggggaagaaaagtgcctggcacatagcaaatccttcagaacatatttgttcaataaatgtttgttgaatgaattgataaaattttagagccagaagaaatcttagatgtttagttaggtgacttttcag

SEQ ID NO: 506942 - DNA, 543 bp, Homo sapiens
tgtgcagtccttgcaatgtcaaacttacttagtgccagcatagacggtggtctcatgcactccataggtgagatcaaatgaaagtttcatatagaaatacacagcctagagaactggcttgtaagataagcaaaaattacttcagtaaggccatgttagtaaatttgcatccatttgtccacatcaggtttagggtactacaaggatctccagacagctacatttatggaagttctgatgaaaatccctcaacaaggcacagaatttgacacacttcaaaaacggtattggctgatgggtttgagcaattggtggaactggtcacagtgatgggtgatcaaggagagctccctatagcgatggctctggcyagtgtggttccttgttctcagtgggtaagtgcatagagtaagtggggaagaaaagtgcctggcacatagcaaatccttcagaacatatttgttcaataaatgtttgttgaatgaattgataaaattttagagccagaagaaatcttagatgtttagttaggtgacttttcag

SEQ ID NO: 506943 - DNA, 530 bp, Homo sapiens
aatctcaggagaaatattaatcagtcacctttgccttaatttagcaagtagttgtcaactttgggtttatgattttgccactcttcagctatctacctgagaacaaaaatgcactaacctgattttgttttgttctcaggatgaactggcttgagttctggttactctatttggttcttggcatttactctaccaactgctctggaacatgttttgtaaagaagtagaattggcagactgactccattcagactctcctctgagrcaacagtttggccagtaaaataatgacactctgtttcaaggtttgtatcattcattttgtgtgtgtgtgtgctgaggtatgtcaagtaatgattatgtacagaatgtgcagagctgattgtcttcttttaaggtaaaatgtatggagcaggcataatgaagtcctactcatgcatttctataggtatatggtgctacctatctataaaaactcctggatgctttattacgaattgagatcacatcctctgatgggcaacatgtta

SEQ ID NO: 506944 - DNA, 441 bp, Homo sapiens
gtagtgacctgctcacagttagaactctgttgactcagtggtgtttctatgagtgtagtgattcgtggtcatggggtggttttcctaaaattgtggacaattctgttttgatgttcaagcatgtgctaaaaatttcacaataaatgtgtctgtgaattwtccatttcatttccacattactccttggacttactgagatgtgtttgtgatgtcaagatgaggtgtttttctttccaggtgttggattttttacctatctgggtatttatgggctccctgggtggaaataagccgcatccatcacacctaccttatggaatttttagaaatttatttgtgcactgccactgtgagacactccatgatgatgacacatttcatttatgttattgtttcataaaattactagtgtaccttccactctagaagagaagatgctgt

SEQ ID NO: 506945 - DNA, 612 bp, Homo sapiens
cacagctaccaccgttttacccggtagcttcagaaggaggactattttgatttaccccaaggtgaggttgagtgggatgccttctgtgagtgactttggagaaggctaaggaaagccagatgagaaagagaggattagaagctgtgagaggtttaaccaggcagaaatctctcccagcaggggcctggattgccatcacatcactgaarggagggctcacaaaagtggtctgcaggcagtgcttactccaagcccgctttttacactgaaaatgatagttgaagacaacatatttgaaagcacctgcaaacaaagttctttcaaaaaacagttctgataccctgctagtcctctcacacaaggcattcccttaaaaaagaatatgcaaaaatgggttggagaatgctatgtgcatttttcaaaatgaattccttctgcctccactgaaagcaatgtgttcacttgtttgataaaaagctactttattccagaggaatgaggcaagaatcaatgagctacttgtcagtgttctaaagctaaattgcaaattcagagtttctctaattcatgaggttctcacaatagtagtattgcatgagtgagaacaatagt

SEQ ID NO: 506946 - DNA, 604 bp, Homo sapiens
ccaccgttttacccggtagcttcagaaggaggactattttgatttaccccaaggtgaggttgagtgggatgccttctgtgagtgactttggagaaggctaaggaaagccagatgagaaagagaggattagaagctgtgagaggtttaaccaggcagaaatctctcccagcaggggcctggattgccatcacatcactgaaaggagggctcacaaaagtggtctgcaggcagtgcttactccaagcccgctttttacactgaaaatgatagttgaagacaacatatttgaaagcayctgcaaacaaagttctttcaaaaaacagttctgataccctgctagtcctctcacacaaggcattcccttaaaaaagaatatgcaaaaatgggttggagaatgctatgtgcatttttcaaaatgaattccttctgcctccactgaaagcaatgtgttcacttgtttgataaaaagctactttattccagaggaatgaggcaagaatcaatgagctacttgtcagtgttctaaagctaaattgcaaattcagagtttctctaattcatgaggttctcacaatagtagtattgcatgagtgagaacaatagt

SEQ ID NO: 506947 - DNA, 512 bp, Homo sapiens
acagctaccaccgttttacccggtagcttcagaaggaggactattttgatttaccccaaggtgaggttgagtgggatgccttctgtgagtgactttggagaaggctaaggaaagccagatgagaaagagaggattagaagctgtgagaggtttaaccaggcagaaatctctcccagcaggggcctggattgccatcacatcactgaaaggagggctcacaaaagtggtctgcaggcagtgcttactccaagcccgctttttacactgaaaatgatagttgaagacaacatatttgaaagcacctgcaaacaaagttctttcaaaaaacagttctgataccctgctagtcctctcacacaaggcattcccttaaaaaagaatatgcaaaaatgggttggagaatgytatgtgcatttttcaaaatgaattccttctgcctccactgaaagcaatgtgttcacttgtttgataaaaagctactttattccagaggaatgaggcaagaatcaatg

SEQ ID NO: 506948 - DNA, 536 bp, Homo sapiens
cataaatataattattacatgtcaactaaaaataaaaggaaaaatatatttttaaaatgttaactcaaaaatcttagcttaatagttgtaaagaaagaagactctcccatcagagtgaagtgggagkgatcttgcttcaggaaatgaagctgcatcagcataacaggactttgacctgaagtcctagctgctggctgaagcagccactgaggagcctttgacagcaaaatctgtaaaaaacattgcgtgataggcatacctaatcgttaaagataaaaacaatacataggtacacgaagacattcgttgtatctcatattttctataaatgttctaaggaaaagtacttgttgcctagagctcatttaagaaacaaggttctcttcagtgcagcatgtgctgttttagggaccctgccagtgtccttccaataggaccaatgctctaaaatcatcacataaataaagtgtgacaagagtttcagcttcttggtttcgtactcctccctcagacatactctactttgtacatttaca

SEQ ID NO: 506949 - DNA, 536 bp, Homo sapiens
cataaatataattattacatgtcaactaaaaataaaaggaaaaatatatttttaaaatgttaactcaaaaatcttagcttaatagttgtaaagaaagaagactctcccatcagagtgaagtgggagggatcttgcttcaggaaatgaagctgcatcagcataacaggactttgacctgaagtcctagctgctggctgaagcagccactgaggagcctttgacagcaaaatctgtaaaaaacattgcgtgataggcayacctaatcgttaaagataaaaacaatacataggtacacgaagacattcgttgtatctcatattttctataaatgttctaaggaaaagtacttgttgcctagagctcatttaagaaacaaggttctcttcagtgcagcatgtgctgttttagggaccctgccagtgtccttccaataggaccaatgctctaaaatcatcacataaataaagtgtgacaagagtttcagcttcttggtttcgtactcctccctcagacatactctactttgtacatttaca

SEQ ID NO: 506950 - DNA, 536 bp, Homo sapiens
cataaatataattattacatgtcaactaaaaataaaaggaaaaatatatttttaaaatgttaactcaaaaatcttagcttaatagttgtaaagaaagaagactctcccatcagagtgaagtgggagggatcttgcttcaggaaatgaagctgcatcagcataacaggactttgacctgaagtcctagctgctggctgaagcagccactgaggagcctttgacagcaaaatctgtaaaaaacattgcgtgataggcatacctaatcgttaaagataaaaacaatacataggtacacgaagacattcgttgtatctcatattttctataaatgttctaaggaaawgtacttgttgcctagagctcatttaagaaacaaggttctcttcagtgcagcatgtgctgttttagggaccctgccagtgtccttccaataggaccaatgctctaaaatcatcacataaataaagtgtgacaagagtttcagcttcttggtttcgtactcctccctcagacatactctactttgtacatttaca

SEQ ID NO: 506951 - DNA, 536 bp, Homo sapiens
cataaatataattattacatgtcaactaaaaataaaaggaaaaatatatttttaaaatgttaactcaaaaatcttagcttaatagttgtaaagaaagaagactctcccatcagagtgaagtgggagggatcttgcttcaggaaatgaagctgcatcagcataacaggactttgacctgaagtcctagctgctggctgaagcagccactgaggagcctttgacagcaaaatctgtaaaaaacattgcgtgataggcatacctaatcgttaaagataaaaacaatacataggtacacgaagacattcgttgtatctcatattttctataaatgttctaaggaaaagtacttgttgcctagagctcatttaagaaacaaggttctcttcagtgcagcatgtgctgttttaggraccctgccagtgtccttccaataggaccaatgctctaaaatcatcacataaataaagtgtgacaagagtttcagcttcttggtttcgtactcctccctcagacatactctactttgtacatttaca

SEQ ID NO: 506952 - DNA, 623 bp, Homo sapiens
aatgaactgtgccattaataatttttctatatttttcatatttgtccattttttgtttcattttctaaatagttaaattgtgcaaaattttctctacagtataaatrtctaccaacaactcagagagaaaatgtcctacagtggcatgtaacttcaaatgatccagacctttacataagtgctaaaaagtgttaatggtgtcatttctgggaaggaggtgccctagaagagggaaacagactggattctcaggcctttaaggttgtcttcttgagacagtctcagtgtcctaactatcagcaccgtgtatggagccgagacccaatttgcatatttcaacaagcttaattttctcaacagttatggctttcactttcccccatcttcttccagccatctctatttatacacccaagaaactttcagattttccttagtttcctctcataacacaaacgtgcctgagatgttatcaggcacatttatcattcacatgtctcttgaaggcgttcagaagaaatgaatggtatcctttctcctggaactgcatcccaccctggaaaccaaatgctgtttacattactcttataggatttttccagacatatgataaaagaaaaaac

SEQ ID NO: 506953 - DNA, 493 bp, Homo sapiens
atgtcctacagtggcatgtaacttcaaatgatccagacctttacataagtgctaaaaagtgttaatggtgtcatttctgggaaggaggtgccctagaagagggaaacagactggattctcaggcctttaaggttgtcttcttgagacagtctcagtgtcctaactatcagcaccgtgtatggagccgagacccaatttgcatatttcaacaagcttaattttctcaacagttatggctttcactttcccccatcttcttccagccatctctatttatacacccaagaaactttcagattttccttastttcctctcataacacaaacgtgcctgagatgttatcaggcacatttatcattcacatgtctcttgaaggcgttcagaagaaatgaatggtatcctttctcctggaactgcatcccaccctggaaaccaaatgctgtttacattactcttataggatttttccagacatatgataaaagaaaaaac

SEQ ID NO: 506954 - DNA, 623 bp, Homo sapiens
aatgaactgtgccattaataatttttctatatttttcatatttgtccattttttgtttcattttctaaatagttaaattgtgcaaaattttctctacagtataaatgtctaccaacaactcagagagaaaatgtcctacagtggcatgtaacttcaaatgatccagacctttacataagtgctaaaaagtgttaatggtgtcatttctgggaaggaggtgccctagaagagggaaacagactggattctcaggcctttaaggttgtcttcttgagacagtctcagtgtcctaactatcagcaccgtgtatggagccgagacccaatttgcatatttcaacaagcttaattttctcaacagttatggctttcactttcccccatcttcttccagccatctctatttatacacccaagaaactttcagattttccttagtttcctctcataacacaaacgtgcctgagatgttatcaggcayatttatcattcacatgtctcttgaaggcgttcagaagaaatgaatggtatcctttctcctggaactgcatcccaccctggaaaccaaatgctgtttacattactcttataggatttttccagacatatgataaaagaaaaaac

SEQ ID NO: 506955 - DNA, 493 bp, Homo sapiens
atgtcctacagtggcatgtaacttcaaatgatccagacctttacataagtgctaaaaagtgttaatggtgtcatttctgggaaggaggtgccctagaagagggaaacagactggattctcaggcctttaaggttgtcttcttgagacagtctcagtgtcctaactatcagcaccgtgtatggagccgagacccaatttgcatatttcaacaagcttaattttctcaacagttatggctttcactttcccccatcttcttccagccatctctatttatacacccaagaaactttcagattttccttagtttcctctcataacacaaacgtgcctgagatgttatcaggcacatttatcattcacatgtctcttgaaggcgttcagaagaaatgaatggtatcctttctcctggaactgcatcccaccctggaaascaaatgctgtttacattactcttataggatttttccagacatatgataaaagaaaaaac

SEQ ID NO: 506956 - DNA, 637 bp, Homo sapiens
gtggcgcctatacataccatctcctctgcctgtaatgctcttttgctagatatttatatttcttgccccaacacttccttcaagtcttttctcaaatatcaccttctcagtgaggccttccctgactagctattgaaaattacacccagtggggatggggagatattggttaaagrgttcaaagtctcagctaaacaagatcaataagatctggagatgtactgtatagcatggtgactgtaattaataataacatattgttcagttgtctctttatatctaggggagactagttccagctcaccctggagacaacaaaatcagcagatgctcaaccgcctcatataaaatggtgcagtatttgcatataacttacacacatccttccatgtagtttaaataatgtctacatttcttatagtagctaagacaatgtaaatgctacgtaaatagttgttatactatatatttgaattattttttgtcatattgttatttttatttttttctaaatattttccatctgtgattgattgaatctgcagatgcagaaccacagatactaagggccaaaagaatacttgaaaattgctaagagagttgatcttaaatgttctcacaacaataaaatggcaag

SEQ ID NO: 506957 - DNA, 637 bp, Homo sapiens
gtggcgcctatacataccatctcctctgcctgtaatgctcttttgctagatatttatatttcttgccccaacacttccttcaagtcttttctcaaatatcaccttctcagtgaggccttccctgactagctattgaaaattacacccagtggggatggggagatattggttaaagggttcaaagtctcagctaaacaagatcaataagatctggagatgtactgtatagcatggtgactgtaattaataataacatattgttcagttgtctctttatatctaggggagactagttccagctcacsctggagacaacaaaatcagcagatgctcaaccgcctcatataaaatggtgcagtatttgcatataacttacacacatccttccatgtagtttaaataatgtctacatttcttatagtagctaagacaatgtaaatgctacgtaaatagttgttatactatatatttgaattattttttgtcatattgttatttttatttttttctaaatattttccatctgtgattgattgaatctgcagatgcagaaccacagatactaagggccaaaagaatacttgaaaattgctaagagagttgatcttaaatgttctcacaacaataaaatggcaag

SEQ ID NO: 506958 - DNA, 637 bp, Homo sapiens
gtggcgcctatacataccatctcctctgcctgtaatgctcttttgctagatatttatatttcttgccccaacacttccttcaagtcttttctcaaatatcaccttctcagtgaggccttccctgactagctattgaaaattacacccagtggggatggggagatattggttaaagggttcaaagtctcagctaaacaagatcaataagatctggagatgtactgtatagcatggtgactgtaattaataataacatattgttcagttgtctctttatatctaggggagactagttccagctcaccctggagacaacaaaatcagcagatgctcaaccgcctcatrtaaaatggtgcagtatttgcatataacttacacacatccttccatgtagtttaaataatgtctacatttcttatagtagctaagacaatgtaaatgctacgtaaatagttgttatactatatatttgaattattttttgtcatattgttatttttatttttttctaaatattttccatctgtgattgattgaatctgcagatgcagaaccacagatactaagggccaaaagaatacttgaaaattgctaagagagttgatcttaaatgttctcacaacaataaaatggcaag

SEQ ID NO: 506959 - DNA, 537 bp, Homo sapiens
acacatccatcatctgcgctgtgtggtcaagccagaaactccacacacctatgtacatcctcttggctaatttctctttcctggagatctgctgcattagttctgatgtcccaaaatgttggccaatctcatctcccatatcaagagcatctcctatgctggctgcctgctccagttcttctacttctccatgtgtgctgcagarggctactttctgtctgtgatgtcctttgatcggttccttaccatctgtcgacctttgcattatcccacagtcatgactcaccacctgtgtgtctgattagtggccttctgcagggcaggtggttttctatccatactgatgcctgcagtgcttatgtcccgagtgcctttctgtggccctaacatcactgaccattttttctgtaacctgggaccattgctggcactgtcctgtgccccagttcccaaaactactctgacttgtgctacagtaagctctctcatcatcttcatcaccttcctctacattcttgggtcccatatcttagtttt

SEQ ID NO: 506960 - DNA, 537 bp, Homo sapiens
acacatccatcatctgcgctgtgtggtcaagccagaaactccacacacctatgtacatcctcttggctaatttctctttcctggagatctgctgcattagttctgatgtcccaaaatgttggccaatctcatctcccatatcaagagcatctcctatgctggctgcctgctccagttcttctacttctccatgtgtgctgcagaaggctactttctgtctgtgatgtcctttgatcggttccttaccatctgtcgacctttgcattatcccacagtcatgactcaccacctgtgtgtcygattagtggccttctgcagggcaggtggttttctatccatactgatgcctgcagtgcttatgtcccgagtgcctttctgtggccctaacatcactgaccattttttctgtaacctgggaccattgctggcactgtcctgtgccccagttcccaaaactactctgacttgtgctacagtaagctctctcatcatcttcatcaccttcctctacattcttgggtcccatatcttagtttt

SEQ ID NO: 506961 - DNA, 332 bp, Homo sapiens
tttttcttagtattgcttaaaatagccatgtattgagaagaactcatataaagattttatgaacaaatttyagtgcatccataggatggaataatatgtaaccattgagggtgtcagtagatacagagatatgtcggcatgcagagatgtactttgctgtatcaagtgagaaaaaatcagtttgttatacatatacacaaatagaatctgctcttgtgttagctggaaatatgtggaaaatataatcaaacttatttctggggatttgtaagtgaagtttttccctttctcttatctgtgatttctgcaatgaacatctgcaaagttttagt

SEQ ID NO: 506962 - DNA, 332 bp, Homo sapiens
tttttcttagtattgcttaaaatagccatgtattgagaagaactcatataaagattttatgaacaaatttcagtgcatccataggatggaataatatgtaaccattgagggtgtcagtagatacagagatatgtcggcatgcaragatgtactttgctgtatcaagtgagaaaaaatcagtttgttatacatatacacaaatagaatctgctcttgtgttagctggaaatatgtggaaaatataatcaaacttatttctggggatttgtaagtgaagtttttccctttctcttatctgtgatttctgcaatgaacatctgcaaagttttagt

SEQ ID NO: 506963 - DNA, 332 bp, Homo sapiens
tttttcttagtattgcttaaaatagccatgtattgagaagaactcatataaagattttatgaacaaatttcagtgcatccataggatggaataatatgtaaccattgagggtgtcagtagatacagagatatgtcggcatgcagagatgtactttgctrtatcaagtgagaaaaaatcagtttgttatacatatacacaaatagaatctgctcttgtgttagctggaaatatgtggaaaatataatcaaacttatttctggggatttgtaagtgaagtttttccctttctcttatctgtgatttctgcaatgaacatctgcaaagttttagt

SEQ ID NO: 506964 - DNA, 332 bp, Homo sapiens
tttttcttagtattgcttaaaatagccatgtattgagaagaactcatataaagattttatgaacaaatttcagtgcatccataggatggaataatatgtaaccattgagggtgtcagtagatacagagatatgtcggcatgcagagatgtactttgctgtatcaagtgagaaaaaatcagtttgttatacatatacacaaayagaatctgctcttgtgttagctggaaatatgtggaaaatataatcaaacttatttctggggatttgtaagtgaagtttttccctttctcttatctgtgatttctgcaatgaacatctgcaaagttttagt

SEQ ID NO: 506965 - DNA, 602 bp, Homo sapiens
tttttcttagtattgcttaaaatagccatgtattgagaagaactcatataaagattttatgaacaaatttcagtgcatccataggatggaataatatgtaaccattgagggtgtcagtagatacagagatatgtcggcatgcagagatgtactttgctgtatcaagtgagaaaaaatcagtttgttatacatatacacaaatagaatctgctcttgtgttagctggaaatatgtggaaaatataatcaaacttatttctggggatttgtaagtgaagtttttccctttctcttatctgtgatttctgcaatgaacatctgcaaagttttagttaagtttcattagtaatgaaataatccttgggaagagaaggaatatgytacttgcatagatacaaataatttcttacattctattatttatttttatacctgtggatggctatcttctgtgaacttttaccctcttcagaagtagagggcttctgtttacctcttgtggtagattttattgtgtatacatcttattatatatagattgatgtgtaaatagtatggattaattattttagtttagttatatatttatgaaaactaaaatag

SEQ ID NO: 506966 - DNA, 602 bp, Homo sapiens
tttttcttagtattgcttaaaatagccatgtattgagaagaactcatataaagattttatgaacaaatttcagtgcatccataggatggaataatatgtaaccattgagggtgtcagtagatacagagatatgtcggcatgcagagatgtactttgctgtatcaagtgagaaaaaatcagtttgttatacatatacacaaatagaatctgctcttgtgttagctggaaatatgtggaaaatataatcaaacttatttctggggatttgtaagtgaagtttttccctttctcttatctgtgatttctgcaatgaacatctgcaaagttttagttaagtttcattagtaatgaaataatccttgggaagagaaggaatatgttacttgcatagatacaaataatttcttacattctattatttatttttatacctgtggatggctatcttctgtgaacttttaccctcttcagaagtagagggcttctgtttacctcttgtggtagattttattgtgtatacatcttattatatatagattgatgtgtaaatagtatggattaattatttyagtttagttatatatttatgaaaactaaaatag

SEQ ID NO: 506967 - DNA, 277 bp, Homo sapiens
aatgagtctctctcctactctttcctctttttggccaratcctcaaatgataaagggaattgtttatgtgatgagagatgagactgaaataattgtctattgcactagcttccagctagagttgtgcattccagttacttcaggaaaatttttaaataatcttcaagtctaggttttcccctgaagattttgatagagtaagtctaataaagcctggatatgtatgtttaaaaatgtttccttgaagccaggcatggtggtgcatggctgtagtccc

SEQ ID NO: 506968 - DNA, 455 bp, Homo sapiens
atccctcaagtcttcatggggattcacacagtgactttgaagttacaacattttttagttccctyacctatgcttatatgctcagccattgttcccaaagcaccagcaccctgctctggccgctgggcatcctgactttatccgcacacaaagtgagcaaattgacccttcctcctgtattcagaacctaatgtggaacccacatcttagctaagaattagctgagaccttcatggtaagagatcctttcaggccgttgttggtcttttctctagcagatatgaggtgggcttgttataaagggtcagaggggttcaaataatgtggcagaaagagatcagtgtttgtttcttcttctttgctaccagatctacactgtgaggcacctttatatcctgtgtagaaccttaggcagtagaaagtcccatatgagccttccccaagcagtggctccc

SEQ ID NO: 506969 - DNA, 597 bp, Homo sapiens
tcagaaggaggagagaaaaaaggacattccaatcattctgttgtttccattgtttctgttgctgcattgttgccactcaaactgcttctgctgcctggtaattgttgacctttgacaccaaggtgcccttactgattcagatccctcaagtcttcatggggattcacacagtgactttgaagttacaacattttttagttcccttacctatgcttataygctcagccattgttcccaaagcaccagcaccctgctctggccgctgggcatcctgactttatccgcacacaaagtgagcaaattgacccttcctcctgtattcagaacctaatgtggaacccacatcttagctaagaattagctgagaccttcatggtaagagatcctttcaggccgttgttggtcttttctctagcagatatgaggtgggcttgttataaagggtcagaggggttcaaataatgtggcagaaagagatcagtgtttgtttcttcttctttgctaccagatctacactgtgaggcacctttatatcctgtgtagaaccttaggcagtagaaagtcccatatgagccttccccaagcagtggctcccag

SEQ ID NO: 506970 - DNA, 455 bp, Homo sapiens
atccctcaagtcttcatggggattcacacagtgactttgaagttacaacattttttagttcccttacctatgcttatatgctcagccattgttcccaaagcaccagcaccctgctctggccgctgggcatcctgactttatccgcacacaaagtgagcaaattgacccttcctcctgtattcagaacctaatgtggaacccacatcttagcyaagaattagctgagaccttcatggtaagagatcctttcaggccgttgttggtcttttctctagcagatatgaggtgggcttgttataaagggtcagaggggttcaaataatgtggcagaaagagatcagtgtttgtttcttcttctttgctaccagatctacactgtgaggcacctttatatcctgtgtagaaccttaggcagtagaaagtcccatatgagccttccccaagcagtggctccc

SEQ ID NO: 506971 - DNA, 455 bp, Homo sapiens
atccctcaagtcttcatggggattcacacagtgactttgaagttacaacattttttagttcccttacctatgcttatatgctcagccattgttcccaaagcaccagcaccctgctctggccgctgggcatcctgactttatccgcacacaaagtgagcaaattgacccttcctcctgtattcagaacctaatgtggaacccacatcttagctaagaatkagctgagaccttcatggtaagagatcctttcaggccgttgttggtcttttctctagcagatatgaggtgggcttgttataaagggtcagaggggttcaaataatgtggcagaaagagatcagtgtttgtttcttcttctttgctaccagatctacactgtgaggcacctttatatcctgtgtagaaccttaggcagtagaaagtcccatatgagccttccccaagcagtggctccc

SEQ ID NO: 506972 - DNA, 616 bp, Homo sapiens
tccaaggaagacagtcccttttatcaagtcagaaggaggagagaaaaaaggacattccaatcattctgttgtttccattgtttctgttgctgcattgttgccactcaaactgcttctgctgcctggtaattgttgacctttgacaccaaggtgcccttactgattcagatccctcaagtcttcatggggattcacacagtgactttgaagttacaacattttttagttcccttacctatgcttatatgctcagccattgttcccaaagcaccagcaccctgctctggccgctgggcatcctgactttatccgcacacaaagtgagcaaattgacccttcctcctgtattcagaacctaatgtggaacccacatcttagctaagaattagctgagaccttcatggtaagagatcctttcaggccgttgttggtcttttctctagcagatatgaggtgggcttgttataaagggtcagaggggttcaaataatgtggcagaaagagatcagtgtttgyttcttcttctttgctaccagatctacactgtgaggcacctttatatcctgtgtagaaccttaggcagtagaaagtcccatatgagccttccccaagcagt

SEQ ID NO: 506973 - DNA, 455 bp, Homo sapiens
atccctcaagtcttcatggggattcacacagtgactttgaagttacaacattttttagttcccttacctatgcttatatgctcagccattgttcccaaagcaccagcaccctgctctggccgctgggcatcctgactttatccgcacacaaagtgagcaaattgacccttcctcctgtattcagaacctaatgtggaacccacatcttagctaagaattagctgagaccttcatggtaagagatcctttcaggccgttgttggtcttttctctagcagatatgaggtgggcttgttataaagggtcagaggggttcaaataatgtggcagaaagagatcagtgtttgtttcttcttctttgctaccagatctayactgtgaggcacctttatatcctgtgtagaaccttaggcagtagaaagtcccatatgagccttccccaagcagtggctccc

SEQ ID NO: 506974 - DNA, 286 bp, Homo sapiens
ttcctcctgtattcagaacctaatgtggaacccacatcttagctaagaattagctgagaccttcatggtaagagatcctttcaggccgttgttggtcttttctctagcagatatgaggtgggcttgttataaagggtcagaggggttcaaataatgtggcagaaagagatcagtgtttgtttcttcttctttgctaccagatctacacwgtgaggcacctttatatcctgtgtagaaccttaggcagtagaaagtcccatatgagccttccccaagcagtggctcc

SEQ ID NO: 506975 - DNA, 504 bp, Homo sapiens
gaaaagcaacagttacaagttaaagaaatgtgtactgctaaatgtgaactgctacttttttctaagtagtttgctatatctagggatcataaagctgttggaagatgaccttttgataaatggcaacacttcttgtatacctcggtcctccagagcacaaacctgtggcagatacataccggtccagccttaaccttaccagttaaaagtttgaggaatttatgatgaggtaaagtacaaccttgaaatgtagaytgctttctttttggttgagaagcagagtttaccactaggccacttgttagatatgatagaagactatgaggaaagatgcatctaataatcacattgccatgtttggggacccaacttttctcctattctatatattatttatttatatatatatatatatatagaaagaatatgttttatatgttgattgccataatagtagtaacaaatcatattttatcatctcgctttcataagttttcacattta

SEQ ID NO: 506976 - DNA, 504 bp, Homo sapiens
gaaaagcaacagttacaagttaaagaaatgtgtactgctaaatgtgaactgctacttttttctaagtagtttgctatatctagggatcataaagctgttggaagatgaccttttgataaatggcaacacttcttgtatacctcggtcctccagagcacaaacctgtggcagatacataccggtccagccttaaccttaccagttaaaagtttgaggaatttatgatgaggtaaagtacaaccttgaaatgtagattgctttstttttggttgagaagcagagtttaccactaggccacttgttagatatgatagaagactatgaggaaagatgcatctaataatcacattgccatgtttggggacccaacttttctcctattctatatattatttatttatatatatatatatatatagaaagaatatgttttatatgttgattgccataatagtagtaacaaatcatattttatcatctcgctttcataagttttcacattta

SEQ ID NO: 506977 - DNA, 509 bp, Homo sapiens
gttaaaggaaaagcaacagttacaagttaaagaaatgtgtactgctaaatgtgaactgctacttttttctaagtagtttgctatatctagggatcataaagctgttggaagatgaccttttgataaatggcaacacttcttgtatacctcggtcctccagagcacaaacctgtggcagatacataccggtccagccttaaccttaccagttaaaagtttgaggaatttatgatgaggtaaagtacaaccttgaaatgtagattgctttctttttggttgagaagcagagtttaccactaggccacttgttagatatgatagaagactatgaggaaagatgcatctaataatcacattgccatgtttggggacccaacttttctcctattctatatattatttatwtatatatatatatatatatagaaagaatatgttttatatgttgattgccataatagtagtaacaaatcatattttatcatctcgctttcataagttttcacatt

SEQ ID NO: 506978 - DNA, 627 bp, Homo sapiens
ttctcccacctatgctcagctatttcacaaccactgaaaccatagactgaaagagaggctagaaccgtttgtgaaaatctctgaagcttagcctcgggtatacagtctatgttgcttaatgatgggaaaatgttctgagaaatgcattgttaggtggtttaattattgtgcaaacatcatacagtataattacacaaacctagatggtgcaacctactacacacttaggctgtatggtatagcccattgcttctatgctaaaacctgtacggcaggttactgcattaaacaccgtagacaattgtaacttaatgataaatgtttgtgtatctaaacatagaaaaagcatagtaaaactactgtagcacacttggcatgaatggagcttgcgagactggaagttgctctgggtgagtcagtgagagtgatgagtgaaagtgaaagcctatgacatcactgtacactaatgtrtactttataaatactagacaattaggctacgcccaatttatacaaacatttttatttcttcaatgtttaattaaccttagtttactgtacttttttaactttataaacttttaaatatttttaaactttttgattctttgtagtaacacttagaac

SEQ ID NO: 506979 - DNA, 586 bp, Homo sapiens
tgataaagaggtaggaggccaggatgagcactgcggggcagatgacattggaggccagcaggaagtacatcataattttatagccgcccttctcgccacaggccagctccaccaagggaagcaaatcacagaaaaagtcatcaatgatgttttcacggcagaagttaaaggaaaacgttttcttggtgatgattgaagagttaataaagccaccacaatatgagactgctaccagcaatgcacacagctttatggacatggcctgrgcataaagcaggggcttggagatggccacgtagcggtcataagccacggcagccagcaggtagcactcactataggccagccctgcagagaagaagaactgacacaggcagccagcaaaggagatgcttttgtcttcagagatgcaggtcactaggatctttggggtgtagacagaagaataccagagatccagaaacgacagatttccagtgaaaaaatacatgggtgtgtggaggcaggagtcattacagatcaacacgatgagggtgctatttcctaccacagtgagagagtacacgcccaggaacaccacgaagag

SEQ ID NO: 506980 - DNA, 592 bp, Homo sapiens
tgaggaaaggaaggatttgtaaggatgtggagagcagcagagtgacaacataatcagtagaaggaagcagaagtattggtcagggcccaggtcctttggaggacggacgttctggatttatgctggaactagtctgccctattgaaagtcattaacaagctaagaatcaaagacaggtctgagaccaggaccgtttataaaattgatgagtcataaaattgttgacttaggaatagggctgaaaatagaaggaagaatatttaaaacttgtttacactgcatttgttagatgataagggaagctagacatgtgttcattagtctgtattttccagtgcactgatagttccaggttagcacaaatgaatcaaaatgggctctgaccaagacagaagaggcatccctaattctcttagatcacaaatgrtggttattctttgagaaatcagtcaacacaatatagctatatatcaaaatcaaaatgtagatttgttacatcccatgaaatttgagagatttgagcatagctatttttttcctcaaattgagtttaaagccttatctcagtttttatctgtatggttttgattcc

SEQ ID NO: 506981 - DNA, 618 bp, Homo sapiens
tggcattgtcttgtcccaccagttcatcctcgagaaacatcaatgcttagttgtctatagtgattattactgacattactaacaaatccccactttagtgtatgttttgtatacctacagcttttctggttgacacttttctagtgtttgtttstgacgaggtctggctctgtaacccaggctgaaatgcaatggcacaatctcagttcactgcagccttgacttcctggactccagtgatcctcccatctcagccccccgagtaactggagaccgcaggtggacaccactatgcccagctaatttttgtatttttctggtagagtcagggtttcaccatgttgtctagactggtcttgaatcctgggttcaactgatccttgcatcccagcctcccaaagtgctaggattatagacgtgagccactgcactgggcctttagctgtttcttatctattttcttttttttatatactttaagttttagggtacatgtgcacaacatgcaggtttgttacatatgtatacatttgccatgttggtgtgcggcacccagtaactcgtcatttaatgttaggtatatttcctaatgctatccctcccccgtcccccgacccc

SEQ ID NO: 506982 - DNA, 667 bp, Homo sapiens
gactttttcctcttttaaatgaccagagagagagagagagaaaaccttccctaagcacttagtgaccacacttagtgaccacctgcyatgcaccaaaactctgtcacctgctcggcaaaccatatctttcttaattcttgctcctacccagtgaggtaggtatattatggttaacatagatgaagcagctggggctcattcagtaaacaaaatttgaactgaatctatttgactacaaagtcagtaggacatactggccctaaaaaattgccagtgggcttgtttttatttttacagattgctgatttaattaaggtcttctgtcttagcaagtttagtctgtgatacttgtctgagcctaactcctttgatggtaaaggcaacacaaatggaaatttaaacatagaattcaaccaatataaaaatatttatatatttttgaaagaaataaaacagtatctgtacaagtcaaaaacataccacattcttggatgggggaacttataatatttcaatttcccccaaaattactttataaatataatgaaattataattggaattcaaatggatttttacggtattaaattacctaaaaattgatgtaaatgtctgagaaaggccaagaaaaacttttaaagaatagttcgggagggtagcttgatttc

SEQ ID NO: 506983 - DNA, 504 bp, Homo sapiens
ttgtgaaactccgcatgcagargttaagcaaccgattcaaggttcacacactgggcagtggtggagacatggttgggatctggctggagactggacatcctgagtttctgctgcacacacagcccttctgaacagaatgatggctccttccccaggccgctgtgcttcatgcctctggatcagctatctcaggccaacagatctgccaactgttctttccatagtgcaaggctgcagcgggaggaagctagcttcctgacaagggcgtttatgaagttcactggtcagtaacacacctggtaaaatgccaaagcctgggcaccgacatgagatcagaagggaacctaggggaactctgctggggttacccgaaaaagggcaatcctatgccttcatgtatcttgaacataaatgaacatgaacaagaggcagacagaagcagggtgaagggcacggactctaagcctggctgctggattcaaagcctgctttgccacctaccag

SEQ ID NO: 506984 - DNA, 630 bp, Homo sapiens
cagcatctcctcctaagtcatcactgtcaattctaataccatacaattgctttcagaagctctcatctctgggaggatgaatgaaaagaagcagggcggcatagaagagtcagtttgaagagcaggattagcatttcctttttgctgatgcaaggacagagagtggggatggattaaagacctatttaatgagctgcctctctcagcctaataacatgaatagcccaaagcgagaagttttaaatgtttcatttgctgtataggaaatcactgcctttttttgggtcaaaatgttgattcttgattccagtttaccttatttaattttccawctttaggatgagaattaagagcattaaaagccaactagaaccactctattttaaactagaagactgatctttttcataaattctaattaacaaaagacaacatataacggcattaatgatctatgtgtagttatttcttggaatattaaaaaacatggaaagtttctgaagttttcttcaaataatattagcatctagttgatgggttctacttttgtgtggttctttaacttcttttattcactcaattctttcttattttgacataaaataattatttaaaatagttttcctaaac

SEQ ID NO: 506985 - DNA, 626 bp, Homo sapiens
gacagtgagagagcataagtagtatgtagagaatagagytttgtgaagtttgggagtaaaggagggatttgctagccaggcatggtactgtggtcccagtagtccaagctactcaggagcctgatgtaagaggaccgcttgagcccccgagttcaaggctgcagtgagctaggaccacaccactaccctccagcctgggtgacaaagcaagatctcatatttgaaaaaaaaaaaaaaatgatttgcaatggccaaggaaatctttttaggcaactttttaaaattttttttttcattttatgtttgtttaggataaggtggtcaaagctgtccatttaaaaagagaaaaaaaatctagttgaaaggaaacttcctcaaacaagagaggaaattagtttaggaaactaaattcagatgagattaaaaaaatggatatgatctggcaaagatagaataactagacttgaaaaaagaaaaggggtttaaaaataaagaaaatgatcaaaatgttcttcgtggggaagatgagtaagaataaaaattttgcagttgagagaaaagaagttcaagcagtcagtgtcaggcagctttactcttcctaatgaaactggattttacatcttctg

SEQ ID NO: 506986 - DNA, 417 bp, Homo sapiens
tatgttggtgaaggaccagggaaaagaaaactgccagcttcctataccaaccatagagttaaagtttttgcttttttttttttttcaggttccttggtaattaracttgtcaataaaacagatttctgtgtccataatgcataaggttaagtaaggtatgtcggtatgttgagtaagatcaccactcaaatgaggagaatgattgttacaaggtacaacatataatgaacaaagtgggaaattaagaaattcttaatttgtacattctggcccaggaaaaagaaatgctgagattatcttggattgtgtttagataactgtttggtatttcaaagtactttcagaatcatctcattttagctttacaatctagaaattttgatacatatattttctatttgagaatactgacaaatt

SEQ ID NO: 506987 - DNA, 623 bp, Homo sapiens
ctgtgttttatatgtatattattttacgtttaaatattctatttctttcttgatattttggctgctcrtaatgtcagttactgagagagaagtgccaaaattttcttctaagctggtggacttatttttatctcctttaaacttttgctctctgtagtttaaggctgtgtttgcgggtgtatataaatgtgtatctttctattgagtagaactttttacaaattttctttcttatctgtcacaatcatatggtggctgtgtcagaactgacactagaaattcaatctgtatcaatcattaagtatttattaagcactgtctatgggtggcagtgggtctgaatctgacctatgctgactcaaaccttcactggaaaatgtcttaagaaactccaggcccaacattgagtgggcatcatttttgacaggaatttttcctattctccatatcaaaggaaaaagacagccaagattaactagtataaattattaaccagtcagaggagcagagttacaaaaccttaatttaaaaggtatgccttacgtatttactgaataaaccatttatgcttatgttttctcttactttggaaaattacaagtattcatgaaaaaaagatggag

SEQ ID NO: 506988 - DNA, 623 bp, Homo sapiens
ctgtgttttatatgtatattattttacgtttaaatattctatttctttcttgatattttggctgctcataatgtcagttactgagagagaagtgccaaaattttcttctaagctggtggacttatttttatctcctttaaacttttgctctctgtagtttaaggctgtgtttgcgggtgtatataaatgtgtatctttctattgagtagaactttttacaaattttctttcttatctgtcacaatcatatggtggctgtgtcagaactgacactagaaattcaatctgtatcaatcattaagtatttattaagcactgtctatgggtggcagtgggtctgaatctgacctatgctgactcaaaccttcactggaaaatgtcttaagaaactccaggcccaacattgagtgggcatcatttttgacaggaatttttcctattctccatatcaaaggaaaaagacagccaagattaactagtataaattattaaccagtcagaggagcrgagttacaaaaccttaatttaaaaggtatgccttacgtatttactgaataaaccatttatgcttatgttttctcttactttggaaaattacaagtattcatgaaaaaaagatggag

SEQ ID NO: 506989 - DNA, 541 bp, Homo sapiens
tctgtctctatctatacttataccaaaccatccacaccattactagaaggatccatctaaaatgtacttctcattacagcacttccctacttaaaaatctctcaagtatctcttcaaagcctagaggataaaattgggagtcctcagtttttctggaaggcctgtgtgatctgattcttgcttaactctccactcactgctctataaggacctgacccagatatctcaaacttttggcagctctctggatgtgcctctctttatataccrgggatatacttgggcatatgccattctcaatatctgttcaccgtttttctcattctacatataatccagacatcagctctgagaaggaggttctaggcatttaatctgtattatctcatttcattttcatcactacgggatgggatagttattactgtaatttccaatttccagtagttgaggaaactgaggcacaaaagtttaaaatcagcctagggtcatataacactttttcccccagatatttaaaattttaaaggcagtggctgtg

SEQ ID NO: 506990 - DNA, 593 bp, Homo sapiens
atcatggtcctttcctgcccccagactctgccctggctttctgctgcacttcaataaaatctctaacaccatcttactagcaacatggtctccagatcagccctggcccacctctcttccccacctcgctacaatctaattaccttgtccttccttctgtctggcccaatgaagtgtcaagttatttcttcccttggaggctttgaatctgctattcctcggtcaggaatgctccttcccaaccctccmaaccgtagactctttcttgtgtttcagaatgttaccatcacattttcacaaaggccttccctgacttcaagcagattccctatttctcaattgtagcatcctatttattccctccctgcatttacttatttaattacttattcatttatttacatgtcaaaccacagtgtgtacctcccactagaaaataaatttcataagaacaggggctttgattttatttgctgctatattccccatattcctagcacctagcagagtctagcacatggtaggtgcacagtaaatattttttgacttaatgtattccttaaactacctcacttgttcagtggccgcagacc

SEQ ID NO: 506991 - DNA, 577 bp, Homo sapiens
ctctgtgttattatagtttctttaatgtccatttctttcacttctttttataawtttttttacatatcttcaagacaggagaacaaattatttgactccttgttctactttaccttccaaacattttactgaacgtttttctaattttttctatcacattttaattctcaagctttcactcaacttctctgactgctcctgtttcttagaatcttgtttttatttcaaacagaatttcttctcttagctctcttgagtattttatttacaatagttcttgttttacaattttttagttctattctgctccctgtagtttctattcctgtcaaatttgtttttccccctttttctttttttctttttaaattagtgtgaattgtcaggctggagacatttcccaagtgtctgaagcatattggttaacatggcactaaaaagccaattgaaagttctgtgtggacagcagggcttgttaattgatctcttcacctctcctccccttcatccacaaaaaagaagtcaagatttatatgtttagtttctttagaggagaatcttccaatatcctgcttgg

SEQ ID NO: 506992 - DNA, 491 bp, Homo sapiens
agtaatgggattgctggatcaaatggtatttctgattctagatccttgaggaatcaccatactrtcttccacaatggttgaactaatttacatgggccctttctttcttaatgtaaatatgcacaaagaccatattacttccattttacttaaactctggcaagtacaggtgccataaaacctatggagtgcttgaaagggaatcattctctttgctttctcctcattcttagattatttgtttcccagttttcttcttaaaaagaggaactgagctgaggcctagaggttttctgtggtggatcaatatgtgccatttgtgggcaggactccacagtgggtcaccactgaaaacaacagttcagttcctcatgcaaatgcacacagacaagccgaatcgagcttaatttgtggagaaaaagcaacagagaggaccctttagaatgcatctctgaactagaattaggatctttaaacaacagcttcctgga

SEQ ID NO: 506993 - DNA, 491 bp, Homo sapiens
agtaatgggattgctggatcaaatggtatttctgattctagatccttgaggaatcaccatactatcttccacaatggttgaactaatttacatgggccctttctttcttaatgtaaatatgcacaaagaccatattacttccattttacttaaactctggcaagtacaggtgccataaaacctatggagtgcttgaaagggaatcattctctttgctttctcctcattcttagattatttgtttcccagttttcttcttaaaaagaggaactgagctgaggcctagaggttttctgtggtggatcaatatgtgccatttgtgggcaggactccacagtgggtcaccactgaaaacaacagttcagttcctcatgcaaatgcacacagacaagccgaatcgagcttaatttgtggagaaaaagcaacagagaggaccctttagaatgcatctctgaactagaattaggatytttaaacaacagcttcctgga

SEQ ID NO: 506994 - DNA, 540 bp, Homo sapiens
ggctgtagtgaaccatgattgcaccactgcccacagctcaggcaacaaagtgagaccctgtctcaacaaataataattaatttaaaaaaatttcttttgagatggagattcactcttgtcacccaggctggagtgcaatggtgtgatctcagctcactccaacctctgcctcctaggctcaagcaattctcctgcctcagcctccagagtagctggsattacaggtgcacgccaccatgtccagcaaattttttgtatttttggtagagacggggatttcaccatgttggccaagctggtcttgaactcatacccttaggtgatcaatccacctgcttcggcctccctaaagtgctgggattacaggcatgaaccaccaagcccggcctaattgaaatttttaaatacaacagttaataaaagcttctattcctcagaaaagcaagcatataagcatgcagagaaatttttgcatatagttttagagattttactaacttcttaaagtctatctattgcattccatgtttaaaattgcag

SEQ ID NO: 506995 - DNA, 540 bp, Homo sapiens
ggctgtagtgaaccatgattgcaccactgcccacagctcaggcaacaaagtgagaccctgtctcaacaaataataattaatttaaaaaaatttcttttgagatggagattcactcttgtcacccaggctggagtgcaatggtgtgatctcagctcactccaacctctgcctcctaggctcaagcaattctcctgcctcagcctccagagtagctgggattacaggtgcacrccaccatgtccagcaaattttttgtatttttggtagagacggggatttcaccatgttggccaagctggtcttgaactcatacccttaggtgatcaatccacctgcttcggcctccctaaagtgctgggattacaggcatgaaccaccaagcccggcctaattgaaatttttaaatacaacagttaataaaagcttctattcctcagaaaagcaagcatataagcatgcagagaaatttttgcatatagttttagagattttactaacttcttaaagtctatctattgcattccatgtttaaaattgcag

SEQ ID NO: 506996 - DNA, 600 bp, Homo sapiens
catgcaacaaccttggaaattagtaagcacaggagccactttttctgatttttgtacakaagcaagacctatgccagtcaccagaataacacactgtacttttgaaactgctttgaaagaggaatgatcaggtgactgaatctctgtgaggttacaaaggcctcatcgctttggttcgtgcactgactattcatgtagtctgaaccgtgattacactttttgccttttcacaaattagttcatctgtttcatcggggctctttaaacattttagctaatcccataacaaaatgagtcagcttttgcatgtagaaatctgaatttcagtgaagccatttcccatatcacagagtctactctccaaaaaaaaaaaaagtgtaatttaggttttatacagaaattgaacaaaattgtttgttccgaaaatgacttttctttttatatctttgaaatccaccccttgagaatataaactgattttgctttaaataaatgacatcttaaaaatcaaagcgtctgaatgtgttcattctcgaatgccattgatactaaagggtgctgaaatttaccttgggtttgctcaataggttgtttgacttg

SEQ ID NO: 506997 - DNA, 560 bp, Homo sapiens
tctgatttttgtacagaagcaagacctatgccagtcaccagaataacacactgtacttttgaaactgctttgaaagaggaatgatcaggtgactgaatctctgtgaggttacaaaggcctcatcgctttggttcgtgcactgactattcatgtagtctgaaccgtgattacactttttgccttttcacaaattagttcatctgtttcatcggggctctttaaacattttagctaatcccataacaaaatgagtcagcttttgcatgtagaaatctgaatttcagtgaagccatttcccatatcacagagtctactctccaaaaaaaaaaaaagtgtaatttaggttttatayagaaattgaacaaaattgtttgttccgaaaatgacttttctttttatatctttgaaatccaccccttgagaatataaactgattttgctttaaataaatgacatcttaaaaatcaaagcgtctgaatgtgttcattctcgaatgccattgatactaaagggtgctgaaatttaccttgggtttgctcaataggttgtttgacttgcag

SEQ ID NO: 506998 - DNA, 553 bp, Homo sapiens
caaagacaggggggaaagtcctcacatactccactagacacacccaggtgtcattttgattatcacattctggcttggtgtcagatgggaaagcatttccatgagcttataagwtggttacaaatatttccagcatttctcttgaaagcttgacccactctctcaccagccttaacattttgcccagcaggttcaaggccattctgtaagtgggtaagagcctagatttgaagccagaccacctggtttgatcccagctctaccctttaccagctgtgtatttttggcaagttagttcatctctctgtgcctcatttcccccatttgtacaattaggatgaaaatagtacccatttcatagggtttttataagaattaaatgaattaatctatgtaaaactgttaaaacaacccaggtacatggtcagcactaaataaatgttaaatgtcattattattattattattattattactatacatttgtgccctggctggactgtttcatgtgtattctgtagctcaatccttatggtaaccctgtgctatgagg

SEQ ID NO: 506999 - DNA, 612 bp, Homo sapiens
gctgcccctgtggccaacttttgcttgctatgaaaggattccattgacttttaccaaccaaaaacacagaagactgactatccaggaaccccactttattttcagttatggctcttctgtttccatatttaaaaacaaaaagtctttcttctctctggttttccagtttcacaaggtcttcaattttactaacaatagtgtgtctgtatagtatttaaagccaaaggaagccccaattccttatatgaatatatgtacatacagcctttccctcttctccttgccttcccatcccccaaacttatgcatacaaatcacgtcattcctgaaatatgatctctccagggtggagtacattggatgctgaaacagcatataacattggctaatatgacggacttcatatagggctgctgaaaggccggcgggcaagggagaaacaaacatttttttaaaaagaaaaacaaacgcctattggaaataaaacaagctagggaactaaagggaaatatatattttccagtccagaattcagagagaaaattattagctaagatttgaaaaaaacaaygcaagaagaaattgtctcattgtttgacataaatcacataa

SEQ ID NO: 507000 - DNA, 590 bp, Homo sapiens
aaccaggagacaagagtttacaccccagacactctatgaatacagagtacagttgagctaaggacagtaggccacagagggaaaggctagcatcttttcaaaacaaaggctgaaagcagatagagaaagcaaaagtataaagagcccaggggtaaaaaaatcctaaagcaataggtaaggagattgaataagtggtgaatagactgggcaatatatggatccaaattcttgcctttgcctgtattttatrtgtttactgtggcattgtatttggaggggttccaatgttcaatgggtagacctatttgaacttcaggttctaaaagttcctcagattacagagtgttcaagagagtgacagttaataaccaaaaataaatattatatgtatcagttcagaatctcttttagaggcaaatagcaagcagaaagaccaactcaaattgactttaaatgcgaaattattggcttaactaactgaaaactcaggattaagacttagttatagacagagcatacattattagagacttaaaaaaatgtcattgtgggtacttttagcccttgccaccttctccagtctgagagtt

SEQ ID NO: 507001 - DNA, 590 bp, Homo sapiens
aaccaggagacaagagtttacaccccagacactctatgaatacagagtacagttgagctaaggacagtaggccacagagggaaaggctagcatcttttcaaaacaaaggctgaaagcagatagagaaagcaaaagtataaagagcccaggggtaaaaaaatcctaaagcaataggtaaggagattgaataagtggtgaatagactgggcaatatatggatccaaattcttgcctttgcctgtattttatgtgtttactgtggcattgtatttggaggggttccaatgttcaatgggtagacctatttgaacttcaggttctaaaagttcctcagattacagagtgttcaagagagtgacagttaataaccaaaaataaatattatatgtatcagttcagaatctcttttagaggcaaatagcaagcagaaagaccaactcaaattgactttaaatgcgaaattattggcttaactaactgaaaactcaggattaagacttagttatagacagagcatacattattagagacttaaaaaaatgtcattgtgsgtacttttagcccttgccaccttctccagtctgagagtt

SEQ ID NO: 507002 - DNA, 570 bp, Homo sapiens
ctatacacccagacaacacagagaagtataaaatcagctccttgttgttctggatacaacagtggttttaaagcccaactctaggaaccaactaggagccctgaaaacttgcttatatactgatctcttctgtctcaagtatatgttgcctgtcttayggtaattctgccatttttggaattcagccctctctttccctcacgcaccacacacacacaaaaatcctgtctgttctagcttcaaaatatatcctgaattcaaccactgtcatgacccacagctaataccccattctaagccaccatcatctttcctggactactacaattccctactagcccatctttctacttctactctaactcagtcagctctccagacagtagctcaaataatcttgttaaaatgcatatcataccatgtcactttcctgttcaaaaccctccagtgacttccattacattaaaataaaacaagagtttcttaccatggtttgtaaagctgtatataatctaatccctagaaacaacccaatctcattagctacaaatcccattagaagaagccttc

SEQ ID NO: 507003 - DNA, 593 bp, Homo sapiens
cacccagacaacacagagaagtataaaatcagctccttgttgttctggatacaacagtggttttaaagcccaactctaggaaccaactaggagccctgaaaacttgcttatatactgatctcttctgtctcaagtatatgttgcctgtcttatggtaattctgccatttttggaattcagccctctctttccctcacgcaccacacacacacaaaaatcctgtctgttctagcttcaaaatatatcctgaattcaaccactgtcatgacccacagctaatacccyattctaagccaccatcatctttcctggactactacaattccctactagcccatctttctacttctactctaactcagtcagctctccagacagtagctcaaataatcttgttaaaatgcatatcataccatgtcactttcctgttcaaaaccctccagtgacttccattacattaaaataaaacaagagtttcttaccatggtttgtaaagctgtatataatctaatccctagaaacaacccaatctcattagctacaaatcccattagaagaagccttcttcttataattgtagccttcttctggct

SEQ ID NO: 507004 - DNA, 570 bp, Homo sapiens
ctatacacccagacaacacagagaagtataaaatcagctccttgttgttctggatacaacagtggttttaaagcccaactctaggaaccaactaggagccctgaaaacttgcttatatactgatctcttctgtctcaagtatatgttgcctgtcttatggtaattctgccatttttggaattcagccctctctttccctcacgcaccacacacacacaaaaatcctgtctgttctagcttcaaaatatatcctgaattcaaccactgtcatgacccacagctaataccccattctaagccaccatcatcttkcctggactactacaattccctactagcccatctttctacttctactctaactcagtcagctctccagacagtagctcaaataatcttgttaaaatgcatatcataccatgtcactttcctgttcaaaaccctccagtgacttccattacattaaaataaaacaagagtttcttaccatggtttgtaaagctgtatataatctaatccctagaaacaacccaatctcattagctacaaatcccattagaagaagccttc

SEQ ID NO: 507005 - DNA, 593 bp, Homo sapiens
cacccagacaacacagagaagtataaaatcagctccttgttgttctggatacaacagtggttttaaagcccaactctaggaaccaactaggagccctgaaaacttgcttatatactgatctcttctgtctcaagtatatgttgcctgtcttatggtaattctgccatttttggaattcagccctctctttccctcacgcaccacacacacacaaaaatcctgtctgttctagcttcaaaatatatcctgaattcaaccactgtcatgacccacagctaataccccattctaagccaccatcatctttcctggactactacaattccctactagcccatctttctacttctactctaactcagtcagctctccagacagtagctcaaataatcttgttaaaatgcatatcataccatgtcactttcctgttcaaaaccctccagtgacttccattacattaaaataaaacaagagtttcttaccatggtttrtaaagctgtatataatctaatccctagaaacaacccaatctcattagctacaaatcccattagaagaagccttcttcttataattgtagccttcttctggct

SEQ ID NO: 507006 - DNA, 542 bp, Homo sapiens
tatttagtaagccaaccattttgacaactgggaatgtgttcactttgctactcccttgccaaatgtgtaacatatacctggttatgtagtgatgaaggttgacatctactcaaagctattgratcctcttccaacagaatttatttttcagtaaaataaattaagctggctagtttggcgtagaatataaagtactatattttttcttctcaaccaattcactggctgcttttcttttttagttttgttttgattaaacttcctttaacaaagaaacaatcgctttgatttagatttttggaaagagttatcattctgtctaacttgggctgaactccaaagaacttccaactaattagcatataacgccacttacccttaactgttatttttgttgccagccaactgtgggtgtcttgatcatgattgatttccttgaggccatgacttgattaaaattccaattactgagtgacacaggcagggaggccctgtccattgactagcaagatatgtaatgtggatatgaatcttttcccaat

SEQ ID NO: 507007 - DNA, 542 bp, Homo sapiens
tatttagtaagccaaccattttgacaactgggaatgtgttcactttgctactcccttgccaaatgtgtaacatatacctggttatgtagtgatgaaggttgacatctactcaaagctattggatcctcttccaacagaatttatttttcagtaaaataaattaagctggctagtttggcgtagaatataaagtactatattttttcttctcaaccaattcactggctgcttttcttttttagttttgttttgattaaacttcctttaacaaagaaacaatcgctttgatttagatttttggaaagagttatcattctgtctaacttgggctgaactccaaagaacttccaactaattagcatataacgccacttacccttaactgttatytttgttgccagccaactgtgggtgtcttgatcatgattgatttccttgaggccatgacttgattaaaattccaattactgagtgacacaggcagggaggccctgtccattgactagcaagatatgtaatgtggatatgaatcttttcccaat

SEQ ID NO: 507008 - DNA, 594 bp, Homo sapiens
ccagtagagatagggttttgccatgttggctggttccagagcctgtgttctgctccattacccttgttgcctgtgtctagtgtccctgctgctggctcagcaatgccagcctcctctaggtccacccgtccactcgggccccagaatggaagcagcagagtaggggctgtggcgagcaataagtggctgggggacaggggccgcggtcagggctggccacgggaagcagacaggcagccagcagggggcagggcagtctgcacagtgtctgatgcctcaggactgtggagcaaggctggctttggcccccttggttggatagttcttacagtgtagaggtgtctccacagcggggggccagtgggagcggccagtgggtgtgccytgggcaaaaagcaaaggccctgactcccccaggggcaggcagaagggtccctgggccttgggaccagagggcgggctctgctgctcactagctgcctcaccctgaccttcacctaatttcttcaagcttccatttcagtgtctgtaaaattcagctactaccagctatttttgtggggttattacaaagcttaaatgagacaaggttct

SEQ ID NO: 507009 - DNA, 576 bp, Homo sapiens
ggtgggcacaatttagctcataaaactcactaaggtttaattaggtaattagggcatggactattaagcattctactgttaatttagtttttatgtttggaaaacattttgaaacataatgatttttatttataatttcattatttatattttcattatgtttaggattgcttggaggtaaatgaagaaagaagagttccgcattagtgaggcagggatgtcagtatataaggaattggaaagacatcartgataatggcaaaagctgcttataaattaaattaagagcttaattaaactgaggaaaaaagcatattgccaaattacatgcagttgttttgtaacagcatttgtccacttgctatgccctgagatttccaaggcacattcctctactaagcgtattataagatgattaaatatgcatagtacaagtatgttatggaaggctatgtcacctgatatagtgggaccacaatagtatgtgtaagtgagatttggaaaatttgataggccagcaagggcaaagaagtgttgaatttgcaagtttgtgcacatattctgaaaatccaggca

SEQ ID NO: 507010 - DNA, 638 bp, Homo sapiens
ctggatctacaggtctcaagctcagtggagaggtctgattgataaaagtgcagaatgtaagctacamgcacagtggctgaagctgtgggttgtagggagatggttctagggcagtggtccccaacctttttggcaccagggaccggttttgtggaagacaatttttccacggaccaagtggggatagtgggtttgggatgattaaagcatgttacatttattgtgcactttatttctattattattgcactgtaatatataatgaaataattatacaactcaccataatgtagaatcagtgggagcagtgagtttgttttcctgcaactagatagtcccatctggggttgatgggagacagtgacggatcatcgagcattagattctaatatggagtgctcaatctcgattcctcaaatgcacagttcacaatagggtttgcgctcctatgaaaatctaatgccaccgctgatctgacaggaggcggagctcacggtaatgcgagcaatggggagcgcctgtaaattcagaggaagcttccctcattcacccactgctcacctcctgcttgtgtggcccagttcctaacaaaccatggaccaatactggtctgtggcccagaggttggggacccctgt

SEQ ID NO: 507011 - DNA, 662 bp, Homo sapiens
aaagtgaaactgttaaacctttgatgacatcaatttgaatttgcaacgttttaaaattgtctagtttgagccatggtagagcaaatgacaagtttctgaaagatttgagagccctggctagagtagctatggaagactatgaggaaaagataagagccacggaggcatagagcaggatggccaggtggggacccaggtaagcacaattcattctgcttaaatggggaaatgaggctttgagtttctttgatatggatgtcactgtgcaagctggatgatatttgggcagagaataaaatgggtttaatacactgtccaggaaaaacgtttgtctgggtctgtccctaccctctatctgacaggtagctggttgttgttatctcctgtagcttcttgtactatccaggctcagaaggactcctcaccatggttagaaatcaataaaggcatctgaagttagttgagaatagcctgtgaataccttctcagtatcctttccttttggttagatttgtcctaactcacgcattacatcacacattcactgagcaaatatttatagagtgctgactttatgccacacactgytcaatgtgtttggatataacagtaaacaaagaagcaagatgactgctattatagaacttaatattctagactgc

SEQ ID NO: 507012 - DNA, 420 bp, Homo sapiens
tgacctatttagaaagatgtgatgtaaaacgatttttacttgacgggtagcattaaatcatatcttaagagactttattagaatcctctttaaagtctccatgaattgctaatataaatgtagtcatatcacatgtaccagaaaatatgaccgatgaagacagacccaagtccctctagtcggattctcaaggattgtaaaaattcatgattcaaaactgacaaaattatgcaaactttttctatacccgttgcagtccagcttctttttctgtatgttttactttacctttctacaaaatgggcattctttaaggattttytgaagattgatgaagtagtttttaaaaaatgcttttaaatccccagatgcttgcaataaactcattgtaggtatttttctgtcatttattttaccagc

SEQ ID NO: 507013 - DNA, 420 bp, Homo sapiens
tgacctatttagaaagatgtgatgtaaaacgatttttacttgacgggtagcattaaatcatatcttaagagactttattagaatcctctttaaagtctccatgaattgctaatataaatgtagtcatatcacatgtaccagaaaatatgaccgatgaagacagacccaagtccctctagtcggattctcaaggattgtaaaaattcatgattcaaaactgacaaaattatgcaaactttttctatacccgttgcagtccagcttctttttctgtatgttttactttacctttctacaaaatgggcattctttaaggattttttgaagattgatgaagtagtttytaaaaaatgcttttaaatccccagatgcttgcaataaactcattgtaggtatttttctgtcatttattttaccagc

SEQ ID NO: 507014 - DNA, 597 bp, Homo sapiens
cattcatagctcttccaataacctgttgaatatgtatgtttagccaacccattcattgtaaagctcctgcagcaacccatcctcctccaaagtgcctgtttctgggctctaccaaaagttatgcttctcagcctgtcaggaaagctgccttgttgtctgtaatcttttataagaaataaagtctccaaatttatagatctcaggattatagatctcagatctatattaatcagttttcctgttactcatttgtgctccccaataaacagaaaartacaaatgaaaatgtggtgaatgctttgctacagttgatggttctttcaggtttatccataggtttctgtgattgctttatgcacataaaagctattgcagacataatagttttatcattcttcttataatctaataaaagttgatgaggtgccagggtgataattggaagtaaactccacggataagtgtagcatctctactagaaccagggcgtttgggttcaaattctggcttcactacttgccagctctgtgaccttggacaagatattgtcatctctgtgtcacagtttcttcctctatgaaacagggataataatag

SEQ ID NO: 507015 - DNA, 598 bp, Homo sapiens
actgcccttgcaaagagatttgctttccctaaagccatgaaaatcctgcaaagatatgtaaaagaacagattctaaaactaaaacagactttagatgttgccaaatctaatttcccccacagttcacgagtcctatctgaaccaaagctgttttagtctaaacacttatgtcctcccaaaattaatgcattgaaaccacatcaccaatgtgacagtattaagaggtgcagcctttgacaggtgattaggttattagggctctaccttgatgaatggaattacagcatatccttgaataatgtccattcactcaatattattttgttataacattgatgagaacattgggttttctccaggtactctggctctgtaccacatgccaaaggcacattaattcatcaggtaaaagaagtgggtagataatcatcttacttgttttcactaaccttcttaaataaatgtctagctcacatttatttcaatacttaatattagaagtattttgatctttattttgragttgggtgatgttttgtaaccaggaataggctataggaacttagctcttttttatattaattagcctgtgggaaac

SEQ ID NO: 507016 - DNA, 618 bp, Homo sapiens
aggggaacaacacacaccagggtgtgtcgggggcctgaggggagggaactgagaggacagatcaattggtgcagcaagccaccatgccacacacatacttatgtaacaaacctgcacgttctgcacatgtaacctaattttcttttaagaataaatacataaaagaaaaaaatagatcaacttactgctctatgaagaacacatagctggcaaccaagaaagaaggcagggaagccagtaagactactgcttcaccacaggagacataatgtggcttggacaggtatgkaccagtggaggtagtaagacctggctgcattttacatttattttgaaaatgaagctgataggatttgccgataatgtggcctgtgaggaaaaattcaatgatggtcataggggctttggccttagtaactgagtcaacaatgatacctttggctgaaatggagaaaggaggatggggaggaaatcatgatgtttcaattattttacgatgaagattcttattaaacattcaagtggaaatcctataaatatctggagggatatatcaggcaaatgctgaagggaaaggtagaaaagatgggaaggcatagctagaggtagaataaaacc

SEQ ID NO: 507017 - DNA, 634 bp, Homo sapiens
cccatataaatacaaatatacatactgagagagagaaagagagagagagaaaagatggtgaaacagaaacagaggaacctagctgattcctgaataaaaggttttcaatgactggccagaaatagttgccccctcacaaactaatgcctattctcatgattcaccccaaattctctcatggattctgtaccctaacaagaggtagagcccttgcataatccagacagactaatacaagaacagctccaaaggatasagtctacacactgaaaaagatgcaatgtgtatggcagggcagggaaacatgaatggatgtagattctgagtatcagatcaagaagaatgaggcataaggtttgacccagctgaattaattgtcaagagtctgttcacccaggattcaagaaaaatgtactatgtcataaacatggcagtggtgttaatagtctgataagttggtcaattgaagctgaatctcgaaaattatctacgttagaggtcagcaaactatggcccatgagccaaatcctgttcaccatctgtatttgtaaataaagcttcatacgaatgaaactaaattcatttatttccatattatctgagattacttgtgaactcaaatgacagagctgag

SEQ ID NO: 507018 - DNA, 634 bp, Homo sapiens
cccatataaatacaaatatacatactgagagagagaaagagagagagagaaaagatggtgaaacagaaacagaggaacctagctgattcctgaataaaaggttttcaatgactggccagaaatagttgccccctcacaaactaatgcctattctcatgattcaccccaaattctctcatggattctgtaccctaacaagaggtagagcccttgcataatccagacagactaatacaagaacagctccaaaggatacagtctacacactgaaaaagatgcaatgtgtatggcagggcagggaaacatgaatggatgtagattctgagtatcagatcaagaagaatgaggcataaggtttgacccagcygaattaattgtcaagagtctgttcacccaggattcaagaaaaatgtactatgtcataaacatggcagtggtgttaatagtctgataagttggtcaattgaagctgaatctcgaaaattatctacgttagaggtcagcaaactatggcccatgagccaaatcctgttcaccatctgtatttgtaaataaagcttcatacgaatgaaactaaattcatttatttccatattatctgagattacttgtgaactcaaatgacagagctgag

SEQ ID NO: 507019 - DNA, 634 bp, Homo sapiens
cccatataaatacaaatatacatactgagagagagaaagagagagagagaaaagatggtgaaacagaaacagaggaacctagctgattcctgaataaaaggttttcaatgactggccagaaatagttgccccctcacaaactaatgcctattctcatgattcaccccaaattctctcatggattctgtaccctaacaagaggtagagcccttgcataatccagacagactaatacaagaacagctccaaaggatacagtctacacactgaaaaagatgcaatgtgtatggcagggcagggaaacatgaatggatgtagattctgagtatcagatcaagaagaatgaggcataaggtttgacccagctgaattaattgtcaagagtctgttcacccaggattcaagaaaaatgtactatgtcataaacatggcagtggtgttaatagtctgataagttggtcaattgaagctgaatctcgaaaattatctaygttagaggtcagcaaactatggcccatgagccaaatcctgttcaccatctgtatttgtaaataaagcttcatacgaatgaaactaaattcatttatttccatattatctgagattacttgtgaactcaaatgacagagctgag

SEQ ID NO: 507020 - DNA, 634 bp, Homo sapiens
cccatataaatacaaatatacatactgagagagagaaagagagagagagaaaagatggtgaaacagaaacagaggaacctagctgattcctgaataaaaggttttcaatgactggccagaaatagttgccccctcacaaactaatgcctattctcatgattcaccccaaattctctcatggattctgtaccctaacaagaggtagagcccttgcataatccagacagactaatacaagaacagctccaaaggatacagtctacacactgaaaaagatgcaatgtgtatggcagggcagggaaacatgaatggatgtagattctgagtatcagatcaagaagaatgaggcataaggtttgacccagctgaattaattgtcaagagtctgttcacccaggattcaagaaaaatgtactatgtcataaacatggcagtggtgttaatagtctgataagttggtcaattgaagctgaatctcgaaaattatctacgttagaggtcagcaaactatggcccatgagccaaatcctgttcaccatctgtatttgtaaataaagcttcatacraatgaaactaaattcatttatttccatattatctgagattacttgtgaactcaaatgacagagctgag

SEQ ID NO: 507021 - DNA, 478 bp, Homo sapiens
acccatttgtaatctttccctatgataactctgcctacacgtagcagtcatatttaggctggagataaaattaacaattaaaatgactactagtcaaatggtaatataaacctatgcttctcttagtgtttactgcttcaacttggaatgtttcatcttaaattttgactgcaatttctttctttttttttttttttctgagacggagtttcgctcttgttgcccaggctggagtgcaatggtgcaatctcagctcatggcaacttctgcctcctgggttcaagtgattctcctgcctcagcttcctaagtagctgggattacaggcatgtgccaccacrcctgtctaattttgtatttttagtagagacggggtttctccatattggtcaggctggttttgaactcccgacatcaggtgatccacccacctcagcctcccaaattaatgggattacagccatgagccactgcaccca

SEQ ID NO: 507022 - DNA, 546 bp, Homo sapiens
ttatgttttctgtggccacttgtttctttcagccagccatgcttcaaaagcaccagctctcagaagcagtagctctgggagtagcaccattggtggcatttggttcatcactgacctgggaactctgctctggacagcagcccatccacacagacatgcctgtgattgacccataaaatgccctcattccatgagggccaatactaatcagattgaatgagttgaacaggccaccaggggtagtaatgtgtgtgcagaaatcaccatatttttcgttttctaaactataaactccacttgtcagaataaaggattttctttccatttgcaagatttctcactcagtctctgatttctccrtggttcctctctgctacattagccctgaatgagctgtaaatgagataatgttgagcacaggaagataggatgttcaagcggacaaagcagggagggcgatccttttcacagcggatgttctaatggctgattcagtcttccgggtggtcagctcagacatcagtactagcactatagacagtgtac

SEQ ID NO: 507023 - DNA, 546 bp, Homo sapiens
ttatgttttctgtggccacttgtttctttcagccagccatgcttcaaaagcaccagctctcagaagcagtagctctgggagtagcaccattggtggcatttggttcatcactgacctgggaactctgctctggacagcagcccatccacacagacatgcctgtgattgacccataaaatgccctcattccatgagggccaatactaatcagattgaatgagttgaacaggccaccaggggtagtaatgtgtgtgcagaaatcaccatatttttcgttttctaaactataaactccacttgtcagaataaaggattttctttccatttgcaagatttctcactcagtctctgatttctccgtggttcctctctgctacattagccctgaatgagctgtaaatgagataatgttgagcacaggaagataggatgttcaagcggacaaagcagggagggcgatccttttcacagcrgatgttctaatggctgattcagtcttccgggtggtcagctcagacatcagtactagcactatagacagtgtac

SEQ ID NO: 507024 - DNA, 690 bp, Homo sapiens
tccacaggaggagggaggaaagagaatggggctcatggtcactttgggaattgctgactttcatatctgcgatttcatttagtcctcatgagtgttttatttyacctaatacagaccttttgcttgatggcagaattgatcaatggttttataaaaacacaggccatgggtcaaaagatcttacttctgaaaagtctcacttttctgaaagccccaaatacagaagaaagagaaccagagggccacctggcatcccatgggggtatccagtaagcataacagaagaggcatcgccttcaattaacccaagtttgtagagtgctgaggaggtcaaaggttggcccagccagtgttgtgatcaatatttatctttggactatttataactcaggtatattgtgaatatttttttaacattacgtatcacagccattgtgtaaaatggtctcttgccaatttctttttttaaaatggcctggcccacagcaaattctgtccagcctattctgaccacctccacaaatcatgcagctgcataaacactcttcagcccaaggtcaaggctctcaggcctttccccagggaggcagattcccacgaaaagcaaacaagaggaggcccagcccacaaagttgacttttaatctcagtctgactagttgcagaagcagagtctcaatccagcccagct

SEQ ID NO: 507025 - DNA, 461 bp, Homo sapiens
ggctgcagtgagctgtaaatgcagcatggcayttcatcctgggcaacagagcaagaccctgttttctttaaaaaagcacaccaaaaccgtgtcttactcattctgcctttataaaattccaggcccaggttttgttgttatttaaagagtctatggcttttttggataaattgcttaaaccagacacttcacatactgacatgtgagaagcgaaggttaattacaaattagctgaatgaatttagatctttgccacttgcattcttaccaagtaacaatctccagttgactcatgttgaaattgccccagcagtttacattagttttatagatcttcatgaatgggtggtgaagacgcaggttgcaacataccctccaggtcacatgaggtggagctgagacagttacagttagagaggaaagttagaatccagtaataaagaatttcgctgctctgttgc

SEQ ID NO: 507026 - DNA, 461 bp, Homo sapiens
ggctgcagtgagctgtaaatgcagcatggcacttcatcctgggcaacagagcaagaccctgttttctttaaaaaagcacaccaaaaccgtgtcttactcattctgcctttataaaattccaggcccaggttttgttgttatttaaagagtctatggcttttttggataaattgcttaaaccagacacttcacatactgacatgtgagaagcgaaggttaattacaaattagctgaaygaatttagatctttgccacttgcattcttaccaagtaacaatctccagttgactcatgttgaaattgccccagcagtttacattagttttatagatcttcatgaatgggtggtgaagacgcaggttgcaacataccctccaggtcacatgaggtggagctgagacagttacagttagagaggaaagttagaatccagtaataaagaatttcgctgctctgttgc

SEQ ID NO: 507027 - DNA, 461 bp, Homo sapiens
ggctgcagtgagctgtaaatgcagcatggcacttcatcctgggcaacagagcaagaccctgttttctttaaaaaagcacaccaaaaccgtgtcttactcattctgcctttataaaattccaggcccaggttttgttgttatttaaagagtctatggcttttttggataaattgcttaaaccagacacttcacatactgacatgtgagaagcgaaggttaattacaaattagctgaatraatttagatctttgccacttgcattcttaccaagtaacaatctccagttgactcatgttgaaattgccccagcagtttacattagttttatagatcttcatgaatgggtggtgaagacgcaggttgcaacataccctccaggtcacatgaggtggagctgagacagttacagttagagaggaaagttagaatccagtaataaagaatttcgctgctctgttgc

SEQ ID NO: 507028 - DNA, 615 bp, Homo sapiens
attaaatttaaagtagtttaattgagcaatgaatgattcgcgaattgggcagaccccagaatcacagcagattcatagagactccagcgcagccacgtggtggaagaagatttatggacaaaagaagggaaatgatgtacagaaatcagaagtgaagtacagaatggctggattgttacaagttggcgtttgccttatttgagtacagtttgaacactcagcagcgtatgagcggttgaactacggcctctgggattggccaagactcagctattgttacagrcgcatactcctaagttaggttttcaatcttgtctacctattaagctaggttgcaatttgtccacaaggactcaactatagaagtacgaagtcccactcaggccatatttagttcactttaacactagcttcggcaactgtctctcagagcccaggacagggcagggatgcaactgggcttcaggaaacttgaattcattgactgtctcttccccatcttagatgcagtgctaagggctttttagtaattttctcatttgattctcaaaacaaactgatgaggaaacggtctgagagtagttaggcagcttttcaaggtcacacagatagtaa

SEQ ID NO: 507029 - DNA, 615 bp, Homo sapiens
attaaatttaaagtagtttaattgagcaatgaatgattcgcgaattgggcagaccccagaatcacagcagattcatagagactccagcgcagccacgtggtggaagaagatttatggacaaaagaagggaaatgatgtacagaaatcagaagtgaagtacagaatggctggattgttacaagttggcgtttgccttatttgagtacagtttgaacactcagcagcgtatgagcggttgaactacggcctctgggattggccaagactcagctattgttacagacgcatactcctaagttaggttttcaatcttgtctacctattaagctaggttgcaatttgtccacaaggactcaactatagaagtacgaagtcccactcaggccatatttagttcactttaacactagcttcggcaactgtctctcagagcccaggrcagggcagggatgcaactgggcttcaggaaacttgaattcattgactgtctcttccccatcttagatgcagtgctaagggctttttagtaattttctcatttgattctcaaaacaaactgatgaggaaacggtctgagagtagttaggcagcttttcaaggtcacacagatagtaa

SEQ ID NO: 507030 - DNA, 615 bp, Homo sapiens
attaaatttaaagtagtttaattgagcaatgaatgattcgcgaattgggcagaccccagaatcacagcagattcatagagactccagcgcagccacgtggtggaagaagatttatggacaaaagaagggaaatgatgtacagaaatcagaagtgaagtacagaatggctggattgttacaagttggcgtttgccttatttgagtacagtttgaacactcagcagcgtatgagcggttgaactacggcctctgggattggccaagactcagctattgttacagacgcatactcctaagttaggttttcaatcttgtctacctattaagctaggttgcaatttgtccacaaggactcaactatagaagtacgaagtcccactcaggccatatttagttcactttaacactagcttcggcaactgtctctcagagcccaggacagggcagggatgcaactgggcttcaggaaacttgaattcattgactgtctcttccccatcttagatgcagtgctaagggctttttagtaattttctcatttgaytctcaaaacaaactgatgaggaaacggtctgagagtagttaggcagcttttcaaggtcacacagatagtaa

SEQ ID NO: 507031 - DNA, 547 bp, Homo sapiens
cctttcccccgtttctcacagcgtggtccctagggtcctatgcttccatcttaccttcttagaacacctctcattttgccccagctcctttaagattcttccccacaagtrgttgcccctgccggggtctcccctactcacccctttctttatttccccctttcactgtcttttgggaaggtgagaccccctccctgactatgggggagggagacagctttggcactggaagatttggcttgaggtggacagccagacctctcctggcccttcctgccctctgccctcctaactggggggtttctggtgttgggaaattcccagggaaaaggcccagaaggctgagcagtgctgggtgccaggagatggagggagtggtgccagaccagagtattcagagatcccaccctccacccatggctcggtcctattttattgacattcattcattgtcacatacttgctgagtgcctgctatccaccaggtactgtactgggcacagcaggaggaacagacaccctggaaaggggtgaggaggtacagggt

SEQ ID NO: 507032 - DNA, 592 bp, Homo sapiens
caccccttccaggcaggaggagtcaggctggccccctgaggtctgaggctgggggaggcctgagcgttaggagcaggaggcaaggaaggtatgttctggccctggaacagcrctcttaggccctgagcatttgtttttcctggcacatgtgctgtgtgggcaggaggggcactagcgaaggcactttagtaacagaagcagagaggagtcacctgtgctgctcatacctcatctggaccattagagcagttctgaaggccagcagccaagaggggtggtgacatggggattacccaacaaagggtggtgcagatggctggggggctgggccacacaggaaggacctgagggcttatgacagaaggttccggttcaggagcctccactctgctccaaagggagaggtcatgaccttcccccaggttcccctgagggccatgggcacagactgtggctcatgttaaggaaggagaaaccccacaagatgattggtgctttggatgtaatgagttctcctttcctggaagtatctaagacctgactggctggagctcctgatttgcagttctgtctctgcacagcctgtggcagg

SEQ ID NO: 507033 - DNA, 582 bp, Homo sapiens
acaactgccttcaattctcatttcctttctaataaaattctgggaacttagcaagaagtaaattcttggcttggtcaatacagtactttgaagtcaactaggtgaaacaattyctttgcatcttgtttttgtaaatttctttgtctttttagagatagggtctcactcggtttcccaggctggagtgcagtggcgtgatcatagctcactgtgaactccagggctcaagcaatcctcctgcctcagcctcctgagtagctaggactacaggagcatgccaccacatccagctaatttttaaattttttgtagagatggggtcttgctatgttttccaggctggtctcgaacttgttggttcagtgatctttcctctctggcctcccaaaatgccgggattacaggtgtgagccactgtgcttggcctcctttgcatcttgagggagaatttacaacattccttgccattgtagtaaaggtagggctgtctgaggattggagtagaaaaagggagttcttttgattgtctatctcaccttccccaaacttctgccatcccagtaaaactgaagccttgcgacg

SEQ ID NO: 507034 - DNA, 582 bp, Homo sapiens
acaactgccttcaattctcatttcctttctaataaaattctgggaacttagcaagaagtaaattcttggcttggtcaatacagtactttgaagtcaactaggtgaaacaatttctttgcatcttgtttttgtaawtttctttgtctttttagagatagggtctcactcggtttcccaggctggagtgcagtggcgtgatcatagctcactgtgaactccagggctcaagcaatcctcctgcctcagcctcctgagtagctaggactacaggagcatgccaccacatccagctaatttttaaattttttgtagagatggggtcttgctatgttttccaggctggtctcgaacttgttggttcagtgatctttcctctctggcctcccaaaatgccgggattacaggtgtgagccactgtgcttggcctcctttgcatcttgagggagaatttacaacattccttgccattgtagtaaaggtagggctgtctgaggattggagtagaaaaagggagttcttttgattgtctatctcaccttccccaaacttctgccatcccagtaaaactgaagccttgcgacg

SEQ ID NO: 507035 - DNA, 599 bp, Homo sapiens
tgtgtgtgcagcatcacaggactcagtgggatacaaatggcttctccstgtatctagattgctcctgagacttgagccacctgaagagttctgtcccctctgtgtgacctacacctggtggctctgaaaagacattttggccactctcaactcactgaatttaatgcttcaggaagcaacaagatttcatcactgaagatgaagctaacgcagagagacaaagaaaatacactgtttaagtccccatgtctgtaaaaggtcatgtggggcaatacagaacctaactcatccaatccacaccaaaacatgctctgtggaatctgactgtctcccccaaactgctccttctggtatagcaatctgtacgtaggccagcccccaaatatcaggatgaactccatctctagaaacacatttgtccttggaaaagactagaacaggactgtcaaaggaaggggagtaacatttgtcaagtacctgctactttgttttatctcatttaattctctttacataatcatttaaagtttactaatgaggaaactgaagctcagaagggttaaataacacgttcaaggacagagagccagtacaggttg

SEQ ID NO: 507036 - DNA, 599 bp, Homo sapiens
tgtgtgtgcagcatcacaggactcagtgggatacaaatggcttctccctgtatctagattgctcctgagacttgagccacctgaagagttctgtcccctctgtgtgacctacacctggtggctctgaaaagacattttggccactctcaactcactgaatttaatgcttcaggaagcaacaagatttcatcactgaagatgaagctaacgcagagagacaaagaaaatacactgtktaagtccccatgtctgtaaaaggtcatgtggggcaatacagaacctaactcatccaatccacaccaaaacatgctctgtggaatctgactgtctcccccaaactgctccttctggtatagcaatctgtacgtaggccagcccccaaatatcaggatgaactccatctctagaaacacatttgtccttggaaaagactagaacaggactgtcaaaggaaggggagtaacatttgtcaagtacctgctactttgttttatctcatttaattctctttacataatcatttaaagtttactaatgaggaaactgaagctcagaagggttaaataacacgttcaaggacagagagccagtacaggttg

SEQ ID NO: 507037 - DNA, 501 bp, Homo sapiens
agcccaaagccacaagctaagcagtactgggaaatatccaaggcaagtaatgggcatcagagaggacactgggtggctgagagactcctagagagaagagcctgaaggtggaggagaaggggcagaagtcataaggaggacaaaatcaagagaaggccagcagcagagccagagccttcagtggcgcagggggtaggctgtaggcacagggggtaggctgcatcctctgcmaactgagggtgaagtgacacatgtttctgctttaagtgatcagtttttacttttaacgttgaagattaaaattaagtgcattactgtagatcagtttacagggatttggtacatctgttttggaaatgaaaaacaaaactgagtaacatcattatatgtattaccagaattggggtaaagtatcagtattaccccgggctgcctccacgctacctccacttttcagcattcctcacacttggtggggaagacatttggccgggcctgggg

SEQ ID NO: 507038 - DNA, 501 bp, Homo sapiens
agcccaaagccacaagctaagcagtactgggaaatatccaaggcaagtaatgggcatcagagaggacactgggtggctgagagactcctagagagaagagcctgaaggtggaggagaaggggcagaagtcataaggaggacaaaatcaagagaaggccagcagcagagccagagccttcagtggcgcagggggtaggctgtaggcacagggggtaggctgcatcctctgccaactgagggtgaagtgacacatgtttctgctttaagtgatcagtttttacttttaacgttgaagattaaaattaagtgcattactgtagatcagtttacagggatttggtacatctgttttggaaatgaaaaacaaaactgagtaacatcattatatrtattaccagaattggggtaaagtatcagtattaccccgggctgcctccacgctacctccacttttcagcattcctcacacttggtggggaagacatttggccgggcctgggg

SEQ ID NO: 507039 - DNA, 484 bp, Homo sapiens
gcccggtggcacctgtgtcggggcccttatatccccactcagattacgacccacatctctgaactattctgcttgcctctggttctgaacacactccaatcttgtaatcatggagattcagaatgtcttattaagggstgtcagccagtgagatggttcttcagcacagaacctgtgagaagacagacttcagttaacacagatattagtcacttgctcctaagtggggaatgccatatgtaacactgcgcacccctgttctctgaatttaccttgggtaaatatcctagcccataagaaaaaaaaaaagacaaaacgtgaaaggttgctgaaccctaaaacttccttccccaaagtcataggtcctagtagcatgtacaacccaattcaataaactctaagcattttaggctggcaaacaaccagactctgaacatctaatgaacgtctgtcatgtgttcaacattacgctagatgcaggagg

SEQ ID NO: 507040 - DNA, 484 bp, Homo sapiens
gcccggtggcacctgtgtcggggcccttatatccccactcagattacgacccacatctctgaactattctgcttgcctctggttctgaacacactccaatcttgtaatcatggagattcagaatgtcttattaaggggtgtcagccagtgagatggttcttcagcacagaacctgtgagwagacagacttcagttaacacagatattagtcacttgctcctaagtggggaatgccatatgtaacactgcgcacccctgttctctgaatttaccttgggtaaatatcctagcccataagaaaaaaaaaaagacaaaacgtgaaaggttgctgaaccctaaaacttccttccccaaagtcataggtcctagtagcatgtacaacccaattcaataaactctaagcattttaggctggcaaacaaccagactctgaacatctaatgaacgtctgtcatgtgttcaacattacgctagatgcaggagg

SEQ ID NO: 507041 - DNA, 517 bp, Homo sapiens
gctggactcaccattgtagctgtagaatttgcaggccattaggtgttgcaagccatgaagcacatggagcctcaagcagaacaagtttttcaaagtctaccaaaatctgccttcggtggtggctacyacagaggtgggtttgaacccaaaatgacaaaatgggaagcagcattaatactccatgtatgcccgactgccaataagggaaaataattgctgctcacagacaaattatgctctttttctttttttttaaaggagcggagagtttaataggcaagaaggggcaagaagggagaaggaagaagctcccctgtatagagacagagggagcgggggctccaaagcggagacagggaaacccacctgccccagataccagctaggtatacagaggctggaggaggcgatgtctgatttgcatagggcttaggggattggtttgattgggcatgtcattgatgtagccctggaaaaagctggccctcccaccctagccttctaatatgcaaatgca

SEQ ID NO: 507042 - DNA, 579 bp, Homo sapiens
tgctgtctgataaagtgacctccatgaaatgccacaataccggattattttctttcctattagagacaaacctaaggttgaagctgccttaaattgagatgataaaaaatatcctaattatgtgcgagaataaaacagagcaggtcatcccggcctgctgctagagtttcctttgtgtttctacctaccaaaaatgaatccaggacaatcagacatttaaagtctacctttggccaggcgaggtggctcatgcctgtaatctcagcactctgggaggccaaggcgggtagatcacttgaggtcaggagttckagaccagcctggccaacatggtgaaaccccatctctactaaaaatacaaaaattagccaggcttggtggcacatgcctgtaatcccagctacttgggaggctgagacaggagaatcacttgaaccctggaggttgaggttgcagtgagccaagatcgtgccactgcactccaggctgggtgacagcaagactcagcctcaaaaataaaaaataaagtctacctttaactcgttcatttgttctatagacatttaatgagccctagag

SEQ ID NO: 507043 - DNA, 621 bp, Homo sapiens
tgctgtctgataaagtgacctccatgaaatgccacaataccggattattttctttcctattagagacaaacctaaggttgaagctgccttaaattgagatgataaaaaatatcctaattatgtgcgagaataaaacagagcaggtcatcccggcctgctgctagagtttcctttgtgtttctacctaccaaaaatgaatccaggacaatcagacatttaaagtctacctttggccaggcgaggtggctcatgcctgtaatctcagcactctgggaggccaaggcgggtagatcacttgaggtcaggagttctagaccagcctggccaacatggtgaaaccccatctctactaaaaatacaaaaattagcmaggcttggtggcacatgcctgtaatcccagctacttgggaggctgagacaggagaatcacttgaaccctggaggttgaggttgcagtgagccaagatcgtgccactgcactccaggctgggtgacagcaagactcagcctcaaaaataaaaaataaagtctacctttaactcgttcatttgttctatagacatttaatgagccctagagatggatgttcccccacgctaatgaagcttcagctccagggac

SEQ ID NO: 507044 - DNA, 579 bp, Homo sapiens
tgctgtctgataaagtgacctccatgaaatgccacaataccggattattttctttcctattagagacaaacctaaggttgaagctgccttaaattgagatgataaaaaatatcctaattatgtgcgagaataaaacagagcaggtcatcccggcctgctgctagagtttcctttgtgtttctacctaccaaaaatgaatccaggacaatcagacatttaaagtctacctttggccaggcgaggtggctcatgcctgtaatctcagcactctgggaggccaaggcgggtagatcacttgaggtcaggagttctagaccagcctggccaacatggtgaaaccccatctctactaaaaatacaaaaattagccaggcttggtggcacatgcctgtaatcccagctacttgggaggctgagacaggagaatcacttgaaccctggaggttgaggttgcagtgagccragatcgtgccactgcactccaggctgggtgacagcaagactcagcctcaaaaataaaaaataaagtctacctttaactcgttcatttgttctatagacatttaatgagccctagag

SEQ ID NO: 507045 - DNA, 621 bp, Homo sapiens
ttctatagataaaatttaaaaaagaaagaaacacagccaaacgaaacagatccgaatcttgccatctgcacactcacctctaataggaacttggcatttaaaaaaggtaagtggaaaagacacacacttttctgtatgctcttcatcaaaatgcaggcgtcatttctgcacatggtgatatttaagcaggagagcattgtcttggctcccctgacccaggtgaggcagtgagtaccccatcyctgagggcaatcaagttaaggaagaatgaccagccatcagaggtgctatagaggtgatccagccttggatattgaaatagggctttgtgagctatggaaagcaaaatggcctaggaaacaaagggggcttaacagatgttccaggcctatctgtgcagcttttccaatgtccctcatttctccagcagctccaagaccttgtaattccatggtgtttgctttgggtaaagagacctggatttccttatatggagcttttctccaggtatttctctccattggcatctaccgcactccatctgccagtgtctcctgccttttgtgcttccagaattagccacagaaaaacaagcacaaaagaagctttcactgccaccac

SEQ ID NO: 507046 - DNA, 580 bp, Homo sapiens
tggtgggtcatagaagccctgaaccatgggctagggaagcagatacaagtacccctcagaccacatgctcgttgaggagcccagagcaagacattggcctatctggtcattggtccttcccgtcaagggaaggaaatgatacatgggccaggcacagtggcttacccctgtaatcccaccttgggagaccaaggcaggcagatcacttcaagttaggagttcgaaaacagcctggccaacatgatgaaaccctgtctctactgaaaatacaaaaattagccaggcatggtggcacaagcctgtaatcccagctactcrggaggctgaggcaagagaatcgcttgaaccggggaggcagaggttgcagtgagacaagatcacaccactgcactgcagcctgggcaacagagcaagactccatctcaaaaaaatgaaataaaataaaataaaaataaatctctttctctctgcatgtatatcctgtttctgtttctctagagaatgctaacacaaaggtgtctcacaccattaatcaataaatgattgtaggcttggtgtggcagcttatgcctgtaatccc

SEQ ID NO: 507047 - DNA, 657 bp, Homo sapiens
gaggactcagcgcacccttgtgtctgggaaggaggaatatttctcaagcgcccccaatgtgctcttgattatgttattcctgttttcattatgactgcaatcctatgagatcatttgactgtttccttttttcagaaaacagacttgtcatggggtgcagtgsctcacacctgtaatccccacattttgggaggctgaggctggcagatcacctgaggtcaggagtttgagaccagcctggccaacatgctgaaacctcgtctgtactaaaaatacaaaaattagcctggcgtggtggcaggcacctgtaatcccagctacttgggaagctgaggcaggagaattgcttgaacctgagagccagaggttgcagtgagccgagatcgtgccactgcactccagcctgggcgacagagcgagactccgtctccaaaataaaaagaagagaaacttgccctaggtcattgatagggtttggatctgtgtccccaaccaaatctcgtgttcagttgtagtccccagtgttggaggtggggcctggtgggaggtgattggatcatgggggtggtttcttaggaacgatttagcaccatcgctttgatgctgtcctctggatagtgagtgagttttcatgtgatctggctgcttaaaagtgtg

SEQ ID NO: 507048 - DNA, 657 bp, Homo sapiens
gaggactcagcgcacccttgtgtctgggaaggaggaatatttctcaagcgcccccaatgtgctcttgattatgttattcctgttttcattatgactgcaatcctatgagatcatttgactgtttccttttttcagaaaacagacttgtcatggggtgcagtggctcacacctgtaatccccacattttgggaggctgaggctggcagatcacctgaggtcaggagtttgagaccagcctggccaacatgctgaaacctcgtctgtactaaaaatacaaaaattagcctggcgtggtggcaggcacctgtaatcccarctacttgggaagctgaggcaggagaattgcttgaacctgagagccagaggttgcagtgagccgagatcgtgccactgcactccagcctgggcgacagagcgagactccgtctccaaaataaaaagaagagaaacttgccctaggtcattgatagggtttggatctgtgtccccaaccaaatctcgtgttcagttgtagtccccagtgttggaggtggggcctggtgggaggtgattggatcatgggggtggtttcttaggaacgatttagcaccatcgctttgatgctgtcctctggatagtgagtgagttttcatgtgatctggctgcttaaaagtgtg

SEQ ID NO: 507049 - DNA, 375 bp, Homo sapiens
ggggagctgttaagcatatagtttttggaattaaactccatgggttctggcaaaatcaaaataaaaatgtggtgatgaattycttaatttaatgttttatttgggaagaaagaattgcagtttggggcttgcacacagactgggcggactttggtacatttgaagaacaaagagaaagttggaggttttatggcaaagagaaatgttgtgtattgcttgttgagaatgttcattggctctagacgtttctggggagctggcaagcttgattggtgggcgatggcagtagatgaaattagtcctagagttgcagcactttatctcagcagttatcgataaaactagtctcaggttacaacaggcagtctcagcagc

SEQ ID NO: 507050 - DNA, 375 bp, Homo sapiens
ggggagctgttaagcatatagtttttggaattaaactccatgggttctggcaaaatcaaaataaaaatgtggtgatgaatttcttaatttaatgttttatttgggaagaaagaattgcagtttggggcttgcacacagactgggcggactttggtacatttgaagaacaaagagaaagttggaggttttatggcaaagagaaatgttgtgtattgcttgttgagaatgttcattggctctagacgtttcyggggagctggcaagcttgattggtgggcgatggcagtagatgaaattagtcctagagttgcagcactttatctcagcagttatcgataaaactagtctcaggttacaacaggcagtctcagcagc

SEQ ID NO: 507051 - DNA, 619 bp, Homo sapiens
ctgcaagtttgacaactactgtggtttacatctcccaggacgtccttctgcccattctttggaaaggccatcccccttattctggctcatctgtcgtgtcctcccgggcatgtcttcaccctctcctcctgtgtgagtctctgggccccttgtttctcattctgccttgtgatgattttccttgctggtttcctggtgttttgggtctgctattgctgtagggcagggtctgcatgtgtgtattcactgttgccctggcactgaatagacaccagtacgcagttgaatgaggggattcccagcttacagatgagagggctgaggcactgaaaggtctggggggtgcgcagrtctctctggcttctgtcctgtctgaaaggtttggggggtgcgcagatctcgctggcttctgtcctgtctgaaaggtttggggggtgcgcagagctctctggcttctgtcctgtctgaaaggtttggggggtgcgcagatctgtctggcttctgtcctgtctgaaaggtttggggggtgcgcagatctcgctggcttctgtcctgtctgaaaggtttggggggtgggcagatctgtctggcttctgtcctgtctgaaaggtttgggggg

SEQ ID NO: 507052 - DNA, 619 bp, Homo sapiens
ctgcaagtttgacaactactgtggtttacatctcccaggacgtccttctgcccattctttggaaaggccatcccccttattctggctcatctgtcgtgtcctcccgggcatgtcttcaccctctcctcctgtgtgagtctctgggccccttgtttctcattctgccttgtgatgattttccttgctggtttcctggtgttttgggtctgctattgctgtagggcagggtctgcatgtgtgtattcactgttgccctggcactgaatagacaccagtacgcagttgaatgaggggattcccagcttacagatgagagggctgaggcactgaaaggtctggggggtgcgcagatctctctggcttctgtcctgtctgaaaggtttggggggtgcrcagatctcgctggcttctgtcctgtctgaaaggtttggggggtgcgcagagctctctggcttctgtcctgtctgaaaggtttggggggtgcgcagatctgtctggcttctgtcctgtctgaaaggtttggggggtgcgcagatctcgctggcttctgtcctgtctgaaaggtttggggggtgggcagatctgtctggcttctgtcctgtctgaaaggtttgggggg

SEQ ID NO: 507053 - DNA, 603 bp, Homo sapiens
gaaaccctcagctcttgtgtcgactcaactcttttaataacttctactcataatccrctgtattactatattgtttatgaggaagcctctctctctctctctctctctctctctctctctctgtcattttctatgactagaaatgtgtgaaaaatgcccactccctcacatggcttcaactcctcttctagtgctgattttctcccatttcttcccatcaccacttctttgcaatggaagctgcaatacttgtgggcagtttcttaattatttaatgtatttgcagttgatttcctggacataacaagagtgccattcaaggtccctgagggctctaagagtgcacttctggaagccaaggcttctcaccttgcccaccagcatcggccctcaggaggtttaaaatcaaatggttctcacatcacctggccctgcaattcacccgtctgatttatcacacttggctgagggcctaggacttggttcagaaaaggtttctggctggatacttcacaacccaacagtatgtctgtaattcatggtggtttgttttatgtatagcagcagaaatccaaacactctctcccttacctgtttttgtgg

SEQ ID NO: 507054 - DNA, 603 bp, Homo sapiens
gaaaccctcagctcttgtgtcgactcaactcttttaataacttctactcataatccgctgtattactatattgtttatgaggaagcctctctctctctctctctctctctctctctctctctgtcattttctatgactagaaatgwgtgaaaaatgcccactccctcacatggcttcaactcctcttctagtgctgattttctcccatttcttcccatcaccacttctttgcaatggaagctgcaatacttgtgggcagtttcttaattatttaatgtatttgcagttgatttcctggacataacaagagtgccattcaaggtccctgagggctctaagagtgcacttctggaagccaaggcttctcaccttgcccaccagcatcggccctcaggaggtttaaaatcaaatggttctcacatcacctggccctgcaattcacccgtctgatttatcacacttggctgagggcctaggacttggttcagaaaaggtttctggctggatacttcacaacccaacagtatgtctgtaattcatggtggtttgttttatgtatagcagcagaaatccaaacactctctcccttacctgtttttgtgg

SEQ ID NO: 507055 - DNA, 603 bp, Homo sapiens
gaaaccctcagctcttgtgtcgactcaactcttttaataacttctactcataatccgctgtattactatattgtttatgaggaagcctctctctctctctctctctctctctctctctctctgtcattttctatgactagaaatgtgtgaaaaatgcccactccctcacayggcttcaactcctcttctagtgctgattttctcccatttcttcccatcaccacttctttgcaatggaagctgcaatacttgtgggcagtttcttaattatttaatgtatttgcagttgatttcctggacataacaagagtgccattcaaggtccctgagggctctaagagtgcacttctggaagccaaggcttctcaccttgcccaccagcatcggccctcaggaggtttaaaatcaaatggttctcacatcacctggccctgcaattcacccgtctgatttatcacacttggctgagggcctaggacttggttcagaaaaggtttctggctggatacttcacaacccaacagtatgtctgtaattcatggtggtttgttttatgtatagcagcagaaatccaaacactctctcccttacctgtttttgtgg

SEQ ID NO: 507056 - DNA, 603 bp, Homo sapiens
gaaaccctcagctcttgtgtcgactcaactcttttaataacttctactcataatccgctgtattactatattgtttatgaggaagcctctctctctctctctctctctctctctctctctctgtcattttctatgactagaaatgtgtgaaaaatgcccactccctcacatggcttcaactcctcttctagtgctgattttctcccatttcttcccatcrccacttctttgcaatggaagctgcaatacttgtgggcagtttcttaattatttaatgtatttgcagttgatttcctggacataacaagagtgccattcaaggtccctgagggctctaagagtgcacttctggaagccaaggcttctcaccttgcccaccagcatcggccctcaggaggtttaaaatcaaatggttctcacatcacctggccctgcaattcacccgtctgatttatcacacttggctgagggcctaggacttggttcagaaaaggtttctggctggatacttcacaacccaacagtatgtctgtaattcatggtggtttgttttatgtatagcagcagaaatccaaacactctctcccttacctgtttttgtgg

SEQ ID NO: 507057 - DNA, 641 bp, Homo sapiens
cagaggttgccatcctgcttcatgccacacagcaggtgagcagtggttagaacctgagcccggctgtgcccgctscacctcgggttccaagccaccacgcctactgcctctccacccacagcccaggcgattttaggagagtaacttaaacactgggtttctgatgtctcatttatcccactggggcaggatggtgtcagattcccaggttcacagcctagagccagtgagcctgccagaatcagcctgcactgcagctctgatttcaggatagtggggtggggtgggggtgtgtgcagtgacatagctggtagactgccaaccccatgttggcagcagtccctggcctctgtggatgagaagccatgtggagagtgtgcccgaggggtggctggctgggggtgggtgggctgtgggcacaccccagttccaggtcctgctccttctccgcaggtctcgttggtcttcctgatcagcgggctggtcatcctgggctatgctgctgctgtcagtggccaggccacctaccagggtgtggtcagggggctgtgtggccctgccattgggaagctgtgtgaggcctgcttcctcctcaacctgctcatgatctccgtggccttcctcagggtgatcggggacca

SEQ ID NO: 507058 - DNA, 641 bp, Homo sapiens
cagaggttgccatcctgcttcatgccacacagcaggtgagcagtggttagaacctgagcccggctgtgcccgctccacctcgggttccaagccaccacgcctactgcctctccacccacagcccaggcgattttaggagagtaacttaaacactgggtttctgatgtctcatttatcccactggggcaggatggtgtcagattcccaggttcacagcctagagccagtgagcctgccagaatcagcctgcactgcagctctgatttcaggatagtggggtggggtgggggtgtgtgcagtgacatagctggtagactgccaaccccatgttggcagcagtccctggcctctgtggatgagaagccatgtggagagtgtgcccgaggggtggctggctgggggtgggtgggctgtgggcacaccccagttccaggtcctgctcctkctccgcaggtctcgttggtcttcctgatcagcgggctggtcatcctgggctatgctgctgctgtcagtggccaggccacctaccagggtgtggtcagggggctgtgtggccctgccattgggaagctgtgtgaggcctgcttcctcctcaacctgctcatgatctccgtggccttcctcagggtgatcggggacca

SEQ ID NO: 507059 - DNA, 542 bp, Homo sapiens
agcccggctgtgcccgctccacctcgggttccaagccaccacgcctactgcctctccacccacagcccaggcgattttaggagagtaacttaaacactgggtttctgatgtctcatttatcccactggggcaggatggtgtcagattcccaggttcacagcctagagccagtgagcctgccagaatcagcctgcactgcagctctgatttcaggatagtggggtggggtgggggtgtgtgcagtgacatagctggtagactgccaaccccatgttggcagcagtccctggcctctgtggatgagaagccatgtggagagtgtgcccgaggggtggctggctgggggtgggtgggctgtgggcacaccccagttccaggtcctgctccttytccgcaggtctcgttggtcttcctgatcagcgggctggtcatcctgggctatgctgctgctgtcagtggccaggccacctaccagggtgtggtcagggggctgtgtggccctgccattgggaagctgtgtgaggcctgcttcctcctcaacc

SEQ ID NO: 507060 - DNA, 641 bp, Homo sapiens
cagaggttgccatcctgcttcatgccacacagcaggtgagcagtggttagaacctgagcccggctgtgcccgctccacctcgggttccaagccaccacgcctactgcctctccacccacagcccaggcgattttaggagagtaacttaaacactgggtttctgatgtctcatttatcccactggggcaggatggtgtcagattcccaggttcacagcctagagccagtgagcctgccagaatcagcctgcactgcagctctgatttcaggatagtggggtggggtgggggtgtgtgcagtgacatagctggtagactgccaaccccatgttggcagcagtccctggcctctgtggatgagaagccatgtggagagtgtgcccgaggggtggctggctgggggtgggtgggctgtgggcacaccccagttccaggtcctgctccttctcygcaggtctcgttggtcttcctgatcagcgggctggtcatcctgggctatgctgctgctgtcagtggccaggccacctaccagggtgtggtcagggggctgtgtggccctgccattgggaagctgtgtgaggcctgcttcctcctcaacctgctcatgatctccgtggccttcctcagggtgatcggggacca

SEQ ID NO: 507061 - DNA, 604 bp, Homo sapiens
tgtgtcagtggagagtcagaagtaacagctttgagcatggcccggtgatgcttcatagtgcaaatgccttgtgctcctgctctgagcatggtaggctgcaggggagacctctttcccttggctcaggggcccagcccagggcactgctggccctaagcacctcaggaggagttgcccacccacagatgcctcccggggacaagtggcaggttttgaaccgggcctggtgagtatgcagctctaccggctaagtacagatggtgaactgtttttgagagtgatttgagattcttaaacattgaaatgcaactcacatagtgtaaaactaaccatcttaaagcataggattcagtggcctttagtacatttgcaatgctacgtcaccatcacttccctctagttctagaacattccatcccgaggaaagccccctgcccatgagctgtccctccccttttcctcttccccatcctcgaggcagccactctgtgctttctgtctaygtggatttgcttattctggacgtttcatgtaagtggaatattagatgccgtctgttgtgtctgcctgccttcactcagtgtggggttttcgagtcaccgac

SEQ ID NO: 507062 - DNA, 524 bp, Homo sapiens
ctaggtagaagaatgtcaccgaagagggcagggtgtggtcagtgtgggtcatgcgtggccatgtgaggggtaggggagaggccaggaccaggaggcaggggtgctggctccaggaagccgcccccttcaaccttgggcttcaccaggacctggcagcacagacactgctctgccttctcaggtgggggcaggggcggcctccttcacttaacaacagggaaacaccttcttgtggaggatggattgaaaagaagcttctgcaccaaagtgtctgtctagaaaaaaacgggatttccttcacaagaagaaggggctggtgggctcctccacgggcctmtgggaggctgtcagtcccgtcccaccgtgcaccaagcagctaaaaggagagagacacgttagagggaaggagtgcgaatgtgggcagcctcgtagctggtggtggtcgtcttgaatgacaggtcgggggatggctttgagtccttgtgtgacacacaggtccttgctggtcacccaggtgcaaacca

SEQ ID NO: 507063 - DNA, 524 bp, Homo sapiens
ctaggtagaagaatgtcaccgaagagggcagggtgtggtcagtgtgggtcatgcgtggccatgtgaggggtaggggagaggccaggaccaggaggcaggggtgctggctccaggaagccgcccccttcaaccttgggcttcaccaggacctggcagcacagacactgctctgccttctcaggtgggggcaggggcggcctccttcacttaacaacagggaaacaccttcttgtggaggatggattgaaaagaagcttctgcaccaaagtgtctgtctagaaaaaaacgggatttccttcacaagaagaaggggctggtgggctcctccacgggcctctgggaggctgtcagtcccgtcccaccgtgcaccaagcagctaaaaggagagagacacgttagagggaaggagtgcgaatgtgggcagcctcgtagctggtggtggtcgtcttgaatgacaggtygggggatggctttgagtccttgtgtgacacacaggtccttgctggtcacccaggtgcaaacca

SEQ ID NO: 507064 - DNA, 461 bp, Homo sapiens
gccttcaatgtttcttcctgtcttgacctccatcgagactcgacagggtgaccccagcacagggaataaggcctggcttcttatagtggccaacagctatttattaaatagaatcaatgcagtgtagtttttcttttgagayagggtctcactctgttgcccaggctggagtgcagtggcacaatcacttcagccttccaagtagcggggactagaggagtgcaccactcggcctaattcaaaaactgtcccaatagagatggggtcttgctatgttccccatgctggtctttaactcctgggctcaggctgtcttctcaccttggcttcccaaagtgccaggattgcaaacttcagccactgtgcccagctgaaatgtcatgttaaagtgtgaacatttatttaaacaaaaccaggtggctggatgtgatggttcacgcctgtaatcgcagaactttggg

SEQ ID NO: 507065 - DNA, 674 bp, Homo sapiens
ggaatttggtaacttctggtagttatgttgattagtctccttggaagaaagtaactttataagctacrgatgttaaatggtgagatcataaatggctgaatctccaggcatggtggctcacacctgtaatcccagcactttgggaggccaagggtggcggatcacctgaggtcaggagtttgagaccatcctggctaacgcggtgaaaccctgtctctactaaaaatacaaaaaattagccgggcgaggtggcgggcgcctgtagtcccagctactccggaggctgaggcaggagaatggcgtgaaccccagggggcggagcctgcagtgagccgagattgcgccactgcactccagcctgggcgacagcgagactccgtctcaaaaaaaaaaaaaaaaattagccgggcgtggtggcatgtgcctgtagtcccagctacttgggaggctgaggcaggagaatcgcttgaacccgggaggtggaggttgcagtgagccaaaatcgcaccactgcactccagcctgggcgacagggtgagactctgtctgatagatagatagatagatagatagatagatagatagatagatagatagactgaaactgtgagccacgtacatttgaaaagttagtgttatttgaacgtacaattgacaagatctgatgccctcag

SEQ ID NO: 507066 - DNA, 674 bp, Homo sapiens
ggaatttggtaacttctggtagttatgttgattagtctccttggaagaaagtaactttataagctacggatgttaaatggtgagatcataaatggctgaatctccaggcatggtggctcacacctgtaatcccagcactttgggaggccaagggtggcggatcacctgaggtcaggagtttgagaccatcctggctaacrcggtgaaaccctgtctctactaaaaatacaaaaaattagccgggcgaggtggcgggcgcctgtagtcccagctactccggaggctgaggcaggagaatggcgtgaaccccagggggcggagcctgcagtgagccgagattgcgccactgcactccagcctgggcgacagcgagactccgtctcaaaaaaaaaaaaaaaaattagccgggcgtggtggcatgtgcctgtagtcccagctacttgggaggctgaggcaggagaatcgcttgaacccgggaggtggaggttgcagtgagccaaaatcgcaccactgcactccagcctgggcgacagggtgagactctgtctgatagatagatagatagatagatagatagatagatagatagatagatagactgaaactgtgagccacgtacatttgaaaagttagtgttatttgaacgtacaattgacaagatctgatgccctcag

SEQ ID NO: 507067 - DNA, 674 bp, Homo sapiens
ggaatttggtaacttctggtagttatgttgattagtctccttggaagaaagtaactttataagctacggatgttaaatggtgagatcataaatggctgaatctccaggcatggtggctcacacctgtaatcccagcactttgggaggccaagggtggcggatcacctgaggtcaggagtttgagaccatcctggctaacgcggtgaaaccctgtctctactaaaaatacaaaaaattagccgggcgaggtggygggcgcctgtagtcccagctactccggaggctgaggcaggagaatggcgtgaaccccagggggcggagcctgcagtgagccgagattgcgccactgcactccagcctgggcgacagcgagactccgtctcaaaaaaaaaaaaaaaaattagccgggcgtggtggcatgtgcctgtagtcccagctacttgggaggctgaggcaggagaatcgcttgaacccgggaggtggaggttgcagtgagccaaaatcgcaccactgcactccagcctgggcgacagggtgagactctgtctgatagatagatagatagatagatagatagatagatagatagatagatagactgaaactgtgagccacgtacatttgaaaagttagtgttatttgaacgtacaattgacaagatctgatgccctcag

SEQ ID NO: 507068 - DNA, 674 bp, Homo sapiens
ggaatttggtaacttctggtagttatgttgattagtctccttggaagaaagtaactttataagctacggatgttaaatggtgagatcataaatggctgaatctccaggcatggtggctcacacctgtaatcccagcactttgggaggccaagggtggcggatcacctgaggtcaggagtttgagaccatcctggctaacgcggtgaaaccctgtctctactaaaaatacaaaaaattagccgggcgaggtggcgggcgcctgtagtcccagctactccggaggctgaggcaggagaatggcgtgaaccccagggggcggagcctgcagtgagccgagattgcgccactgcactccagcctgggcgacagcgagactccgtctcaaaaaaaaaaaaaaaaattagccgggcgtggtggcatgtgcctgtagtcccagctacttgggaggctgaggcaggagaatcgcttgaacccgggargtggaggttgcagtgagccaaaatcgcaccactgcactccagcctgggcgacagggtgagactctgtctgatagatagatagatagatagatagatagatagatagatagatagatagactgaaactgtgagccacgtacatttgaaaagttagtgttatttgaacgtacaattgacaagatctgatgccctcag

SEQ ID NO: 507069 - DNA, 467 bp, Homo sapiens
cagcctcccaggtatctgggattacaggtgcctgccaccacgtctggctaattttttgcatttttagtggagacagggtttcaccatgttggccaggctggtctcgaattcctgacttcaggtgatccagctacctcagcctcccagagtcctgggattacaggtgtgagccaccgcaccagccagtattytatcctttaatgtgtttggaagatacggtcttttttttttaatattgttttgtaaatttttaaaaatcttaactatgtagacactatcacaataataaaaaatagggaaaaaccatagaaaactcgcttccagcctcagcatactaacttggccactgttttttaaatattcttttccagcccttatctgcaatacttattttttttgttatcattgtgcacttggcaaaaattcacaacttttttggtggttctcattatatcataaatattgaa

SEQ ID NO: 507070 - DNA, 564 bp, Homo sapiens
gttttacagggctctgaacgctgggtcctggctcccacgccagccttctcccatctgtggagcccagccaagcagatctaccctcaatccacctgcctctgagacactgcacatgcaggttcctctccatcggtctcccctcattatctggatgcctctgattcatcccttggatgyatgcagaggccgaaccccagagtctcgaggattgttgtgttgtgaaatccccttcccatggccctcaccacacctggcctgccatctgccaggcggtgaggacagggctccccactgcctcaccaccatggaccttcagcattggcagtggctggtacataacaaacagccataaatatctgttgaatgaataactggacttccttacatgcctcctgcagaaaggaagaagtgaggagctacaaagctgctgggaatttctgcaagtttcagcaaacacagtttaggcagcttcctggtgctagcgtgctctcattttgaaagacggccatccagtggagaaagatgaagagtctggaacaacgtgcactgctagactgtcttccc

SEQ ID NO: 507071 - DNA, 630 bp, Homo sapiens
gtgtacaggaaccacaaggactgatgcaaaactaggaagagaagaagcacgagaayggatgaaaaagaggatctgaaaacaacgaatcctcaacacgaggttgtttttgaccaaagcagggaccttcaattgaggacacagccattctcaagtgacatcagaaggaaggagccagttcccctcaatctctggtcagagatgcccgttagccaagtcccaagagaaacaggccctagaggaggtccactgttgtcatcacacagatcagtcccctgggcagagagtaaggtggagaagggcaagctaagagaggatatgttgaacaaattgtaaactgttgttcaaaaagtgttaaagcactcaacagtgctttgtacctttcaggtggcctgctatttctcattccaaacaggatatttacaaccaaatacaaccatttcaccgaagtgcaaccaaagataaattaatgtatgactttatacaccacaatgtaacaggctgttaagcagcatgatcgaattaaaggtcctgaaaatggcataactaatggcactgtcttgaaaaaaaaaatagtgctaatgcggaggctcatgaaatgtgtatgaactgtataacatattcatgccctat

SEQ ID NO: 507072 - DNA, 630 bp, Homo sapiens
gtgtacaggaaccacaaggactgatgcaaaactaggaagagaagaagcacgagaatggatgaaaaagaggatctgaaaacaacgaatcctcaacacgaggttgtttttgaccaaagcagggaccttcaattgaggacacagccattctcaagtgacatcagaaggaaggagccagktcccctcaatctctggtcagagatgcccgttagccaagtcccaagagaaacaggccctagaggaggtccactgttgtcatcacacagatcagtcccctgggcagagagtaaggtggagaagggcaagctaagagaggatatgttgaacaaattgtaaactgttgttcaaaaagtgttaaagcactcaacagtgctttgtacctttcaggtggcctgctatttctcattccaaacaggatatttacaaccaaatacaaccatttcaccgaagtgcaaccaaagataaattaatgtatgactttatacaccacaatgtaacaggctgttaagcagcatgatcgaattaaaggtcctgaaaatggcataactaatggcactgtcttgaaaaaaaaaatagtgctaatgcggaggctcatgaaatgtgtatgaactgtataacatattcatgccctat

SEQ ID NO: 507073 - DNA, 600 bp, Homo sapiens
ttgttgatagtgtatacaccagaaaatcaactggacaactcgaaaataaaaatgagacataaaaaaaaagctgctcttttctcagtaaaactgataattacagagccatgcagtttgttctgctacttacattacccatatttcataatcaacattttgagggcttttaacactttaactgttttgcaattgatctgattcttctaaagagttatgtatttctgagatgagttttttttatttgttgattgccaacaagctgcaaacaataatatgtaaagacacctgagttaatttgagtggcttttccagggcttctcaagctttaatgtgcatatggttcacctgaggattgtgttacacttcagattctgattcagtaggtctggaatrggacctaagagtatgcatttctgataagttggtctgctgttgatcagctcacaagttaaacatcatgtcaatgttgctggtctgcagaccacacttagaggagcaagcgtttacacagaaacttggaaatattaagtcagcagcaggctgggcttggaaagtggaatacaggcaccgttgggaggactggaaccccatttttcaagg

SEQ ID NO: 507074 - DNA, 593 bp, Homo sapiens
gctgcccaaaatgttgggatgacaggcatgcgycactgcacctggcctcaacatactttaaactttaaaataacactttctgggggcgggtttgaactaagtgctttacctgcagatgtaaatggcagctcctcaacctaatgactgtgtaacctcgggaaagtttatcaatctctccgaaccttagtttctcatctggcaaatgggggtagtaacagcaccatatattgaaggatttaatgcatatagagcccttagcgcagggcctggcaccaagttggccccgggcacggccatagccacttcgcctgaccgtcaaggcaaccttgtgagattcgtgttgtcatcaggcccattttctagttgacaaaactgaagccccaagcaagtaagtgcttcccccgaggttaagtcatcatttaaaaatcctgaaataatggcgccatcaaggggttcaggtggagtgaccaccacagcccctcccgtcccctcaccacactgagggctctcggcccccctgcagtgacgtccccactcccagccttccctggcccagaagcccactcctctccagcccccgactctggggcagc

SEQ ID NO: 507075 - DNA, 537 bp, Homo sapiens
catgactgccctgcagcaggtgttattactgctgctttagagacacacagtggggggctcagctagatgaggctcatcgagctcgcaagtggcagagctgggatttgaaaccatgtccatccgaccccaaaatctgagctaagcagttaggaagggtgtttgtttgtttgtttgtttgtctccctctgttgyctaggccggtgcacagtggcgtgatctcagctcactgcaacctctgcctcccaggttcaagtgattctcctgcctcagcttcctgagtacctgggattataggcatgcatcaccacacatggctaattttttgtatttttagtagagacagggtttcaccatgttgactggtcttgaactcctgacctcaagtgagctgcctgccttggcctcccaaagtgctggggttataggtgtgagccaccgtgcctggccctggaagggtgtcttgtcaatgctgctggagagggcttgtctttcatgcccaggatggggcagcctgggactcaggcacaggttgcccag

SEQ ID NO: 507076 - DNA, 564 bp, Homo sapiens
caaaggaaactgcattttcattttcaactgggccccccaacaaatcatgtggccagtcctataagatttgtaggctgtctgccctgccagaccatcacattagttgcctatggctgctgtggtgaatttccacaatcagcagcttaaaacaactcacatttgytaccttacagttctggaggtcagaagtctaaattaggtccataaggcgtcattctttctgtttattttgggttcttttgtttgcctttttttagagacagggtctcactctgttactcaggctggagtgcggtgatgtgatcaccattcacagcgagggatctcccagccccaggctggggcctgtcattgtcacacactcggggtcccctccccattttcttcttggcctgattgcgcagaagtgctggtgctgccagcacagaacattaaaattttttttttcatatgaacagggtctcactatgttgcccaggctggtctcgaactcctggcctccagcagtcctctcatctcagcatcccgaagtgctgggattacaggtgtgagccactacgccca

SEQ ID NO: 507077 - DNA, 564 bp, Homo sapiens
caaaggaaactgcattttcattttcaactgggccccccaacaaatcatgtggccagtcctataagatttgtaggctgtctgccctgccagaccatcacattagttgcctatggctgctgtggtgaatttccacaatcagcagcttaaaacaactcacatttgttaccttacagttctggaggtcagaagtctaaattaggtccataaggcgtcattctttctgtttattttgggttcttttgtttgcctttttttagagacagggtctcactctgttacycaggctggagtgcggtgatgtgatcaccattcacagcgagggatctcccagccccaggctggggcctgtcattgtcacacactcggggtcccctccccattttcttcttggcctgattgcgcagaagtgctggtgctgccagcacagaacattaaaattttttttttcatatgaacagggtctcactatgttgcccaggctggtctcgaactcctggcctccagcagtcctctcatctcagcatcccgaagtgctgggattacaggtgtgagccactacgccca

SEQ ID NO: 507078 - DNA, 583 bp, Homo sapiens
ctcactaagtgcttgtaaaagagaatcagataatcagataaatataagttgaacaaaagtaggaaaccaaaaatagcatagtaagtagccttggaatagagcaaaactaactcgaatccacttactagttgtgtacactccagaaagtgactcaatttctatgccttggttctttcatctctgaaatcaggrccgaaatgtcccctttgctgcagtgacacatgattaataaactattcaaagtctaaggcactgagtagctgctcaaaaagcagtggctaggagttgggttgtttttgccaaatctggggaatcttccaggtgaaaacatctctggaattgaaaaatcttagaaggatctggagcaacggctggatttccctgaactgaatgtagcaacatttacatttttcataccacggaaaattgagggacgatccaggaaaacatagacagcttgagaaaatttaaaggttccacagtgtttttccattcggggacaatagaaaacaggaaaacattaataacatgtcactgcccgactgccagcagaaccaccccaggaaagcatcttttggtataa

SEQ ID NO: 507079 - DNA, 625 bp, Homo sapiens
ctcactaagtgcttgtaaaagagaatcagataatcagataaatataagttgaacaaaagtaggaaaccaaaaatagcatagtaagtagccttggaatagagcaaaactaactcgaatccacttactagttgtgtacactccagaaagtgactcaatttctatgccttggttctttcatctctgaaatcaggaccgaaatgtcccctttgctgcagtgacacatgattaataaactattcaaagtctwaggcactgagtagctgctcaaaaagcagtggctaggagttgggttgtttttgccaaatctggggaatcttccaggtgaaaacatctctggaattgaaaaatcttagaaggatctggagcaacggctggatttccctgaactgaatgtagcaacatttacatttttcataccacggaaaattgagggacgatccaggaaaacatagacagcttgagaaaatttaaaggttccacagtgtttttccattcggggacaatagaaaacaggaaaacattaataacatgtcactgcccgactgccagcagaaccaccccaggaaagcatcttttggtataaatcaccgggtgggcatggtattctcccgtcccatgcgtcata

SEQ ID NO: 507080 - DNA, 626 bp, Homo sapiens
aaggatcatagccgtgatcaatgccattaagcttttccctatgttttcttctagtagtttaacagttgctgatactatgtttaagattttaacacattttgagttggcttttgtatatggtataaggtagttcatttttattattttgcatgtagataaccagttttctcagttccattttttgaggagacaattatttctccattgtgttttcttagctaatcattgaggttctattcacaatagccaagatggggaaatgatccaagggtcctttgacagattaatgaatcaagaaaatgtgctatatacatataatagaatattattaactctaaaacagaaggaaatctgcaacataatggcctgtcacatctctgtcactctacaataattagtgatattaatactattatttagaaaaaattgatttcctatgacataggttatgacatgtattttgtctcaggtgcctcattcacagggtaggttaagggacaatatctaaagttcttttctgctgcttccartgtataaagacattagttaagacataaacaagaaacagataatcatgaactcaagttagaaaatcatgagagtttagtgaaggaattattttcaaa

SEQ ID NO: 507081 - DNA, 670 bp, Homo sapiens
gggaagctaaaactggaggggggcaaaaaccaggcccactaaggctaagcctgaggacagggcagaggaaagcacaacagatttactttcattcttagaagacagtggatggaaaagtggatttccaccaacaaaagacctggcctttttccctgagcaggaaatactgagctgctgtggtcttgccctccctgcagagccggcctaatggtttasccatggtaaaagcgttgcagccaaagagagcagaagagaaaactgggaagctggtgtcagattttctactcgggcatatctttggcctaggcccccgcagcagtcacgggggaaggcctggaaagccgcagtctaacaagatgcctgacattgtgaaatgccttaaccctagcctttcatccacctcttagccttgcctctcccgcccgccccgcgtggcgctgctggatacaagagaaaaagtcaccgtccccttgtccttgaggtaattaatcagcggtgactctttaccctgggaataatatgcctcagaacacttttcattcctgtaatatcaattatgctgcagagatgcagttctgaaaaagatacaaaggcatttggtggggtttggtggcaaagtaaccaggctaagttgttgacactacagcacacaggatggtattcagacacc

SEQ ID NO: 507082 - DNA, 670 bp, Homo sapiens
gggaagctaaaactggaggggggcaaaaaccaggcccactaaggctaagcctgaggacagggcagaggaaagcacaacagatttactttcattcttagaagacagtggatggaaaagtggatttccaccaacaaaagacctggcctttttccctgagcaggaaatactgagctgctgtggtcttgccctccctgcagagccggcctaatggtttacccatggtaaaagcgttgcagccaaagagagcagaagagaaaactgggaagctggtgtcagattttctactcgggcatatctttggcctaggcccccgcagcagtcacgggggaaggcctggaaagccgcagtctaacaagatgcctgacattgtgaaatgccttaaccctagcctttcatccacctcttagccttgcstctcccgcccgccccgcgtggcgctgctggatacaagagaaaaagtcaccgtccccttgtccttgaggtaattaatcagcggtgactctttaccctgggaataatatgcctcagaacacttttcattcctgtaatatcaattatgctgcagagatgcagttctgaaaaagatacaaaggcatttggtggggtttggtggcaaagtaaccaggctaagttgttgacactacagcacacaggatggtattcagacacc

SEQ ID NO: 507083 - DNA, 543 bp, Homo sapiens
gacagtaaacaatgtttgatgaatctacagtctttatactagcgggagagtccaaagaccaataaatccasggtacaattaataattgagattcctggaagctctaaaaggaaatattaaaaatgcaaaatcttgttgaaaagcataattaagcgcatcaatgcctaaagtttaaaggacaagcaatttctcattaaagttaaaaatgtcaattttatataagaatatattaccctaactttctttgtggggtaggaggaggatatagaaaaacagtttttatagacttcattttaccctaacttaaaggagcatcctgttccatttccaaaatcctcactgccccaagatcctaaaatagtataacttcagatgagtaatagctaaataaatttatcacacatcagaaccctttactggtgcacagatgttttgacaatggtgctgatggacatgatgggtttactgtgtatgtggaggaaattaagaggcatgtagactgcatacctttttcttaatggctgatgtgcgtctcttccccat

SEQ ID NO: 507084 - DNA, 543 bp, Homo sapiens
gacagtaaacaatgtttgatgaatctacagtctttatactagcgggagagtccaaagaccaataaatccacggtacaattaataattgagattcctggaagctctaaaaggaaatattaaaaatgcaaaatcttgttgaaaagcataattaagcgcatcaatgcctaaagtttaaaggacaagcaatttctcattaaagttaaaaatgtcaattttatataagaatatattaccctaactttctttgtggggtaggaggaggatatagaaaaacagtttttatagacttcattttaccctaacttaaaggagcatcctgttccatttccaaartcctcactgccccaagatcctaaaatagtataacttcagatgagtaatagctaaataaatttatcacacatcagaaccctttactggtgcacagatgttttgacaatggtgctgatggacatgatgggtttactgtgtatgtggaggaaattaagaggcatgtagactgcatacctttttcttaatggctgatgtgcgtctcttccccat

SEQ ID NO: 507085 - DNA, 456 bp, Homo sapiens
gactagatcaaacaaaaccagtggtcttctctcttggaattgcctgatgtgggtagamggatgataaagagataacagacaagtatgcaaacaagatgatggtctacagtatgcagacagtaacaccagagactgggaaggcatggtgtgttggccaagtgacacttgcagtagacctgaaggatgagaagtactcagcattgcagagtacagggaactttcttggcaaagggaagggcaaagagcaaaggccccaggacagtgataaaatctgcccatcaattcgcttctcctctcatcgagaggtggagtctgtgtcccttccccttaatcccagtgagctcaggactatacagtggtgactgccttccccaaagatgcagtggaagtgacaccctctgccttctgagactaagtcagaaaaggccgtgccacttctgctgtgtagctgaaaca

SEQ ID NO: 507086 - DNA, 593 bp, Homo sapiens
aaaggctcccagccgactctgcattcrctgaatttgccagccctcccctgcaagaagaagagagcgtttcctcactcctttcatctcagttagcactcaaaagcaagatgcacctgcgctgtaataaatgcagggatacagctaagggggggaagagaaaaataacaaatgcagctaggggcttaaaaaatggtgtttgaagctaatgacagcgttcctgcctttattgcttcaggcagaaacagggagttaaaaatctaagtggcttgagaaaatataacatttagcaaactcatttgcaggcctccagttggattatcctaatttatttcattgttatggggttttctcttttgggtacttttttgatctatttttaatggaagactaatgtgcattcctttttccccctcttttttttttttccacagggatttattgagcagtaaggcttttttttaaaaaaagaaactttcttttttaacttactcctttacggaggcagagacaagactgagggggaacaaagtccctcttcacaatccatttaatgcctgcgtgcgataccaactcctaaagctttatttcatctc

SEQ ID NO: 507087 - DNA, 593 bp, Homo sapiens
aaaggctcccagccgactctgcattcactgaatttgccagccctcccctgcaagaagaagagagcgtttcctcactcctttcatctcagttagcactcaaaagcaagatgcacctgcgctgtaataaatgcagggatacagctaagggggggaagagaaaaataacaaatgcagctaggggcttaaaaaatggtgtttgaagctaatgacagcgttcctgcctttattgcttcaggcagaaacagggagttaaaaatctaagtggcttgagaaaatataacatttagcaaactcatttgcaggcctccagttggattatcctaatttatttcattgttatggggttttctcttttgggtacttttttgatctatttttaatggaagactaatgtgcattcctttttccccctcttttttttttttccacagggatttattgagcagtaaggcttttttttaaaaaaagaaactttcttttttaacttactcctttacggaggcagagacaagactgagggggaacaaagtccctsttcacaatccatttaatgcctgcgtgcgataccaactcctaaagctttatttcatctc

SEQ ID NO: 507088 - DNA, 539 bp, Homo sapiens
gctagtggcggaggcgctgtcgttggccgcctccaggaggtagcgctggcagcggccgcggcgctcggggggctctgggccgcgggaggcgggcgccgtgcggttccactcctcctccgggctccagccgcagcgctcggccagcgccgcggcacttggcccgcggcaccagtagtggtcgggctgcgtgcccaggaagaccacgccgacgaagaggaaggcgaaggtgacgcccgtcaggcacagcagcaaaaacacgcgcctctggaagcgcccgaactcgcccacccgctgcagcgcctcgtcgaaggagggcatggtgcgcccgccgcccgccgcccgcagcycgcgcctcggagtgacccgcggacccagccggcggcctctctttactccgccgcctcccccgcgccacccgcctcactcgccctggcgctgtgccggccgcagccgctcctcctgccccccgcggcccccgcctctcttccccgggcgcccgcagcagccccgggccacaggtcgcgggagggacggccgcg

SEQ ID NO: 507089 - DNA, 380 bp, Homo sapiens
ttgacattgtaatggtgaattttatctatgttaaacaacaaatttaaaaaaaatatttggaggaacattgacccgcttgtccccactccatgcgtcccattgagcaccctgactttggtatwacagacctgccttgattgggcatttagcattctttagagcttggctactctgaattaagtctgaggtcttatcctcagctctgtcttttctcatgctgcagatgggaaagtctttgtatgctaccaaggtttccacttgcttgttaatcaatctcaagtctttgttatacttttctttgaaatgcctgatgtatcatgtcatccacatttcagcacatctcttcattatactatctcagtttcccactagagaagtga

SEQ ID NO: 507090 - DNA, 380 bp, Homo sapiens
ttgacattgtaatggtgaattttatctatgttaaacaacaaatttaaaaaaaatatttggaggaacattgacccgcttgtccccactccatgcgtcccattgagcaccctgactttggtattacagacctgccttgattgggcatttagcattctttaragcttggctactctgaattaagtctgaggtcttatcctcagctctgtcttttctcatgctgcagatgggaaagtctttgtatgctaccaaggtttccacttgcttgttaatcaatctcaagtctttgttatacttttctttgaaatgcctgatgtatcatgtcatccacatttcagcacatctcttcattatactatctcagtttcccactagagaagtga

SEQ ID NO: 507091 - DNA, 553 bp, Homo sapiens
tgggaacgtttctccctgaaaaatgaatgcaaccaagaaaaatttcaactatctctaaaataaatatagacttgccttggctctcagcccacttccagttggaaataaacaaaattcagaaactatttgcttcagaatcagcctgtttataccatacccatcatgttggttgagtggttttttgtaattttcagagtaatttaattccagtcttctacttaacatgtaaaggaaaagaaacactttctggggaaaggaaccacctatttgccacaatcgaacacttgctgtgactgatacatagtatatatggaataaatatttgctgagtattacaaaaagacaaaaaactacaatgaaaccatagatgtatctgcaaagtttgtataacttgtctgtatgtagactrgagatttcttttttttgttttgttttgttttgttttgttttgacaccgagtctggctctgtcgcccaggctggagtgcatggcgctcggctcaccgcaagctccacctcccaggttcacgccattctcctgcctcagcctcctg

SEQ ID NO: 507092 - DNA, 553 bp, Homo sapiens
tgggaacgtttctccctgaaaaatgaatgcaaccaagaaaaatttcaactatctctaaaataaatatagacttgccttggctctcagcccacttccagttggaaataaacaaaattcagaaactatttgcttcagaatcagcctgtttataccatacccatcatgttggttgagtggttttttgtaattttcagagtaatttaattccagtcttctacttaacatgtaaaggaaaagaaacactttctggggaaaggaaccacctatttgccacaatcgaacacttgctgtgactgatacatagtatatatggaataaatatttgctgagtattacaaaaagacaaaaaactacaatgaaaccatagatgtatctgcaaagtttgtataacttgtctgtatgtagactggagawttcttttttttgttttgttttgttttgttttgttttgacaccgagtctggctctgtcgcccaggctggagtgcatggcgctcggctcaccgcaagctccacctcccaggttcacgccattctcctgcctcagcctcctg

SEQ ID NO: 507093 - DNA, 358 bp, Homo sapiens
atcatcatcatcatcatcatctttatctctcaccaatgttttataatttacagatttatccaatttattatctgtcttcccacctgcatatgtattcagtgatggaagcactttgcttttgttcactaccatactcccagaactgagacatgtgactkccatatacttggaattcgttaaatatttgcttgataaacaaattgaatgcatcgatgcacaagctataaccataaattatctgccataaaagtatatctcagaagcaagctattattttcagaaggagccatcactttaatttagctacattatattaaaaatttcctcaacttttacaagaaagcacttgctaaaagct

SEQ ID NO: 507094 - DNA, 606 bp, Homo sapiens
gctgtgaatcacaatgcctttagcattttttagcatcatttgcttatatatactcagataacatactaatatatctcaagaattcagaagcagtaaatgacacaatattagaaactgaaaatgcaaaccaacaaccagtacaaattgctgtttgtacaatacaacattattcaccattatgctcaatcataaacccctcaggctgtgcagagtattttacttattagaagcaacacattgattcataacctgcctcaattctattctcttgtcttcatttttttcctsttaccaatgctcatttaaatccctaaaatcatttaatattcaatacaagaactactcacttcaggaaactaccacaaggattgtaaccccacagatgtttccaggagtgtggggaaaaaaaaaagctacaataagatttgggtttgagtcctggcttaactgtttcctactactgtagtaggagtaggcacatcatttatttcacttaacctcagtttctgcatttgtaaaagtacataaaaattgtacctatttctcaagtttacaattatcctaacaaaataattcaagaaaaagaaacatcgaaagttataacat

SEQ ID NO: 507095 - DNA, 680 bp, Homo sapiens
tgcccggaaacagctaagcatgagttatggataagcatccacggagacgctctcccatatccagtctaaacttgagraaaatgtaggagtgtgtgacatgccctggcctggagaagactgtccatgctcaagccactctgggaacgaccatagtgttagaattgatcctatcaatccacaaacctcagccatcccttcaacccctgtactcattacagcaagcgtcagggcccatatggtattcctgggggcaattaggctgtagctgtgccccttgagataactttgacttaaagttgcatgattaaaataatttctgtagaaatgtaacaatacccttgtataaccaattctatttttaccatcttagtcatttttaaatgtacagttcactaaagtataatcacgttgctgtgaaatgaatttccataattttcatgttgcacatttgaaactctgtacccattaaacaacaatctccctttcttccctctccccagccaccattttcatggatttgactactttagatacctcacataagtagaatcatggaatcagacagtatttgtctttctgtgactggcttatttcacttaatataatgccttctaggtttatccatgttgttgatgactgataggattttcttcttttttttaaaaaagtctcaatattat

SEQ ID NO: 507096 - DNA, 670 bp, Homo sapiens
gtgtgcattatggaacatttttgaagctgccataaaagatttctgattttcctcttgttgttacatgatttgggaaatgttaaagtctcaattgtccttttctcagtgtactctttctacggcaattagaagcagccagccactttacaaccatgataacatcatctttaccatcacaaaaaaagcactctggccacattatctctttctgtgttacccttcattccatgccatcaacagtgacaacttaagtaaatgtgacactatcacaagacacatgttaacattgtatcacttttcctagcaagttattcacatgctaatgttatcaaatrttttcataacccaattccagaatcccactttgagattccagccctgcccacttatggccactcttaatacttatattattattcaaggttcccacagaaagtatatgtcaacacaaaattagtgatgaacaatagtttagtgattaacaatagtgactcttaaaagggttaagagaaaccagtaaaatgaagcaacccaaggttagagtgtatgagaattttttccctaggactgaatgggcagcagctcccacagtgtgaacctgagatcctgccttccacacccaaccctcagcctccctcttgccaggggatgcagcaggctcttcatctat

SEQ ID NO: 507097 - DNA, 441 bp, Homo sapiens
ctgctcccggtttgggtgcagcggtttcccccgcagaggaggaggaggagacagcgcgagggagcgactccgggctcgggtttccgcaccaatgccgagcagccccgggcggcccccggtggccgtccctcctccccggcaccacgttccacagtcatggcgcgcgaggaggggcgagcgcgcgcrgcggctgcacccgcgccccctctcctcccctcccctccgccgcccggcccctctcctaggcaacccccctccccggcctgctgcgcctgccgcggcaagggagacccctccccagagagctgctcttccagcgcggtctactgcaccccttccccgcccccatcggggcggagggatggagacgcgcgcttcgcgaacctccagccccttctccggagccccagccctctcccagccccaccgaggccagggtgc

SEQ ID NO: 507098 - DNA, 613 bp, Homo sapiens
gtgcatgtgcacacacacacatacacacacacgggagaagcatacattggttacagwggacccgagcaagaggtgaggcccagtgacagcttacccaccttcccaacagcaggctggtgcagcttcttcactcacagaccggcaatgctgagagaaataacagaatgaggtttacacaggcctaggactcagcagcacctccttcagaactcctccaaaaaaggaaaattctaaaaaccaaaagctatttcactgcctctccagagcagtcttggaattatttaatcctctgtgtttgtttttaaattatattagaatgttccagaaaatgtaaagctaaactaatacataaagtgcagtcttttgcaactaaaaatccactttgcataaaaagcctcattctcccatgccagtattaaactggaagtcaggataactgaattccacccaagatcctaggcctggcttggggcaccgtcttgattcctgccctccttctccattctgacagcatattctgtatacaggtgcccataggaaaccaacccagtgacttacacatcccctgtcacctgtaaatcaccgaggtgccattaatcaacaatatgcatcc

SEQ ID NO: 507099 - DNA, 646 bp, Homo sapiens
aacaaccattgactgactatttaatgaagaacactgcaatggtgctaaaggaatggaagggagggagcagtgggaaagattagttagaaggaaggcaggatacagtgaaaagaagtggaagactcacgagatagtgagtctggtcccagctccaccactgcaaagtcttgagtaagttgatcccacctttacttccgcatccatgaacatgtcctatctatctctcagggtcatttatagttgaaatgaggtagtgtaagcctaagtgcttggaaytgcagaaggctctgtataatgcaccgtgaggatttggaggtacctacttccccagcttcactaactaccctgtctactttcccaagagtcttctgaatctctcaatttgtccaatcctctcagacagtaactgtttcaggggagcacaggggccaagggaacccagtcaggggcaactaaactcaattccagacctttgggtggcccatcaaggaagctgtctttttttttttccactggaaaaactggttttggggcatctcagctgagccctgggtaaagcctcacctgaggccggaatctacccctagattgttcaaccacataggccaatacattttcttcttctgcttgaaccagtctgggttgg

SEQ ID NO: 507100 - DNA, 588 bp, Homo sapiens
tctcagaggcaggttctctgaccctatgagctcacgatctttacatctgaagaaataggcttctatgggaggtttctcagtcttctcaacaaggatgttgagtcattgcagtcactgcagatgattggacatcagaaacacctcctgagtcatcatttccattgctcaacattgactgttgtcatcaaaaccatctacccatttaggcttgcaagttgccgagtagacaattctcactttattcactttattccccagtatacttttcaaggtaacagaactagtagatatgactggatgagatgaatcttatttattgacatgaaaggttggcagtcagagctctggcacccaccaatactgcccccaactccgtcccaagcagcctgcagcaccagcttctcacccagcttcccttgcctttggggtcagtctgagttagctccagggtcagtattaactctgcatggtcctaggatctgcaacacacagagagaacttatcctgggattgggaccaaactggaatgtgtcttctttmatctcagctggaggcttcaggatgtcacttaattaacacccaggctag

SEQ ID NO: 507101 - DNA, 547 bp, Homo sapiens
tctatagcactcagatatctgaaatctattgattactcggctaattcatatcatttctcttgggcttcttagctaaaattagctcgtttgccatctgatctgccctcagttatgcattttacattctcattcttttagcatctctcaatgcacggaggtccctgagttyggtccaacataccctgctttctcagggtgggtctagtgcaggaggttggccccacccccctgcctcatgccttcctagctggcctgcctgaaactcacagtgctttcccagtggaagagccctggcaaactgctcttcagagggtgacaagctgcagaaggaggaagagtaagcccaagctgctttggttgggctttttaagcataatcctcaatcgttctatttctgcatatatgaaatgggaattatgctcactgtcctgccccgcttatggggtggctcttcttagactggaataagacagaacatgttggagaaacttatacactgtaaagagatatattaagattattagaatttatttgagcttgttgcttc

SEQ ID NO: 507102 - DNA, 602 bp, Homo sapiens
ctgaacttttagcttattggtaatgctctattattattattttttactatttcttcttcattcaagataacctggtagtagaaggctgcataatctgtccaaatgttttgggcattaaatctttcagtgaagacagccctctaaggagctcccataatgctaataagatacactctatccatcaaaagcacatttgattttttggggcttctctcaattcccaatataagtaattttatcagccctctgtaatccataatcggcacttaagagcttccaaacctcaatggcaagacatcacccacattacatacttatggccaatgaaactgacaattctcttaccaggttttctgtggcacaattgaaggcttttacaaagmatgaattaaacatggcttgagctgagaatagccagaaacaagaacaaatctatgcttacatccctcctccttcaacaaaggacactacactttggaacagttacctctttttcctaataaaataagtgattttgaccacagtgtgccctccgcttggagagaaggtgtaagaatttgcaaaccaaaaccaaaggtgaagaaaacgtaaaagtgccaaaa

SEQ ID NO: 507103 - DNA, 668 bp, Homo sapiens
ctgtttttctttaataaattctcctcagtttgttgcaagcctttagttaacattcaaagttctaaataagtttattttgataatttcttcagtgttttttttttgttttgttttgkggaggaataaattttcaaaggtgcttactccagcatcctggaggcgcttctccttttggtgacatttaaatgcaatctcatgtggaaggaggtaaaaatgcatgtaaatatgatatcttgaaatgactaatttttaaaaactgtattttcatatttcttttattcctgtgagatactagctacaacacatctcacacaggcaaattattttatagttatggttcaaggtttgcaaacatggagtgttagcttaaaaaagaacgcatctcatgatgtattttgaaaaaaaacaaaagttagtggatggtcatacacccatatgcccttttatcaaaggatgccatttagaagacacaaatatttttctctcttgacaatttttttttgatcacacacaggaattatcattatagggttttatttttattggtggacaaaaccaagcatcaaattttatggttcagattaaataattataaccaatggttatctgagaaccgtgattcttttaacctttgtttatcctacttgatttaggtgaatgaaccaaaa

SEQ ID NO: 507104 - DNA, 668 bp, Homo sapiens
ctgtttttctttaataaattctcctcagtttgttgcaagcctttagttaacattcaaagttctaaataagtttattttgataatttcttcagtgttttttttttgttttgttttggggaggaatarattttcaaaggtgcttactccagcatcctggaggcgcttctccttttggtgacatttaaatgcaatctcatgtggaaggaggtaaaaatgcatgtaaatatgatatcttgaaatgactaatttttaaaaactgtattttcatatttcttttattcctgtgagatactagctacaacacatctcacacaggcaaattattttatagttatggttcaaggtttgcaaacatggagtgttagcttaaaaaagaacgcatctcatgatgtattttgaaaaaaaacaaaagttagtggatggtcatacacccatatgcccttttatcaaaggatgccatttagaagacacaaatatttttctctcttgacaatttttttttgatcacacacaggaattatcattatagggttttatttttattggtggacaaaaccaagcatcaaattttatggttcagattaaataattataaccaatggttatctgagaaccgtgattcttttaacctttgtttatcctacttgatttaggtgaatgaaccaaaa

SEQ ID NO: 507105 - DNA, 668 bp, Homo sapiens
ctgtttttctttaataaattctcctcagtttgttgcaagcctttagttaacattcaaagttctaaataagtttattttgataatttcttcagtgttttttttttgttttgttttggggaggaataaattttcaraggtgcttactccagcatcctggaggcgcttctccttttggtgacatttaaatgcaatctcatgtggaaggaggtaaaaatgcatgtaaatatgatatcttgaaatgactaatttttaaaaactgtattttcatatttcttttattcctgtgagatactagctacaacacatctcacacaggcaaattattttatagttatggttcaaggtttgcaaacatggagtgttagcttaaaaaagaacgcatctcatgatgtattttgaaaaaaaacaaaagttagtggatggtcatacacccatatgcccttttatcaaaggatgccatttagaagacacaaatatttttctctcttgacaatttttttttgatcacacacaggaattatcattatagggttttatttttattggtggacaaaaccaagcatcaaattttatggttcagattaaataattataaccaatggttatctgagaaccgtgattcttttaacctttgtttatcctacttgatttaggtgaatgaaccaaaa

SEQ ID NO: 507106 - DNA, 325 bp, Homo sapiens
tggtcctgttttgagccctggtttaggaaatacatattgggaagtgatgaatgaatgagttagccagtaaggactgagtgcttgtcacgtggccagcartattagatggggtataaaaagtataacacagagacttgtccttaaaaaacttacattctggttaaagggacaaaattaacccacgtaacaatgaaaagataatttattactaaaatgtaaggaattaagctcagtaagagttaaacaaaggtaatcataaattggagtttatcgtgtcctcatcgaaggatctcattgtattaggattctccagaaaaacagaact

SEQ ID NO: 507107 - DNA, 395 bp, Homo sapiens
  misc_feature (1)...(395): n = A,T,C or G
nnnnnnnnnnnnnnnnnnnnnnnnnnnnnnnnnnnnnnggctctgttaccacatgagattgggagtggtgtggctcacattgaatccccccacttatcctgcctggtgtcacagggaaagttgaacacttggtttctgtgcctagagctgctatcagatgagaagacaatgtatttgactatataggaaatctgttgtggactgtcaattaactcattttcacttccgttgatttggttgtgaccagccctagattagagggcagttttagagtgtcctggcctagaatgtcttcctcagttttgagtaagccagggtayctggcctctttctgggacttctctgcccttacaggacccactggaatctgtagggttccagcgtcaatctgtgtt

SEQ ID NO: 507108 - DNA, 521 bp, Homo sapiens
tgagcgcagtggcccacacatgtaatccaagctactcaggtggctgacgcaggagaatcacttgaacctggaagcagaagttgcagtcaagattacgccactgcactccagcctaggggacagagtgagatcctgtctcaaaaaaaagaaattaaaaaaataaagataattaaatagcttattaaatagcttagagtcacatataaaaagtatacacacacatacgccatatatacatatatattgcatgtacatgtgtcttttgtagttttgaagagtgctcagggaggagccacatcttattcatctatgtgtacttataatatttagtccagttactagaatgtagtagatacgcagtgaataagttatgaaaaaaagtgaacatgtgcaattagaatgaactaaataagcaaaaaatactataattacttggaatattgaasagctatttgtttaaaagacaatattaacatggaaagctgtttatgatataatgttaggtaaaataatatagaaaa

SEQ ID NO: 507109 - DNA, 476 bp, Homo sapiens
atgcctggcacagtttctttaatcccccctgaaaaggataaaatgaattaatttgtatttcatcgctgaaactgatttagtaaacatctttcaaaatggtaaggggaaggagggaaagtaataaaaggtgagtttggattctgaaatttcattcttcagagatccttgtgtagaagctcaattccctttgactccctctctagagaaggctggtgtccgtctgtgaaacatgcagtatatctttggaatacccatgcagtgaatacaaactcattctcagaaaataaaggcacatttgtaactgcgcttgaaacatatttttttaacccatggctattagagtgttgaagcccatcagacagatgtgtatatgcatttttatgttttaggcaagttaggatgttggcttgttaaaagyaagcatctatgggttggaatggatgttaaccatatacatagtccagtttaatatctta

SEQ ID NO: 507110 - DNA, 609 bp, Homo sapiens
taaccatatagattgctttccagcttccttctacatcagttactgttatggtttcgctctgtgtccccaccaaaatctcatctcgaattataatccccttgtcttgagagagggaagtgattggagcatgggggcagtctccccatgctgttctcatgatagtgagtgaattctcatgagatctgatggtttaaaagtggcagttttttcctgtacgctcacttctccctcctgccactttatgaagtaggtgcctgcttccccttctgtcttgattrtaagtttcctgaggcctccccagccatgtggaactatgagtcaattaaacctctttcctttataaattacccagtctcgggtagtatctttatagcagtgtgaaaacagactaagactgttactctgctaagaattactttctttttcatttattttgaagtcatatttctttctttatgattgtaaaataaacatatgttcacaataaaatgcagatatgttcataataaaatgcagaaagataaatatctatatttttgccatccaggagcaaccaaatgtctgcatgtgtataaacacacatatacatgtgtatatatacatatacaa

SEQ ID NO: 507111 - DNA, 225 bp, Homo sapiens
gagaagtatgcagcttgaatgctgttgarcaatgagcatgaggacaagcaaagagactattcagttgcatgctactagggtcactggaagctttaaccaggcagcttcagaaatatctaggatgctgaagacggatcagagaacatgggagaagtatagcattttgagacagcacaagcagacaactgtctttgggagttcaggagagtacatagaaagaaaatt

SEQ ID NO: 507112 - DNA, 550 bp, Homo sapiens
tatagtctcacaatttttctcaagtgggatattaatgagggtaagtagccaatagtggcagggctagatacacctcagatttcgagtgcaacaagggtaagccccattaatccatgcaaagaactttcatgcatatagtttagtgcatataatatgattatagaaccagaagttctttctttaacattttgcttttcactaggcaagtyaatttacccagcatattctgaatagtgacatagcatttttcacaaagccagtggttgactttcatgttaacaatgcctcaaaaataccaaacattatattataaaatcccagtgctaattaaacaatgaacatttgccttcctgggtattttacaggtttacttaaaaaactgagcatgtgtatgtttatttgtaaagctcaaatatttaaacttgcagaagttgtgcctacaagcagttgaaagtataaagcaggttttaataaaatgtagtaaaaaatgaacacctaattgcagatacattgcattttctttgaagctaagtttccatagcagtgtagc

SEQ ID NO: 507113 - DNA, 292 bp, Homo sapiens
atgatgtgtacactatgccaggcatgaagaagttggatatacacttgtttgttttaaaatgataacagcaatgtaaataatctacagatagagaacaggaatacagaaatacattaattcattaacagttattatgtataggtagttggactttaaatgagtttttcttattttcatamattttttgtgaatgtttatataaaagaaactattttaaatgaaaatgaagatatccagtagccaggaggcgagaataacaccctctcttaatctagacactgtgctggccagt

SEQ ID NO: 507114 - DNA, 569 bp, Homo sapiens
attttaatgcagcagagaagaaggggacactgcatatcagagtccactcccaagccctcaggtcccctgcttgggcattttataacacagatccaaggtgattacctgaaacatatttcagtgaagctggggacattggtaagagagggaatgtaataacatattagcaatttggccctaggcaagctattaaataagaagctacagtttattttctcacaaaatagtgatcatgtcgcctacygcaaagggattgcaaatgacaaataagataatgcatgtaccatgcttagcaaaatgtttggctcatagataatacctacatggtaactttttctgtgtcagtgaagacaagcaggctaacacttgtatcataatagtaattcttgctttgcttgcaaagggttgtatcttgaagcatgaattggttgatgtgacctcttcagagaaacctttcctgtacccaatggaaagcagcagctgtgtctctccctgtcatatgactctgtttcattttcatcatattttctcctcttactgaaattaacttcatgagggcagaaacattg

SEQ ID NO: 507115 - DNA, 569 bp, Homo sapiens
attttaatgcagcagagaagaaggggacactgcatatcagagtccactcccaagccctcaggtcccctgcttgggcattttataacacagatccaaggtgattacctgaaacatatttcagtgaagctggggacattggtaagagagggaatgtaataacatattagcaatttggccctaggcaagctattaaataagaagctacagtttattttctcacaaaatagtgatcatgtcgcctaccgcaaagggattgcaaatgacaaataagataatgcatgtaccatgcttagcaaaatgtttggctcatagataatacctacatggtaactttttctgtgtcagtgaagacaagcaggctaacacttgtatcataatagtaattcttgctttgcttgcaaagggttgtatcttgaagcatgaattggttgatgtgacctcttcagagaaacctttcctgtacccaatggaaagcagcagctgtgtctctccctgtcayatgactctgtttcattttcatcatattttctcctcttactgaaattaacttcatgagggcagaaacattg

SEQ ID NO: 507116 - DNA, 522 bp, Homo sapiens
tcttggaatatatgaaaatcacaaatatagctgtatgtgttattgaactttgactttctagctgaattctcttattatttctaatagttctcagtttattttcttgggtttcccatgttaaaaattaacataaacaatattttttttatctgctctttttcttgcccatacttcattttttcacatttattgtctccttcctgacttttttttttttgaggcagcctagctctgtagcccargctggagtgcggtggcacaatcttggctcactgcaacttccgcctcctgagttgaagcaattctcctgcctcagccttccaagtagctgggactataggcgtgtaccaccacgcctggctaatttttgtatttttagtagaaaatacaggcaacatggcagggatttgccatgttggccaggctagtcttgaactcctgggctcaagtgatctgctcatctcagcctcccaaagtgctaggattaacagacttgagacactgcgcccggcctccttcctg

SEQ ID NO: 507117 - DNA, 591 bp, Homo sapiens
cccgtcggtttcattcccagggtacagattaaaatacagttccccctttaaaatacagttatatagaaaattctaaattcactactgagtttgttcctataacatctcaggttttcctaaggaggacgtgttacaaattccatcatctctgtaaatcacagatacttcctttaaccagcttttaagatgatattaaaaatttaaagatcctcaaacaaatgtccctgatctatgggattagacaggggtaggaatcgaatttctaaatttatctttggaaggaatccctcagatttaaataagaggataaaggtggtgggagaatgacttcacagaggacctgtatttctcaggcatcacaagatgacaatggatgatgggctatgctcagaactgagcatcttaagaatatagactccagctcaaatctctattctgccacctttatcaaggacaaacatgtgsaacatactcacatattcaaccatctataagcccaaagtggctgtaaggaagtaggctggttttaatggttaatattgataacacttcattttcacattttactagtattttttactaggatcagca

SEQ ID NO: 507118 - DNA, 591 bp, Homo sapiens
cccgtcggtttcattcccagggtacagattaaaatacagttccccctttaaaatacagttatatagaaaattctaaattcactactgagtttgttcctataacatctcaggttttcctaaggaggacgtgttacaaattccatcatctctgtaaatcacagatacttcctttaaccagcttttaagatgatattaaaaatttaaagatcctcaaacaaatgtccctgatctatgggattagacaggggtaggaatcgaatttctaaatttatctttggaaggaatccctcagatttaaataagaggataaaggtggtgggagaatgacttcacagaggacctgtatttctcaggcatcacaagatgacaatggatgatgggctatgctcagaactgagcatcttaagaatatagactccagctcaaatctctattctgccacctttatcaaggacaaacatgtgcaacatactcacatattcaaccatctataagcccaaagtggctgtaaggaagtaggctggttttaatggttaatattgataacacttcattttyacattttactagtattttttactaggatcagca

SEQ ID NO: 507119 - DNA, 408 bp, Homo sapiens
tttgcagcactttacctctctgaaagccccagaggaccagagcccccagccttacctctcaacctgtcccctccactgggcagtggtggtcagtttttactgcaaaaaaaaaaaaagaaaaaagagaaagaaaaaaaagaatgaatgcaagctgatagctgagactgtgagactgtttttgtccactcttctgaatcactgccacttgggtcagggaccacagccattgccacccttggcccatctctctgcgtgcgtgccttgagcacacatataaaaagtgccatgtgcaattgtcttatcttttatgatctaggctttgcctagggatcactactccttaacgggctggctggggcaatgaggaaaarctcctttgctcctgtaaggccataagtggctgttaac

SEQ ID NO: 507120 - DNA, 449 bp, Homo sapiens
cttgttgcttttccttagaatatatgttcctgtgtaaattctggttctaaagacgctatagaaagtgcatctcatttctcaagtcttctcaaccatcgctcctctcctgagarcttcaatttcctcctcaaacacggtgaggcttttatggtatatagacataagtactgtttaaagcaaaccctacgcaaatagcataacaacagcattttgtacagattaacttttttgtgctgtaaggatgaatgagcagggcaagtcagagacagaggactagttagaagtctgtcacaggaatcctacagtgaaatgacaagggcctgtctcaaaaagtgacagtagaaatgagaagaatgaatagatataagaagcagggggaattgacaaggttagtgatagattgaccaagtggttcagatggcttaaaaaagatatagtagcaaaaacca

SEQ ID NO: 507121 - DNA, 521 bp, Homo sapiens
cctgaaattgctaccatcgtcctggcagttccagccaaaaacagcaggcggaatcatgcccactgaaatgtaagtttttatggaccctgtccagtgggtgtcaccaaactatagccaagatttagaagggttgatcttagcagccagcctttccttgggaacgacaggccagctagctacacagacttgcctacgcttattttatcagcctcccaataatgtgtgctaacattttaagcatttaaaaatgttttgagtccctctaattaattagactgggttttattgtataccagtaatacaagacagaatttaagaatagattcaataagagatgccaaaacaaattaakttgtgaattcaaaggaggaagggatcccatctgattggagaaaagaggaaattaatcgtggataaagtggcatttgaaatctgccttgaaagctagatagtattctgatagggataaggggataattccacctacaggcaacagaataaacaaaaggtccaagatggct

SEQ ID NO: 507122 - DNA, 574 bp, Homo sapiens
tcccactatgctataaatttatctctgatatttccactatgttataatttaatctctgattatatagtcttaatattcaaatctgtagtcaccaaaagtttgtgagtaatggtgctcaaattaacattaacaacgtaagaagttacagaaagggggaaaagcttcattcccaggtgttaaaaatgtgccctacactattatcaaaaagagaaaatagattatgtcatttcacaaatgcaaagtagcagtggtcattttcggttcaagccattatctctccaatacaaccttagccacaaaaattcaatggttttcacaggcacctagtattatgaatattctggcaagtaaatataactcaagcactgacacaataagaactctattagggatttgtatttgcatatgcctacagacataaaatgttcaaaaagtggagtggactagaacggaaactgcattatgctgaaaaataccaataataatatgctggcaattgtgcyttgattgttcacatttcttctaaagtgtttttctagcccatgaacacgtgagctttaaacaagtttgatta

SEQ ID NO: 507123 - DNA, 531 bp, Homo sapiens
ctggggttgggattaagtgcaccttatgctaattagaactataggttttactccttaaataactcccattggcctagctttgattctttaatgtaacaaagatagatgtgggaaaaaagtgacctatcaaaatatataactcagaaagctttttgggataaacatatttaatacaggatttctcagttatatattctttttttacttagataaaacccccaagggaaaaataggtatctaatgatatatcctccattcaaaactgtgtattgctattgagaagttttatgtactattttaaataataattattaataaacatatacaagcaatgccaaataataaaaaatgtctgtctttttcctgtggrgatactcagctcatgccaatttggttccctaaacaactagaactggagaaagctgtgctgtgacgtttgaaatcgaaaacctgaaaaatgtaagcttcttatcaacttccaaatttggggcaaatctggatcctaaaatcaagacatctttcgtaagatta

SEQ ID NO: 507124 - DNA, 617 bp, Homo sapiens
gtctgtgaggctcgcttaattttatatttcactgtttcttcagggtgcgcgtgtctgtgtgtgttagaacttgtgagtttctgcgtgtgtgtgagtatgggtgtgttttcagtktgtgtgtgtgtgtgtgtgtgtgtgtgtgtagctcattctgtaggttctctagaattgtgtgttgggtaatgttttcctctgaaacgtctaatttgatcagccggccatacagtaatttttttcaattaagacatactttttttatactagctctttaatttaatttggctattctgtactgttaatttctcttgatatgatatctgctttcttgcatgttgtttttttaaatatttgaaatcagttatcatactgatatgtcaaattttcacgcaattctaatcatttctctcattcctgagcctgtttgtattacccgatttatttcctggtcatgggtcacacgaaacgcttttctacatgtagtcagattttaaatttaggactcactctgcggataccgcatagctgaggcaatcgactttgttgtttacttctaaagagagttgagatttcctctcacaggcacttcattgattggaaaccgatttgatgcttggaca

SEQ ID NO: 507125 - DNA, 478 bp, Homo sapiens
ctgtaggttctctagaattgtgtgttgggtaatgttttcctctgaaaygtctaatttgatcagccggccatacagtaatttttttcaattaagacatactttttttatactagctctttaatttaatttggctattctgtactgttaatttctcttgatatgatatctgctttcttgcatgttgtttttttaaatatttgaaatcagttatcatactgatatgtcaaattttcacgcaattctaatcatttctctcattcctgagcctgtttgtattacccgatttatttcctggtcatgggtcacacgaaacgcttttctacatgtagtcagattttaaatttaggactcactctgcggataccgcatagctgaggcaatcgactttgttgtttacttctaaagagagttgagatttcctctcacaggcacttcattgattggaaaccgatttgatgcttggacacttgctttccag

SEQ ID NO: 507126 - DNA, 478 bp, Homo sapiens
ctgtaggttctctagaattgtgtgttgggtaatgttttcctctgaaacgtctaawttgatcagccggccatacagtaatttttttcaattaagacatactttttttatactagctctttaatttaatttggctattctgtactgttaatttctcttgatatgatatctgctttcttgcatgttgtttttttaaatatttgaaatcagttatcatactgatatgtcaaattttcacgcaattctaatcatttctctcattcctgagcctgtttgtattacccgatttatttcctggtcatgggtcacacgaaacgcttttctacatgtagtcagattttaaatttaggactcactctgcggataccgcatagctgaggcaatcgactttgttgtttacttctaaagagagttgagatttcctctcacaggcacttcattgattggaaaccgatttgatgcttggacacttgctttccag

SEQ ID NO: 507127 - DNA, 364 bp, Homo sapiens
tgccatttagcattgcaggcccagcccagtttgatatttttattcctttacaattaaaatgttttggtttttgatgttgttgttgttgtttctgcttgaatacttctggaattttgtctctatccctgcaatttaaatattccctggaatatggctaaatatagatctgatgttattaatcttgcctaaagtgaagtgagcctttcagtctatacactgaagtgttctgctttgtggcttttccagtggttccatttatttgtttgttttccaggaatattgtyaggaacattcccaagctgaggagctggtacccactgataatctggaactttgagttcaagatgttcccttctactgccca

SEQ ID NO: 507128 - DNA, 364 bp, Homo sapiens
tgccatttagcattgcaggcccagcccagtttgatatttttattcctttacaattaaaatgttttggtttttgatgttgttgttgttgtttctgcttgaatacttctggaattttgtctctatccctgcaatttaaatattccctggaatatggctaaatatagatctgatgttattaatcttgcctaaagtgaagtgagcctttcagtctatacactgaagtgttctgctttgtggcttttccagtggttccatttatttgtttgttttccaggaatattgtcaggaacattcccaagctgaggagctggtacccactgataatctggaactttgagttcaagmtgttcccttctactgccca

SEQ ID NO: 507129 - DNA, 541 bp, Homo sapiens
  misc_feature (1)...(541): n = A,T,C or G
nnnnnnnnnnnnnnnnnnnnnnnnnnnnnnnnnnnnnnnnggttatctgaactctaagctatattagtcaccaatatgtctgggagtaaagtatgggttcatcctgccttacccatatttcctcaccaacaatgtcaacgttctccaaaagaataacaagaatccatattgtaagtgaaatcacattttaaacatttagaaaagcttgctattgtagaccaattcaaatgtcacctctcctgtgaaactgtttctaacaaagcagagccagacaggagaaaaagaggtgataagaagtcaggagtcctggatctgctgataactggctatgtgrccttagaaatatccttttgtgggctgggtgcagtggttcacatctgtaatcccaacactttgggaggccaaggcaagtggatcccttgagcccaggagttcaagaccagcctggccaacatggcaaaacactgtctctactaaaaatacagaaaactagtcaggtgtggtggcacatgcctatagtccaagctactcaggagataag

SEQ ID NO: 507130 - DNA, 650 bp, Homo sapiens
ggatactttcctgccactcagctctcataaaatctgatgtagtctgattttcatgacactatagcaatgttgtagaattatctagctatatgaattatctagctacgtgtctgagtcagtcaggattggtcaggaaaacagaaggcactccgtgttttgggggcagaaagggtttgttattaggaattaggggcttgcttgactattggaaaggctggggagtagtgaagaccaggcaagccagcgggaaggaagcggacactggagatcttatcctgaggcaacagggcagcgggttctcaggaacttaacagcaagctgctgcaagttttaggaatctctaagaggtcccccagcgtctcacggtgcagcagcaacacagatgggttctcaagagctcaccagggagccactctgagcctctcattttcttcagtcaggatgcagttgcctctagagaataaaacttctctatttcttctgtcttccamatcttgagtgacttctatgggaaactccgtgtcctaggtaaatggattgtgggagaagaccttaaaagggatgatggtgatgcgcagttgacaatagatgattcagcatagtatctcatgataaatgtcaagagacaaaattgcaacaagtttagttaa

SEQ ID NO: 507131 - DNA, 294 bp, Homo sapiens
aatgatattgttgatcatattggcaccatgtattgggataaagctaatgaataatcatgttgatgtcatttggagtatggaaaaagagatgcaaaaggttaattaaaaactctatgagatcctgatttgaaaagaaagtcrgtatacattcatgattatagatacacacacacacacacacacagagagacacacacacacacattgttctcagctctgtctgctgaaaaggtcttgaagcaatgaagaactcactaacaacgtgtaaaaataaagcccagtttatgatctcta

SEQ ID NO: 507132 - DNA, 578 bp, Homo sapiens
gctaatgtgctgatagccaggtctgaaacttgatgtgctatccagacacatatgatcagaaaagatctagagtgcaaagaggtgyctgaggagcaaaatgtggttttaatgttgtggaaagatcacttgcaagtatataagactgtataaagaagaggactgtgtgcaagtggggtgaaaaaaaaggatacgtgaatgtgcatatgactgaatagggaggaaggtcagggctagaaaggaggctacataaaaaggggcaatggagaatgcacaggaaagacacaggggaaggtcaagtcgagcaaggtagaaacaggagtagctagagccattgggaatccattttgaaacaagaaggagttttgaaagggaataggaaagtaagtgtcttgaagtaaaagataaatatggatggagaaagaagaaattctggatgatagagatgataaaaatatttattaagaaatgaagtcaggttcagtgtatgaaatggaaaggaatttttcagaattttaagaaaggggaagttcctcttggaaaagatatagcaaccatcggggaatgaccttttcatttca

SEQ ID NO: 507133 - DNA, 578 bp, Homo sapiens
gctaatgtgctgatagccaggtctgaaacttgatgtgctatccagacacatatgatcagaaaagatctagagtgcaaagaggtgcctgaggagcaaaatgtggttttaatgttgtggaaagatcacttgcaagtatataagactgtataaagaagaggactgtgtgcaagtggggtgaaaaaaaaggatacgygaatgtgcatatgactgaatagggaggaaggtcagggctagaaaggaggctacataaaaaggggcaatggagaatgcacaggaaagacacaggggaaggtcaagtcgagcaaggtagaaacaggagtagctagagccattgggaatccattttgaaacaagaaggagttttgaaagggaataggaaagtaagtgtcttgaagtaaaagataaatatggatggagaaagaagaaattctggatgatagagatgataaaaatatttattaagaaatgaagtcaggttcagtgtatgaaatggaaaggaatttttcagaattttaagaaaggggaagttcctcttggaaaagatatagcaaccatcggggaatgaccttttcatttca

SEQ ID NO: 507134 - DNA, 578 bp, Homo sapiens
gctaatgtgctgatagccaggtctgaaacttgatgtgctatccagacacatatgatcagaaaagatctagagtgcaaagaggtgcctgaggagcaaaatgtggttttaatgttgtggaaagatcacttgcaagtatataagactgtataaagaagaggactgtgtgcaagtggggtgaaaaaaaaggatacgtgaatgtgcatatgactgaatagggaggaaggtcagggctagaaaggaggctacataaaaaggggcaatggagartgcacaggaaagacacaggggaaggtcaagtcgagcaaggtagaaacaggagtagctagagccattgggaatccattttgaaacaagaaggagttttgaaagggaataggaaagtaagtgtcttgaagtaaaagataaatatggatggagaaagaagaaattctggatgatagagatgataaaaatatttattaagaaatgaagtcaggttcagtgtatgaaatggaaaggaatttttcagaattttaagaaaggggaagttcctcttggaaaagatatagcaaccatcggggaatgaccttttcatttca

SEQ ID NO: 507135 - DNA, 652 bp, Homo sapiens
ctctgtaaaatcctatgtatcctcctccttcttcttktacttcagggaggtgaagagttgaggaacattgaatgagaggtgaggtatgtttcttctgatgacattcacatcccaattaagccagcagagactaccttattgtagttccattcttacttaaactgtgagccaccaccaccatcaccattaccacaacatacacacaaacacacacacgcttacaaactttattttattgataaggaaatgaattaactaatgtgtttgagatcatgcaactaaagcaaaactgaaatccaagtaagtctgtctgagaccataaaaacaactttaaatatgatttgactcaatcttaagtataaaaactttgagatattgagaagtttgctgctttttcttaccattctgccattgtgaaatgtaagcaacaaaaaggaaagctgataaattcagattataatactaaaaatattttagaaaaatatcctactgattccattaatcatatctcaacattatgtcatcagtttagataatgttgataattatattcaaagatggcattaggtggaactatattttacattttttccaggagtgtggatagattcattttcagtcatgtatatagtttcatttaattgacttttta

SEQ ID NO: 507136 - DNA, 652 bp, Homo sapiens
ctctgtaaaatcctatgtatcctcctccttcttcttgtacttcagggaggtgaagagttgaggaacattgaatgagaggtgaggtatgtttcttctgatgacattcacatcccaattaagccagcagagactaccttattgtagttccattcttacttaaactgtgagccaccaccaccatcaccattaccacaacatacacacaaacacacacacrcttacaaactttattttattgataaggaaatgaattaactaatgtgtttgagatcatgcaactaaagcaaaactgaaatccaagtaagtctgtctgagaccataaaaacaactttaaatatgatttgactcaatcttaagtataaaaactttgagatattgagaagtttgctgctttttcttaccattctgccattgtgaaatgtaagcaacaaaaaggaaagctgataaattcagattataatactaaaaatattttagaaaaatatcctactgattccattaatcatatctcaacattatgtcatcagtttagataatgttgataattatattcaaagatggcattaggtggaactatattttacattttttccaggagtgtggatagattcattttcagtcatgtatatagtttcatttaattgacttttta

SEQ ID NO: 507137 - DNA, 652 bp, Homo sapiens
ctctgtaaaatcctatgtatcctcctccttcttcttgtacttcagggaggtgaagagttgaggaacattgaatgagaggtgaggtatgtttcttctgatgacattcacatcccaattaagccagcagagactaccttattgtagttccattcttacttaaactgtgagccaccaccaccatcaccattaccacaacatacacacaaacacacacacgcttacaaactttattttattgataaggaaatgaattaactaatgtgtttgagatcatgcaactaaagcaaaactgaaatccaagtaagtctgtctgagaccataaaaacaactttaaatatgatttgactcaatcttaagtataaaaactttgagatattgagaagtttgctgctttttcttaccattctgccattgtgaaatgtaagcaacaaaaaggaaagctgataaattcagattataatactaaaaatattttagaaaaatatcctactgattccattaatcatatctcaacattatgtcrtcagtttagataatgttgataattatattcaaagatggcattaggtggaactatattttacattttttccaggagtgtggatagattcattttcagtcatgtatatagtttcatttaattgacttttta

SEQ ID NO: 507138 - DNA, 472 bp, Homo sapiens
  misc_feature (1)...(472): n = A,T,C or G
nnnnnnnnnnnnnnnnacattgtaatattctatgtaatatattcatttttatgtttgccatctctctccttaaattgaactcaattccccaaggacagtaatttttatctacttttcctttcactattgttatgtccagtacctactgttatgtctaagaaaataataggtccttcataaatatctgttaaatgaatgaatgaatggatagtaatgtctgaggagtcccccagagccgaaagagacagctacaaaggtgttgatgagcacacagggttgcaaggaagcatcaggtttattgtacttgaggctgtgagtactcctgaagcaaccttacacaggaaatrgtcccctctctgggctaaacaggtaaggtctgcagggaagacactacaacttgctgctactccacaaagcagcagtgaatacattggggagaaacagtggcctcttgaacacaatctctagttgc

SEQ ID NO: 507139 - DNA, 656 bp, Homo sapiens
gggaatttcacctactatacacatggatttagctgaggattcgctaacttcactaagttagggttgggggatttaattctcagatgtctttttcattcacatgagcttctttttctccacctggcatctyatccccccagagtccctggagggcctctctatgtggcttgtgcttcctcacagcatggcagtgtcaggtagttggactccttatatggtgtttggcttgcaccaaagtgagcatccccaaagacaagaagtggaagcatcatttccaccatactctattggtcaaagcaatcgcagatcacctttctctcttgattcaatgggaggggatctagatcacatttctcaatggaaggaatgtcaaagaacttacacctatctttagtctgtctcactgtacatagtaagaatccaataagtggtagatcttacttagaaaataaatctataaaatgaatgccgctaatacccactcactacccaaggtgattgcaagcattaatgaatgcaaagtacaatgctggatagttggcaaaacacagatgcataatacagtaagcttcctctctttagtgactaccaggattctctggccagagaggtagtattatcccaagtgtaggattgccagatacgacagagtacat

SEQ ID NO: 507140 - DNA, 578 bp, Homo sapiens
ctgattaaaatgttgacagtgatatctctggatggtagtaataaaacaatttgattttcatttccttgtgttcttttgtatctttgatttcaaacagtcttactaggagcatatatttcatttttaatgagaaaagaacaacacaaaaaagaaaaaaatatatatatatgtaattgcatcaacctagacagtatatcaaaataccagatataaattaattgttctaaaatattttccacaggattttacattaaaaatattatcagttttatactgtggtttataaagaaacagactttgaagaattactggtatctggatatgtagaaaaatgggaaatacattctaagtgggcagaattctgctataaaatgacagagatgaaaaagccacgggtttgtgtagaatactatgagcaaaataatagagtatagtggaagtttagtgagataagtagattgtgacmgattatggagggtctttaatgcccaactagtgacggaagtttttaccataagttgtgtgacccctgtctacctctgtaaccccaacttacactgctttcctcattggctcac

SEQ ID NO: 507141 - DNA, 613 bp, Homo sapiens
ggaagtcctacatgaattaacaaaccattaggatacaaattcttttaaagataacataggaaaactcaggatcagacaatgaaatcagataggaacacattccatatattattttaaataatgacttagtaatttagagcttagcgggttctgagctttaaaggtttctgaattataggctgatctttggggaataattgtttctagtaacagtttatagaattaatttaaagtgtggatgctagagacaaagtgtttttctttttgttatactgtgttatgttggttgaataagcagtggaaagagtgctggaattagggaaatgaaagagcagctagaatggaggtgctgtagatrtaaaaaggccttacttattaacctactggaaacgatgagtaggataatagaggaaatgagtcaaaatagactttactattttaagtctgggggtctgagagaacagtgatgcattcagtggaaatgcaaaagattggaggtacagcttaagaggagctcagtttaggacagactgaatttaacatgcttattagctatacagatggaaatatcagtaaatattgttgctctgatgttcctgaatgaatgagtgta

SEQ ID NO: 507142 - DNA, 617 bp, Homo sapiens
ggaagtcctacatgaattaacaaaccattaggatacaaattcttttaaagataacataggaaaactcaggatcagacaatgaaatcagataggaacacattccatatattattttaaataatgacttagtaatttagagcttagcgggttctgagctttaaaggtttctgaattataggctgatctttggggaataattgtttctagtaacagtttatagaattaatttaaagtgtggatgctagagacaaagtgtttttctttttgttatactgtgttatgttggttgaataagcagtggaaagagtgctggaattagggaaatgaaagagcagctagaatggaggtgctgtagatgtaaaaaggccttacttattaacctactggaaacgatgagtaggataatagaggaaatgagtcaaaatagactttactattttaagtctgggggtctgagagaacagtgatgcattcagyggaaatgcaaaagattggaggtacagcttaagaggagctcagtttaggacagactgaatttaacatgcttattagctatacagatggaaatatcagtaaatattgttgctctgatgttcctgaatgaatgagtgtatcag

SEQ ID NO: 507143 - DNA, 631 bp, Homo sapiens
tggctttcctaggcagtgctcttcaacttttttctattattgcctcttttatggagccttttagacatcttttttcctaattatctgcccgccccaaataaatagactgcagatatattctatatttgtttatgtatcatggacctttggtgagctggcaaccgtagttcctataattattggcaaattcttcaaacggatctagtggaatgcttttctagattcctgrccctgttattagtcttagtgttagtatcttagctagtcatgtgtaataaagatcaacgaattattccacctcctgtttttaagatgagaatagaagacagtcagatatccatctaaggtacttattgttagttttagtcaaagtaaaggtctgtatttattctttgattctgtctcatttgcccagacaggcaatgtgaaatgactaggaatctgtatattcagccctaaagtagatcagtctgttttcagtagatttggcaagtggaaccctctagaatgcgtaattttttaactaaacactttatggtcgaaggacaaaatgaaaacaaatgccattgactggccatggtgtacttattttttttttaacgaaatccctacgtttttaacgtgtaacttg

SEQ ID NO: 507144 - DNA, 631 bp, Homo sapiens
tggctttcctaggcagtgctcttcaacttttttctattattgcctcttttatggagccttttagacatcttttttcctaattatctgcccgccccaaataaatagactgcagatatattctatatttgtttatgtatcatggacctttggtgagctggcaaccgtagttcctataattattggcaaattcttcaaacggatctagtggaatgcttttctagattcctggccctgttaytagtcttagtgttagtatcttagctagtcatgtgtaataaagatcaacgaattattccacctcctgtttttaagatgagaatagaagacagtcagatatccatctaaggtacttattgttagttttagtcaaagtaaaggtctgtatttattctttgattctgtctcatttgcccagacaggcaatgtgaaatgactaggaatctgtatattcagccctaaagtagatcagtctgttttcagtagatttggcaagtggaaccctctagaatgcgtaattttttaactaaacactttatggtcgaaggacaaaatgaaaacaaatgccattgactggccatggtgtacttattttttttttaacgaaatccctacgtttttaacgtgtaacttg

SEQ ID NO: 507145 - DNA, 572 bp, Homo sapiens
tgctttctgtgcattctctcccatccccgcaagatcttgcaaggtaggaggttttattccytgcgtgcctcctttatttttttcaaatgaggcctctaaggctcaaaaacactaagtaacttgcccagtcaaggtacacagcttataagtagtcaggctgaaattttaaaccaagtctgcagtattttgttaagatactttaagaaaagaggtaaaaggacagaactcaacattgttgtttttaaataaatgtttcattatagcagaagcctcttaggaatttccattggtgatgaatttttaaaaggggttactgaaaatgtgttttaccaaaaaggcaagctcacttttttttctcctgtgctctccggcagtcttcagtaggcattcaaagtaaggatttttaaatatgtatatatttcagtgaccaaaaagaaaatagaaaaatattccatatagaaagccagtgaaattcttgctgaagttctgtctcttgagggagcctcctagaggtgcagtgctctttgtattttaatactttgcttatcacaaaaacagtcgagagtatgata

SEQ ID NO: 507146 - DNA, 489 bp, Homo sapiens
ctcaaggatttatgcctgtccctaactgagagttgcatattcaaaaacccctgctactaccgctctcatcttccccgagggaggaaagatgcttgagatccaccaagatggatgtgaccctctagttaactgtggcaaagtgaggccaccaatagagaaaacccaatcagattttcaaggacgaatgcataggggatttgactttcactaatccccagattacatttggtaccaaacagcttaaggtaccaataccatctcctagctcagaaataataagcaaatgtgtgattaaggttttagataatgtaggggattaaaatgctatgttttcaaaccatgtacaccaaacctctcactrcagaattcttgttttcagtaataatatctgtattgttttttgtttgttcatttgttttgctttggtctagtacagaacttcctaagcaatggcctcttttcctttttaaggtaccagatatactaaag

SEQ ID NO: 507147 - DNA, 489 bp, Homo sapiens
ctcaaggatttatgcctgtccctaactgagagttgcatattcaaaaacccctgctactaccgctctcatcttccccgagggaggaaagatgcttgagatccaccaagatggatgtgaccctctagttaactgtggcaaagtgaggccaccaatagagaaaacccaatcagattttcaaggacgaatgcataggggatttgactttcactaatccccagattacatttggtaccaaacagcttaaggtaccaataccatctcctagctcagaaataataagcaaatgtgtgattaaggttttagataatgtaggggattaaaatgctatgttttcaaaccatgtacaccaaacctctcactgyagaattcttgttttcagtaataatatctgtattgttttttgtttgttcatttgttttgctttggtctagtacagaacttcctaagcaatggcctcttttcctttttaaggtaccagatatactaaag

SEQ ID NO: 507148 - DNA, 244 bp, Homo sapiens
ttcatcaaattgatggagcttctttgtcacctcaaaagggaaagttaacctgtatgtcttttctagaagccataagtttgagaagaaagctgattttgtgattctttttagacataagtcttctgtccatctagaataaactgggtactgaagtgggtaaytcaattacctttaatttttattatttaatgacaggcatatataaatgatttgtccttataattgaatacgctgctggcaaact

SEQ ID NO: 507149 - DNA, 580 bp, Homo sapiens
tgccactttttgtcctgggtctcaccactataacaaaatgtcttttccttgcatgaatttgtttgacatcataagctttgtacccagagcactgttgtctactcttgggccagatatcatattatttatgctacccttctccatggagaaatttccttttttattgttcacatatcatactgcaaawacatgaagttcttccagtatgccctatggcaaaaggtcaatattcttaaaatcatgttaatcaaaaattgcagaacagacttcagtaatgcttgggttggccactgtgataggcagaataatgatcccgccaatgatacccccacaatccctagcacctatgaatatgttaccctacaaggcaaaaggaaaattaaggtggcagatagaattaagcctgctaattagctgattttaaaatagggagattatcctgaattatctagcttggcctaatacaaatacaaagggatgcagaagaaaagaatgcagtgatatgctgtgagaagaactcaatctgtcattactggatttgaagatcaaggaagggaggccattcaccatggaatgtggg

SEQ ID NO: 507150 - DNA, 580 bp, Homo sapiens
tgccactttttgtcctgggtctcaccactataacaaaatgtcttttccttgcatgaatttgtttgacatcataagctttgtacccagagcactgttgtctactcttgggccagatatcatattatttatgctacccttctccatggagaaatttccttttttattgttcacatatcatactgcaaaaacatgaagttcttccagtatgccctatggcaaaaggtcaatattcttaaaatcatgttaatcaaaaattgcagaacagacttcagtaatgcttgggttggccactgtgataggcagaataatgatcccgccaatgatacccccacaatccctagcacctatgaatatgttaccctacaaggcaaaaggaaaattaaggtggcagatagaattaagcctgctaattagytgattttaaaatagggagattatcctgaattatctagcttggcctaatacaaatacaaagggatgcagaagaaaagaatgcagtgatatgctgtgagaagaactcaatctgtcattactggatttgaagatcaaggaagggaggccattcaccatggaatgtggg

SEQ ID NO: 507151 - DNA, 580 bp, Homo sapiens
tgccactttttgtcctgggtctcaccactataacaaaatgtcttttccttgcatgaatttgtttgacatcataagctttgtacccagagcactgttgtctactcttgggccagatatcatattatttatgctacccttctccatggagaaatttccttttttattgttcacatatcatactgcaaaaacatgaagttcttccagtatgccctatggcaaaaggtcaatattcttaaaatcatgttaatcaaaaattgcagaacagacttcagtaatgcttgggttggccactgtgataggcagaataatgatcccgccaatgatacccccacaatccctagcacctatgaatatgttaccctacaaggcaaaaggaaaattaaggtggcagatagaattaagcctgctaattagctgattttaaaatarggagattatcctgaattatctagcttggcctaatacaaatacaaagggatgcagaagaaaagaatgcagtgatatgctgtgagaagaactcaatctgtcattactggatttgaagatcaaggaagggaggccattcaccatggaatgtggg

SEQ ID NO: 507152 - DNA, 584 bp, Homo sapiens
acatgcttttgatctttagggtatcttgccctatccagagaaagcccaaggcattttttaattcttctaacccttttctgagaaaatacaatttgaaggaagcataaataagaaaaacttttgcaattttaaaaatgcatcctgcctgattttctttagaagactcatcccggttctttttaaagaagtaaatcattatgcattggctcattttcttgcctggaataaccaatgaaatctcccaatatatccaaaaagaaaggcaagttatagcttttttctttatgagtacgcaaactgaagacacaggcagccttgcgggatttctcaaggttacaacattgcgaacataagtttttacccattaccytactctgcagtgtctcaggggtcacattgtctctgtcttgttcaacatgccatgaaaaactgtttccagctgatggatttggtggcttgaaagcatgagctactagaggttaggaatctcagaaatgaatattgcacagtgtgtttgagagtaattgttcacaggaaaaaagctgagaaatttaccctctggggctgggaggagtgacaacaga

SEQ ID NO: 507153 - DNA, 584 bp, Homo sapiens
acatgcttttgatctttagggtatcttgccctatccagagaaagcccaaggcattttttaattcttctaacccttttctgagaaaatacaatttgaaggaagcataaataagaaaaacttttgcaattttaaaaatgcatcctgcctgattttctttagaagactcatcccggttctttttaaagaagtaaatcattatgcattggctcattttcttgcctggaataaccaatgaaatctcccaatatatccaaaaagaaaggcaagttatagcttttttctttatgagtacgcaaactgaagacacaggcagccttgcgggatttctcaaggttacaacattgcgaacataagtttttacccattaccctactctgcagtgtctcaggggtcacattgtctctgtcttgttcaacatgccatgaaaaactgtttccagctgatggatttggtggcttgaaagcatgagctactagaggttaggaatctcagaaatgaakattgcacagtgtgtttgagagtaattgttcacaggaaaaaagctgagaaatttaccctctggggctgggaggagtgacaacaga

SEQ ID NO: 507154 - DNA, 449 bp, Homo sapiens
tgctgaactgattagctaagatcgtacttctttatcaaagaagctctggttctttgagttcaccattgatgataaaactgaaaatctctcttgctcagggtcagatgtgaaacgattcctggtcccaatctccagagtcactctttaaatgctggcttctatttttttttaatctcttttttaaattattattattatactttaagctttagggtacatgtgcacaatgtgcaggtttgttacatatgtatacatgtgtcatgttggtgtgctgcacctattaactcatcatttagcattaggtatatctcctaatgctatccatcccccatccccccaccccacaacagtcccctgtgtgtgatgttccccttcctgtctccatgtgttctcactgttcaattcccacctatgagtgagaacatgycgtgtttggttttttgtccttg

SEQ ID NO: 507155 - DNA, 449 bp, Homo sapiens
tgctgaactgattagctaagatcgtacttctttatcaaagaagctctggttctttgagttcaccattgatgataaaactgaaaatctctcttgctcagggtcagatgtgaaacgattcctggtcccaatctccagagtcactctttaaatgctggcttctatttttttttaatctcttttttaaattattattattatactttaagctttagggtacatgtgcacaatgtgcaggtttgttacatatgtatacatgtgtcatgttggtgtgctgcacctattaactcatcatttagcattaggtatatctcctaatgctatccatcccccatccccccaccccacaacagtcccctgtgtgtgatgttccccttcctgtctccatgtgttctcactgttcaattcccacctatgagtgagaacatgtsgtgtttggttttttgtccttg

SEQ ID NO: 507156 - DNA, 465 bp, Homo sapiens
attctccccttctacttactcctctccctttttctaaagagattgatttcactttccatgagatgctacagtattttcagtttaaatagaaacttyaaataaattggatttaaaatcttctcagggaaaagggaaacaatttgtttgctggggtttaatttcaaggcaagagtcataatcaaggctattttaacccatcctttgattaccttcatggcaacacatgctcttgcaaagataggaagattattagaattttaaggaggtggatgtggctgtatctacacacaaagtagcaatgaaaaggttcatgggttgcagtctccagcctctggggcctctaatccacccagaacaaataactgtcttttctcttaacaattgccgcagctacaggctacaaaatctctcttggtggtcaactgcactaccttatcacacacaagggtaaatgttgtcaacctg

SEQ ID NO: 507157 - DNA, 465 bp, Homo sapiens
attctccccttctacttactcctctccctttttctaaagagattgatttcactttccatgagatgctacagtattttcagtttaaatagaaactttaaataaattggatttaaaatcttctcagggaaaagggaaacaatttgyttgctggggtttaatttcaaggcaagagtcataatcaaggctattttaacccatcctttgattaccttcatggcaacacatgctcttgcaaagataggaagattattagaattttaaggaggtggatgtggctgtatctacacacaaagtagcaatgaaaaggttcatgggttgcagtctccagcctctggggcctctaatccacccagaacaaataactgtcttttctcttaacaattgccgcagctacaggctacaaaatctctcttggtggtcaactgcactaccttatcacacacaagggtaaatgttgtcaacctg

SEQ ID NO: 507158 - DNA, 602 bp, Homo sapiens
ctgggctaaagaagcagaatttgaaaaggaggagaaagctgagacctaatcttaattttttttcatcttttttttttaatattgggtgactttgagaaaatggaatggtattagaatattcagactgctgggcagggtgggagaggctgtgctgagggagcttctaaagatggaaggaagtttcctgggaaaagtccagaagtggttgtgcagtggcacttgaaatggactgaattgtgctcctgcctgctgtgcctccagaaggctctgtaagatcatctgagtgtatacacgcatcagagggcactttggggtttagctgatgtcaaggctgagggattccatctcctgcgaataagttgtttaccactaccmccttcttttgtcacccctcatgtcagtgcacaaagggcccttgagtagagaagcatgtttggtctagatacatgaaaagaggggactgtgaaggaagaagagagacagacaattcagtgtattttggcatcctatgaactgaaccccaagtaaggcaattttaagaatattctctttaaaaacttctcttctaccaaatgtgttttcagctaatgtgggaaattaaa

SEQ ID NO: 507159 - DNA, 489 bp, Homo sapiens
ctcctattaagaagagttgaataaggagttaaggatgagcagctamattttttccagatgtattaggaaatagcatgttcgtgaatacaaatacacctggaagtggtcacctatgaaggtcttaaagactacattcatgtgcagccttgactaaaggcagactaatgaaccagatgactatgattgttggcattcttcaaaagccatcatagccagcagtttgaggcttacaatgtgctgtctaagtgctttccaaacacagttctgaatgcattccccacattaactaaggtaagcctcacaacaaacccatccattagactaacatcacccccattttgcagatggagaatccaaggcacagaggagttaagtactcttccaaaagtcactcagccatgaagtggcagagctgggggttgaattcagtcagtttggttctagggccttgaacttaacccccgcattacacattactctgtggaaact

SEQ ID NO: 507160 - DNA, 561 bp, Homo sapiens
cactacagtctattcagcgcagagcactggaagaatctcatctcagtcaaagcacaaagtcttgacattaacctgaaagatcctacatgacccaactcccctacgtccttgacctcattccctacaactctgtctcacaaatggctgccctaattgtcttaattctaacataktcctttttataaataatatttagatttttcagccaatggaaataaaaggctaaatctctgaaaaatgtcaaagattccatttctgatattagatgaagacaagagggggaagtaaatgagatcctttttggagtagaagagagaaacaatttccctataccttaaaagaaatagagcggtattctttgagctttatgctataataagctgtcactctttttaataatttagtgtattgacttattatgagagtggtatatataagaaaattttcaaaagtctcttttgcagtaaaaaatactatctttatttttaatattgtttaaatttggaggccctacttcaatattgcaccactacttagagtactttcatcctagaaaatgtc

SEQ ID NO: 507161 - DNA, 561 bp, Homo sapiens
cactacagtctattcagcgcagagcactggaagaatctcatctcagtcaaagcacaaagtcttgacattaacctgaaagatcctacatgacccaactcccctacgtccttgacctcattccctacaactctgtctcacaaatggctgccctaattgtcttaattctaacatagtcctttttataaataatatttagatttttcagccaatggaaataaaaggctaaatctctgaaaaatgtcaaagattccatttctgatattagatgaagacaagagggggaagtaaatgagatcctttttggagtagaagagagaaacaatttccctataccttaaaagaaatagagcggtattctttgagctttatgctayaataagctgtcactctttttaataatttagtgtattgacttattatgagagtggtatatataagaaaattttcaaaagtctcttttgcagtaaaaaatactatctttatttttaatattgtttaaatttggaggccctacttcaatattgcaccactacttagagtactttcatcctagaaaatgtc

SEQ ID NO: 507162 - DNA, 325 bp, Homo sapiens
aggaggaatatggcacaatatgtttacctactccatggactacctacttcttaattatccagaattatttrtttgattaacatgatacttttctatacagtgatatattcactgtagataccagggacataaatataccagtggggaagaaacactaatttcagaaaattaagaatatatatgtatattaaaaaataaattaaaaacagcagtttctggtggggaagtactgtgaaaattggatcagtactttcagattactagttcaaaagcaaatcatcattaggattatatttcaatctctatctttttctattcaattttt

SEQ ID NO: 507163 - DNA, 216 bp, Homo sapiens
cacagaaaatagcaccacagttctccggaccatcattacatatacctacgagtggaaacgagctgtgtggatcattctctccacacscaaaacaggagatgcaggtcttgtgaggctgttgagtccacattctaatgctgttagtacactgcccggcgtatagaatcctctcctttataaataggcttagtcatggttattgacaattgcccggtg

SEQ ID NO: 507164 - DNA, 216 bp, Homo sapiens
cacagaaaatagcaccacagttctccggaccatcattacatatacctacgagtggaaacgagctgtgtggatcattctctccacacgcaaaacaggagatgcaggtcttgtgaggctgttgagtccacattctaatgctgttagtacactgcccggcgtatagaatcctctcctttatraataggcttagtcatggttattgacaattgcccggtg

SEQ ID NO: 507165 - DNA, 639 bp, Homo sapiens
acccatgccactctagacagataaactcatttttttcatcaactcatgtatgtttccttcttttttctcatttaacttttaccattataatccacttaatttcccatatctgatattcctggctatctcattggactttaaactctttaaggaaagtctgtcttattcatttctatattactagttttactgygtaatacggttaagagcccagattctgaagccagaatgccaagtttcaaattttagccatgtattttaataatgatgagacattgggcaaattgttctctgcagtaatgtttcatgctggaaaataggaacatcattagtctacctcaatagggcaatattcaggatgaactgagataacttatgtgaagttaatagaaagtttttagtaaatgttaatgacaaattattattattaaatgtattattattattttatctccatatctgccatggtgattaaagactaaataaattaatgcaggcaagttagaactaatttacaatattcctaaaatgtcctaacacattatcataaacatctgtgtttgaaaaaaaaattgtgtgatatcagatgtaaaattgttatcaattttatatatatgtatatatattacagtacacata

SEQ ID NO: 507166 - DNA, 639 bp, Homo sapiens
acccatgccactctagacagataaactcatttttttcatcaactcatgtatgtttccttcttttttctcatttaacttttaccattataatccacttaatttcccatatctgatattcctggctatctcattggactttaaactctttaaggaaagtctgtcttattcatttctatattactagttttactgcgtaatacggttaagagcccagattctgaagccagaatgccaagtttcaaattttagccatgtattttaataatgatgagacattgggcaaattgttctctgcagtaatgtttcatgctggaaaataggaacatcattagtctacctcaatagggcaatattcaggatgaactgagataacttatgtgaagttaatagaaagtttttagtaaatgttaatgacaaattattattattaaatgtattattattattttatctccatatctgccatggtgattaaagactaaataaattaatgcaggcaagttagaactaatttacaatattcctaaaatgtcctaacacattatcataarcatctgtgtttgaaaaaaaaattgtgtgatatcagatgtaaaattgttatcaattttatatatatgtatatatattacagtacacata

SEQ ID NO: 507167 - DNA, 528 bp, Homo sapiens
aggctgtggacacaggtgaggagcaatgggatacagcattggggctgtcagctttcttcttcttttgagacggagtctcgccctgtcactcaggctggagtgcaatggcgcgatcttggctcactgcaacctctgcctcccgggttcaagcgattctcckgcctcagcctcccgagtagctgggattacaggcatgcgccaccacgcctggctaattttttgtatctttagtagagacgggggtttcaccgtgttggccaggctggtctcgaactcctgacctcgtgatccgcccgcctcggcctcccaaagtgctgggattacaggcgtgaaccacctcacctttcttcttttctcaggatcttggagtccagatccccagtctccttctaaccccagattctggacccctgtccctccccaccaggacataagtgcaggacccagccccttcccccgtcaagatacaggagttcaagcccccagctccctttattctctggggttcgcatccctagtccattccct

SEQ ID NO: 507168 - DNA, 445 bp, Homo sapiens
ctctgccctccacacccccatgtgcttcctcctgagcgtattctccttcctagacatctgcagttcctccatgtgcaccccaggctgctgatccactttctcaccactaaccatccatctcctttgcaggtggtrtaatccagatggccctcatgaccttctatggcacaggggaatgtctgctgctggccatcgtagcctatgactgagttgtggccatttgccaccctttcccctagcatatcatcatgtccaaggggactgtgtgcccagctggtggtggttacctctgctgtgggggtgctcatttcagctctagacaggatgcattcatctcgccctaccgtggcctaacatcattgatcattactatgttctgttacattccccacccccatgctccaactggcctgctcagatgccactgtggccaacatgatcctgt

SEQ ID NO: 507169 - DNA, 568 bp, Homo sapiens
tgattgaggggagaagtatgaaggagccataggagtggggttggggtacagtccagttcttccacgttttgtaatgtgacactgggcaactcatgggagaaagcagagtctgtgaagtgaagaggacaaatcctggctggacttttgggattcagtagactgagaagatggacagaggcgctttgaaaagaatgaagtgcttatgatgatcccaggtggtatggcctgaggaagaaatagtgtgatggggaaacaaatatttgttgagctcctgctctgtgttatcctctaggccagacacttcccccatcctgacctcartggagaagcgagtaaactgcttaaggtcacaaatggaggagttgagatttgaacttggatgaccatgtggagagctgttggcttagtcccttcttcactgggtagggataatgtagatcaggaaagaaaataaatgatgcaagctaaagaatgtacttaatgagaagcaagaagtacaatatggtgctgcagtttgaatgtttgttcccttcagaactcacgttgacatttaatccccaatgtagta

SEQ ID NO: 507170 - DNA, 509 bp, Homo sapiens
tggttgttgcaaattagacctgtcattattgcaggctttggatgttttctctttcagttgctgctcctgaatctgtctcctgccatctgaggtgtccttcctctctctccctgtgaatttctgtggcttyggttcttgtccctttcttttactttctctgtcttgaggatcagattcaaaatccttcttacagagagacctgtaataagtgtttgtattatttaagaacactctttatagaaaataagagaaagaaatatagagccaaaaaacttgtgagaaaggaggtagagacgatatgtgatgaatatttataggaagccatggaaggaccaaaaagcatctcatatttatgaggcatgtgagtcactatatcttcatgaagctctcagtattcatgaaatcttagacggacacccttgggtgatccccacttttggttccatttgttttcttcccaaggcatgctgcaggtaaggcatggttgcttagcaagtcgctggtgagca

SEQ ID NO: 507171 - DNA, 509 bp, Homo sapiens
tggttgttgcaaattagacctgtcattattgcaggctttggatgttttctctttcagttgctgctcctgaatctgtctcctgccatctgaggtgtccttcctctctctccctgtgaatttctgtggcttcggttcttgtccctttcttttactttctctgtcttgaggatcagattcaaaatccttcttacagagagacctgtaataagtgtttgtattatttaagaacactctttatagaaaataagagaaagaaatatagagccaaaraacttgtgagaaaggaggtagagacgatatgtgatgaatatttataggaagccatggaaggaccaaaaagcatctcatatttatgaggcatgtgagtcactatatcttcatgaagctctcagtattcatgaaatcttagacggacacccttgggtgatccccacttttggttccatttgttttcttcccaaggcatgctgcaggtaaggcatggttgcttagcaagtcgctggtgagca

SEQ ID NO: 507172 - DNA, 509 bp, Homo sapiens
tggttgttgcaaattagacctgtcattattgcaggctttggatgttttctctttcagttgctgctcctgaatctgtctcctgccatctgaggtgtccttcctctctctccctgtgaatttctgtggcttcggttcttgtccctttcttttactttctctgtcttgaggatcagattcaaaatccttcttacagagagacctgtaataagtgtttgtattatttaagaacactctttatagaaaataagagaaagaaatatagagccaaaaaacttgtgagaaaggaggtagagacgatatgtgatgaatatttataggaagccatggaaggaccaaaaagcatctcatatttatgaggcatgtgagtcactatatcttcatgaagctctcagtattcatgaaatcttagayggacacccttgggtgatccccacttttggttccatttgttttcttcccaaggcatgctgcaggtaaggcatggttgcttagcaagtcgctggtgagca

SEQ ID NO: 507173 - DNA, 619 bp, Homo sapiens
  misc_feature (1)...(619): n = A,T,C or G
tgtctggtttctctctctgtacaacagcagagatgagtagttgcagcatagaccatgtgacccagaaaggctaaaatatttttctgacccctttataagaaaaagattactgaycctttatgtagaccatttattcatactctatgagtaaaagcaaagaggtcttactagtactaggagagacagcagaatgaagtaaaggtagtgttaaagaagttctggaggcctgaggtgactaaaaaatttagaattttctgtgatggagggttgtcctgagcacaaccagtgtcttcattcaaacactgtttcctccaaaaagcttttcttgtagtttcccagccagagttagttacttcctgctccaaccattatatttatgttattacagcacctactgtaggtggctacatgatttaagagcaagaaccatcctttttcatctttgaatcatctttaaaacatatattctaataatagcacttcagggctgaatattaaatacatacatacatgaatttaaaaaacaaccaccagcttgnattcctgtagtttaaaagcccaatcatgtttcttgcaagaatattcttaaaatcgcacatctgaccaatcagcaaatatt

SEQ ID NO: 507174 - DNA, 619 bp, Homo sapiens
  misc_feature (1)...(619): n = A,T,C or G
tgtctggtttctctctctgtacaacagcagagatgagtagttgcagcatagaccatgtgacccagaaaggctaaaatatttttctgacccctttataagaaaaagattactgatcctttatgtagaccatttattcatactctatgagtaaaagcaaagaggtcttactagtactaggagagacagcagaatgaagtaaaggtagtgttaaagaagttctggaggcctgaggtgactaaaaaatttagaattttctgtgatggagggttgtcctgagcacaaccagtgtcttcattcaaacactgtttcctccaaaaagcttttcttgtagtttcccagccagagttagttacttcctgctccaaccattatatttatgttattacagcacctactgtaggtggctacatgatttaagagcaagaaccatcctttttcatctttgaatcatctttaaaacatatattctaataatagcacttcagggctgaatattaaatacatacatacatgaattkaaaaaacaaccaccagcttgnattcctgtagtttaaaagcccaatcatgtttcttgcaagaatattcttaaaatcgcacatctgaccaatcagcaaatatt

SEQ ID NO: 507175 - DNA, 563 bp, Homo sapiens
gactgtgcttcataggcagagacttagggaatcagagtgtaaaggaagtaacactatcaactaaggaaatggagatttgataagcaagccatgattgtcacagggtattgggaaatcatacactaggcatgccgaagtagaatcagcagggaaaaaaagccatgcttaatctaggaaaacattcaggcatggcttcagagacactaggaggattctagtaggggacttgacatacgccgggggcaacccattgtgaaggagctaggtggcctgggagtgcattctcaggctatgagatactgccacatataggtcaacctaaaccttcgttcttgaagaccactagctttggaaataaacggcttttttgatctagaaaaaggccttgaaaattaaagtcactcagcaacgttasacattgaaaattaaaagtaactcaattcaaacttttcattttataatcaggaaaactgaactgaaaacaatatatcagttaagtcatttgagcatgtctcacagcaaatgattgttgaaaaaaggctattcaaaatgctaggatatgg

SEQ ID NO: 507176 - DNA, 451 bp, Homo sapiens
agctgtgtttaatttcccttaattgccctacgaaggaaaaagaatttgaccagatttggggaaaaatttaatctatcagtaagattttatttcttatttttgcagaaaattgaagcccctatatmcaggtagtcatacctgaagtccatcttcagttgtgcatgttccagatatatggcagccttccaatactttgattacttcactgtagaatggagttactaaaagtttacttcgtgtgatttgcatatcaataaatcacttagcttaatgcccacaaaaagttataggtgatctttttaaaaattgtttttagtgactagtaggtaagattaatgtaaaatacattatctaaataatgtaaaaataaagaataatgaatacaattactgaaataattatttttgcatttataatgtacaaacagatccatcaaaaataactttattta

SEQ ID NO: 507177 - DNA, 451 bp, Homo sapiens
agctgtgtttaatttcccttaattgccctacgaaggaaaaagaatttgaccagatttggggaaaaatttaatctatcagtaagattttatttcttatttttgcagaaaattgaagcccctatatccaggtagtcatacctgaagtccatcttcagttgtgcatgttccagatatatggcagccttccaatactttgattacttcactgtagaatggagttactaaaagtttacttcgtgtgatttgcatatcaataaatcacttagcttaatgcccacaaaaagttataggtgatctttttaaaaattgtttttagtgactagtaggtaagattmatgtaaaatacattatctaaataatgtaaaaataaagaataatgaatacaattactgaaataattatttttgcatttataatgtacaaacagatccatcaaaaataactttattta

SEQ ID NO: 507178 - DNA, 568 bp, Homo sapiens
attacatgaaatctctatttatacctgtcttgtaactgtcacagcaatggtatttgcaaagtgtttacaacatcatgaatgtttgctgagttaaawtgcattagcatgtcatgaataaatacatattttaacatttgctacctgcataattcatctggcattattctatatgtcttgctgtccttttattctgtatatagacagcacagtttattgggtaagaaattaatttctggagagggacataatgaggtttgaattttagcattctcattattagcactgtgacttcagggaagtcacttgctgccctgatgaaatttagtttcctttctctaaaatagacatagtaatgcataaaatgttcttttgaataagtaacctattacttaacatataacaagcatgaaataagttatttcagcaaaataaatacattcttaagcaaaatcatttattatttattagcaagcattcctttctttctaactagaataaaaagttggcaaataattacaggaactatattttacacaactttctgggtgtagggaaatccactgactac

SEQ ID NO: 507179 - DNA, 568 bp, Homo sapiens
attacatgaaatctctatttatacctgtcttgtaactgtcacagcaatggtatttgcaaagtgtttacaacatcatgaatgtttgctgagttaaaatgcattagcatgtcatgaataaatacatattttaacatttgctacctgcataattcatctggcattattctatatgtcttgctgtccttttattctgtatatagwcagcacagtttattgggtaagaaattaatttctggagagggacataatgaggtttgaattttagcattctcattattagcactgtgacttcagggaagtcacttgctgccctgatgaaatttagtttcctttctctaaaatagacatagtaatgcataaaatgttcttttgaataagtaacctattacttaacatataacaagcatgaaataagttatttcagcaaaataaatacattcttaagcaaaatcatttattatttattagcaagcattcctttctttctaactagaataaaaagttggcaaataattacaggaactatattttacacaactttctgggtgtagggaaatccactgactac

SEQ ID NO: 507180 - DNA, 427 bp, Homo sapiens
tttagattagctttattttattttgatctcttaattcaacaagtttagcctccaggcaggtagagcttacagaaatacacaaaatttccattaataataaaagacctgatgctaaaagttaaatctgaaggatgaattaagtagtccagtgttctgaacatttatttaacctcataaacatgctgtgttttgtgctgattttaacattaaacaaacaaaagtttcttaatttttagttataaaggtcaattttcrcagttcagaaatgaatactaacagtccttctgcacttggttgagatccaagactaccagtataaatgattctaatacattttccagaaatcttgacaaagaagacagaatttaagtcaagataatatgtaatttcacattttatataattttcagtttaaagaaaccagcta

SEQ ID NO: 507181 - DNA, 427 bp, Homo sapiens
tttagattagctttattttattttgatctcttaattcaacaagtttagcctccaggcaggtagagcttacagaaatacacaaaatttccattaataataaaagacctgatgctaaaagttaaatctgaaggatgaattaagtagtccagtgttctgaacatttatttaacctcataaacatgctgtgttttgtgctgattttaacattaaacaaacaaaagtttcttaatttttagttataaaggtcaattttcgcagttcagaaatgaatactaacagtccttctgcacttggttgagatscaagactaccagtataaatgattctaatacattttccagaaatcttgacaaagaagacagaatttaagtcaagataatatgtaatttcacattttatataattttcagtttaaagaaaccagcta

SEQ ID NO: 507182 - DNA, 427 bp, Homo sapiens
tttagattagctttattttattttgatctcttaattcaacaagtttagcctccaggcaggtagagcttacagaaatacacaaaatttccattaataataaaagacctgatgctaaaagttaaatctgaaggatgaattaagtagtccagtgttctgaacatttatttaacctcataaacatgctgtgttttgtgctgattttaacattaaacaaacaaaagtttcttaatttttagttataaaggtcaattttcgcagttcagaaatgaatactaacagtccttctgcacttggttgagatccaagactaccartataaatgattctaatacattttccagaaatcttgacaaagaagacagaatttaagtcaagataatatgtaatttcacattttatataattttcagtttaaagaaaccagcta

SEQ ID NO: 507183 - DNA, 408 bp, Homo sapiens
cttttcctgacttttctaagaacaagaaagaaatatcaaagcctaaaggaataaagaattactttccagataattcagaaaggaattaaatgctgaaaactgacatctgtgaatatcacattttttgagagttatgtatagagaccatccaagtatcataattttattaaaaatatatacatagtaactattgataatattgtttattggtataattgatgcattatgatatttaaatgattctttggaggggtaattaacttttatacataggctttttttagtagtatgtattattatgttgattkatattgaaatagtattataatttaaaaacatatagaaattttatctttaaggctcaagttttgcatatattttaacatcaaacttttcattcaagctatt

SEQ ID NO: 507184 - DNA, 408 bp, Homo sapiens
cttttcctgacttttctaagaacaagaaagaaatatcaaagcctaaaggaataaagaattactttccagataattcagaaaggaattaaatgctgaaaactgacatctgtgaatatcacattttttgagagttatgtatagagaccatccaagtatcataattttattaaaaatatatacatagtaactattgataatattgtttattggtataattgatgcattatgatatttaaatgattctttggaggggtaattaacttttatacataggctttttttagtagtatgtattattatgttgatttatattgaaatagtattatwatttaaaaacatatagaaattttatctttaaggctcaagttttgcatatattttaacatcaaacttttcattcaagctatt

SEQ ID NO: 507185 - DNA, 408 bp, Homo sapiens
cttttcctgacttttctaagaacaagaaagaaatatcaaagcctaaaggaataaagaattactttccagataattcagaaaggaattaaatgctgaaaactgacatctgtgaatatcacattttttgagagttatgtatagagaccatccaagtatcataattttattaaaaatatatacatagtaactattgataatattgtttattggtataattgatgcattatgatatttaaatgattctttggaggggtaattaacttttatacataggctttttttagtagtatgtattattatgttgatttatattgaaatagtattatawtttaaaaacatatagaaattttatctttaaggctcaagttttgcatatattttaacatcaaacttttcattcaagctatt

SEQ ID NO: 507186 - DNA, 627 bp, Homo sapiens
ttggaaaaggccatcttaataaaggactatatatacctcctgggatgataaaagtcttttcatcttttctggtagtaagtcctttttagtataaagataagaagtgtctttctagattaaatattcttttttaatacagaatttacattctatctgtgagatatgtcttctctgctttgcatgcctagttcratattttgtttcatttgcatgcctgggttaaactgttttgaacacattcatcttagtttatttttatttgggttgactgcattcccttgcttttatctacaaatattttaagagcaaaaataaacattctggaagggaattcagaatggctgaaataaaagccactagggtagttgctatcatctaaaacactggtcttaaattctgacattttctgacaggatttataggattttctttgttcccaagggattaataagaaatgaaatgaaattcttaaacttaaggcatgccaaattttcttgaactccagtcagctacatattatggcctatacttgtgcgtatttttaaactgatagacaaactacatgaaggataattcagaactgttcatattatcaatgaccattcggagatggtcattatttaaaaa

SEQ ID NO: 507187 - DNA, 543 bp, Homo sapiens
tatggaactttgggctttctaaggacaagagaatttaatttccttctctatatgaagactgcctgatatggaagtgtcccactctgatctgagcctaatccttcttcagtgtaatcaggatatgtgtactagagctgtggcaaaaaaacatgacagcaggcttgagcccctaacctgcaacctttcctctttcggtcctgactttctgtattttgtcctttcttccaaaagtactactgattgtctactactttcagatactgtcctaggtagagacatgaaggggaatggaataaagaaaggasctctttttttcttcgatatcaatgtactcatctggatgtccagttctttccttcttcttcaggtcgaatcatggattcacgaaaacatagcatattttgtcctaaaagagattttgaagacccttattcaacatatgataaatctgagatgtgtatgtgtgtgtgtattatcaccagtaccaatactactactaacactaatggtaatagtattgaagatgattatgataatgatgat

SEQ ID NO: 507188 - DNA, 617 bp, Homo sapiens
ctgctatggaactttgggctttctaaggacaagagaatttaatttccttctctatatgaagactgcctgatatggaagtgtcccactctgatctgagcctaatccttcttcagtgtaatcaggatatgtgtactagagctgtggcaaaaaaacatgacagcaggcttgagcccctaacctgcaacctttcctctttcggtcctgactttctgtattttgtcctttcttccaaaagtactactgattgtctactactttcagatactgtcctaggtagagacatgaaggggaatggaataaagaaaggacctctttttttcttcgatatcaatgtactcatctggatgtccagttctttccttcttcttcaggtcgaatcatggattcacgaaaacatagcatattttgwcctaaaagagattttgaagacccttattcaacatatgataaatctgagatgtgtatgtgtgtgtgtattatcaccagtaccaatactactactaacactaatggtaatagtattgaagatgattatgataatgatgatgataaggaggatgatgaggatgatgaagataatgttaccaaaccctatttaccatggggcctaggtttgg

SEQ ID NO: 507189 - DNA, 634 bp, Homo sapiens
taaaagaatagaaaatggtagggtttgtggcagaactagagtatgagtcttctctaaagacattcaaattcaacattttttacactagcaatcaaactaaacacatctaatgactacattcaatccagagacaatgtgcttaacatttcaatctctagactaatttaaaggaaacatcagccttggaatattttcagaacaagctatcttgttgagaattactcactccctgggtgtctcccatgtatatgagaaatatacatgttaatgaacttctgtttgtttttatttttttaatcagtctttcattacagggatccatttcaactaagtctaagaatgttggagaaaaaaattattattcttcccctatataaatgttctacagaaagtaaagccttccttcctccattttcccgaagagaaataatatattttattttaaattagacaaattgaaagatatcaaacaaatctagtctggaatcccagcactaccatttacaagctatattaacctagactktaaaccctctgagtccctggaatgaacttggcaagaatgtaaagaaagcacaacgaacaaggaggcagcaaaaggcaataggactgctgaggtaggtcctggacaggt

SEQ ID NO: 507190 - DNA, 614 bp, Homo sapiens
cctattagattagaaattggggaatccaggcatcatggatagactacttccaggctgggcgtggtggctcacggctgtaatcctggcactttgggaggccaaggcgggcagatcacttgaggtcaggagttcaagaccagcctgggcaacatggtgagaccccgctcccccccacgtctctactaaaaatacaaaaattagccgggtgtggtggagtgygcctgtagtccaagctacttgggaggctgaggcaggaaaattgcttgaacccaggaaatggaggttgcagtgagccgagatggcgccattgcactccagccagggtgacagacagagactctgtttaaaaaaaaaaaaaaaggatatagactatttccagaagcttagccaagaacagatagagagtgaggttaaaggaatgttgtttcttatttttaggattgcttcagttatctgcttctgcccagcaaaccaccttgaaacatatgactttttaaaacaaagatttattatttctcagaatccaatcaattaactaagtagtttttcttctggtctctcctttggtcactattcagactacctttagctggtaggccaactgtttgggctag

SEQ ID NO: 507191 - DNA, 507 bp, Homo sapiens
cattcgcatgacctacataggccaagcagtgttagattgacttaaaaggatattggataggaaacacagtatgccagcagggtattcctttttcaccagagtcttcacagcaatctgaatactgttgtttatcccctaccaccaaatgacaacttgggtacaaagygacaagattcagatagttaggagcagggattgctttgtcttaaaatccccatgcaacacaagagcagattatcttttttttttttttccttttaataccctaactggtctgagctaatacctttgtaccagtctcatgggtacagtttccaaggttcctataagggacatgcacatttataagagtctctacattcaaagaagctaaaacctgtggccttacaccagctatataattcattcagaatcttcccatccagatgcaatttgtcaatcaggtttgatttttaccataagcaatgtttcctggtgtttgttaatccttttcccatagttgataaa

SEQ ID NO: 507192 - DNA, 507 bp, Homo sapiens
cattcgcatgacctacataggccaagcagtgttagattgacttaaaaggatattggataggaaacacagtatgccagcagggtattcctttttcaccagagtcttcacagcaatctgaatactgttgtttatcccctaccaccaaatgacaacttgggtacaaagtgacaagattcagatagttaggagcagggattgctttgtcttaaaatccccatgcarcacaagagcagattatcttttttttttttttccttttaataccctaactggtctgagctaatacctttgtaccagtctcatgggtacagtttccaaggttcctataagggacatgcacatttataagagtctctacattcaaagaagctaaaacctgtggccttacaccagctatataattcattcagaatcttcccatccagatgcaatttgtcaatcaggtttgatttttaccataagcaatgtttcctggtgtttgttaatccttttcccatagttgataaa

SEQ ID NO: 507193 - DNA, 632 bp, Homo sapiens
cattcgcatgacctacataggccaagcagtgttagattgacttaaaaggatattggataggaaacacagtatgccagcagggtattcctttttcaccagagtcttcacagcaatctgaatactgttgtttatcccctaccaccaaatgacaacttgggtacaaagtgacaagattcagatagttaggagcagggattgctttgtcttaaaatccccatgcaacacaagagcagattatcttttttttttttttccttttaataccctaactggtctgagctaatacctttgtaccagtctcatgggtacagtttccaaggttcctataagggacatgcacatttataagagtctctacattcaaagaagctaaaacctgtggccttacaccagctatataattcattcagaatcttcccatccagatgcaatttgtcaatcagstttgatttttaccataagcaatgtttcctggtgtttgttaatccttttcccatagttgataaagttaatttgggagaaggaagagagagtgacatatttggctaccttcagggaacaaaatctaacagcacagatggtagtagaggagataccaattacatattaaggagctagagttgatgatggta

SEQ ID NO: 507194 - DNA, 629 bp, Homo sapiens
cctcagttgaagaaagtaccatacccaaggtgataggttttgttagttaacagagccacgacaaggactcagatgttcagactccccattctagtgctcattccactctttggagcctccacccaaggtcctgaattaaagtgaggctgttagtgtttactgttgcaaatgccagatggtaytatgagtaagggaaagtggtccagctctacccagcttgcagagtgatttccaactcagtacttcattccacaaacattcactcatgaaagggtgcctgccatgtgccaggcactgggctgagggcccagaaaggaggacacagcccctgctcccaagtttactgagggaggcagacagataaagtcaacaattatgacagagcccgagggctttgatggaggcctcagagagaaaagacgccacagggaggggcccttggccctctatctgctcagagcctgcttaaaagtcatgcacctaaggtgcagaaacacagttaagttctccttcatcttacctcaaactcatggtcttccactgctcaggcagactacctctactatggttccgtagacaaagctttgaagattagagcagcagcgaactaaccttgatctcatcagctt

SEQ ID NO: 507195 - DNA, 629 bp, Homo sapiens
cctcagttgaagaaagtaccatacccaaggtgataggttttgttagttaacagagccacgacaaggactcagatgttcagactccccattctagtgctcattccactctttggagcctccacccaaggtcctgaattaaagtgaggctgttagtgtttactgttgcaaatgccagatggtattatgagtaagggaaagtggtccagctctacccagcttgcagagtgatttccaactcagtacttcattccacaaacattcactcatgaaagggtgcctgccatgtgccaggcactgggctgagggcccagaraggaggacacagcccctgctcccaagtttactgagggaggcagacagataaagtcaacaattatgacagagcccgagggctttgatggaggcctcagagagaaaagacgccacagggaggggcccttggccctctatctgctcagagcctgcttaaaagtcatgcacctaaggtgcagaaacacagttaagttctccttcatcttacctcaaactcatggtcttccactgctcaggcagactacctctactatggttccgtagacaaagctttgaagattagagcagcagcgaactaaccttgatctcatcagctt

SEQ ID NO: 507196 - DNA, 613 bp, Homo sapiens
tgcactgataagaaagcaaggcccagcatagagcctttgttctttgtgtgattagcaggctctcaggaaaaaatttcctccccttttcaggcatttatgtggtgagctccgtgggaacttgcacacggaggtggggrgcttacctaaaacagacccacagttacacaaacaagagaagctgcactttgtgtttacccaagacatacacagataaggagagttacatacacagcttcatagataagggaagttacacaaacagctacagagttgaggggagtttcacataaaagcttttggattcaactgtaaaaacagcagcccactcgggtcccttctccactgtggagagctttctttcttttgcttataaaagttttgctccaacctcacccttgtgtccaggctccttaattttcttggttgtgagacaatgagctcagataacacctcagactacaagaccattgaccctagacagtttcattagtattgagttgtagtgatttcaagaaggcagtttgttatctttattcatatggccatgctatatagagtctgactggtttattacatttttgtgacttataaatgacagtgttatttgtgaagc

SEQ ID NO: 507197 - DNA, 613 bp, Homo sapiens
tgcactgataagaaagcaaggcccagcatagagcctttgttctttgtgtgattagcaggctctcaggaaaaaatttcctccccttttcaggcatttatgtggtgagctccgtgggaacttgcacacggaggtggggagcttacctaaaacagacccacagttacacaaacaagagaagctgcactttgtgtttacccaagacatacacagataaggagagttacatacacagcttcatagataagggaagttacacaaacagctacagagttgaggggagtttcacataaaarcttttggattcaactgtaaaaacagcagcccactcgggtcccttctccactgtggagagctttctttcttttgcttataaaagttttgctccaacctcacccttgtgtccaggctccttaattttcttggttgtgagacaatgagctcagataacacctcagactacaagaccattgaccctagacagtttcattagtattgagttgtagtgatttcaagaaggcagtttgttatctttattcatatggccatgctatatagagtctgactggtttattacatttttgtgacttataaatgacagtgttatttgtgaagc

SEQ ID NO: 507198 - DNA, 613 bp, Homo sapiens
tgcactgataagaaagcaaggcccagcatagagcctttgttctttgtgtgattagcaggctctcaggaaaaaatttcctccccttttcaggcatttatgtggtgagctccgtgggaacttgcacacggaggtggggagcttacctaaaacagacccacagttacacaaacaagagaagctgcactttgtgtttacccaagacatacacagataaggagagttacatacacagcttcatagataagggaagttacacaaacagctacagagttgaggggagtttcacataaaagcttttggattcaactgtaaaaacagcagcccactcgggtcccttctccactgtggagagctttctttcttttgcttataaaagttttgctccaacctcacccttgtgtccaggctccttaattttcttggttgtgagacaatgagctcagataacacctcagactacaagaccattgaccctagacagtttcattagtattgagttgtagtgatttcaagaaggcagtttgttatctttattcatatggccatgctatatagagtctgactggtttattacatttttgtgacttrtaaatgacagtgttatttgtgaagc

SEQ ID NO: 507199 - DNA, 440 bp, Homo sapiens
agggcgagaccatcatgaaaagtcagcagtgtggcagaatcacagtgaacaaggagagagtggcacaaaacaacaaaaacaacaacagcaactagagcctagcaagtgacccaacccaggggttcacatagatcctccagtgttttacactgtaggaaatgccagggtgcaagaagaaaggtagtgagaaggcctatggctgaagaccttarggcaaaagctagaaaattatacttctctagggtgaggagttcactctgatgtacaaagtctatttttttcaagcaaaaaataatggaatagcactgacttttattcattcatgtgaagtcacctgaaatgatatctgttgcatttaaatgctcattaataatataaatgacttaacaaatccatttcaatggatattcaatattccacttagataagtcacacagcct

SEQ ID NO: 507200 - DNA, 440 bp, Homo sapiens
agggcgagaccatcatgaaaagtcagcagtgtggcagaatcacagtgaacaaggagagagtggcacaaaacaacaaaaacaacaacagcaactagagcctagcaagtgacccaacccaggggttcacatagatcctccagtgttttacactgtaggaaatgccagggtgcaagaagaaaggtagtgagaaggcctatggctgaagaccttaaggcaaaagctrgaaaattatacttctctagggtgaggagttcactctgatgtacaaagtctatttttttcaagcaaaaaataatggaatagcactgacttttattcattcatgtgaagtcacctgaaatgatatctgttgcatttaaatgctcattaataatataaatgacttaacaaatccatttcaatggatattcaatattccacttagataagtcacacagcct

SEQ ID NO: 507201 - DNA, 643 bp, Homo sapiens
ctaactcctatccctcctaatagagtcacaaaccaccccagttgccagttttaaggaagagctcctatccatgctccctaccatgagggcatacttcatcctttcttgtggagtaggaggtaaggagatgggggagtattccacctacttttattttttgagatgaggttttgttgtgttgcccagactggtctgaaactcctgggcacaagtgatcctcccacctcagcctaccaagtagctgggacacaggcatcgtgccagctcatctacttacttttatatcaattaatacccagaggaagctaggttcccagagtattccaccaaaaaggaggaaatgaccaactcytgccccagtagagagaagacagagaatgcttggcaccaggtgggtctcatcgcctgcccctcaagaatggttgccacttttgagatccttgatccccatacctttattattgagtccattcatctactcgctccacatttatttattgggcacctaatatgtacctggtcttgtcctaggtgcagggagtgctactaaaaacaacccccaaccccaaccaaggagcttgtgtatgaagtggggggagatagacaatgaacataataaatgtgtagaatacatagtgtgtta

SEQ ID NO: 507202 - DNA, 606 bp, Homo sapiens
cttgggaaccctctcaagtctgcagcaggataaactggggttaggctggagaaagaaccttctgattcctagagctgcaaggggctaagtcagggaagcgggtgaaggatgattccttatagataccaaaggacaggattccctctccccctaacccggacaacagggacagacaccccaaattagagaaatgctcctctctagaagcataccactcaggtctgatgcccaccagactggccagaccctgagccactgacctcagagaggatgaccttgacaatgaggaatgcactggacaccagcgtcgtgacctgcccaggggagggagggaggaaggggaaggcagaggctgggaagtgagtcctcctccatcccatcccttccaccagccctgccagggcccagaagctgccaggaaagtggcatcttaccgcaatcacccaccagtgccggagcygcagcacggcatagcctaggagcagtccagagaagcggaagaaggccaggacctggtgggggacgggagcaaggcagtcacaggaagctactgccccccaccctgctgcaggctgacctcccctctggtcctgcccccacgttccc

SEQ ID NO: 507203 - DNA, 576 bp, Homo sapiens
  misc_feature (1)...(576): n = A,T,C or G
ctgatattggtggggaagctgaagagaaaagagggaagattttgaggagggacttcctgtgggtagaggtcctgtgctggcttgcagccttccattttgggggcagaagaactgacaccaccaccctcccaacaggrgcaggacagatcttggtgccacagctatatattgaggatattctgtgtgccaggctctgggtccagttcctgccttcgtgaaatgtgctgcccagagcggcttcctggaggaggtgatgcttangcttaaggggtgaggaagctggactggacacctcaggaagacagaacagcctgaacaaagattactaggcatgaggcttgtaaatccagaaatagttggagctgctgagggcacagataaaagcagcagccaaatcaaggggtgtccctaaagagcatggcctcatcttagggacactgggagccatggaaggcaccagagtaggcaaataccatgtttgcatggtatttgcattttggataggatgtgcagggtgggtagccttggtcccgtgaggtaagcnnnnnnnnnnnnnnnnnnnnnnnnnnnnnnnnn

SEQ ID NO: 507204 - DNA, 459 bp, Homo sapiens
cagctctcacaccccaaagcccggccccgcgcgagctggggtggctgcaagcgcctgcgtggggacgaccccaaaggyctgcccaggaagctttcctccacctccacacctctgtaaagaattttcccggaattccgcactgtggaggttttgcagcactgccctgacttcccatttgaaaggctacagggcctgggtgtcccgggtgcagaggagacatgcatttaggttgactgcaaactcgtgagcatctgggcctggctgttccaagcgcagctctgcaggggtccaggaaaacttctctcctctcgtgttctggcaccctctagtcccgcagtccagtagagtttactgggatgatgccaatgttctgtctccactggccaatatggtggccactagccacacgtggccatggatcgcttgaggtgtggctgaagaactgaattttaaactgta

SEQ ID NO: 507205 - DNA, 626 bp, Homo sapiens
catgtgcatggtttttggcagatattaatttgtgcagctctttagtatttccatgaaaatttccctgtttggtgacataggcagttgagattagtgtcagaagttttcttgtatttttgcaaattaatgattttttaaaaatcaaagaatgaatttgagagctagcaatattttttttgaccatgacctcttcagcattcaaaaggattttttggtgtatcatttcctatagtaaatacctatcttcaggaaagagtagtttctatttttcttgctgacagcttgatggcagaaatgggccgaacttcccctccattctcattattttaattttaactctaccagaagaggaagttctgtgagttctggaaggtgaaaaattaaaaaacaaaactgattattccagtaacggtaagcagaccatggacatcgaaggaagcaatattctacgcctttgaggctttattatttttttccgtaaatttcctgtcaagtgctayagacatctgtgatcgtagagattttcctgcaaatctggtaactttctaatccctgataaccaaatggaaactatgtagtaaactttctcctagacttttaaaaatggaatcttctaataattttat

SEQ ID NO: 507206 - DNA, 647 bp, Homo sapiens
tggtcttggaatataatccccaaagayaagaagggactgcacaattggccactttagaacttctctttctaaagacacattatttttcaaagaaaaagacataaattgtctgactttatctagtttgcagctgcataatttatgtgatgttcctaagtagctcacagagttaataactgcattttcttaaaaattatattatagaaaatatttatagaaaaatatttcaacatgagtttgaatccaaggtgttctcacttgtatgaggtgacactcaacaatgattggtttgttgaatgaaaggtaaggtaaaagtcaaacaaacagacaaacaaaaatcatattgcaattgctcctgtatccagcctccacggatacatttaatatcacagcttaattggcaagccatctttatttcttttacccttgaattgaaattcattctccttgtaatactgtagacaatattaagacaatcaaaatgagctaagatgcagcagtatattccatctatgattgccagagcttccagtctccaatgaaactgggaataacgcccttttcaggtacacccttccctctgtatccctgggagattgctttcaggacccttggaattacaaaatccacaagtgctcaaatccctt

SEQ ID NO: 507207 - DNA, 657 bp, Homo sapiens
gaataaggaaaagaaatttatgatagtttttttgttgcacctgaaactgcaaaagttagtctgtgataggtgtttagttaagatggaaaaggcattaaatttgttggtggaagacatggacagaaatgtgctctgatagaaggtaattggatactacctgcagcttcaagcatccactgatggtcttggaatataatccccaaagataagaagggactgcacaattggccactttagaacttctctttctaaagacacattatttttcaaagaaaaagacataaattgtctgactttatctagtttgcagctgcataatttatgtgatgttcctaagtagctcacagagttaataactgmattttcttaaaaattatattatagaaaatatttatagaaaaatatttcaacatgagtttgaatccaaggtgttctcacttgtatgaggtgacactcaacaatgattggtttgttgaatgaaaggtaaggtaaaagtcaaacaaacagacaaacaaaaatcatattgcaattgctcctgtatccagcctccacggatacatttaatatcacagcttaattggcaagccatctttatttcttttacccttgaattgaaattcattctccttgtaatactgtagacaatattaagacaat

SEQ ID NO: 507208 - DNA, 599 bp, Homo sapiens
acacatacatcactaaatttcttcaatttttcataaactgcacaagtaaaatgacacccaatctctgcaaataatgatctatgctgttaaaataatgcagagcaattctatcaaatgttttattttttctatgagatctgtcttcattgtacatttaattttaatatttgaatgacaataactctgttatactgcaataggcaataaaaacagatataagctcttctactaagtgaagtattcatgtagtttttctcagtaaaaaaaaaaaaaatatatatatatatattcgtacaccagtagtgtattattgctttctggtgctacagaggagaagttaaaatctaaaacatgggrgagtcttcctatccatattaatcaattttatctcatccagacatcagttctgtcccctgtttctcgagaaccctcatggtccaattgcaagatgctttctacaggcttaattattcatattagtaaattactgcaagtactttggtgtacgatccattttgtcacgtcagtagaaatttgaaataattactggatttcttgcaggaggcaatttggaagtcaaatcttcagaaactataata

SEQ ID NO: 507209 - DNA, 501 bp, Homo sapiens
tctctagtatatatactagagtatataagtttttatttatttatatatgatatatacaataatatacaaatttacataataaataaattaatttatagatattaaatacatataataatacttatgaacatataatattaaatttaaatgtacaagccttgatactattagccttgtgaagtaattggatataaaagcagaactcccataggactagtctaaaaatcttctccaaaatgatcaggacattgattatgtaatttcatatagaaatatgcatcagttagggatttaccagagaatcagacaaataaggattagttatgggactctgagagctgatgagacaattccagtatctgtgggttagaatgtcaggaarggcacgctggaactcttggacatgaggagaagccactgtttacagtcagaatttcttcttcagagaagcctcagttctcctcttcaggcctttcaggtgattgaatcaggcctatgtgg

SEQ ID NO: 507210 - DNA, 556 bp, Homo sapiens
ctgtagttccagccattatttgaaaattgcacagtcaaggagaacagaggagcagagcatactggttacacctccaagaagaataaaacctttcaaaacagatttcctggaaggcacagtcagttacttctgctcacatcttattggccaccctgttttaaaggaagaagggatatcacatgccatcaagaaaaagttatgagaaccaccactcaagttaacagatagaaagaacatttccagcattccagaggccgcttccttcccttcctaagtcaccacctctctccgcacctccaccaaggtaactatcaacttaactcttactggaattacacctttacttttctttagagttttattacctgaatatgtaygtatttttaaatattaagatttaggtttgcttatttgtttgggctttacataaatggaattatttaacaataatttttaaagcttgtgtattgcagaaaggggagagaaaggatattaggtgggcaactagtaatctccactacatcagcagaacccagagttaaggttctttcaacca

SEQ ID NO: 507211 - DNA, 556 bp, Homo sapiens
ctgtagttccagccattatttgaaaattgcacagtcaaggagaacagaggagcagagcatactggttacacctccaagaagaataaaacctttcaaaacagatttcctggaaggcacagtcagttacttctgctcacatcttattggccaccctgttttaaaggaagaagggatatcacatgccatcaagaaaaagttatgagaaccaccactcaagttaacagatagaaagaacatttccagcattccagaggccgcttccttcccttcctaagtcaccacctctctccgcacctccaccaaggtaactatcaacttaactcttactggaattacacctttacttttctttagagttttattacctgaatatgtatgtatttttaaatattaagatttaggtttgctyatttgtttgggctttacataaatggaattatttaacaataatttttaaagcttgtgtattgcagaaaggggagagaaaggatattaggtgggcaactagtaatctccactacatcagcagaacccagagttaaggttctttcaacca

SEQ ID NO: 507212 - DNA, 557 bp, Homo sapiens
tgggcaccccgttgtgctgctccaggactggccccgtgtcctggccttggggttgagtctcggggttggctgcatgcgttggtgtgatttcagggcatacacacggaacgtgctgcccaggtgctgggcccagggaagccacgtgtctcagccctgaagagttgtcctggcgttgtgcacaacctggctggtggcttggagagcaaacagtacccccgaccccacgggtgtctgcgggcactaggccccacgtgcgggttctctggagtctcccaagctgagcatcaccggacccagacccgtcacagccatgytgagcttacccgtgagtgaccttcccgaggaaggcatggggctttctggggcaggaagcaggggaagaggctctcaaaacagcaggagatgggagcgcgctgtcccgcaactgttgtccgcctccctctgccatccaggtgcccgccaccaggtcccctctgacaggctcctgatgcttcccgggccgggtagaccaggggtgcccagcagcttggccagatcagcctgccgtttttcctcaa

SEQ ID NO: 507213 - DNA, 588 bp, Homo sapiens
cttttggcccatctgaactccaggaggggagacatacagataaaagagtgaggtgcttttatagtgttcctctgaggctccctggtaacatgccatccattgaaaattggcctctttgcctgggggagcccctaggatgagttgatacctaagtcaccactggscatgctgaattaaaggcatgccttgctgtaaagaggaacggaagctcagggcaccaagcagaaggggcacattaggagagcctagcagaaatgtatttttgaatttgtgtgccctgttgggctcatttggattgatttcctccactctaccttctatcctatgcctaagttgatcatggagcaaaatgttcctgtttgttcttccttctagagttacgaatggtaaaaaggcaataactgatgtttactgagcacttcttatgtgctctaagctctcttcatgcgttctctttccccccttccaaatcctctccatcatagctgttattgccacttaaagatgaaggaagagccttgagaggtttagtaacattcccaggctgagtggttaagtaactgggggaagctggaatttgatctctgc

SEQ ID NO: 507214 - DNA, 588 bp, Homo sapiens
cttttggcccatctgaactccaggaggggagacatacagataaaagagtgaggtgcttttatagtgttcctctgaggctccctggtaacatgccatccattgaaaattggcctctttgcctgggggagcccctaggatgagttgatacctaagtcaccactggccatgctgaattaaaggcatgccttgctgtaaagaggaacggaagctcagggcaccaagcagaaggggcacattaggagagcctagcagaaatgtatttttgaatttgtgtgccctgttgggctcatttggattgatttcctccactctaccttctatcctatgcctaagttgatcatggagcaaaatgttcctgtttgttcttccttctagagttacgaatggtaaaaaggcaataactgatgtttactgagcacttcttatgtgctctaagctctcttcatgcrttctctttccccccttccaaatcctctccatcatagctgttattgccacttaaagatgaaggaagagccttgagaggtttagtaacattcccaggctgagtggttaagtaactgggggaagctggaatttgatctctgc

SEQ ID NO: 507215 - DNA, 588 bp, Homo sapiens
cttttggcccatctgaactccaggaggggagacatacagataaaagagtgaggtgcttttatagtgttcctctgaggctccctggtaacatgccatccattgaaaattggcctctttgcctgggggagcccctaggatgagttgatacctaagtcaccactggccatgctgaattaaaggcatgccttgctgtaaagaggaacggaagctcagggcaccaagcagaaggggcacattaggagagcctagcagaaatgtatttttgaatttgtgtgccctgttgggctcatttggattgatttcctccactctaccttctatcctatgcctaagttgatcatggagcaaaatgttcctgtttgttcttccttctagagttacgaatggtaaaaaggcaataactgatgtttactgagcacttcttatgtgctctaagctctcttcatgcgttctctttccccccttccaaatcctctccatcatagctgttaytgccacttaaagatgaaggaagagccttgagaggtttagtaacattcccaggctgagtggttaagtaactgggggaagctggaatttgatctctgc

SEQ ID NO: 507216 - DNA, 606 bp, Homo sapiens
tttttaaaaattaaatctaaaatgcaaacaaagctgaaatgattgactatggggtacagacaatgtaaggtgatcagggagagaagaacaataagaaataattaattgtaataattgaggttaacagacagttctgaaagatacacaaaagcatttgttgagtgttgtctatttggaaggccgttttacacatgctcttttctaacttttacaaaattaggaataaattatcctcattgtaatagagcctcagagaaattcaataacttgtctaaacttatgatgtacatgatagtcaggattttaaccctcatctgccctatgtccaaagcctataagaataagaaattggagtcagaaagagaaattttattatttgcggtactggaagtagagcctcactcagtgctgctgagtgttcagttgtgactacatcattaatatccaacatgaaattaagcataaaaaacactgaaatctcytgaagaaaacatgttattcattactaagaacataacattagtcctttttctaatttgagttagaacacagattttacatatgtcccccaaattaagctagaaaatagcttatgaaacatgacag

SEQ ID NO: 507217 - DNA, 614 bp, Homo sapiens
ctcatcccatcccacagcgccccacyccaccacgcgccatttgccaagaccagcggacaactctagaacatgtgatgatgctcgctctagtatctctatgagaaccatgctttccactgtgaactgcggcttcttgctcaggaggacagccctgatcagaaggaagacctgagcttcaaagagtctttctgcacatctgggagcagaacaagggaagagccaagcacatccacctaaagaaggcagagaagacagcaggaggccgggggccctggcagaaggaggggaggctgtggactgctgggactgaaagggccactggagattccccaaggccactgccaaagcacatttccagagcagccatccctggagctgctcccttggctgtcacatcaacaccatggccaccacccgggcaggagtaagcacactcaccagaaagccagcagcctcctctgcactcacccatgtggggcatgcagagggggagcacagggaggagggaagagtgaaagacacaggccccattccctctgcaacaaaacttccttgaagtccacgacgtcccagggagacatgggatcctccccaggtggggtgggatcccagct

SEQ ID NO: 507218 - DNA, 587 bp, Homo sapiens
tcattagaaaaatgtacagattatttaataaacagctagatcactggcctcatttgaccacacagcataagtaaacaacttgccccaggtcatccagtgcacataccagtcaggctggtgccaattttgtgctttgtctgctgtactatacrccataagtgccaccaccctcacccaaagataatgagccttgccagccagaggggagaaaaatcatttgaaatgatttttacagtaatttattgaggtgaaattcacatgaaataaaactaacaatttttgccattcagtggcagggagtacagtcacaaagctgcacagccaccccctctacctggttctaaaacattcccattgctgcacagcaaaaccccttatgcattaagcagtttttccctattcctcaacccccacagaccctggcaaaccccaatctgcattctgataggatttttctttttaaaggaaacattttaacttttataaaataattttggaagtgactcatactttgtttcaacctctggagaggcaaatattctgccatggtccaaaagtgatgggatttctgggtgaccttttctggg

SEQ ID NO: 507219 - DNA, 587 bp, Homo sapiens
tcattagaaaaatgtacagattatttaataaacagctagatcactggcctcatttgaccacacagcataagtaaacaacttgccccaggtcatccagtgcacataccagtcaggctggtgccaattttgtgctttgtctgctgtactatacaccataagtgccaccaccctcacccaaagataatgagccttgccagccagaggggagaaaaatcatttgaaatgatttttacagtaatttattgaggtgaaattcacatgaaataaaactaacaatttttgccattcagtggcagggagtacagtcacaaagctgcacagccaccccctctacctggttctaaaacattcccattgctgcacagcaaaaccccttatgcattaagcagtttttccctattcctcaacccccacagaccctggcaaaccccaatctgcattctgrtaggatttttctttttaaaggaaacattttaacttttataaaataattttggaagtgactcatactttgtttcaacctctggagaggcaaatattctgccatggtccaaaagtgatgggatttctgggtgaccttttctggg

SEQ ID NO: 507220 - DNA, 595 bp, Homo sapiens
ggtgaggcacccccacaaggtgccagagaccacctggtccaaccatcacttcccacacaaacaaaccaagatgcaggtgtttagttaggcatcaactagcttgggttagtatccgttgcctccggcagctcttcctttcctggtctgaggggctccagtgagggctccaaacagcccagagtcttattgcttgtatttgaaaacaaatgcacaaagccgcgggaagggcaaagccctcccagcactggctgtgcctagtccctgcaatctgacctcactgctccaatgccattagctccagaacaactcctcttctccagcagcaaggacttcaggactcccgggcagacccacgcrgggcagcacccctgcagatccaagcctcatgcactctcttccacacctgggcccctgaggctcctccacggactgctgcatttcctatttcttccaagacaaaatggacccattcacctttttccctcatgtccctctctcccttctcctccctggtcccactaaaagtgtgagcttccaacgcttcctgggtttgaaaagtttcacatgatatcagtacacagagacagttcatttt

SEQ ID NO: 507221 - DNA, 522 bp, Homo sapiens
ccgcccaagcagctcatttgtcagcgtttaaacatcattacaacgttaacggcctctctgatgccaaagagttggctttgcacgcctataaattagagtacatcaaaccagagtttattgagtcttggccaatcagaagtaaaacttccataactttttacaattctctacattcttccaattatattaaaatatttatttgcaccctgcatgatatatataaacgttttattaagaacatttgaaacctggttctttaaacagaaaaaagatccactccatgctggcagaggtccggccagtaygtgctgtgtccagttggtttcatggagggaaacagctctgattggattttcgagggattagcaagaaggagtggcagagcacgaagccggctcccaattcatggctgcgcctcccttagcaaatcccctgcatttggtcgtgacaccaatgaggagcaggtccctgttttgtctctgcctgggctggcctgtctggaacagtcttctagggtcacag

SEQ ID NO: 507222 - DNA, 618 bp, Homo sapiens
agcgcgcctccttttcatgttcgaaaggattcacatggacggctcacggggctcggagaatcgggcttgttctgcggctgctgcacttgggcagagagcaggcagtcccaggcagagattttcacggactgatttcactccaagtgggaaacgtgttgtcamagcaggaatgctgccgtggagtgtcttggacccgcatgtgactgggactcggcctgccagtgcacagagcctcgtggtgtggtcatccgccccagcgcacccccagcagctcccatctcccagaggctgccgcacttccacctggacaccccgcgctggccctgccgcctgaccactccagggctggccccaccagcctgctcgtcttggcggggagaccctcgtggcttttcagtcattgtgcaaagcagcttcttgctgttgctgtttgtagtttctggttggaagaatgtaaatgccatggggcagaggacagccgggctgacagtgcagtggcaggaaatgaggaactttgctgagctgaacaagggaacctggagggtagacccagcaactacggaaaccgctttcccccaaatagaccaacctgaccgaaaaatcagctaccaactacat

SEQ ID NO: 507223 - DNA, 417 bp, Homo sapiens
agctggttccaggtggacagatcagccctgggaccttcagtgcctgtggaacaacaggaaacccaggcgcagcaccccccgagacgcagcaccccccagatgcagcaccccccagatacagcaccgcccaagatgcagcaccccccaggcacagcacccccyaggcacagcatcccccgagatgcagcactcccaaatgcagcgccccctgagacacagcaccccccaggcacagcaccccccgagatacagcaccccccagatgcagcaccccccagacgcagcacccccgggccatgaagctgctgccctgcatctgctgaatcaagaatgacaggaggcacaacatcagccggcttctgctgaaagcagagcctaagacgcagagctttccaggccgccctctgttgggggctg

SEQ ID NO: 507224 - DNA, 617 bp, Homo sapiens
gggcagcccccgatccctggcacttctgggcatagaggacgccttggctgcttcaggggttggcctcagctactcttccggccgtactgggagcgaggcaggcttggggggggsgctggctcaggagccctgcctgatgttctgtgatcatcttggggacagtcccctcaaccaggttggtggccaccctgtctgggtgttgggtgccaggcactcgactccactgggcagcagaggggacagagcttctaggtccagactgccgcgcacagatgaggcaggtagaatggcggccccgagagtgatgtgtatccagaaggtgagaatgggaccccatggacaaaagggtctgcacagataaaattaaggatcttaagataatcttggatgaagatgagccctgaatccaacagcaaatgtccttgtaagagacagaagaggacagacacagacatgagaaggcaatgtgaagacaatgccgggtatgggaaagatggggccacagccaggagtgctgacagcccccaggagccagaagaggcaagcaggaccctccccaggagggcgcaccctgtccacaggtgtgctctcacctgcaaacctgcagtcatccccag

SEQ ID NO: 507225 - DNA, 298 bp, Homo sapiens
ctggctgtatccgcctgccctctgcctggtcattcctgccacctgtttcagtcatggtaaactaagtgctkccaaagcaaagcccctcccagatggcactcatgttcctgccaggcaccttgtctggaggggcccgcatgccaccacctgctcaggggtgtgcagtcccaggtcctggtgactgttcttccccgttcttctcagagctgcctccccctcctcttcggctgtggcccccctcccattttggggtacagcagcctctgcactagctgctgcctgcagccccccaactggc

SEQ ID NO: 507226 - DNA, 577 bp, Homo sapiens
cgtgtcggctcttggagaaaactctgtaaaccagccgggtctacccacaaatggaggattctggggtattgggtgcccaggctagwcccgctggcatctgaaactaaggtcatgctggtaatgatggagccacctgaagaatatcgaggcagtaaatgaggttaaccagacagagggaatgaggaaggagaaagagcttagggtccctctgagccgagggtctcatccactgaggaggagaacacacggagggcaggaggaggtggtgatgtggccttcgcgggagctgcaggtgtctctgtgacagccgactccccagtgctggagagcacgattctgaagccgttagattcaaaggattcggccagggtgttttttactgtaggtttttctcgtgagtagtctggactgagatatgttatttgcattttacttaactatatttactgctggctgggaggtgaaaattcaatgcacatgaatctgaggtgatgtaattagaagcaacaacatgggaccagttgagttcctgggccagtggcccccagataagaagcgacaccctgcaggcacaagg

SEQ ID NO: 507227 - DNA, 686 bp, Homo sapiens
taaaaaaaaaactcgaagtagtataaagtgtccaactatgaaatatataaatagctttagttacttcatcagaaagagttgtggcaaaaaaaaaaaaaattcttctgccgtgaaggttttaagtgaaagttcaagtgggggaaagacaagagggactaccagaacagaatctctcctttytctacctagagatggaaaatagtcaaagccagcagcagaagattcctgtgaacacttccctgacttctgtatctcctacctctatcaccaaagcaaaattaatcacatactccctgtttatccacatcatttactgaactgaatacaataccaaaagataagtctgcaatcataagtttaaaataaaaactataaatcaatctcaaggagtttttcaccttggaaaagagaaaacattatgaaagcagtctcaagattagaaggatcctgaaatttaataaacataaaacatttttacacatatatacctggggaaaaaaagattaaaattatattcaccaaaatgttaacaatggttacagctgggcagaagaattacgtgtaattttttattctcttttctgtgcttttctaaattttccaaattgtccacaaacaaaattagaagaaaataaaaatatacacttaaagaaagggatgggagagtatggggagaaacaaatcta

SEQ ID NO: 507228 - DNA, 686 bp, Homo sapiens
taaaaaaaaaactcgaagtagtataaagtgtccaactatgaaatatataaatagctttagttacttcatcagaaagagttgtggcaaaaaaaaaaaaaattcttctgccgtgaaggttttaagtgaaagttcaagtgggggaaagacaagagggactaccagaacagaatctctcctttctytacctagagatggaaaatagtcaaagccagcagcagaagattcctgtgaacacttccctgacttctgtatctcctacctctatcaccaaagcaaaattaatcacatactccctgtttatccacatcatttactgaactgaatacaataccaaaagataagtctgcaatcataagtttaaaataaaaactataaatcaatctcaaggagtttttcaccttggaaaagagaaaacattatgaaagcagtctcaagattagaaggatcctgaaatttaataaacataaaacatttttacacatatatacctggggaaaaaaagattaaaattatattcaccaaaatgttaacaatggttacagctgggcagaagaattacgtgtaattttttattctcttttctgtgcttttctaaattttccaaattgtccacaaacaaaattagaagaaaataaaaatatacacttaaagaaagggatgggagagtatggggagaaacaaatcta

SEQ ID NO: 507229 - DNA, 634 bp, Homo sapiens
caaatcatgatctagtctccaagtctgtaacagattaaatgttataatttagtgatgctacaggcaggcacattgaaagccctaagaaatgtcatrtgggaatctcatagagaagaaaggcagtctgtgcatatcatcctgaatgtgcctgatgttgtctgatctcagaggctaagcagggttgggcctggctagtacttagatgggagaggaaaggcagacaaaatattaaatgctgactatacaatttaaaaggtattatgatgtagggctgtatgatactgggcataatgatgctctagtgatcatcaacctttacaaaaagaatcactattttcattgtacagtgtcagaagacagggaagtaagtagtcattgaggatatattcctatccaaaatggttaaattttgaaatattgttcatacaattaaaaaagataagcgtatgatacagttatctggaaagttaatttgtgtgggagctcttctccaaggtcagtggaattgtatatttattatcacatttgtgacatgaatgggaattgctttattagttattaaaaactcaacaaattagctattgtgtgaattattactgggaggcagctgttgactttgttgtgaaatatgtca

SEQ ID NO: 507230 - DNA, 634 bp, Homo sapiens
caaatcatgatctagtctccaagtctgtaacagattaaatgttataatttagtgatgctacaggcaggcacattgaaagccctaagaaatgtcatatgggaatctcatagagaagaaaggcagtctgtgcatatcatcctgaatgtgcctgatsttgtctgatctcagaggctaagcagggttgggcctggctagtacttagatgggagaggaaaggcagacaaaatattaaatgctgactatacaatttaaaaggtattatgatgtagggctgtatgatactgggcataatgatgctctagtgatcatcaacctttacaaaaagaatcactattttcattgtacagtgtcagaagacagggaagtaagtagtcattgaggatatattcctatccaaaatggttaaattttgaaatattgttcatacaattaaaaaagataagcgtatgatacagttatctggaaagttaatttgtgtgggagctcttctccaaggtcagtggaattgtatatttattatcacatttgtgacatgaatgggaattgctttattagttattaaaaactcaacaaattagctattgtgtgaattattactgggaggcagctgttgactttgttgtgaaatatgtca

SEQ ID NO: 507231 - DNA, 634 bp, Homo sapiens
caaatcatgatctagtctccaagtctgtaacagattaaatgttataatttagtgatgctacaggcaggcacattgaaagccctaagaaatgtcatatgggaatctcatagagaagaaaggcagtctgtgcatatcatcctgaatgtgcctgatgttgtctgatctcagaggctaagcagggttgggcctggctagtacttagatgggagaggaaaggcagacaaaatattaaatgctgactatacaatttaaaaggtattatgatgtagggctgtatgatactgggcataatgatgctctagtgatcatcaacctttacaaaaagaatcactattttcattgtacagtgtcagaagacagggaagtaagtagtcattgaggatatattcctatccaaaatggttaaattttgaaatattgttcatacaattaaaaaagataagcgtatgatacagttatctggaaagttaatttgtgtgggagctcttctccaaggtcagtggaattgtatrtttattatcacatttgtgacatgaatgggaattgctttattagttattaaaaactcaacaaattagctattgtgtgaattattactgggaggcagctgttgactttgttgtgaaatatgtca

SEQ ID NO: 507232 - DNA, 640 bp, Homo sapiens
gaaaaacttggaagaccaacactgttccatacataaacattatctgcccttagacagaatgtgaaaattggtgctcaggtgaaactcttgcccaaggcacctggctggtgaggcayaaagcaaggaaatagaattttatgttttttttttttcatgtattcaaatcttactgcacagagcttggaactgtaggagcaatccatgtccttctctggttgctggacttatttgagataaaggaaaaactcacagatatatttggagagaaaacatagccatatgttctgatctagtaacaagatgatgactaggaattagactttcaaaggagagtgtgttacaaggaaaacttcctttcatgggcttctgcttttattgagaattacatgtgctctattacacaggtctcactctgagagctctagggattacagtgattacccaacatgatcaataaactggccaataactcatccggggtggctggagtgcaacacactttgcattttgtgattgaaatttccttcaaactgtcacttgtaactttggttttattccaaatctagtaacccatgaaagtacaatgatcttggggatttattggctgcattgtggctgatgaaaacagaatctctgacag

SEQ ID NO: 507233 - DNA, 659 bp, Homo sapiens
ctgcttgctcagtggtatgggcaggaaaagtgagctggagcaaggggtacacatttgaggcagccttatagtcctaatggtccagtggtttagtaggaaaataaggtgaaagaaggatggtgtctatgtcacaggaagccaagccaagaaataagcaacgggcccaggggagactcaagtatgagagggcaagagggaacattcttggtgcagcaggcagagctctctgctcacacgatcagggcctctgctggcaacacgtttacactcatagaacctgacctttatccaaacatttcctctgcatgcaagaaaacagacatgtagagaagtaagtccacttgcccacagttacaaaaaaaaatctgtgacaaagccagaataactgtaacaatgtcacaatttcttttagaatttgacagaaggattcttaatttcaccattagaaagaaaatactctgtagtaaatacctatgccatccaagacaaattatttgtttccttaagtcttggtctccgttttggcaaaatagaaataactatrtttaaacaaaaggcatgtgaaaagagacaaagtacctaaaggccctgtgtggatcatccttattatttatttgctccagccatattgggcttttccatcttcttgcacacaatgt

SEQ ID NO: 507234 - DNA, 577 bp, Homo sapiens
  misc_feature (1)...(577): n = A,T,C or G
agtaaagttctcattccacacctggaattggtaatgcattgtctcaggacacacttggaggacgtctggagcagaaggaaaagaacctccccatcctagcacggattagagtttcctgaattggggtcctcaagagaaccccaagctgctccaataataagcttccctgtttgccgcaaactccatctgaatggctaccctgtggaaagcagtcctgattgtgctttggatgctggcgtggcttgatcttgcctatccctgtctttctggctctccatttcttctccatgttcagcgggaattcctagacctgagttctagctctcatgtttctcccagcactgtcctagcatagtctacaagaatttctctgtggtcctcgttagcactattttcctaatatttctggttctcccccacttacaggyacataataggaccccactatcatggtttcttgaggttaggtatgaccaggtgatttgccgtggactacggaatataaacagaaactttaagagccagtgtgtgacttacttctttacttgcctcagtgggaagcatatgttnnnnnnnn

SEQ ID NO: 507235 - DNA, 577 bp, Homo sapiens
  misc_feature (1)...(577): n = A,T,C or G
agtaaagttctcattccacacctggaattggtaatgcattgtctcaggacacacttggaggacgtctggagcagaaggaaaagaacctccccatcctagcacggattagagtttcctgaattggggtcctcaagagaaccccaagctgctccaataataagcttccctgtttgccgcaaactccatctgaatggctaccctgtggaaagcagtcctgattgtgctttggatgctggcgtggcttgatcttgcctatccctgtctttctggctctccatttcttctccatgttcagcgggaattcctagacctgagttctagctctcatgtttctcccagcactgtcctagcatagtctacaagaatttctctgtggtcctcgttagcactattttcctaatatttctggttctcccccacttacaggtacataataggrccccactatcatggtttcttgaggttaggtatgaccaggtgatttgccgtggactacggaatataaacagaaactttaagagccagtgtgtgacttacttctttacttgcctcagtgggaagcatatgttnnnnnnnn

SEQ ID NO: 507236 - DNA, 356 bp, Homo sapiens
cgcgagcgccgcacgccgccctggttccccctcgcgcctttccctccacacctccctgcaagctgagggagccggctctggccttggccagcccagaaaggggctcccacagtgcaacggtgggctgaagggttcctcaagtgccgccaaagtgggagcccaggcagaggaggtgccgagagcaagcgaaggctctgaggactgccagcactctgtcacctctcattataacttaattttcatgagaaattaataaatatggctcaataactgccattaatacgtttggrgaaaatgatgaaatgccaagaaaagaaaaacgtatccaatttttcttttcaaaactttctctgagt

SEQ ID NO: 507237 - DNA, 632 bp, Homo sapiens
ctgcagtttaggtacttctaagactattttaggatagcttacttagttttagcatagtttaaattcaagtagcccttatttatcagcgtaataatcaatataaattaatataattatctcccatacaagatctagacaagtgaaaattaaactcctgttatatattttaagggggctaagggaccttgaacaaaattattgcaagtatcctttaaagctattttctattttaattgaaaactagaatgtggtaatatacattgagggtatgcatcttatttttgttcaatataatgaaatagaataaacgttttgaaaaatttgtcctaacttctttgcttgatagtctcattaggttattttaaaaccctcctcagattggctacagcttactcttgtaaacttattttctgttattcctttatttgcccggccaagctcatttattygctccacataaatgctttagaaactttcaactctgcatgtaaacatccccatctcatagatttccccctctccttctttactttatacagatccttcctgtcttcaaatcccagctcaaatccttgctccttgaaaccatcttaaacacccagctctgccaggtgcagtggctcactcctgta

SEQ ID NO: 507238 - DNA, 632 bp, Homo sapiens
ctgcagtttaggtacttctaagactattttaggatagcttacttagttttagcatagtttaaattcaagtagcccttatttatcagcgtaataatcaatataaattaatataattatctcccatacaagatctagacaagtgaaaattaaactcctgttatatattttaagggggctaagggaccttgaacaaaattattgcaagtatcctttaaagctattttctattttaattgaaaactagaatgtggtaatatacattgagggtatgcatcttatttttgttcaatataatgaaatagaataaacgttttgaaaaatttgtcctaacttctttgcttgatagtctcattaggttattttaaaaccctcctcagattggctacagcttactcttgtaaacttattttctgttattcctttatttgcccggccaagctcatttattcgctccacataaatgctttagaaactttcaactctgcatgtaaacatcsccatctcatagatttccccctctccttctttactttatacagatccttcctgtcttcaaatcccagctcaaatccttgctccttgaaaccatcttaaacacccagctctgccaggtgcagtggctcactcctgta

SEQ ID NO: 507239 - DNA, 569 bp, Homo sapiens
aaattccagaaacaaacttatctaagtaaatccgggggattctgcctcaataggaccacgaaagggtacatctgagtcaaacagcctgccctccattcggaaaacacactccattgtaacagtggtcccacaggccactccctgatcaccactccagggatgwtgaaagagcatctttcatcagcgttgcacagagggtcggttttgcccagcaggcagagacctgctcatcctgccaccagagccttccgaaggagttgcctctggcttggtgttaatccttcttgtagcccaacctgaactccagggtcatcagccaccaactcgaaaacccaaggccccgttcgctgaatgtagcccttgcctggatcccaagaaaatgccaagggacccgaggacactcaccaggcctccgcataagctgacgacggccttgtaatcctcctgtgagttgacctggccgcggtagaagcagtggcgcaggtccgagggccctgcgtcgctctcccaggccccgcgctccggggttcccaagtgcacctcggtgtagccggcggccagaaaggatg

SEQ ID NO: 507240 - DNA, 505 bp, Homo sapiens
ctgcccggcccgcggggcgcgccctgacccttcatctttgggcaggctcgagggcgcgcgcacggttggcgttctggggcctcaaactcctgggccttgaccgggcaggccgcgtctccccgggtgtgagtccaccgggacccggccgccgcctaagcgcgggcgccacagaagcggcggcgcccgaagacgcgctcctggctcggcccgacagcctcgcttggccgccagttcttctgcagccgaaggcggtaaggtctggggcgagggcgcgggcccgcgcgcggagggcctttggacccggccgggcgcgttcctgggtaggtttccctcyctgcgcacaggggcccccttgttcccccacgagtcccatctgtttagacctgggttctccaggcctggccgggtaacccgtgagtgtctgggccagagtcgaaagcagaggagggtcaccctcttagtgcatagagcaaatcgggggaggtaacgtccctgagtcacgcct

SEQ ID NO: 507241 - DNA, 505 bp, Homo sapiens
ctgcccggcccgcggggcgcgccctgacccttcatctttgggcaggctcgagggcgcgcgcacggttggcgttctggggcctcaaactcctgggccttgaccgggcaggccgcgtctccccgggtgtgagtccaccgggacccggccgccgcctaagcgcgggcgccacagaagcggcggcgcccgaagacgcgctcctggctcggcccgacagcctcgcttggccgccagttcttctgcagccgaaggcggtaaggtctggggcgagggcgcgggcccgcgcgcggagggcctttggacccggccgggcgcgttcctgggtaggtttccctccytgcgcacaggggcccccttgttcccccacgagtcccatctgtttagacctgggttctccaggcctggccgggtaacccgtgagtgtctgggccagagtcgaaagcagaggagggtcaccctcttagtgcatagagcaaatcgggggaggtaacgtccctgagtcacgcct

SEQ ID NO: 507242 - DNA, 610 bp, Homo sapiens
ctggattttaaacatggtttaaatgaataaatttggatttctgaaaagtgacttaataaactgaaatactcagttggattcttgagtaggaatacagtatagctcaaaatattagagacggtcttacttgtcctgaaataaactgatcttatcaatagaaattcaacctgaatgtgagtctggttattaggaaaatagtatctctcatggaaaggaaaatagcaatttggaaatgaaacatgagaggtaattagtcaaaggataagaaagagtatctgttgccgcagggaatgaaaactaagtaaagtgaatctcatatttcagtgtgtgaaaatacatatgatcatatattttmttaccaagacttgaagggataggataccagattagaatagaataatggaaatatatgccttattcaatataaataggccagttgtgagttaggatagtgtggatgtgagctgcttagaacttggtgtacttgtaaagtggaaatggcctgaagaataatatttgggtgataaaggagatgaacggagtgtctttgtaggacatgatagctttcctcctgtactctaaaggctactgagtgaaagaggaattattt

SEQ ID NO: 507243 - DNA, 578 bp, Homo sapiens
tcagtgacttcagaggctacacactgtggagaaaacagactgcattggaacagtcagccaagccactaaacaaataaacaaacaagtccagggtaggggaaggagaatcaatactgaacattgcattrtattttctaaaatgtccaattcacagccatacacaggcaaagaaaatggcaagagaaaggacccaaatattgtacttatcagccaaagactgcaaaggagatattataaataaaaactaaacaaagtcacacttaaataattaaacaaaggtatgatggcattgtcttattaagtagagaatgtcaataaagagctagatgttatagaagaagaattaatgaaaagtccagggttgaaagtacaataattagagtgaaaatattaaacagagggtttaaaagtgggttggaacattttgactctgattgatctaggtgtggatctcttcatttttattctattttgagttctttgggctttctggatgtgtagattaattaagagagaaaatcttgtaagtagcaaaagagcagacttatcatgtacaggggatcccaaaagattaacag

SEQ ID NO: 507244 - DNA, 578 bp, Homo sapiens
tcagtgacttcagaggctacacactgtggagaaaacagactgcattggaacagtcagccaagccactaaacaaataaacaaacaagtccagggtaggggaaggagaatcaatactgaacattgcattgtattttctaaaatgtccaattcacagccatacacaggcaaagaaaatggcaagagaaaggacccaaatattgtacttatcagccaaagactgcaaaggagatattataaataaaaactaaacaaagtcacacttaaataattaaacaaaggtatgatggcattgtcttattaagtagagaatgtcaataaagagctagatgttatagaagaagaattaatgaaaagtccagggttgaaagtacaataattagagtgaaaatattaaacagagggtttaaaagtgggttggaacattttgactctgattgrtctaggtgtggatctcttcatttttattctattttgagttctttgggctttctggatgtgtagattaattaagagagaaaatcttgtaagtagcaaaagagcagacttatcatgtacaggggatcccaaaagattaacag

SEQ ID NO: 507245 - DNA, 606 bp, Homo sapiens
gggcaaccatgtgcctagctacagtctgctattatgaaaggagaagacagatgttggggaacacacagcagtctctctcacaagggggtataaagagagaagatcgaggaggggagccaggcacggtggctcaggcctgtaacaatcctcccagcttgcagccaggagttagagactgtagtgagctatgatggcactactgccctccagcctggacaacagagcaagaccctatctctaaaaaacagaggagggaattagagagtgagaacagaggtgagaatggagaagaagagttaattataagtagaagaaaaaactccagttgctgaggcaaagccctggggttggattccaatcagtgccaacagcatcatagcagttgctgagttgttattmtggggtttaggaagaggatgtctgtgactacagtaagaaaggggggcctattccatctcccgggccttaccagcctccacttcaggctcatcttgtttctgtcatgattttgtgcttccgactcttaaaattgttctgcattttgttcccttttatttgcccactgtctttaaacaactcgaccagacaacttgaacaaaagctatg

SEQ ID NO: 507246 - DNA, 562 bp, Homo sapiens
gatatgactcagaattaatattctttatatacataataaactttaaaaattagtaagaacytggctgggtgcggtggctcacacctgtaatcccagcactttgggaggccgaggtgggcagatcacctgaggtcaggagtttgagaccagcctggcctacatggtgaaaccccaactctactgaaaatacaaaaattagctgggcatggtggtgtgtgcctgtagttccagctacttgggaggctgaggcaggagattctcttgaacccgggaggcagaggttgcaatgagctgagatcgccccactgcactgcagcctgggtgacagagcgagactgtctcaaaaaaaaaaaaaaaaaaagaagagcctaactaatacacacatggaaaagggggtaaagaatacgaatttacaagagaaaaatacaagtgacagataaacttaggaaagaaaaaccctctttgccagttttttgaagttgtaaattaaaccaatgtattcacctatcaaattggttccactttttataaaggtagtagcttttgatgctggtgagagggt

SEQ ID NO: 507247 - DNA, 574 bp, Homo sapiens
tttgttgaccacgcatgaaggcattagagagattcaagccttgtacaaattacctctcaggtctctaactttgaaatcctctgcatctaccttcaaaagtattttcagccgggcacagtggctcatgcctctaatcccagcactctgggaggccgaagcaagcagatttctttgagctcaggagttcaagaccagcctgggcaacatggcgaaaccccatctctacaaaaaacaaacaaaaatacaaaaaggattttttttttttaccattaatgtgttggttattattaaacacctctgaaagtgttgtctaattgaagtagacawtgaaatttccatgtaaaaatgaaagcatccaacttggaatatgtagataaatcaacaacttgtaggaagaaggaaaccgaatttggtgccagaaaccagggtttaagtcctggctcttacagaagcaggttcaatttccctatctgtaaaattatgaactcagcctacttcacacagttgcattgtagtatgaacttaaagctcatgatacagaaacatttatagaatcccgagtcctaaataaatg

SEQ ID NO: 507248 - DNA, 605 bp, Homo sapiens
ggtttgtggtttgactgctgtagtgggatgttatgaataatcctttctatttatgttctgtgcatctactatagattgttttctggttatcatgatctttataaagaaagacattcacattgtcatattccaaaggcttacagctaactcggtaagggtgtgagattcataactgagaaaagaaaaacaaaaattgtcaaagaaaacaagaagtttcaaggatgcatttaagcagagtgagttacacctcttgagtaggagccaagtttttaaggtaattaagggtaggttctttgtttagaagatgtatgttaaaattaagagctacaatctggaatccttacagcatctgatatttgcaaagcgtgtgtgtgtgcgtgtgtgtgcatgcgtgtgtgtgtaaattgcacaaatagcatcctacatttggcacattactttttattttcagactatcctttgggatagatgaagggttcctctgagtcatattttataaatttcttggctgcccaaaaatttcaagaggaaatttcactgttggtcaragatcctaggatggaaactcactagcctgctgacactggtgaggcatgcccaccaga

SEQ ID NO: 507249 - DNA, 620 bp, Homo sapiens
attactgcatcttgagatgaaaaatacaattttccttattattaatagaggagatttgtgaaggattaagatcacagtgacaggaggtttgaagcaatgagacatcactatcaatacctgtaggacactagtgctcataaataaatcccatggtgtcctcaatttcaattgaatgctcctgtccaatctttgaaaacattagttatcaaaaatatacttttcggaatgtaataaccaatgagaagaaaaaaacttccaagaaacatgaacaatttttatcactctttaatatctgaaaatgttcttctgattgtttttctatgctaaaattcctaacactaaaattcttaatgatctcccatagtggctgctgtcagaacacctaactaaatacttttcatasttatattgaggtatgagtgggaagaaaaactcaggaaataatcatttattaagtatctactctaataatattaacactagttaatgtttattgaatgcttgcaatgtgctgggcacttcaaatagaaaactttatttaatattcataataaacttattattttgtaatttgaatactgagattaagtaacctctcaaaggttacaaaattcgagatt

SEQ ID NO: 507250 - DNA, 631 bp, Homo sapiens
ttgctttcctggagcaatatgatgtctgacattattcacctatactctttgctcagccctcttgtaacaaacaccatagacttgctatattttttgctttattttaggtgttccatttatgatttatctagacctataaagataatatcttagagcatcagtgggttacaaaatgtattttggctgtggaattctgctttcaaataaaatctttcttggaggcacaacatgtaaagcttataaatttgagstacaattccagatgagatgcaattcttcttcttctttcctctccttcataggaatccccagagagtgctgtgtccagaagactgtgaatcactatttaaaaccctgcatagattaatgcctcattgaaaaagattcagggatcgagggactagaatgtgcatccttaagattaagaattgcattattgtcatcatggcaaatattttgagtggttattgtttgtgaaacattatgctgagtgttgtagctgcattatcccagttattccttattactagtgtctgaagataactattgttcttggctatgatttgtaatcctttttacaaaaagaaaactgaagcacaatgtgcttaagtaaattttcctgtatttagca

SEQ ID NO: 507251 - DNA, 631 bp, Homo sapiens
ttgctttcctggagcaatatgatgtctgacattattcacctatactctttgctcagccctcttgtaacaaacaccatagacttgctatattttttgctttattttaggtgttccatttatgatttatctagacctataaagataatatcttagagcatcagtgggttacaaaatgtattttggctgtggaattctgctttcaaataaaatctttcttggaggcacaacatgtaaagcttataaatttgagctacaattccagatgagatgcaattcttcttcttctttcctctccttcataggaatccccagagagtgctgtgtccagaagactgtgaatcactatttaaaaccctgcatagattaatgcctcattgaaaaagattcagggatcgagggactagaatgtgcatccttaagattaagaattgcattattgtcatcatggcaaatattttgagtggttattktttgtgaaacattatgctgagtgttgtagctgcattatcccagttattccttattactagtgtctgaagataactattgttcttggctatgatttgtaatcctttttacaaaaagaaaactgaagcacaatgtgcttaagtaaattttcctgtatttagca

SEQ ID NO: 507252 - DNA, 627 bp, Homo sapiens
attccatcaacctgggttttttgtttgttggttggttttttttttgttttgttttttattttgagacggaatctcattctgttacccaagctggagtgcagtggagtgatctcggctcactgcaaccttcacctcttgggttcaagggattcttctgccttagcctcctgagtagctgggattacaggcatgtgccatcgcacccagctaacttttgtatttttagtagagacggtgtttcactatgttggccaggctggactcaaactcctaacctcaagtgatcctcctgcctcggcctcccaaagtgctaggattacaggcgtgagccaccrcacctggcccatcaacctggttttgaactttctgcctgagccttgaacttgacccctctgggttgctaacctggggcatgtgtccccagacttcatgccagtcccttccccagacttcccccaggctacttagctggacccaaccctggcctagtcaggcccccactggctggggagagatagcaggcccagcacatgtggactatgagggttaatcgtaggcatcaacaggactggattgaggagcatctagagaattggtgaagagtggctcctgggtgtgtctgtgcag

SEQ ID NO: 507253 - DNA, 468 bp, Homo sapiens
tggcaaatggtgtatactagattcttttttggatattcaggacaaacagatgaggattgtgagacagcaaatgcattgaagaaatcggttttgccttgatgaagttggtgtttccccaactcatttgaccctggaatcctttgtttgtgtaactctgttagatgggtataaaatgttctttgaaagcactgcactttgatgttctacttaaagccaggaataagacaagaatacttgctatcatgtctagaacttactgctaatgcagtaaggtggcaaaggaagttgatggatggaggtagagcccctggaaaagggaaattaagtggccgggcacggtggctcatgcctgtaatcccagcactttgggaggccaagatgggcagatcacctgaggtcaggattttgagaccagcytggccaacatggtgaaaccccgtctctactaaaaatataaaaaattcgcca

SEQ ID NO: 507254 - DNA, 516 bp, Homo sapiens
cctacctcctgtgccattttgtgggggggtctgcttggctagttaaggtgaccaattaacccataaagcagtattaataaagtatgaagattttttatgtgccccagggtgcattttaacaccttcggtatcttgatactaaaagtgctgcctaaagatagaaacgtagggcattgaaagctaactagtgagagaaatattgaagaacccagtataatgatggtagatgaccatcagctacttggyggggtcctgtgtttagtcttaaacaatagaattggcaatatcaagttgattttccacaagtcttcacatgacatccgcttcacgtcacaaataggaatggtggggctctaggtggtacaccagatagacagacaatagggacatgataatggccccagacctttcagcctatcagtcaggcaatggtgggcatgtcacatggccaaggacaagtcttttctgttggaccagctcaccggggcagcttggtccattgcccctgtcaatcaa

SEQ ID NO: 507255 - DNA, 497 bp, Homo sapiens
aaaagtaacactaaaagctgaaagccaatggaaaaacatctttcatgtactgaaaaaaattaccttcaatgtagaattctgcagctactacaatagtcttccaaagatatgggtaaaggaaaaaataaaaacctgtcaacagcatatttggagaagggccaggttttgtgggttttatatttttttgaatttctgatctgttatagacttgagtttttggtttatatcttgttcaacaagtcaagtaaactgattgtgcacttgaatattgcagcaatgttaaattggtatgcaagttagactcattttctrtacttatggtgagctggtagcagtttgcaaacttacaaccattccatggatcacactttcagtaaaaagttttaaaggatgccctttagacaaaaggaaagctcactcatatgggatgagctgagtgagctgagatacatatgagtgagctgagatacaagaaagaataaagagccaaggaagtg

SEQ ID NO: 507256 - DNA, 495 bp, Homo sapiens
gccagtctttgattttccttccagagccaagctacctaaaataattaccaacacgtggtcccagtttttaacctctttttcattcatcaatgtctcaagtcccacctttccccccaaaactgctctccaagattaccaagtgaccattttgttgctcagctcaatggataaacttcagtcttcattgcattgactattctgtagacgtggatatactttcttttgttgggttggggtttttgtttttgttttgggaaacagctttattgagatacaatttacataccataaattaatccattcaaagtgcccaattcagtatttgttttagtatactmagagttatgcagtcatcaccacagtcaattttagaacattttcatcactcccaaaaaaagcctaaactctttaacattcaccctcattcccttcatacccctccccagccctaagcaattatgaatctactttctgttggtacagttttacctattc

SEQ ID NO: 507257 - DNA, 626 bp, Homo sapiens
attcctgatagttacccatttgtgcaactggaacactatgaagggaatctgcaaaatcacaggaaaagaaattgatgcttatagctgaagcgtatggtcctttcgagaagacatgatcatagtttggtttagcagtgtgtgtcttggcatcaaatagtatttaaagtctcgaatctagcattctaggatctagaatcatctctcttcatcccaatcataacttagtctaccgttactactgcctacaggctcacatcgctaggatcagaacaactcccttgccttcaaaccaggtttgagaatgggctgaccctacaccaccatcccaactcaaatcaccacatatcttctgcatttcaaagagtctagtctctatggcattcacttatcatccagagaatcttggttagtaggtcttaatcactgaraatttgattaaatctgtaggttctcttcctagaaaagccctcttacacacaaaactttgtgtataatttcagggaattgaccagaataagatttgctcattttagtgaacaggtgagcctttttaaaattaacaaaatggagtaaatggaatttgtaaatagtcacaattatcctggataccattaggttgattactt

SEQ ID NO: 507258 - DNA, 540 bp, Homo sapiens
tttaactttgtcagaaggaagaagtaggagaattgatctccagcaggcttccttaaacccgctaatggcttcacctacatttgtattttaacacatctgcccttatctaatatttggattttcatcttagtgttttgtttgtttgtttgttttgtcacttttgggagcagagatcgtttgtttctgagcatcatttgttttctacagaacatatgcctgatttaaccgtaaataacctgctctataaagtaagtttccacttattttctctctctctccctctctctttctcattttagatagagttttctctaccttgcccagactgaacttgaactctggggctyaaggtgatcctccagctcctgaggggctggtgattacaggtgcatgccaccatgctcagctcttatttgtctcattttttcttgggaagtttaactttaagccaccctaaatacgtctccatgatttttacggtcgataaaattgtttccatttttaatcaaattgaaaaaatattttattttaaaatgtttt

SEQ ID NO: 507259 - DNA, 540 bp, Homo sapiens
tttaactttgtcagaaggaagaagtaggagaattgatctccagcaggcttccttaaacccgctaatggcttcacctacatttgtattttaacacatctgcccttatctaatatttggattttcatcttagtgttttgtttgtttgtttgttttgtcacttttgggagcagagatcgtttgtttctgagcatcatttgttttctacagaacatatgcctgatttaaccgtaaataacctgctctataaagtaagtttccacttattttctctctctctccctctctctttctcattttagatagagttttctctaccttgcccagactgaacttgaactctggggctcaaggtgatcctccagctcctgaggggctggtgattacaggtgcatgccaccatgctcagctcttatttgtctcattttttcttgggaagtttaactttaagccaccctaaatacgtctccatgatttttwcggtcgataaaattgtttccatttttaatcaaattgaaaaaatattttattttaaaatgtttt

SEQ ID NO: 507260 - DNA, 394 bp, Homo sapiens
aaaaaaaaaaaaaaaaaaaaaaaaaaaaaaaaaaaaaaaggtctgtgcataatttccaagatatcccctatcacagataagcaaaaaagacctagcattcaaagggctgggcacgctacactgataaaatgatacagtcattatctatgtaaacactctacttgaccttatcaaaggaattttttcccctgagggatttgtctccagaagaaaatccacagttagagtaaaccacaatcagaagaaaaagatctacctctgtaaacaattcctaacaggtaaaacaasaccgttactgaatcactgcacttcttgaaatggcttacgatatcctagcaaaagcactcagcaggattctgtcttggagaaatctgaaaacacaggcatgaaggcc

SEQ ID NO: 507261 - DNA, 488 bp, Homo sapiens
ccgcagcctcaaagctttctttcaagtgtacgtgttgaaccaagagtctcccctgcagcayaacacttgacaatcatctcccagtgtcaggcccattcaaggcaatagcaaagacagttatgactagatggcatcttgtaacgtctcagacactgtgcctgctgcccaggcctccttgccccaccccagcatccagaggctagacacccagacttcacagaccctaaatatcaaccaggccaaaggaagcactgctctggaaggctgtttcatggataaagcaatggcctgtgataggctcaatcctgttgccacatgttgtgcatgagagggccctgggcaacaccttgaagtgcaaatgaagtcaccctaagagtggggatgtggccagaataggacataccccaaacagaagccaaactctcttcaccttgaagacctcatctttaattgaagagacctggttgtattaggaagacactaacact

SEQ ID NO: 507262 - DNA, 610 bp, Homo sapiens
tcgcatgcttggatggaatatgaatagtaaagccggagcaaacatcgaattcccacgttccttccaggtagtctgcaagttgaactgacattctttttataaactatatggccaaaatcattagttgtctcagttaaatgggtgagtggctgtcaaaaagggtctattgtatcctaagatgtcaagatgatgaatgtgattctaagaatagcagcaggtctctgcacacgtaagtcacttttaagcattatctatagttcctgtagctctactgatcaatgcacagaaactaagataaattcatcgttttttgccaattggatctacctttctagccaacttactgcatttgaccagtggaaatgaagctgtggggcaggaattctgaacagtaatttgttaccagtactaagggtggaaccaccgtttctcatgggcawtggtaacattaccaagggttgactccctcatgccctaacaacgacaagtgcacctgaggaaccctcatggtacgaccacagtctactcacattcctaactctaaatggcaccaggtcatttgtgacaggtgtgtgagtgagaatgtgatcacactcctagaaaacaagct

SEQ ID NO: 507263 - DNA, 580 bp, Homo sapiens
ttaaaaaaatggcaattgcttaggctaccaaagcatgacaggaacgactcttgagagcaactcaactatctttgctctaatcctatgctcatggaaaaatttcttatccataatttgaggtcttaagtggacttcctggccagcatagagtgtcctggatagagaagccactctagttctggagccactcagaggtcttactttaaagtgattaattgggatttttgtttgtcactcaacatcctgggagtctggtsagcatgaatcagtccctcagaggctaatcaactccgagtgaaatgaaacggtgaagtgaccagaatcgcaaagcccaaccagctgtgattactccgtcaaagcactgccgctctctgagggcctgccttaaggagcctctctctggacatcttttagaactctaacacaagtggacttagagataatttaattcttattttacagaaaaggagattgagtctgagagtctgagtgacagtgacaactaactacaggtaacagtggaatttgaaaacagttttccttctgtccacttagctaccttgctttcgtcagaaaggca

SEQ ID NO: 507264 - DNA, 659 bp, Homo sapiens
gtattgacttagtaattctaggaatttattctaaggaaacaattcaacataagctcaaaggtttctgcacaaagattttttccttcaatgttatagaaaacagaaaaaaaaaaaaacctcaacaaaaaagaacaaaccaaccaygggagaatagtttaataaattacagcatagcaatattatggaaatgtgttaaattttgtattgagtaaagcctttcatttagcttctgaagaattcccaaaggatgtattttaatcctacttatgatgagagcttgttttcagatatgaatcatcataagtcattgccattttattgtgtactttccttcaacattactatttgttacacaatcaatagaaattcaggaagatacagatttcaaaaccaatcctaaggtgctttacaagctttatacaacatcctcaatagggaaaacttttcagggaggaacaaaatgttaactataagaagggtctccataggaaacatttcattatggcattaattaaaagttgctagtttctatcttataggactgaggaattttcagacagataaccttactatttctaaagagagataggtagttttccaacagagatttttcctcacatttttatacatgaacaattggaaatgcagtgaagtcagat

SEQ ID NO: 507265 - DNA, 613 bp, Homo sapiens
tattaacaaattataattaaatatctgcctgactactagtttagtaactgtctttctcactacaccgtaaagtttatggctacctgggcacgtctgttcttttaacaagcatctaggatagggcctagtatagagcagcaactcaacaagtgaaatggtaaaagcagggacatttatgaaatgcaaggcagtactatttatctaaatctaactacatcaaaactagcctcccccttctatcatacacagaagttcattcaccagttcttgtctcaactaattcattccgtttgccaccctcctttctttctctagccttcttccttcacctttcttgcccttttaacccctcctgtcctatctcaatgcataaaacttgtctttgttttcctcattcctttgtctttggacaacttagaaacaaaaaaagctttctacatttttgccaagaagcttagtttccatttatttcaggatgtaaaataactggattttcacaagaasaagatgagatggggtggaggaaggagattgggatgtttcttttgcctatatacatgcgaggggtgaagactgaagggaggggaatcatgcttacttttgatagatgcag

SEQ ID NO: 507266 - DNA, 571 bp, Homo sapiens
gtgaatgaggagtcacatcatttttaggggtccagaaaatcagtagatcatccattctgctattagacttatggggaacacattagtgaagtaatagaatgaaagtggacaatatagttttggcagctcactttccctctttaaaaaaagaaaaacttgtcttttcaatatatgtcagttcaagttttgaaaagatggattatacaagagaaccacagacttacgaatcaagtataaaagggaagaaaaattaaaagtgaayagatacctaaatagatgttattagaaaatggaccgcagttttctaatccatgtttcatctgcatttctagaaaataatataatactgtgcattttctgagaaccagagaaatggcaatatgcttgttaggaaggaatttcactgacatgatcaagattatttaatttaaaatataataacatatgctaaattgattaaattcataataaaactatacattatatgcgctttagactcttaggtaacctctacatacacttccagtaacttaccattacagtaaggatgaaacagggataaaaaatacaa

SEQ ID NO: 507267 - DNA, 159 bp, Homo sapiens
cggcccgcgcggggcgaggtcagcgcggggagcgaggggagctagggcagcggggaccccgggcccaggcccgggycgagctgggctcgcggcgggagggcgggaggctgggggcgaggtgacagcgcgacctcgcggactgggacttccacgaagctg

SEQ ID NO: 507268 - DNA, 604 bp, Homo sapiens
agtaggagctttacttcctctttcttattcttctttgacagaaaggtccaaatatagctccaggctggcttttcacaatgtgatgagaagacggcattcctgaagtttgagggaggctgctgtcaccatgggaagggggtttgacaacttgggcagtagccacacaaagatacaattcctaatctgtcaaaattgctttttcttagaagctctgattatattaacacattctctatctgatctgatggtgtctctttgaaattttctccttacaactgtaatcaaaatcaatccaattatatttaaaaagtaggcatatatattacttctggaaytaaatttaaaggtaaatcacatatatcatggtttagccatagatatctgaaatgagaagtggtggaagaggacaagtaggaattaaaaaaaacaagaactgttagaagatactgcggtatcaagtctctaagtataaaatcacagttcaactgttctcctttatggtacaagaagaagatataaaagaaagataatagaccattatttaagggaagtaaataatcccaagagactggataagttagtatttatgccaaagaaaactttc

SEQ ID NO: 507269 - DNA, 520 bp, Homo sapiens
acctatatccatatggctcaaacttgttagcatggcctacaaggcctttccatgatccaccccttgaaaaaccttccaacyttctgtctcccactcccctttactgatacctctctaggcatgtgaactcctttcattctgggaatgcagctctcttgctctctctctcccctacccccaaccccatcccaccctccctctttccctttccagttggatccaatgttgttgaatgcaacactacataaactctttgctagtggtgctggctgggccctgtaggcgggaaaatcttatacccacacaagttctatgtgtttattcctgtgaaaggaaactgctcacctcgcaggatgagaggggtccagtgttatcatcttgccaccagtggccactttatattttcaaggaatggtgcaatttgagtgttcagcactggcctctgttgctggcaggctggacattggtggtgggagtaaatagattagccttggtaactcagaatccgtgttgctgaacc

SEQ ID NO: 507270 - DNA, 596 bp, Homo sapiens
tccctggagttgggagagacttcacagaggaggtggcgtctgagttggaaccagtggatgaacaggagtttgccgcagttgacaagagtgtcagaggacagagcttgtaccagtgcacattaggaagaaccagaaccatggaggcagccagaaactcagacactagaacaaggtgtgaggggaacagtaggggacaggctgaggccaactcatgaagggtgttaaatgccaaattgaggagaaagtctttccatgtcctcagaaacagggctggtgtcctttacagttctatccctcccagacctagcccaaggctgataacctaggagtggtcctctccccaccacacacacttggagctggaccacttgaacccctcaaagaagaactaagtgcctcggaagactctggatggaaaatccagcttcatctccaaggctccttcctggtaggaamtgtccctgtgaaaatgagacctggaggcaggatggaaaagctccccctcttgtcctgctgctgcggcttcccaggatcatataagcccaagttgcctgtcatcagccaccaaagccattttttattccaaataaagaaaa

SEQ ID NO: 507271 - DNA, 604 bp, Homo sapiens
tgtgtactgcagagagcagagtcgtttcctgccctaaaataaagagtcaccaaaggccaaaggccactgtggtatcatatcagaagcagccccacctcggggagggcctcaactctgttgtttgaaaatacctggaaccacacacaagtcactcagcttccgtgagttcgtttccacatacatacagcacaaatactaacactgacctccacaaggctgttaagagaattacatgacaatatttatgtaaagaggctgggaagttgtgaaatggtatatgaataagaaaattagtagtagtgctacccagatgcacagtggctgctattttctgttgttatcacactactgcagagcatgctactggaaaacccagcagatcccactggcactcaaaacaaaagggttgtcttctttgagcacttatagaaggcaagggttgctgaattttcctttggcacgtctaaactagaatgcttttcaccttttactttaccttattaccttttaatgtattattttgaaataattatagactcacgagaaattacaaaaattatacagagatgtcctctayacccaccgctcaatttcccccaatagt

SEQ ID NO: 507272 - DNA, 426 bp, Homo sapiens
tcctaaataactgatatcttattcatattgcagcatatagaatgatgtttactagagtttagtttaattttatcacataactcggaaggcatagatatttatgagattaaaatcgggcattttaaatttgaggaaagaaaactgtattttatcgtattagaatccaatggatagcaaatctactcccactttccctactccagccttctaaatttagctccacatcacacaggtcattaagattcaaaagtaacaactgcgtcattccaggtttaaatgaaacaacatcagagcacaggaaaaattataaaaatgttcttctaagttaagacyaaagagttaaaatgtaaggcagatggtagcactgaattccgtacccttgatttgcttaccaaaatgcacaagaaatctcagaatgagaaaggc

SEQ ID NO: 507273 - DNA, 503 bp, Homo sapiens
ctgggaccacaggtacatgccaccacactggacctggctaatttttaaaatttttttgtagagatggggtctctctaacttgcccaagctggtgtggaactgctgggctcaaggtgtgatcctcctgccttatcctctcaaagtgctgagattacaggcgtgaatcaccacacctggcctgcaaattccctttaaaaatccatttttatttcagactatacagcttaattttattcaaacatactcagaagccagagatagctattgattatatatgcatatgtgtgtatacatgtaagtatgtgtgtggatagacatataagcatttaacccaaggtctctttttactacttgactgattccctgatgatgactttaatgktaaacgtgctaattttaaagtcaaacataattagaaacaaagacaaaaataaaagttatcaagtattatcataccaaagggttgaacaatttcagagttggtcattatcctgaatttttca

SEQ ID NO: 507274 - DNA, 499 bp, Homo sapiens
cagcaagtgaattaggggtcaaaacttagttttattttgtttttaaattttggacaaatgttaaataatttttggatcaagcttagcctgagctaggaagtaaatgcttttaacattttgtttaaaatgatttcatctgttttaatatataaacccaacagaaatcttgttaatgggtcattctactatacttcaatgacacaaaaatggcctcagtttcaaaggggagactttgcaagttattattgtataaaacattgcaatcttgtttrttttctagtatttttgtttatgtgtttttaatggttacatgaaccaaatgcttaggcaactgtgtcaaagatgatagtgaataagaaacaaagatctgttacactgtgagttggagaactaactgcttcacaagttttcttaaaatgtggctaatggaataaaaagaattctaagttgtgtttgaaaacaaccaataaaacatagtgactaaaattcacaaagaaag

SEQ ID NO: 507275 - DNA, 499 bp, Homo sapiens
cagcaagtgaattaggggtcaaaacttagttttattttgtttttaaattttggacaaatgttaaataatttttggatcaagcttagcctgagctaggaagtaaatgcttttaacattttgtttaaaatgatttcatctgttttaatatataaacccaacagaaatcttgttaatgggtcattctactatacttcaatgacacaaaaatggcctcagtttcaaaggggagactttgcaagttattattgtataaaacattgcaatcttgtttgttttctagtatttttgttyatgtgtttttaatggttacatgaaccaaatgcttaggcaactgtgtcaaagatgatagtgaataagaaacaaagatctgttacactgtgagttggagaactaactgcttcacaagttttcttaaaatgtggctaatggaataaaaagaattctaagttgtgtttgaaaacaaccaataaaacatagtgactaaaattcacaaagaaag

SEQ ID NO: 507276 - DNA, 633 bp, Homo sapiens
gtatcagactgggtgatgggcacattgtcatttcaccaagttcctggaactgttagaattgcttgtgtatggggatcctatgttagttcccctggatacattgttttatcagtcggaattcttaaataaagacatacttcccttcatgtagtggtgcagtccatgtagaaaaggcaggatcaatgctggagtcttycccattatttgcattactttcctataatcagcgttatttatgagttggttcctatcctctaaagatgaacaattttttaaatattatgaatttatgggcttaaatatatttgagttttctggtgaaatcctcgttttttggtgaatatgttttataattttgaattgacctttctaaacatggtccataacacaaaaacatattttaacaaagaagaaaaaagacttctttccatcaaagctcaatagagatttctgtctattgaagatcatggtgaaatatttcattttccactagaatagtttaaaattattcatttgctttattccatgttataaaaactcagaatagcaatactaatactaccaccaccaataactgagaacagttttttttttttttaactctttattttgcaatacttgtatactgacatg

SEQ ID NO: 507277 - DNA, 633 bp, Homo sapiens
gtatcagactgggtgatgggcacattgtcatttcaccaagttcctggaactgttagaattgcttgtgtatggggatcctatgttagttcccctggatacattgttttatcagtcggaattcttaaataaagacatacttcccttcatgtagtggtgcagtccatgtagaaaaggcaggatcaatgctggagtctttcccattatttgcattactttcctataatcagcgttatttatgagttggttcctatcctctaaagatgaacaattttttaaatattatgaatttatgggcttaaatatatttgagttttctggtgaaatcctcgttttttggtgaatatgttttataattttgaattgacctttctaaacatggtccataacacaaaaacatattttaacaaagaagaaaaaagacttctttccatcaaagctcaatagagatttctgtctattgaagatcatggtgaaatatttcattttccactagartagtttaaaattattcatttgctttattccatgttataaaaactcagaatagcaatactaatactaccaccaccaataactgagaacagttttttttttttttaactctttattttgcaatacttgtatactgacatg

SEQ ID NO: 507278 - DNA, 508 bp, Homo sapiens
tgctttttaatgttttcttttctcttttcttactctgctactaaatatattgttttcttttcaactgaataaaccttttcttgatcaatataacttagagattattttcataattcattcaacaaatattatagaacatttattatatagcaatcaatattctcagaattgagattgcattagtatttyaaaatgattaatattcacacacgcaatacaaccattttcatgacactatgacaagaattctgaattaaggctagtgttcttctgaacaattatcataaagagatctgatagagtcatgagatactatccttaagatagcctttagtcgaatttaaacaatatgcattactaaatacaaaatgagtaggaaagggtgtgacaagagcagaggtgtggtgaggttgggacatggtaggtctgagggcctttaacacagtgagcattcagtaaatagtgttgcaaaatgaacctaagaagaaggaatggtcaaacactggag

SEQ ID NO: 507279 - DNA, 508 bp, Homo sapiens
tgctttttaatgttttcttttctcttttcttactctgctactaaatatattgttttcttttcaactgaataaaccttttcttgatcaatataacttagagattattttcataattcattcaacaaatattatagaacatttattatatagcaatcaatattctcagaattgagattgcattagtatttcaaaatgattaatattcacacacgcaatacaaccattttcatgacactatgacaagaattctgaattaaggctagtgttcttctgaacaattatcataaagagatctgatagagtcatgagatactatccttaagatagcctttagtcgaatttaaacaatatgcattactaaatacaaaatgagtaggaaagggtgtgacaagagcagaggtgtggtgaggttgggacatggtaggtctgagggcctttaacacagtgarcattcagtaaatagtgttgcaaaatgaacctaagaagaaggaatggtcaaacactggag

SEQ ID NO: 507280 - DNA, 612 bp, Homo sapiens
ttctgatttctatttgatcctgccataaacaaaaagacctagaacaagttagttgaaaagtaaatctgtctatattactaggtcagtgtattattattttaacatgttattgggaaattttattttagagtatgtggtagatagatttctaagatgattcatccccttgcataatcctttgtcaagtgtaagcaggacctgtgaatataatagaatatcagtcctatgattggattacattacatggaaaaagktattttacagatttaatagaggtctctagtcagttggctttgtattattaatcaaaagagagattatcctgagaagaactgacctaatctagtggtgagtctttaaaagggactcaagtcaggagacaaattccaagtaaaagagatactcctcctatcctccaacaaacaaaaagtatgttgtgacctgcctctggaggaggccatgtggcaagaagctaagggcgccctctaggtgctgagagcagtccctggcccacacccagcaagaaaatgttacttcttttctacagaggcgcaaaactgaattctgataaccattgagtttgggagaggactctgaacctcagatgagatg

SEQ ID NO: 507281 - DNA, 620 bp, Homo sapiens
tagagtacaaacagcatgaagtaatagactactctaggtcaggatgtttatgaagagctttcaatcacagaaaagtagttcaactgggtaattgtagacatctcttctttcactgaatgtgtcttattcaaggaaatatcatttcttagtttttcttgtgcatgctatccttctttaacaaggctatattttactcttactcactaaaagtacatrttgaataaactttaaaaatatataaatatatgaaacagtttataactgagcaagtactgaccaaattttagaggactgccaactcacttttgtctaggtagttagggaatgctttccagagtatatatcatcagatcattaccatgaaagctggattgtagttcttggtattttggtttggataactcctgggatattaagatagggagactagaagagcttgctggttgggagtgatggatggagccacagaattcagttttggacgtgctgagctttaagagtctgacgtgtgtttgaggatatatgtctagaagggaactaaatacctaaacctaagagctcattgtgtggaaagtggttttagccttggcagaatactaagtcatgcaattttagtgtta

SEQ ID NO: 507282 - DNA, 507 bp, Homo sapiens
gagctgatctggggggaactagagcctatagatggatcctagtagcatcttttgagcccagaattgagccataccttagctagctgtgcctgtggatttatcatgagccaatgagccagtgctggtgagttttaaaaacttttttttttttttttgagaggaagtctcagtctgtcacccaggctggagtgcagtagcgcgaactctgctcactgcaagcaagctccgcctcctgagttcaagtgattctcctgcctcatcctcccaagtagctgggattataggcaagtgccaccatgcccggctaattttcatattttctgtagagatggagtcagaactcctracctcaggtgatccgcccacctcagcctcccaaagtgctgggattacaggcgtgagccaccgcgcctggcttaaatacactttttgatctaatccagttggagctgggttttctgtttaaactgactccaaactaagagtattcacagtacgtccctaatg

SEQ ID NO: 507283 - DNA, 428 bp, Homo sapiens
gcagcagtcccctagctgatttgcctgccaccatctccctccctccctacacattcttcacactctctttagtgttatctccaaaaactccaaacaatatttccatttcaagatgagttaaacttctctgcttcccatcttccaaagcaaagaaatatgagaagtttttaaaagtacatttctgatgtcactaggccggacatctataggatatcacacgagacacagtgcaaatgaatttgtactctgggaagtatccatgtgcttatagctcaaaaaaatccaaggaagaagtcttctaggaacagaatggacacaatttcacagttgcagaaactgagagagatggattgactgtggaagtgtcagaagaggctggrtttggaaaagaaaattgatcagtgccagcagggccttgagatgaaagc

SEQ ID NO: 507284 - DNA, 417 bp, Homo sapiens
atttccatttcaagatgagttaaacttctctgcttcccatcttccaaagcaaagaaatatgagaagtttttaaaagtacatttctgatgtcactaggccggacatctataggatatcacacgagacacagtgcaaatgaatttgtactctgggaagtatccatgtgcttatagctcaaaaaaatccaaggaagaagtcttctaggaacagaatggacacaatttcacagttgcagaaactgagagagatggattgactgtggaagtgtcagaagaggctgggtttggaaaagaaaattgatcagtgccagcagggccttgagatgaaagcagctggwtaactgggctcacctccaagtccgggcaaatggctaagaatagtgcagcaagtgctgttaagttataaaggagcactatt

SEQ ID NO: 507285 - DNA, 417 bp, Homo sapiens
atttccatttcaagatgagttaaacttctctgcttcccatcttccaaagcaaagaaatatgagaagtttttaaaagtacatttctgatgtcactaggccggacatctataggatatcacacgagacacagtgcaaatgaatttgtactctgggaagtatccatgtgcttatagctcaaaaaaatccaaggaagaagtcttctaggaacagaatggacacaatttcacagttgcagaaactgagagagatggattgactgtggaagtgtcagaagaggctgggtttggaaaagaaaattgatcagtgccagcagggccttgagatgaaagcagctggttaactgggctcacctccaagtccrggcaaatggctaagaatagtgcagcaagtgctgttaagttataaaggagcactatt

SEQ ID NO: 507286 - DNA, 594 bp, Homo sapiens
gctggttaactgggctcacctccaagtccgggcaaatggctaagaatagtgcagcaagtgctgttaagttataaaggagcactattgtaggtgactccaaatgattgacttttctctctgaatgagtcagtaccaccctaagttactactacaaatacaaggaaaaaaattctgtactttgatgactttctcatctgcggctccaggcataatggcctcttctttyagacaactaaagttcaaaccttatatggtaatcactgagctccaacagaggagatcatactggaacagaggggaggggcaggacaatggcacaaggaatgagtccaaaagcacatgcaatgatcctggtatgttcagaatcttaagtcaagtgctggattcatgttttaaaagtttttatggttcataattttataaatatgtggcatgcatttcttgcatgattcaaatgttatataaaaaacaaatttgaaaataaaaaagaataaaaaggagttggaaagtaaatgtgaacttagagataataaaagtcaaaataaaggaaaatcatcatgcaaacatgatcttgtatttttccaagatagttcc

SEQ ID NO: 507287 - DNA, 594 bp, Homo sapiens
gctggttaactgggctcacctccaagtccgggcaaatggctaagaatagtgcagcaagtgctgttaagttataaaggagcactattgtaggtgactccaaatgattgacttttctctctgaatgagtcagtaccaccctaagttactactacaaatacaaggaaaaaaattctgtactttgatgactttctcatctgcggctccaggcataatggcctcttcttttagacaactaaagttcaaaccttatatggtaatcactgagctccaacagaggagatcatactggaacagaggggaggggcaggacaatggcacaaggaatgagtccaaaagcacatgcaatgatcctggtatgttcagaatcttaagtyaagtgctggattcatgttttaaaagtttttatggttcataattttataaatatgtggcatgcatttcttgcatgattcaaatgttatataaaaaacaaatttgaaaataaaaaagaataaaaaggagttggaaagtaaatgtgaacttagagataataaaagtcaaaataaaggaaaatcatcatgcaaacatgatcttgtatttttccaagatagttcc

SEQ ID NO: 507288 - DNA, 594 bp, Homo sapiens
gctggttaactgggctcacctccaagtccgggcaaatggctaagaatagtgcagcaagtgctgttaagttataaaggagcactattgtaggtgactccaaatgattgacttttctctctgaatgagtcagtaccaccctaagttactactacaaatacaaggaaaaaaattctgtactttgatgactttctcatctgcggctccaggcataatggcctcttcttttagacaactaaagttcaaaccttatatggtaatcactgagctccaacagaggagatcatactggaacagaggggaggggcaggacaatggcacaaggaatgagtccaaaagcacatgcaatgatcctggtatgttcagaatcttaagtcragtgctggattcatgttttaaaagtttttatggttcataattttataaatatgtggcatgcatttcttgcatgattcaaatgttatataaaaaacaaatttgaaaataaaaaagaataaaaaggagttggaaagtaaatgtgaacttagagataataaaagtcaaaataaaggaaaatcatcatgcaaacatgatcttgtatttttccaagatagttcc

SEQ ID NO: 507289 - DNA, 657 bp, Homo sapiens
agaaaatacacttaaaagaaaagtattaatcacggtgaaagtgtacaagcatagatgaaaaaggttaacatattattcatcatatcattttacatatgatatattatttcacacttgattgaacttttcttcaacaaaaattttcactgaaatctctcaaaataagattatttgatcagattttaagattatttaaattaacatgtatgctttaccttatcatgccaagattaggaaatagtttaatatctttcaagccaaaaccaaaatacagacaaatattaaaggtttgctgmaacatggatggaactggaggccattattttaagtgaaacaactcagaaaagagaaaataccacatgttcacacttataagtaaaagctaaataacgtatatgcataaaacatcagagacttggatgggagggaagctgggaaggaggtaaggggtaaataattacttaatgcaaaaaatatacattatttggatgatggttacattaaaagcccacacttcatcgcatgcaatatatctatataacaaaactgaactcataccccttaatttatacaaataagtaagataaaaataaaagaatagaaatcatgcaatgactgctgtcagactactaaggaattctactagaaattaataac

SEQ ID NO: 507290 - DNA, 611 bp, Homo sapiens
ttcaaactttgtttactaatccagaatgccgtgaactaatgttttccttttttttcattattttgagtgaaaaggagaaaaataaaaatgagaggagttggcaataaaataaagttttagtgaaaatggaaaaaaatgatgtttcaattggaagtgaaagaaaagagttaaagctgataatataagttagagatgtaagcagaatgaaggagatagagaaagtgagtgagaatggaatattaaatggcaggatacatatgccctcaatatgaatttgtgtatggaatcttaggtttccactcattttgtttttaacaaaaagacaagtagtagatacaaaatatatatcatattgaagggcaattatctcaagcctttagtctcatttctatcctgatagagaaagatttcaygtaaagaacgaatgccgcttttcatgctcagttctatagtgctggttatatttgttaaggcaagatctgatttttctcagataacgatggggaatcccaagtctgggctttgtaaatctgttgctcgtgttctcattttatgagcttaggtatcattaagtaaacttagagatgaccactcttctctctttctttttc

SEQ ID NO: 507291 - DNA, 542 bp, Homo sapiens
aactaaatgtaaagctctggaagggacttctctggcacatgctatattcatcctcagaaatgatggtttaaacaaatctgcaaaactctgtttcaaaatatattacttcaaattaacatactctttcatagaagacacaaatgtctgtgcttacccaccattactttgaaataagtgaagattttggtgttatttcaactttctatgtatattgaactgtaatcagtatcaccttactcttgagaaaaatgaagaaattggtcattaagaaattaaaatcattgtttaaaattcttagtcaacaataagatgaaaattagaagaacatcactrgcccatgccattacaaaattcaacaaagctgtttcttaaatgtgtacatttaaaagaagaaaaggagggaaggagagaggggagaagaagaggaggagaaggggaaaggaaaagataggaagagaggaaggaaagaaggcagggaggaaggcatctgagactacaacttgatgagctacatttcttctaaatatttactagacaattat

SEQ ID NO: 507292 - DNA, 542 bp, Homo sapiens
aactaaatgtaaagctctggaagggacttctctggcacatgctatattcatcctcagaaatgatggtttaaacaaatctgcaaaactctgtttcaaaatatattacttcaaattaacatactctttcatagaagacacaaatgtctgtgcttacccaccattactttgaaataagtgaagattttggtgttatttcaactttctatgtatattgaactgtaatcagtatcaccttactcttgagaaaaatgaagaaattggtcattaagaaattaaaatcattgtttaaaattcttagtcaacaataagatgaaaattagaagaacatcactagcccatgccattacaaaattcaacaaagctgtttcttaaatgtgtacatttaaaagargaaaaggagggaaggagagaggggagaagaagaggaggagaaggggaaaggaaaagataggaagagaggaaggaaagaaggcagggaggaaggcatctgagactacaacttgatgagctacatttcttctaaatatttactagacaattat

SEQ ID NO: 507293 - DNA, 606 bp, Homo sapiens
tcttacatatgccattcactaattaaacacaaatccaaagaattcccatagcaagaggtttgtgtgtcaccaaggctgggctaacatgttaagattattatagagtttgtttatcattgagaagaaaataaatgtacaacatatgtatttctccaaaatattttaatatgtattttgggtgattytgcaagatccccacagtcatgaatcactggtgtagtgagaaaagcactaaactgattacgaaccttgacccaaaatccgagtaagtcacctaacctcatagccacagattcttaaaataagcaaatgaacctacatccctagattgttaggagaacatgaattttaaaacagaatgagtgggtaagaaaaagttgctttgtaaagataaaatctcagtttagctaggtttcattcggttagtgtatctccaaaactcattttaaaacataaaagatttttctatctatacttgctcaagtggtgcttaaacattcatcagagtaaagtggccaaacttcttttccaaaaatcatttaaaattaaataaaaatctccacaatgacttagaagactgtctttggaaagatactccacatatga

SEQ ID NO: 507294 - DNA, 629 bp, Homo sapiens
gccccttgtggttctatcacagaacttttcacagtgtgcctgactagtctctttcctctccaggtcaggaggtcctccgtaacagaggtagaaatgtttctacaccacataaaacaacactgaatattatttgctatctgaaatgttatttgaattaatgaaaaaaatgactcaggaaaattgtctaagcagtgttttccagagaatgttstctaggatgaattctagcctcaaaaactattaaaatggggtttgttgctcaaaaaagtttgggaaataatgctatatattatttctgtaaatatacagttcacattttggcatactaaaactgtgaaacaaactaaagaaaaaaattaccaaatgttcttaacttggtttttcctaaacttatttaactataacattttttatgaaataacaactcacgtcctctagtctagtgctttaagaaattttggaaaattttgacttagtgtataaaaatctatagagttcatacaaatctctggagagagcgagagagggagaaacacatctttaatctgttttacagcagatgtcagaaaaaaacattaggaacaatagagaactctgaaatctggaacaaaatgagacactctggaaag

SEQ ID NO: 507295 - DNA, 629 bp, Homo sapiens
gccccttgtggttctatcacagaacttttcacagtgtgcctgactagtctctttcctctccaggtcaggaggtcctccgtaacagaggtagaaatgtttctacaccacataaaacaacactgaatattatttgctatctgaaatgttatttgaattaatgaaaaaaatgactcaggaaaattgtctaagcagtgttttccagagaatgttctctaggatgaattctagcctcaaaaactattaaaatggggtttgttgctcaaaaaagtttgggaaataatgctatatattatttctgtaaatatacagttcacattttggcatactaaaactgtgaaacaaactaaagaaaaaaattaccaaatgttcttaacttggtttttcctaaacttatttaactataacattttttrtgaaataacaactcacgtcctctagtctagtgctttaagaaattttggaaaattttgacttagtgtataaaaatctatagagttcatacaaatctctggagagagcgagagagggagaaacacatctttaatctgttttacagcagatgtcagaaaaaaacattaggaacaatagagaactctgaaatctggaacaaaatgagacactctggaaag

SEQ ID NO: 507296 - DNA, 484 bp, Homo sapiens
catgttctcatgtatatgtggaattgaaaacaatcacactcayggaagcagagagtagagtggcaattaccagcggctgggggtgggagaaatgggaagatgttcatcaaagggtacaatattttagttagaaaagaggaataaatgataggtatttgaggtgatgggcatgctaattagcctaattcaattattccacatttatacatatatcatgcatcactttgtactccaagaatattaaaattataatttgttactattcaataaaatgaaaataataaattttaaaacattagacttaaagaagtttttctaaaaaaaaaaaaaaaaagagaaataccaatgggtagacagcttgaattttttccaacaaaatgacataagggtgatgacttgaaggcaaaaatggatttcctatttctaaattttttactgttatgtaagaaaactcagaggaacactagaagtattctagaaattt

SEQ ID NO: 507297 - DNA, 484 bp, Homo sapiens
catgttctcatgtatatgtggaattgaaaacaatcacactcatggaagcagagagtagagtggcaattaccagcggctgggggtgggagaaatgggaagatgttcatcaaagggtacaatattttagttagaaaagaggaataaatgataggtatttgaggtgatgggcatgctaattagcctaattcaattattccacatttatacatatatcatgcatcactttgtactccaagaatattaaaattataatttgttactattcaataaaatkaaaataataaattttaaaacattagacttaaagaagtttttctaaaaaaaaaaaaaaaaagagaaataccaatgggtagacagcttgaattttttccaacaaaatgacataagggtgatgacttgaaggcaaaaatggatttcctatttctaaattttttactgttatgtaagaaaactcagaggaacactagaagtattctagaaattt

SEQ ID NO: 507298 - DNA, 583 bp, Homo sapiens
ttttgtcttcttccgctgatgtgttcctcatgacgtccagccacttccgcatctgcccaatagggtctcgggtttttataggcccaggatgggggcgtggcaggccagagtggtctgggggaatgcaacatttgggcaggaaatgcctgacctcaggtaggtccatttgggtggagccccgggcaaagaccatgccctcctctacctagcgcttccctcccctacttctgtatcatttaaatagaggcaaatagagggaagatatttagaataggaataagtttagaattttatacagattttaattctgtttccttcaccaagtaattttagaccctttgcaatagtaatctcaaatactacaaaagcaaaaattattacaaaaaattaakaggaaattgtcaatttatagcaggagggaggagaatactaggattaagaggagggaaaacttcgttagcttcttcacaaacagacaaaggcgcaacagaagatggttgcatagttctatgggtagtaaaaagtacaaatctcattgttcaagaaggaaaaactcgcatatgactctaggatctgggctaat

SEQ ID NO: 507299 - DNA, 610 bp, Homo sapiens
tggaaggattcattgagcctcgtaggttagggctgcagtgagctgtgatgacgccactcactccatcttggctgacagagaggtgctgtctcagaaggaaggaaggaaggaaggaaggaaagaaggaaagaaggaaggagggaaggaaggaaagaaggaagggaagggaaaatgatttttttaaaatcasaaagcctaatttttatagctctacgtttattaatttatttcatgaggtcacattaaatatcataaccatatctgttcattaattttgaaatctcacttattaaaaggataattattcatttaaagtggtatttcctcaaaggtttgtaaagattaaatgaattattatgtaaagtacttagaaaaggataagctacgaaaaccatatagaagtgttagttatcattattagtgcactaaagcacagtaaattataaaataaatataaagtggacatctaaagaaaacaaatgacatgtattttattgcaaaaatatatttattcatgtttttagcttagaaaagcatacatagtttttagtagtgtatatttttgttatgaaaatagctttcctgctttgtgatagatattgcttagatt

SEQ ID NO: 507300 - DNA, 610 bp, Homo sapiens
tggaaggattcattgagcctcgtaggttagggctgcagtgagctgtgatgacgccactcactccatcttggctgacagagaggtgctgtctcagaaggaaggaaggaaggaaggaaggaaagaaggaaagaaggaaggagggaaggaaggaaagaaggaagggaagggaaaatgatttttttaaaatcagaaagcctaatttttatagctctacgtttattaatttatttcatgaggtcacattaaatatcataaccatatctgttcattaattttgaaatctcacttattaaaaggataattattcatttaaagtggtatttcctcaaaggtttgtaaagattaaatgaattattatgtaaagtacttagaaaaggataagctaygaaaaccatatagaagtgttagttatcattattagtgcactaaagcacagtaaattataaaataaatataaagtggacatctaaagaaaacaaatgacatgtattttattgcaaaaatatatttattcatgtttttagcttagaaaagcatacatagtttttagtagtgtatatttttgttatgaaaatagctttcctgctttgtgatagatattgcttagatt

SEQ ID NO: 507301 - DNA, 610 bp, Homo sapiens
tggaaggattcattgagcctcgtaggttagggctgcagtgagctgtgatgacgccactcactccatcttggctgacagagaggtgctgtctcagaaggaaggaaggaaggaaggaaggaaagaaggaaagaaggaaggagggaaggaaggaaagaaggaagggaagggaaaatgatttttttaaaatcagaaagcctaatttttatagctctacgtttattaatttatttcatgaggtcacattaaatatcataaccatatctgttcattaattttgaaatctcacttattaaaaggataattattcatttaaagtggtatttcctcaaaggtttgtaaagattaaatgaattattatgtaaagtacttagaaaaggataagctacgaaaaccatatagaagtgttagttatcattattagtgcactaaagcacagtaaattataaaayaaatataaagtggacatctaaagaaaacaaatgacatgtattttattgcaaaaatatatttattcatgtttttagcttagaaaagcatacatagtttttagtagtgtatatttttgttatgaaaatagctttcctgctttgtgatagatattgcttagatt

SEQ ID NO: 507302 - DNA, 363 bp, Homo sapiens
gttttaaaggcatcgcatcttgtttcctcacttctttgaagctcataagaaacctctccttctgagcgtctacttcacytaaatgatctcaaattccttgaatcacaaaaccagtaagaaagggaggggtttggggagggggcaggggagagtagtgaggagagaaagaaagaaaatgggatgaacagtggcttagtgcaacgggctgcgagtgtgtgacacaagatacccaccgcagacaaagaacgccatgagactcgcagggagacaatgacggctccaggaaaaacgcagcgctcacggggctggcgagggagcctggcgcagctcccttcccagacccgctctccctgccagcccagg

SEQ ID NO: 507303 - DNA, 363 bp, Homo sapiens
gttttaaaggcatcgcatcttgtttcctcacttctttgaagctcataagaaacctctccttctgagcgtctacttcacctaaatgatctcaaattccttgaatcacaaaaccagtaagaaagggaggggtttggggagggggcaggggagagtagtgaggagagaaagaaagaaaatgggatgaacagtggcttagtgcaacgggctgcgagtgtgtgacacaagatacccaccgcagacaaagaacgccatgagactcgcagggagacaatgacggctccaggaaaaacgcagcgctcacggggctggcragggagcctggcgcagctcccttcccagacccgctctccctgccagcccagg

SEQ ID NO: 507304 - DNA, 598 bp, Homo sapiens
gatgttggtggcctgtcaggactattttaggagacctcatttatcctttgaccaagaaatatcctgactggggcctgacttgaatatatagctccctgtgggggtgatgccaaggctcccttccagtaataactgctcaaggaaacaaagagtttccaagagtctgtggtccagaacctacacttactacacttaacctttacgacgtagaccygcccaaacgaatcaataatgactttccagtgttttaatcttcgccgatagattcagcactgttttgaatttggcctgcatgtgacctaaacaatggactgaagtagggaaagcgaattcagcctgcctttgctattcatgcactgcagccaaaacaaagctcctgaggtttgaaatgacttgttggagaaatcctgctggttttagagaactcttttaaagcccaatattagtgacccacggcctggccctatgactgggtcacttaacttagttgaccatagcatgatttcactatgctaagaagaaggatgaaacacctgaatgagccaagtagcttgatttatggctaaacactggattcttactctaagtagtcatccaa

SEQ ID NO: 507305 - DNA, 598 bp, Homo sapiens
gatgttggtggcctgtcaggactattttaggagacctcatttatcctttgaccaagaaatatcctgactggggcctgacttgaatatatagctccctgtgggggtgatgccaaggctcccttccagtaataactgctcaaggaaacaaagagtttccaagagtctgtggtccagaacctacacttactacacttaacctttacgacgtagacccgcccaaacgaatcaataatgactttccagtgttttaatcttcgccgatagattcagcactgttttgaatttggcctgcatgtgacctaaacaatggactgaagtagggaaagcgaattcagcctgcctttgctattcatgcactgcagccaaaacaaagctcctgaggtttgaaatgacttgttggagaaatcctgctggttttagagaactcttttaaagcccaatattagtgacccayggcctggccctatgactgggtcacttaacttagttgaccatagcatgatttcactatgctaagaagaaggatgaaacacctgaatgagccaagtagcttgatttatggctaaacactggattcttactctaagtagtcatccaa

SEQ ID NO: 507306 - DNA, 550 bp, Homo sapiens
gttcaatgttaatttaatgtatacttttcacatctctcactatatgtaacttcamacagtggcttttggattttactctgtagaaaagcaagtttatacttctgttttgctactaggtcttggcatttaatggtagagacaacttcatggataagagttttaccccacaagtgactttacatgtccgtgaaaaggcagagacgacctcaatccagactgactggtggtgattagaaaaatgtcatctctgttttcaatttaaagagtaattgagtgatttgggtgaaagaatcttcattttcagcagatggaaagtttggaatctttggagccttccagcaatttgaaaagggccttgagaagaccttctagtaattagaagagcttcaagaaacaaaacttataagtctcccctcagttttagggcatagctgttgttctgttgtttttggtaaggcgagtagggatgaaggtcaggagagagaagtggtgatttgctgataggtggacagagaaggaaggcgagttcttcttgagggacagactgagc

SEQ ID NO: 507307 - DNA, 550 bp, Homo sapiens
gttcaatgttaatttaatgtatacttttcacatctctcactatatgtaacttcacacagtggcttttggattttactctgtagaaaagcaagtttatacttctgttttgctactaggtcttggcatttaatggtagagacaacttcatggataagagttttaccccacaagtgactttacatgtccgtgaaaaggcagagacgacctcaatccagactgactggtggtgattagaaaaatgtcatctctgttttcaatttaaagagtaattgagtgatttgggtgaaagaatcttcattttcagcagatggaaagtttggaatctttggagccttccagcaatttgaaaagggccttgagaagaccttctagtaattagaagagcttcaagaaacaaaacttataagtctcccctcagttttagggcatagctgttgttctrttgtttttggtaaggcgagtagggatgaaggtcaggagagagaagtggtgatttgctgataggtggacagagaaggaaggcgagttcttcttgagggacagactgagc

SEQ ID NO: 507308 - DNA, 550 bp, Homo sapiens
gttcaatgttaatttaatgtatacttttcacatctctcactatatgtaacttcacacagtggcttttggattttactctgtagaaaagcaagtttatacttctgttttgctactaggtcttggcatttaatggtagagacaacttcatggataagagttttaccccacaagtgactttacatgtccgtgaaaaggcagagacgacctcaatccagactgactggtggtgattagaaaaatgtcatctctgttttcaatttaaagagtaattgagtgatttgggtgaaagaatcttcattttcagcagatggaaagtttggaatctttggagccttccagcaatttgaaaagggccttgagaagaccttctagtaattagaagagcttcaagaaacaaaacttataagtctcccctcagttttagggcatagctgttgttctgttgtttttggtaaggcgagtagggatgaaggtcaggagagagaagtggtgatttgctgataggtrgacagagaaggaaggcgagttcttcttgagggacagactgagc

SEQ ID NO: 507309 - DNA, 624 bp, Homo sapiens
tccatgtggaggagaggaaggccccgtgtgagatgttggaagccaaacagggcatccatgcatgggagtagtctggcatgggtgtcacagcatgggctgggtgaggactctgtccattcagagaaggggcttggtgaggaatgtcagatcccaggcgggatgagcagcatccacactagggaaggctacacgtggaacatagggcctcagggtgaagagggcatcaatgtatacaggtggtgtatccgagtttgagcacggtgaacaggaaagtgtccatgtgtgatggaaaatctagtatgggatgtgagaagggcatccacagagaggagtggatggtggtggtgatggctgattagttacacacaggaatattaattgaatgtgtgacacatgcactccttaccctgcttgtgtgccaacatctcacaccaggccagacctccatgtgtacatttttcttgtttgagcccaaccaayggctttggtactgaattattcaggaaggaaaaaggaaagaaaaaagaaagaactgttgtattattttacttatcttattttttggcatcttttcttccattcacagccaatattctcttacaagttatttgtccatatttgctg

SEQ ID NO: 507310 - DNA, 548 bp, Homo sapiens
ttgaaaactgtgcactttcctcgttgctatcactgcagagctgctgattttatacatatcaaagggtccataaatacgtgattccrggtgattctaatgtgtatccaggttccgcaaatgctctggtaggcaatgtctgtaatgaaagtcctggtaagtactgaggaggttctgaattaaagcagtagtaatgaaggtataaaggaaagaaaagattagaaggacattagagaggcttaggaaaattcatttcacaaactcattctttcaacatatttttattaaatgagtacctgctctgtaggaagcaaagggtctaaaatggcaaaatcaatcctcacagagcttttaatctatttgacaaaatataggattacaaaagaggaagaatataagtgataatgttaggctttctagaaagactggctgaataagtggttgatgttggcaccattcatcagaatgggtaatataatgatagtagcagcaagcctctgtgtgccagatagggactttacccatattcactgatattgaatgagtgcctc

SEQ ID NO: 507311 - DNA, 618 bp, Homo sapiens
ttgaaaactgtgcactttcctcgttgctatcactgcagagctgctgattttatacatatcaaagggtccataaatacgtgattccgggtgattctaatgtgtatccaggttccgcaaatgctctggtaggcaatgtctgtaatgaaagtcctggtaagtactgaggaggttctgaattaaagcagtagtaatgaaggtataaaggaaagaaaagattagaaggacattagagaggcttaggaaaattcatttcacaaactcattctttcaacatatttttattaaatgagtacctgctctgtaggaagcaaagggtctaaaatggcaaaatcaatcctcacagagcttttaatctatttgacaaaatataggattacaaaagaggaagaatataagtgataatgttaggctttctagaaagactggctgaataagtggttgatgttggcaccattcakcagaatgggtaatataatgatagtagcagcaagcctctgtgtgccagatagggactttacccatattcactgatattgaatgagtgcctcatagtggccatatctgaatcatcatccctgttttagagttgtgcaaactctggcgccgggagggaagccc

SEQ ID NO: 507312 - DNA, 618 bp, Homo sapiens
ttgaaaactgtgcactttcctcgttgctatcactgcagagctgctgattttatacatatcaaagggtccataaatacgtgattccgggtgattctaatgtgtatccaggttccgcaaatgctctggtaggcaatgtctgtaatgaaagtcctggtaagtactgaggaggttctgaattaaagcagtagtaatgaaggtataaaggaaagaaaagattagaaggacattagagaggcttaggaaaattcatttcacaaactcattctttcaacatatttttattaaatgagtacctgctctgtaggaagcaaagggtctaaaatggcaaaatcaatcctcacagagcttttaatctatttgacaaaatataggattacaaaagaggaagaatataagtgataatgttaggctttctagaaagactggctgaataagtggttgatgttggcaccattcatcagaatgggkaatataatgatagtagcagcaagcctctgtgtgccagatagggactttacccatattcactgatattgaatgagtgcctcatagtggccatatctgaatcatcatccctgttttagagttgtgcaaactctggcgccgggagggaagccc

SEQ ID NO: 507313 - DNA, 488 bp, Homo sapiens
ctcatccagtgaaatactggagcccctctttccttagttccccttaccatagctgtggcaggccagctaatttttcagatataaatctactacatacactaggagaattcaacaagaaaacaattcaaaaaaaatggagaccacgtatctacagacaagttttcaaagtccatgatcataaaaggaaaactccctaagatcccaaagttgtcagaaggtacttgtcttgtcctagctttgtttctctgatatcttcatgtggtgaatgtggtttacacggagttaagatgcaaaattctaggttttaataaaaggagtatgtttgctgtactgcacagaaaggatcattaagcccaaagattttgacaacaattaggataactttttggcggtttagagccagagaaagggcaaggaaaagatccctttgaaaataaattgcctgaattaaaaagaggagaaakgaggaggaggaggaggaaaaatat

SEQ ID NO: 507314 - DNA, 596 bp, Homo sapiens
cttaaaacctagatgatggattgataggtgcagtaaaccaccatggcacatttatacctatgtaacaaagtggcacattctgcacatgtatcctgtaacttaaagttaaaaaaaaaaaaaaaagaatccatcatatgtgtcgaagagtacattttacctgtgactatattagtggtaaattaagtatattgtttagatataatttataaagaaagcattaaaaaaaagtacagtttggtcagtgctttcaaagatcctctccccctttcctagtaaaacccasattttcttttggggaccctcctctccttccttatgtagcaacgaaatagccctaagcccagtttcaaggatgtgccttaatttgtctaaaccagggattgggaaactttttctctgaagggccagagtgtaacaattttaggttttatggagctgaatagtctctgtcacaatttacctctatccttgtaatagccacagtgagaacataaacaaatgggtatggctgtgttacaataaaatttcatttacagaagcaggttgtgggccatatttgctccctttgctctgtgcagtttgtggcagtgccaacc

SEQ ID NO: 507315 - DNA, 626 bp, Homo sapiens
aaaatttattaactaccacctagtctttttcaattactccacattaactttttaaccttgaatcccactgagagtagccttcatatacatttccaagtttgttatttagtcttaatatccatctataaattagcattctcataataaaaactaatttttatggaagtcaaactggrccagttaccataataaattctttgtaatcctcatccaactcaatgaattagattggattattatgctcattttacatgtgatgtaaataaacgaagcttgcacagaagaagactcttgcctaagtaattttaccaagacagaaactcaggtactctatccctagaacctgaattttaccatgataaatttcttcctgtcagtcaattctgtgatattcacctatatattaatagatgaggcaactttttatttaaagttgacattctatgaatattatttacaaatagaataatacattttaatgacaagcctttaaaaattattttaggttccccaaaatttaaaagttatgaccatcagcttttagttgtaaaatgcttgttaaatgaattctgtccatttttagatttggtttctttctcctttaaaaataaaattcaacttgtgtt

SEQ ID NO: 507316 - DNA, 618 bp, Homo sapiens
tttttacgaaaggaaggagaaaaagacaggaaataattcacaatctccaactctttcatcgtaattagtgagtgacaagtagtttgtaacactctcagtgtatcttgataatgagcttgagaaaggctgagtgctagcactcactaaagtggaggctgggatcaagattttatttcagtacctgcagtgatcaattacccttccaccttctaaagttgcttctagcctttcctcttatccaagcctaccctgtttcagtctggaagagtctcaggtgtatgcccacagaaccttggtatctggctctctaggtcttgtttgtgtgggcacaggagacaagctgggaaatccaagcccagaggttcttacccagcyttgcccacaaggctactgcctaagggcttccacccctagaagctttggcccttgggatcatccctctttctcttcttctgcagcctgactttttattctcagcttccctcttccctgcagacactgcctccgcccccctcccccacccccgtccaccgccccggcatactacccagctctctaatggctcagggaagcacattccacactccttcttggggctgaggccaatgaagcagtggc

SEQ ID NO: 507317 - DNA, 618 bp, Homo sapiens
tttttacgaaaggaaggagaaaaagacaggaaataattcacaatctccaactctttcatcgtaattagtgagtgacaagtagtttgtaacactctcagtgtatcttgataatgagcttgagaaaggctgagtgctagcactcactaaagtggaggctgggatcaagattttatttcagtacctgcagtgatcaattacccttccaccttctaaagttgcttctagcctttcctcttatccaagcctaccctgtttcagtctggaagagtctcaggtgtatgcccacagaaccttggtatctggctctctaggtcttgtttgtgtgggcacaggagacaagctgggaaatccaagcccagaggttcttacccagctttgcccacaaggctactgcctaagggcttccacccctagaagctttggcccttgggatcatccctctttctcttcttctgcagcctgactttttattctcagcttccctcttccctgcagacactgcctccgcycccctcccccacccccgtccaccgccccggcatactacccagctctctaatggctcagggaagcacattccacactccttcttggggctgaggccaatgaagcagtggc

SEQ ID NO: 507318 - DNA, 414 bp, Homo sapiens
gtctgtttgactttacccctgagtgcagagcaacctatcaagaccaaaagaataagaaggcaaacgagtgttcctcagggctgaagtacagcatggagctagacgaaatggatgaggtcaaattcttctcacaggaaaaagacttggacgggaaaatccagamtgcaccaaattctcatagtgcacagcatgtgaagatggggtatggagcatggtacctcaagcctaagttggggaaaaagctaagaagtgatgaacctttgattgaccccaagctcgtacttgaaaagcctgatgaacccgacattcttgacggtctttatggaccaatcgcctttaaggatttcattctaagcaagggctatgaaatgcctggcatcattcaaaggctgtttgccaggaggggatggactt

SEQ ID NO: 507319 - DNA, 414 bp, Homo sapiens
gtctgtttgactttacccctgagtgcagagcaacctatcaagaccaaaagaataagaaggcaaacgagtgttcctcagggctgaagtacagcatggagctagacgaaatggatgaggtcaaattcttctcacaggaaaaagacttggacgggaaaatccagaatgcaccaaattctcatagtgcacagcatgtgaagatggggtatggagcatggtacctcaagcctaagttggggaaaaagctaaraagtgatgaacctttgattgaccccaagctcgtacttgaaaagcctgatgaacccgacattcttgacggtctttatggaccaatcgcctttaaggatttcattctaagcaagggctatgaaatgcctggcatcattcaaaggctgtttgccaggaggggatggactt

SEQ ID NO: 507320 - DNA, 438 bp, Homo sapiens
aactgcgtacagttttatgatgtcctcatttctgtcaaagtgttattataaagtataatacacataactttctacgtttagatagatcaatttttaacattttacaattgtatgtcacagacacacaaacacacactgaaatacctgaatgaagagacagacagatgcagctaacttcatatatttcccaagaacaagaattctgggacaggcaccatggctcacacttgtaatcccagcactttgggaggccaaggcaagaggatctcttcagcttaggagttgaaggttacagtggcctatgaccaagccaatgtaaggcagcctgggtgacagagcaagaccctgtctctaaaaatattaaaagaaaagcaaacaaaagaaaaaaattctcttacaaaaccatagtacrtgtatccaattccagaaatttaacat

SEQ ID NO: 507321 - DNA, 625 bp, Homo sapiens
cctctgtattaggcaggaactcaactcgccctgaatttctccaaaagagaactgatgggttgaaaccaagagatcctggcatggcttacactaagcgctaaaataatgatgtgaaatttttctccctttctcctgcctcctcttcctccttgtcctctcctcaccccaggttggattcattttgaggcaggctttttctacagtttagcaatcttcgtagaaaaagagtgtttctctgtggacacataaaggggaaccacagacactggggtggtggacagtgggaggagggagaggatcaggaaaaataactgatgggtacaaggcttaatacctgggtgacaaaatgatttgtacaacaaacccccatgacatgtgtttacctatataacaaacctgcacatgtgcctcgaacttaaaataaaagttaaatttaataaataaataaaatgaagaaaaggagtgtttctctcaagattttgactctctttggcctagttttggtcacatgcccattccagaatgaayctggttggccaagctttggtcacatgcttatgcctgggaacatgttatgagagtgggaaagaagtgattccccaatgaaaatttagggtgttgatgc

SEQ ID NO: 507322 - DNA, 576 bp, Homo sapiens
tcatcaatattttcaaagccctgatcactgacatcatgctatacatactgtgcatttgctgtctgtttcttcccgcttagaatgcacacatcaagaggttatagagggccagatgcagtgtctcatgcctgtaatctcagcactttgggagcccaaggcaggaggatcgcttgaggccaagagttcaagactagcctggacaaaatagcaaggccccatctctactcgatagatagatagatagatagatagatagatagatagatagatagatagatagataaatagacagatacacacacacacacacacacacacacacacacatttwtatatatatatatatatatatataattagccggggatggtggcatgtgcctgtagtcccagcagctcaagagactgaggggggaggatcatggcgccactgcactctaggcaacagagcgaggctgagaccctgtctctaatgaaaaagaagtatggtgtcttttgaggaaaacacaggaggctcccatgttgcttgcgccttctgcacgaaatgctggcagggcaggcttgcctcttgttgaga

SEQ ID NO: 507323 - DNA, 507 bp, Homo sapiens
ctgcagcagatgacgtacagcctgatcgagtggcggtcccagatcctgtctgggacgctccccaaggatgaactggcagagctcaagaagaaagtcacagccaaaattgatcatgggaacaggtaggtaaaccagggatggcttttcactgaaaacttggcgaacagtgggcatgttcacgctaatgacactgtttgcagcgacctttgatcttagagttgccaaagaataatgcttactgctctcattttgtctttgaagacatttaattttgttgaaaaaaatgtcacagttccctccatggccaggctctgtgttggatctctgatcccatggaggtgacagatgatcaggaaagatgggtcttggactgaggctgctccactccaaataaagaaaacaaaaacaaaaaacctggctgggcacagtggctcacrcttgtaatcccagtactttgtgaggatgaggctcgaggatcacttgagcccagtagtttggaaccagccc

SEQ ID NO: 507324 - DNA, 641 bp, Homo sapiens
ccttccaaaaacactttttcactttacactctcaccaactgtcttgagaatgcacatttcccgagcctttgccagaaacaggtagtgtgaatctgtatttttgctaatctagtatgcaaagagtgttatcattgtaattggcatctctctgattaaccagtgaagctgaatatcttgtcacgtttgttattaatagttactcttcttctgttcatgctatcttcccatttttctattgggttatgtgacttttatttattatttgtagaagctcttctagattttaatattatgttacatatgttgcaagtatttccctccagttggtattttgtcctcagtgtatactctgtatgttatgcagtgaaatctatcaacatttcctttacaaatgcakgaactattgttgcctaggatgatcataacaaatattattaaaaatgtttccaactcttacccaactatactattgttttacatttaaatttacattggaatttatttttatatatggtatctgttaggaatctaaatacatattttctcatctttaaccaattgttccaatacctatcttgaataccatcattataataaactatgtttcatatagacaaaaattgatacttgggctgtttctt

SEQ ID NO: 507325 - DNA, 643 bp, Homo sapiens
ctgggatttgtacccaggcagtcagggtccagagtcagtgatagtgacacgaatatatatccttgacagcacgtttcagtgaaatagttgttcaagtcatgaatctcgttttcaaggctacaactcattgaaagaagctaacataaagtatgtattatgatgagacagcgtggcctaacttcagaaaaatttaaggataygaataaacatgtattcataatgcatgggtccagaaacctggctatcattgcttccccagacccattcttacactatatttagactccagtgactaccgttgaccgacttctgattttcccaaatccctattccctctgtagggaaatattgcccaattttgcttttgtttaatcagggcataaatcttagatatctaatcagttatagattttcttatatcagagtcaatcaactctgattagtgatgaaggtgaaaggaagcggtcattacatgtcaatgatttgacacaaataggagagatgacacaaataggagagatgaagattaggcaggaattatgaataaaacattcagtaccatgatcactgatatttttctaatatcatccacattcatattatcaccctgtgtgtgatttaaaacactcactctcccctcaga

SEQ ID NO: 507326 - DNA, 604 bp, Homo sapiens
tcttttctctgggcttttctattgtcagtttgattaatgggatgtctttaaatgtatctccttttggatatcttatatctcaacaagtctatttcatgtttttgccaccaacatttccagtagatttcttctaacatgtcagaatgacagataagtttccatagtcagccttatagagagctcattattgtttcaaaccagtgcaattgcccttaagtttccctaaccagagggcctttggagggccatgtcatttccaaactcacgatgagtaaaggtggcatttctgggcttaaaataagggtataagtcaccaattaaagtcaagtactaatttttgcaagataatctcctgagttgatagaaaataaaaatattaaatattttaaatgcattgtatgggctgccaaattttttcatgtaagctatccgtaatttctttttgtattacttagctagtaakagtagaataatcgaactttttaaatttatttagttcactttcttaggaggaaactttgaataaagcagcatttctacaatatataatggcaataaatgatcatcagtttttattctagaaaatatttataaactatataca

SEQ ID NO: 507327 - DNA, 467 bp, Homo sapiens
ctgtttcatttctggagcaaagcaacacatcccctgctctctggtatatacctactgacctgcataaagactataaaaaacagtatattttcatctggcaaggccaatagtacacttcgtcctactttagggatatagcagctccccagcaaaaagttataatctctagcccaggaatcctgatcacagttgccttccacaagagaacatactcatccattatattgattatgtaattctgattgggtcaggtatgaaggagcacattggtaggacacttacatgccagatgatgagaaataaatctcacaaaaaattagtatgctagcttgccaaaatttccagttattcagtggtatgggccatgctgatatatccttttcaatgtgaaggaccagttactgtatatggcccatccaatcwgtaagaaaaatgaacaataccctgataggtatcttcggaatttg

SEQ ID NO: 507328 - DNA, 489 bp, Homo sapiens
aaggctctggtccgggtacttgttttaggtctcatactttcatcatttgcctacacttccttctgtggtatcttaacgtagcttcttcactaagcaaaatggcttgggttatttggccctttatttttttattaaaatgyctacatctttagcaaaggcttgtttcaggcataaaagacccaggtgatttattgaaattcaccttcaactcttgaccttggcagggagacatttttgccctcagcccacagaatggagatatagttgccttcagccatgaaaaggatcttggctggactttgccttgccttttagagctgagttttaataattcaaagtttgcttcctccaaacctactttaaatcttgattgtcagaggtttcttatgtttagccatatattgtgcttactgaatatggattatttgatacagaaaatgtatagtttattaactgtagtcacagacattccaatatgaacctgcagca

SEQ ID NO: 507329 - DNA, 489 bp, Homo sapiens
aaggctctggtccgggtacttgttttaggtctcatactttcatcatttgcctacacttccttctgtggtatcttaacgtagcttcttcactaagcaaaatggcttgggttatttggccctttatttttttattaaaatgcctacatctttagcaaaggcttgtttcaggcataaaagacccaggtgatttattgaaattcaccttcaactcttgaccttggcagggagacatttttgccctcagcccacagaatggagatatagttgccttcagccatgaaaaggatcttggctggactttgccttgccttttagagctgagttttaataattcaaagtttgcttcytccaaacctactttaaatcttgattgtcagaggtttcttatgtttagccatatattgtgcttactgaatatggattatttgatacagaaaatgtatagtttattaactgtagtcacagacattccaatatgaacctgcagca

SEQ ID NO: 507330 - DNA, 578 bp, Homo sapiens
gctgattgtgcaagttttctaactgatactatacttaccctttaaaatttcgttttcaacatcttgacttttatctcattttcaggcagaggctccacaggaattgactcaatggtggtttcagttcaatatctataataagcaaatcccttaaacatgtatttctggaggttatgctctacgctagcaacttaatttcagagtaacaatgaaccatacatttttaaatgaacacttcaaagcacctataggcatagagtcaagtccactgcatctgagtaatccaaaatttaaaccacgctaagtaagttcttttgcacgttccttttctttcaaagagctcagagcaacttgcaagttttatctccttgatcctcacattatgcatcagatgttcacaatggggttcatcattgcctcgccctctgcgagtctgcargcaaaaggatggatttttatattcaaagacgttttatgcctttgcatttgaaagatgaactcataaatacttctttattctttctctattttctctttctttttctatctctcatctgtctttttcttttgttttctat

SEQ ID NO: 507331 - DNA, 578 bp, Homo sapiens
gctgattgtgcaagttttctaactgatactatacttaccctttaaaatttcgttttcaacatcttgacttttatctcattttcaggcagaggctccacaggaattgactcaatggtggtttcagttcaatatctataataagcaaatcccttaaacatgtatttctggaggttatgctctacgctagcaacttaatttcagagtaacaatgaaccatacatttttaaatgaacacttcaaagcacctataggcatagagtcaagtccactgcatctgagtaatccaaaatttaaaccacgctaagtaagttcttttgcacgttccttttctttcaaagagctcagagcaacttgcaagttttatctccttgatcctcacattatgcatcagatgttcacaatggggttcatcattgcctcgccctctgcgagtctgcaggcaaaargatggatttttatattcaaagacgttttatgcctttgcatttgaaagatgaactcataaatacttctttattctttctctattttctctttctttttctatctctcatctgtctttttcttttgttttctat

SEQ ID NO: 507332 - DNA, 555 bp, Homo sapiens
gtaaatgtgaacaggttgtgatgctttccaaagttgttacaggcatgttactggtgacagggcatgctctctgtcttttgaggtacccagacagagggctaacgatgtgtcagagtggagctgaaattctgacattgttgaaggattggcctaaatgatcattaaarccccttctgattctgagattacgttattcaacatggaggtgaaatatccatattaaaaaagcaaaatagcagtggctagttttggactggacaaataagtcctttccccaccaaaaaaaaaaaaaaaaaaagaaaaaaaattcagaaacatttagagaaggcaagctgtcaaaactccgatgaactacagccaggcatggaggtgcacaactgtagttccagctactcgggaggctgaggtggaagaatcactggagcccaaaagttggagcccagcctgggcaacctaagcagactctgttgcaacaacaacaaaatcagacaaattgaagtcaaggagatagtgcctgggagcattagttatcaatgagactacatctgaacccag

SEQ ID NO: 507333 - DNA, 555 bp, Homo sapiens
gtaaatgtgaacaggttgtgatgctttccaaagttgttacaggcatgttactggtgacagggcatgctctctgtcttttgaggtacccagacagagggctaacgatgtgtcagagtggagctgaaattctgacattgttgaaggattggcctaaatgatcattaaaaccccttctgattctgagattacgttattcaacatggaggtgaaatatccatattawaaaagcaaaatagcagtggctagttttggactggacaaataagtcctttccccaccaaaaaaaaaaaaaaaaaaagaaaaaaaattcagaaacatttagagaaggcaagctgtcaaaactccgatgaactacagccaggcatggaggtgcacaactgtagttccagctactcgggaggctgaggtggaagaatcactggagcccaaaagttggagcccagcctgggcaacctaagcagactctgttgcaacaacaacaaaatcagacaaattgaagtcaaggagatagtgcctgggagcattagttatcaatgagactacatctgaacccag

SEQ ID NO: 507334 - DNA, 671 bp, Homo sapiens
gaatcctggttccaacacttattgtctgtgtgactttgggcaaggtagttagcctttctaagccttaacctcttcacctattaagaaggcttaatacataacttaaaaggtaactgaacaccagtgaactaatatgtccaaaggatatgtcacatgatacatgctcaaaaattgacaatccgaccataagatctaatatatgaaatattataattgtcaactttaacatgtagagaaataaaaggcagttctgtgcacccctgtaatcatgtgttgctcaattctgcttttgtccttcttttctttccctgtacttctacccctggtcattcttatatttgaggaatagattaattatggccaaggacatgagactgggagattggaaagagaaatggtgaggggcctggaagagaaaagtttcctggtgggattattctattaggaagccccaagggaggtgtggacaattcatttagtttattgaatgtgaaaatatagaaagattgtaaaaacaaagaaaccctcaacacgccattaatctgaaccctactcttcactcaacaratgccaaatctatcctgtgtcttttgctttaggagaaagtagaatcactttccttattcaggaatgagggtgacaaatgttaagtctgttttcttaggaaacag

SEQ ID NO: 507335 - DNA, 389 bp, Homo sapiens
tcccatgagtcaggatcttctagttattaataacatgggctcttctggatcggaccacctgggttcaaatccataatgtgccacatcctgactgcgtgaccttgggcagtgtattcccactctctggatcttggtgtccttcactgcctagagcctacctaccagggttgttgggataattaactgagtatgaatgccagtaaaggacttaaaacagtgcctgtcaggtggtgaggaagggctccataaacatttgctgctattcctcacactytattatggcgcaatagtctccaaagatcggtttttgagtacccattggagccacttggagcacacgctccttttttggggcacgatggctctttcaacccattcagtgcctctgg

SEQ ID NO: 507336 - DNA, 528 bp, Homo sapiens
tggagttgcctttacctgagctgtcttctagctgcaactcaacaacacatagcaggacgcaaggccgggaatgtataaggtgaagtcagttttcaatgacttggatctctaccacagtaacatggagtggtacctttgctttgaaattcaatttgcatcaattctagagatgccagaagaatgcaagaaaaaggaacacatgactcaaatcaacatctcacctctccccagccttccctagaagggcatcgtggcagggagtgtcccgcagtgagacccctgggcaatgatctgttttacccttcctaattgcaagctacccaaggtctcatcaggatctgaaaatctgactgaaagacactttcctgaaaagtttccaactctccccactttccayacatagggacgccatatatgtttcagggcccagagttcaatgtcatcttttacaagctgtatcccaactcctggccaagtcaatttcttcctgggttttaggaagccctgggcattttgattgcttactgt

SEQ ID NO: 507337 - DNA, 580 bp, Homo sapiens
cttctgattttctttgtttaacatgcatttatctgcttttgatggagttgcctttacctgagctgtcttctagctgcaactcaacaacacatagcaggacgcaaggccgggaatgtataaggtgaagtcagttttcaatgacttggatctctaccacagtaacatggagtggtacctttgctttgaaattcaatttgcatcaattctagagatgccagaagaatgcaagaaaaaggaacacatgactcaaatcaacatctcacctctccccagccttccctagaagggcatcgtggcagggagtgtcccgcagtgagacccctgggcaatgatctgttttacccttcctaattgcaagctacccaaggtctcatcaggatctgaaaatctgactgaaagacactttcctgaaaagtttccaactctccccactttccacacatagggacgccatatatgtttcagggcccagagttcaatgtcatcttttacaagctgtatcccaactcctggccaagtcaatttcttcctgggttttaggaarccctgggcattttgattgcttactgttttccccttc

SEQ ID NO: 507338 - DNA, 537 bp, Homo sapiens
gggagctctgtgagggcaggcaatgtgccttttctctgtttgtgctccagagtcaagcacagtgcctcctacagagcagaaacgtgctcaagagtacaccaatggggccaggcatggtagctcatgcctgtaatcccagcactttgggaggccgaggtgggtggatcacctgagaccaggagttcaagaccagcctggccaacatggtgaaaccctgtctctactaaaaatacaaaaattagccaggcttggtggcatgcrcctataatcccagctactcaggaggctgaggcaggagaatcgcttgaacctgggaggtggaggttgcagtgagccaagatcgtgccattgcactccagcctgggcgacaggagcaaaactccatctcaaaaaaaaaaaaaaaagtacaccaatgaacaacaggaaaaagaagcagtacgacagactacgggaggaagcaactctccagtaggaagaatatatttaatgtattttcttagtgctaggtataggaacttccattaaagcagcctgtac

SEQ ID NO: 507339 - DNA, 522 bp, Homo sapiens
aaactggagatgagatccaagtaggagcagcgaccctgtaagccaaggtagggagtttacaattcattctgaatgaatgaattggatggatctgaacagaggagaggcaggatgcaaaactgtagtttgagatgaatgcatacatgcatgcatattatgcttgaaasagatataagcaaatactttggttatttagaggttccaatttatgcagatctgatgggcatttgtatttcatgagacagtgttgaattacaaccattttggtcagaactgatttgcttacatgcttagatagccctgaagctagttgctttcaaaagttgctttgctttggtatgtctgtgtaagactgagaagtatgaagtgaaggagggcagtaagaatttgaggacagttggaatttcaccaggtaccaagaattttaagaatgatgtttcaggctgcaaagagatcccagagtactttatgctttgtgatgggtgaatttaagtccgagtgtctcctacctagcaatgtttt

SEQ ID NO: 507340 - DNA, 565 bp, Homo sapiens
cagctaagaagtaatattgctgggatttgaacccagagatttttgctccagcatgtgggtccttaaccacaaccctatacagcctctatgtggtatccttgaataaattaaatttgaaggagaaaaatgagtgtcttgtatcaaagtagcgaagggatgggaactgtggattagcttagtaaaaaggtattttggtcagcaacaccatttgggtaacaatgccrttttgaaacaggccaggaagagttataatgaaaataaacattgtttggaatggaggcagcaggcagagttcattttctctctttccctttcaggtagttctgaacaataaaagccaccaaccagtattcatatctgattaaacaaaagttaaaaaaaaaaaaaaaagagagagagaaaagaccgcaacagccaagaggcaagcttaatctttggtatttagaacgataaagaggagcaattgtgaaatccacttaaaatatgatttcatgttctcatatacattttgaatttatggagaactgacttctgccatttattcagagagcaaaaaaatgcatat

SEQ ID NO: 507341 - DNA, 565 bp, Homo sapiens
cagctaagaagtaatattgctgggatttgaacccagagatttttgctccagcatgtgggtccttaaccacaaccctatacagcctctatgtggtatccttgaataaattaaatttgaaggagaaaaatgagtgtcttgtatcaaagtagcgaagggatgggaactgtggattagcttagtaaaaaggtattttggtcagcaacaccatttgggtaacaatgccgttttgaaacaggccaggaagagttataatgaaaataaacattgtttggaatggaggcagcaggcagagttcattttctctctttccctttcaggtagttctgaacaataaaagccaccaaccagtattcatatctgattaaacaaaagttaaaaaaaaaaaaaaaagagagagagaaaagaccgcaacagccaagaggcaagcttaatctttggtatttagaaygataaagaggagcaattgtgaaatccacttaaaatatgatttcatgttctcatatacattttgaatttatggagaactgacttctgccatttattcagagagcaaaaaaatgcatat

SEQ ID NO: 507342 - DNA, 592 bp, Homo sapiens
taaattcctactcaaaaaacaaaagtgtaaggctctgatgataccaagtgttagtgagaatatacagaagcggtcattcccctgcactgctggttgagattgtcaattagtatagcctttttggaagacaattgatcaatatctagtaaagttgaaaatataattctcccacagtcaagccatttcacttctaggttacatacccaagaggaacactgttatcagcaaaaggtagcatctatgaggacgttgctgacagcaccattagtaattcagaaaaactgaggggaaaacctacatatgcaccaacacgagaataggaatctattaacagacaataaataaatcatggaatactacagagtagttaaaatggrtaaactagatttgcattatcaacacagagaaatagattgagatgataaataatattaaaaatatagataaataataaataatgagagaagagagcaagtcatagaagggatgtatatacagcatgataccactatgtcaatttgaaaactcaccagactctagactgtgtaatactattacataaaaagtaagagtataggtcagatacagtgac

SEQ ID NO: 507343 - DNA, 516 bp, Homo sapiens
gtttctttttcatctgattggtgtaacagtggtatcacaaatatttcttagcggcaaagtttcttggtccttttagttatatttcacatggaggaagatactctacccaggaacsctgtgtggttattgaagtcattagcaaggagggtataaccttagtgaatcattacccatgggacacaaatggaaaacatgcacatttaatttaaaaaaaaatgtagatttgctaggtgagggccaatagcagcttaaaaagggagcaactgggtagcaaaaggaatttgtctttttggtggtctctttcatctccctaaaccaagggttggcaagttatggcagataagacaaatctagctgctgccaatttttgtataactcatcagttaagaatggtttttgcatgtttaaatggttgaataaaaatcagaggaggagtaatgcttcatgacacatgaaaatgatatggaattcaatttcagtgtagataaataaagttttattggaacgcagccatgc

SEQ ID NO: 507344 - DNA, 544 bp, Homo sapiens
cagacatggggcagggggaggaggccaaccagaatggtgagctaagtgtggatcaccccttcttaaccaggttacagtccaggggaacctgggaattgcttcctacccatgcaatggcaaaggctgcaaaagggcaggaggagactgtgcaatcccaaagcaactgctttggtagattttctccattgaattggtgcatctttttattttgccaggacaaccaatgccctggaatagtttgtgctaccatagattggccagctayatgcccagtgcttaacccatggtttgacattttttctcttttaaaaggtggctgtcaccctttaaaatcgatcatagagaaatttaagattaggactgcttattgaagcttattttagtgagtaatccttggattcatgcagctgtaggatctaagtctgcaagggtcttatatgtctcatctagccctatttgttggccagttctaagggttccacctgactggagcctgagaacctctagaggcagaaagtctacaacctaaaaaggcaactctgac

SEQ ID NO: 507345 - DNA, 544 bp, Homo sapiens
cagacatggggcagggggaggaggccaaccagaatggtgagctaagtgtggatcaccccttcttaaccaggttacagtccaggggaacctgggaattgcttcctacccatgcaatggcaaaggctgcaaaagggcaggaggagactgtgcaatcccaaagcaactgctttggtagattttctccattgaattggtgcatctttttattttgccaggacaaccaatgccctggaatagtttgtgctaccatagattggccagctacatgcccagtgcttaacccatggtttgacattttttctcttttaaaasgtggctgtcaccctttaaaatcgatcatagagaaatttaagattaggactgcttattgaagcttattttagtgagtaatccttggattcatgcagctgtaggatctaagtctgcaagggtcttatatgtctcatctagccctatttgttggccagttctaagggttccacctgactggagcctgagaacctctagaggcagaaagtctacaacctaaaaaggcaactctgac

SEQ ID NO: 507346 - DNA, 624 bp, Homo sapiens
gaatttccaccttgacgcttccccaataagttttgccagttacttgtgtgcacatgggttcatacatcccacgtaaataggaagacatgggtattcctattccaaccagctctatgcttgcttccttgtcagtttcgctggcctgttttcatgaagatcacagaaatcagcacaccacatcaccccacccctttccaccctactgggagagtctctgggtaatagagaatgtttccattgttcctctttctgccttccattttctagccttcatstctcatcactacaatccatcaaaaatgccaatgccaggcaaatctatctctccctccccttggaccacattcttgaatccctgccctggcactccttctccctcagcctacagagcaaatggctcaatcttcagagcctctgacctctccagacccacacacacttttgaatcctcaggaccgctccctgcccttctcctcctcctcctgcgtcatctggtttcccttggaaccaagatacccatctctggttacaggacactttctctttctataggaactctaggtcccctgcaggcagactacctgctttatttccatttttcactttggatgtaattcatcacag

SEQ ID NO: 507347 - DNA, 571 bp, Homo sapiens
acccacacacacttttgaatcctcaggaccgctccctgcccttctcctcctcctcctgcgtcatctggtttcccttggaaccaagatacccatctctggttacaggacactttctctttctataggaactctaggtcccctgcaggcagactacctgctttatttccatttttcactttggatgtaattcatcacagccaattatgatttgctttaytctgtgtggtccaacaaaataaatgtgttcctaggaagagcttttaattttttcagctattttcacattagtcacgagaatgtaattgagtaaacaccacttttgtgaattgtaatatatttctggttattttatttcattcatgctttcttccgttcctttctcctatttgcctatttctgactattaaagggccccttcttacttaaagatccagcatgtcaattttttttcctccacctccccacctccaacacacagccattatgaaagtgtatccctttttaaagcttcagtttattctctgaatacaatcagatacagatgcacaatctgcctccaccaagctgtgtg

SEQ ID NO: 507348 - DNA, 564 bp, Homo sapiens
ctgtgtggtttgactactgtgtgcagacacacttctggtgagggggaagtaaaaaaaaatcatacgactttgttgttttccttacaaagctcacaatgtagggatttgtcagtttgttaagtcaaaatagcaacacggtgtggaaaatcaaagctgacctttgcttggagccacgagaagaaagggaaggagttggggtgaaggtctctgaggcttcaagaggatgggcatgctttttcaaaaatcatgaaaaacrgaagggactgagcctgtgtgcagtatataactttttgcaaaaaaaatttgtccactgtctgttttttcttgtgtgtagccttaagtgttgtacataaccttttataattagaggtggacaaattcccagtacctaggacaaagtctgacacatagttggtgctcaataaatgttagttgaataaataaatacatcttattagccatcacttggacttgacacaagaaggtatggattgtttttctagataataagttccttttaaaggtatagatggggtgcttataacaccccttgaactcctaaat

SEQ ID NO: 507349 - DNA, 495 bp, Homo sapiens
cttcgtttttgccgcctagtaacgatgcaaaatcttcaagattctaatatgcctaaacaaatttttctacttctttctttgataattaccttctctttgcttcattgaaaacaatgaagctatctgatatcatcttctccaattttacatattttttaaatcttttagaaacatctaatttacaattatactctattctcttataaatttttacctttctattwtcctaaaaaggtaaataaaaaataatgaatgctctgtttatctgtctcccacccatatataatcaaaccaatctcacttttcatcaataatttctggaatgtaagtgaatgaggaaataagggagggagtatagaaagagaagagaagaacacttagtaccagaaaacagcaacatttaaaccctaaaagagaaggaaaagccaaataaaattgtttgtaaagtggatataattgcaacagaaatattgagaaattcaggtttaaaaaaat

SEQ ID NO: 507350 - DNA, 464 bp, Homo sapiens
gggaggctgaggtgggagtatcacttaagccaggaggttaagactgcagtgagctgtgatcctaccactgcagtccacactgggcaacagagcaagaccatctctcaaaaaaaaaatagtgtattataaacatttttgtatatgtcattggtcaagctatacaagctatataagtatttyttccatttagctatctagtagtttaactgttgagttgcaagatttgctgttgttcacctttaagtgatattggcaaaagacttttcaaggtggaaattggcagaccaagaagcaacatataagcacatcagatactccacattttacaaatagtgtcattttcattttagccattgaacgagaaagtacacagttgtatcccattgtgatttcaatgtacatttccataatgaaatgttgagtaacttttaatctggcatttgcatatgtttctttgtgaggtg

SEQ ID NO: 507351 - DNA, 609 bp, Homo sapiens
aacttgccaactaactttagcatgcactgatgaatcttacctgcaacaattattatgcgayggtaattttctatttctacgattcttcttttggtttcattctttgtatattatgaataatgtggtgataaacatttttatacatgattcctgatgcacataaacacattttatttatttttttgtttttttatttcaataggtttttagggaacaggtggtatttggttacatgaataagtcctttagtggtgatttctgagattttggtgcacccatcacccgagtagtgtacactgtacccaatgtgcagtcttttagccctagctagcccaaccctttcccctgagtgtccaaagtccaatgtatcattcttacacctttgcatcctcatggcttaactcacacatatgaatgagaacgtatgatgtttgatttttcattcctgagttgcttcacttagaataatagtctctaattccatgcaggttgctgtgaatgccattattttgttcctttttatggctgagtagtattccatgtatatatatatatatatactacaatttctttatcaactcgttgattgttgggcttttgggccagttc

SEQ ID NO: 507352 - DNA, 609 bp, Homo sapiens
aacttgccaactaactttagcatgcactgatgaatcttacctgcaacaattattatgcgatggtaattttctatttctacgattcttcttttggtttcattctttgtatattatgaataatgtggtgataaacatttttatacatgattcctgatgcacataaacacattttatttatttttttgtttttttatttcaataggtttttagggaacaggtggtatttggttacatgaataagtcctttagtggtgatttctgagattttggtgcacccatcacccgagtagtgtacactgtacccaatgtgcagtcttttakccctagctagcccaaccctttcccctgagtgtccaaagtccaatgtatcattcttacacctttgcatcctcatggcttaactcacacatatgaatgagaacgtatgatgtttgatttttcattcctgagttgcttcacttagaataatagtctctaattccatgcaggttgctgtgaatgccattattttgttcctttttatggctgagtagtattccatgtatatatatatatatatactacaatttctttatcaactcgttgattgttgggcttttgggccagttc

SEQ ID NO: 507353 - DNA, 572 bp, Homo sapiens
tatatatatatatataaaatgagtaggaagagacattattgtaatttacagatgaaaatattatcttcctagaaaattctaaagaagtaatctaaaaaaattagagagtttagtaaggtggctgaattttaggtaaaaatgttaagaaatcaatagctattgccaatcaaaaataatttttaaaaggtaccatccaaaatagcaacaatactatagaagtatgtgagaccttatgaagaaaaaacagcaataataaaagaagtcttgaaaaagtaagagagaaagaataatgtttctgcatgagaaaactatttcgcaactatggcagttttcttttaatttattgatttaatacaatattaataaaagttccactgaaattttattttgaaagtttctcttaagatatagttgcaggggtaaatgcttgcagataaccaagaaaacttggaaacaaacaayaaggtggattcccaagtataatatgtagctacagcaattaatacagggtgttcattgcaagatttggtaaatccatgaaggaagacagccagccaagaaagtagatatag

SEQ ID NO: 507354 - DNA, 539 bp, Homo sapiens
ctgcactttcatttcaatactcttccagttacacaagacagagacaattctgatttgcacatgtaaatagaaacagatggccacattcttttttaaaaacaaaatccaaaagctttggaatagtaagaaatttgtttcaactctctaccactaacaacatctaatatctccttgcagtccttatctcagatatgttagacaagaagcatctgaaacatatattgactgctcagcccatggacagcatcatcattggcacagcatgttaaacgctaatttctttatgyacagttgacactgccgctttgcctgacatttaagtgaaggcagcacatgcatatacaccctcgtgctaaactccaacttttaacatcctggcgcccactgacatgctaattttttatcttcatcaccccaagctggcacatggttggcactcaataaatattcattaaatgaattaattgggctgccagaattacttgctttctttttttttttttttttttgcaggggaccctaaaatagtttttctcctg

SEQ ID NO: 507355 - DNA, 570 bp, Homo sapiens
tttaagtgaaggcagcacatgcatatacaccctcgtgctaaactccaacttttaacatcctggcgcccactgacatgctaattttttatcttcatcaccccaagctggcacatggttggcactcaataaatattcattaaatgaattaattgggctgccagaattacttgctttctttttttttttttttttttgcaggggaccctaraatagtttttctcctgccatttctatgaatgtctgaacgtgcaaatatgtcaatgactagggaaaatatagtgacgcactggtcattctacaactttaagtctacacaggttccttcatcaaaacagggcattaaaaacaactaagctatagagccagatcactggaggtactgtagtttataacctgcttataaaccccagttcttaagtccctcaatgcctagcatgctacctaccaatacgcatacaaataaatcagacgatcttgtgccccccagcccaatgtttaccaagacttcaaaatgttctggtgagatcacctccctgctatgtgatgcaaacatcagagtataaatctttt

SEQ ID NO: 507356 - DNA, 337 bp, Homo sapiens
acctccagggctcaagtgatcctcccacctcaggatctctggtagctaggaccagaggtgcacagcatcatgcccagctaactttttgtacttttttgtatacatggcattttgctatgttgccaaggctggtctaaaatgcctagacttgagctattcacccctctgcagcctcccaaagcactggggttataggcatgagcccccgtgcccggctccagccctgctctttctgtgctctgtggtgctgagcgcatcacttcacctttctgaatttcagaggggataacaaggcactccttccttggcttaactcrcaagatgaccaagtgaagtt

SEQ ID NO: 507357 - DNA, 465 bp, Homo sapiens
cagctgagggcacagtttgcctggttcttctataataggttaagtatttttttctccatttttttcccttttaaaagtactgctagaaggccaggtgcsgtgtctcacacctgtaatcccagcactttaggaggccaaggcgggcggatcagttgaggtcaggagttcaataccagcctggccaacctaaggaaacctcatctttactaaaaatacaaaaattaaccaggtatggtggtatgcacctgtagtcccagctactcagaaggctgaggtgggaggatcacttgagccttggaaagagaggttgcagtgagccaagatcacaccactgcactccaccctgggcagtgagtgagaccctgtctcaaaaaaataataataataataataataataataaacacaagtactgctggaacttctttgcagaaacaacttgtggggaaggagggaggtatattt

SEQ ID NO: 507358 - DNA, 617 bp, Homo sapiens
ttcctagaaggcgccccacatgagagtgttgatgttctctgcgtgctgacacagcattctgcagccaagcaggaagggagagtcccctcattcagtctgctttcagttcttcagatcacatcttggagaaatgatcagtaagtgcaatgagtgatccttgatgattgctggaatttgcaaagaaaaaggatctaaagagtatgattgggttaactgggaggaaatttgaatgtagattaagaagtacatgatagaattgaatggattttaaattttctgggtgtgagaatcattgctgtggttatgtagaagaatgcccttgtgctaggagatacgtgctgaagtatttaggagacaactcatgtttgtctcatacttgtctacaaatggttcacaaaaaatatgtgtgcgcttttgcacacgtgcccacatgtgcgcgcacacrcacacacaccagtcgccccttatccatggtttcgctctcatggtttctgttagtctcagtcaaacaaggtctgaaaatatgaaatggaaaattccagaaataaacaattgataaattttaaattttgcaatattctgagtggccgtgatgaaatctcatgctgtcccacacc

SEQ ID NO: 507359 - DNA, 497 bp, Homo sapiens
tcaaattgattgctaacttgtgtaagctaccgtacatggtgagttaaagagaagaagaataaactttttgaagttyacaagccttgacagacaaccatgactaaaatactgaagagaaacggaacctgaataagcatttcttaaatattgaaagcagagcatggtacattttaaaaagtaatcaaattctatctggagtggctaatggggagccatagaagtttgctattaagcaaaggaagggtcaaggctggcctttattattcctccatgaaagcttcctggaagctgacttaacaaaggaagaattttgatgtacaaatttatttgatgatgagtcaggagaagtgatagcccaggaactgactttaccttgacaagaacaaagatgactgataaagacacaaatcaccactgcctcacaaaaaacaacagcaaaacttaaaatttttgaacttgtcacgtttgtaacctggatatttaagtacttcacgttt

SEQ ID NO: 507360 - DNA, 497 bp, Homo sapiens
tcaaattgattgctaacttgtgtaagctaccgtacatggtgagttaaagagaagaagaataaactttttgaagttcacaagccttgacagacaaccatgactaaaatactgaagagaaacggaacctgaataagcatttcttaaatattgaaagcagagcatggtacattttaaaaagtaatcaaattctatctggagtggctaatggggagccatagaagtttgctattaagcaaaggaagggtcaaggctggcctttattattcctccatgaaagcttcctggaagctgacttaacaaaggaagaattttgatgtacaaatttatttgatgatgagtcaggagaagtgatagcccaggaactgactttaccttgacaagaacaaagatgactgataaagacacaaatcaccactgcctcacaaaaaacaacagcaaaacttaaaatttttgaacttgtcacktttgtaacctggatatttaagtacttcacgttt

SEQ ID NO: 507361 - DNA, 473 bp, Homo sapiens
ttttctagaagtctggctcattctcgtggggttgggtttctgttgaaggtactctgagaaaccaccgtccagccaactggctgggaggaagtagcccagattgcttgcatagagccaygtccagcatcacttaaatcgtcagatttatgaatatgtgggctctattccttgaattacaagcaagtaagtaattgatgatgttaacataaaaaaaaaaaactttagaaggctgctctcttcttccttaagtgaattacgaacttgttcctaggacatattaggaagtaaacagcatataatcgcagggatttacagggcaattaggttaagcactgcaaaagtgcattagtctgacactgcacaaacattctgataacagacagatcaaggcactggtccaaattgctccccagagggaagcgtgcattcacctagatcaggcagaaccataatattcatcaatccccaaactc

SEQ ID NO: 507362 - DNA, 192 bp, Homo sapiens
gcatttctctgcacctcccagtgctttaaaaggtgtgaagcacaggctttacatccrgcacaatgccaatttattttagtctgcaatactgagtattgagcaagtaaaggaaaaacatcttcctctccaaggtgggccttaattccttggtgacaattaccggtctttcccaaaagccaaaagtgcaatatt

SEQ ID NO: 507363 - DNA, 639 bp, Homo sapiens
catttctctgcacctcccagtgctttaaaaggtgtgaagcacaggctttacatccggcacaatgccaatttattttagtctgcaatactgagtattgagcaagtaaaggaaaaacatcttcctctccaaggtgggccttaattccttggtgacaattaccggtctttcccaaaagccaaaagtgcaatatttcagggtttgtcatcaagaattttcttttaacccacccttcacatctttactgcctcctgctccccacccactttcagcacatttaaaatcagtccmaaacttttcccagccttcaagtgtctgagacctgattcatttcatggacatattaaaacacacttggacccagccaatgtgtgaccagttttacttgtctttcttctatgcttgtaatagaatttgtatagtacaataaaatatctggaatcacatcacattttttatcttctgtttccttgagttgggatagttttgccaggatgccattgaagaaagttacttcaccatgatggtgctaggaagaaaaccaaccaaacaaacaaaaagtccagtattcttgcagcttctaagcttgaaagtcagaaggactttccaaccatttaatttccctgattttttacataccct

SEQ ID NO: 507364 - DNA, 558 bp, Homo sapiens
gtccattaccattaaaaaactcttggtcaatttttaaggaaaaaatatatcactctgagcttggcttgacgtttctttctatcttgagagtctggtgtaatagcgcctgatgtccatggtctcatctgagtaggtcttccacactcactctggaaagttctgatacagtcgttccctgtctaatctgcatggttaggacatgtgatgtggtttttcaacgtattatctatgatgtaccatctaggtatgtactgtctcctcaactgtaaagctgaagcaccagctctccaactggagtggttttctccctaagttgggttgccagatgtagcaaataaagtacatggtgtcctgtaaaatgtgatttttagacaaaaaataatgttctctggaatattggggactaacactacaaagtattcatttttttttttttctggaattcctagttaaatgagtgcactgtgtgtgtgtgtgtttttttttttttttttttttwacctgagcctctacttggaggggacacttggtaaggtctggaaacatttggggttgtga

SEQ ID NO: 507365 - DNA, 558 bp, Homo sapiens
gtccattaccattaaaaaactcttggtcaatttttaaggaaaaaatatatcactctgagcttggcttgacgtttctttctatcttgagagtctggtgtaatagcgcctgatgtccatggtctcatctgagtaggtcttccacactcactctggaaagttctgatacagtcgttccctgtctaatctgcatggttaggacatgtgatgtggtttttcaacgtattatctatgatgtaccatctaggtatgtactgtctcctcaactgtaaagctgaagcaccagctctccaactggagtggttttctccctaagttgggttgccagatgtagcaaataaagtacatggtgtcctgtaaaatgtgatttttagacaaaaaataatgttctctggaatattggggactaacactacaaagtattcatttttttttttttctggaattcctagttaaatgagtgcactgtgtgtgtgtgtgtttttttttttttttttttttaacctgagcctctacttggagkggacacttggtaaggtctggaaacatttggggttgtga

SEQ ID NO: 507366 - DNA, 533 bp, Homo sapiens
tgtttataaaccactgcttctttccttgctcccagcccccactcccttcaccttcaatctgatattagtttcttgtccattgccttgcattgctgctgatttgtaccaactattaggacagttctgtcttctggatcactgtcattcttaacaaaatgacccatgttttggttattgatytcaacatatacataaacaattcttccaaaactgcggcttctcagctcccagaatcattttcttccaatatttctgtcttctaccttacacaagccaatcatttgcagtatgatactttcatttctaaagaaatatgtctttttgtgataactcccctgaataatagtaccaagtttattaataacttattaaatatatttcagtggcacattcttatatctcatgcaatgagtaattaaacatcagaccttgtcatcttctttaattatttaaaagtcatggcagaataaagtaacattgtatcttttttaagcttcaacattatgcctggtataaaatatgtgttaaagttc

SEQ ID NO: 507367 - DNA, 533 bp, Homo sapiens
tgtttataaaccactgcttctttccttgctcccagcccccactcccttcaccttcaatctgatattagtttcttgtccattgccttgcattgctgctgatttgtaccaactattaggacagttctgtcttctggatcactgtcattcttaacaaaatgacccatgttttggttattgatctcaacatatacataaacaattcttccaaaactgcggcttctcagctcccagaatcattttcttccaatatttctgtcttctaccttacacaagccaatcatttgcagtatgatactttcatttctaaagaaatatgtctttttgtgataactcccctgaataayagtaccaagtttattaataacttattaaatatatttcagtggcacattcttatatctcatgcaatgagtaattaaacatcagaccttgtcatcttctttaattatttaaaagtcatggcagaataaagtaacattgtatcttttttaagcttcaacattatgcctggtataaaatatgtgttaaagttc

SEQ ID NO: 507368 - DNA, 533 bp, Homo sapiens
tgtttataaaccactgcttctttccttgctcccagcccccactcccttcaccttcaatctgatattagtttcttgtccattgccttgcattgctgctgatttgtaccaactattaggacagttctgtcttctggatcactgtcattcttaacaaaatgacccatgttttggttattgatctcaacatatacataaacaattcttccaaaactgcggcttctcagctcccagaatcattttcttccaatatttctgtcttctaccttacacaagccaatcatttgcagtatgatactttcatttctaaagaaatatgtctttttgtgataactcccctgaataatagtaccaagtttattaataacttattaaatatatttcagtggcacattcttatatctcatgcaatgagtaattaaacatcagaccttgtcatcttctttaattatttaaaagtcatggcagaataaagtaacattgtatcttttttaascttcaacattatgcctggtataaaatatgtgttaaagttc

SEQ ID NO: 507369 - DNA, 643 bp, Homo sapiens
tgcttctgcagcacacagtgcaggccgcctgctctgttatcactatgtacctgtgaaacctccatttcctcctcccaggtgaacgatgagctcaagggagcttgttccatgtgtctagttcacctttatacagaaccttgtgcctagcaatcgcagaggctcagaaaggtaatgtaattaccacaatcgaagccaattaggcayttagatactttgatggatccactgaagaaaaacttgtttttgttttcctaaccagtattctcccctttctgctaagacaggagaggagagatccctgaaacttatgtttttaaccatcttgtggttagtacatcattctctcagccctttcttcagcacattgcacgtgcacactgaatttgttactgctcaccacactgggaattagtcactgaacaatgactaattgctctcaaggagcttaccttcttgctctcagatgcagaaacctaaagacaccagacaagcccaaactgaccgatagttggcaaaatcactgatgtcttctcggtgtcaaaatcctgaaagacaagaaagactgaaggactgtgatatatggcagcaggccaaggataaacaacaatgaagtgcaatgtggaattctggaaccaaaccaaaa

SEQ ID NO: 507370 - DNA, 643 bp, Homo sapiens
tgcttctgcagcacacagtgcaggccgcctgctctgttatcactatgtacctgtgaaacctccatttcctcctcccaggtgaacgatgagctcaagggagcttgttccatgtgtctagttcacctttatacagaaccttgtgcctagcaatcgcagaggctcagaaaggtaatgtaattaccacaatcgaagccaattaggcacttagatactttgatggatccactgaagaaaaacttgtttttgttttcctaaccagtattctcccctttctgctaagacaggagaggagagatccctgaaacttatgtttttaaccatcttgtggttagtacatcattctctcagccctttcttcagcacattgcacgtgcacactgaatttgttactgctcaccacactgggaattagtcactgaacaatgactaattgctctcaaggagcttaccttcttgctctcagatgcagaaacctaaagacaccagacaagcccaaactgaccsatagttggcaaaatcactgatgtcttctcggtgtcaaaatcctgaaagacaagaaagactgaaggactgtgatatatggcagcaggccaaggataaacaacaatgaagtgcaatgtggaattctggaaccaaaccaaaa

SEQ ID NO: 507371 - DNA, 423 bp, Homo sapiens
tggttaaagacactgacttttgatttgatcctggctccttcactgtttcagtcggataggttaggttacgctgcagtaacaagcagcaccaaattttcagtttctgaacacaataaaagcttattttacctttataccaagtcagtgcaggtccaggtgactctgtagggcaaccaccttcatgcagtgggtcagcaatccacatctcttcaatcttttggcacctccatttcaacaaatgcctccatgactgctggagcagaggaataaagcattaaagcccacatgagagctcttacatgtgtcagcctagaagyaccttatcactcaaagtcacaacacattggcaaaactagtcacaagaccctacccaattgccaagaaagatggaaaacaaagttttccatgtatctaggaagagga

SEQ ID NO: 507372 - DNA, 613 bp, Homo sapiens
tggtcactgaaaacttaggattgctttttttgcctttccttataaacctctctcccccmccccgctctctctctctctctctctctctcacacacacacacacacacacacacacacccctctagggccatagagaagatatgccagtgattcatccaaacagccatggtaatgcctttacaaatattggagccatagacagagtagcatgcaaaatttctgcagcaaaatatcattggaacgaagttcagtccaatgagtcataagaaaactacccctttgctgccatctctatgaaatgattcattcctacaagctctaaggagaaaggacctacatctcagtcttggttaacccagcatggctacttgtctgaatcatgccccaggactcaccatggatgctgagacccagcccaaggtgctcatttaaagatgatactaatatttttaataactacaaaataatatttattgattaatatcagcacaaatactgtgcagcaacaaaaaacctctttatttcaaaaattctatttgttcttcaagaaaatattttgtgttccacatcactctgtatctgtttctggtattgcagaaatcatagtctatat

SEQ ID NO: 507373 - DNA, 613 bp, Homo sapiens
tggtcactgaaaacttaggattgctttttttgcctttccttataaacctctctcccccacsccgctctctctctctctctctctctctcacacacacacacacacacacacacacacccctctagggccatagagaagatatgccagtgattcatccaaacagccatggtaatgcctttacaaatattggagccatagacagagtagcatgcaaaatttctgcagcaaaatatcattggaacgaagttcagtccaatgagtcataagaaaactacccctttgctgccatctctatgaaatgattcattcctacaagctctaaggagaaaggacctacatctcagtcttggttaacccagcatggctacttgtctgaatcatgccccaggactcaccatggatgctgagacccagcccaaggtgctcatttaaagatgatactaatatttttaataactacaaaataatatttattgattaatatcagcacaaatactgtgcagcaacaaaaaacctctttatttcaaaaattctatttgttcttcaagaaaatattttgtgttccacatcactctgtatctgtttctggtattgcagaaatcatagtctatat

SEQ ID NO: 507374 - DNA, 613 bp, Homo sapiens
tggtcactgaaaacttaggattgctttttttgcctttccttataaacctctctcccccaccccgctctctctctctctctctctctcwcacacacacacacacacacacacacacacccctctagggccatagagaagatatgccagtgattcatccaaacagccatggtaatgcctttacaaatattggagccatagacagagtagcatgcaaaatttctgcagcaaaatatcattggaacgaagttcagtccaatgagtcataagaaaactacccctttgctgccatctctatgaaatgattcattcctacaagctctaaggagaaaggacctacatctcagtcttggttaacccagcatggctacttgtctgaatcatgccccaggactcaccatggatgctgagacccagcccaaggtgctcatttaaagatgatactaatatttttaataactacaaaataatatttattgattaatatcagcacaaatactgtgcagcaacaaaaaacctctttatttcaaaaattctatttgttcttcaagaaaatattttgtgttccacatcactctgtatctgtttctggtattgcagaaatcatagtctatat

SEQ ID NO: 507375 - DNA, 626 bp, Homo sapiens
gactttggtcactgaaaacttaggattgctttttttgcctttccttataaacctctctcccccaccccgctctctctctctctctctctctctcwcacacacacacacacacacacacacacccctctagggccatagagaagatatgccagtgattcatccaaacagccatggtaatgcctttacaaatattggagccatagacagagtagcatgcaaaatttctgcagcaaaatatcattggaacgaagttcagtccaatgagtcataagaaaactacccctttgctgccatctctatgaaatgattcattcctacaagctctaaggagaaaggacctacatctcagtcttggttaacccagcatggctacttgtctgaatcatgccccaggactcaccatggatgctgagacccagcccaaggtgctcatttaaagatgatactaatatttttaataactacaaaataatatttattgattaatatcagcacaaatactgtgcagcaacaaaaaacctctttatttcaaaaattctatttgttcttcaagaaaatattttgtgttccacatcactctgtatctgtttctggtattgcagaaatcatagtctatataataatta

SEQ ID NO: 507376 - DNA, 635 bp, Homo sapiens
ctgttacacctttggatctgctgcagtgtttatgccaaggccatgctcaccccaggctgctactagccaatagctgaacatattggggtatgaaagccatgccattctgcctgatgcctcttacagtaggcaatctttgctccaggacttcccatcagcctggccaagactttctcagaatcacactgcaggccraagctccttttcctcagtcctcctgccttccctcctggctttctctctcccctttcacaggtgtcagatccacattgtgttcaaagagctctcttctcctatttctgatacctcacttgtttatcctctgtaggtgtttctcctaatacatctcttgcacatctggttccaccttggcatctgtatctttgaggacctaaacagacacagaaatcaagtaacaatgcaaaaagcctgacgctcactgactattaaattgttgacaaatataagattgctgggccttgggaaagcataatttcacttgttcctaataactgaaaatgctttttgaaaaactaaatatgccatgcataaagggcctaagatttaggttttcctgtagaaaaacatctgtgccctagtgggaaagtatcacttttaaatataaaattttaaaa

SEQ ID NO: 507377 - DNA, 624 bp, Homo sapiens
cactgtgtggttgctacctccagaaacaatggcttcaccaaggactgatgggacaaatcagtccgatttctgccaaggtcttttaaatgtcctttacttgaatttctcacagtctgactgggtttgtcaacataatttattttaatttaccctgaatgcccatccctctaggaggtcaaatccaaccctctctgagatgccaatggtgttatttattcatccatcatttattaatccattcttgtatttaacaaayttagggtgagggctcacaggcactgcactaagctttactgatacaaggaccaatgaaacacttgtcttttcttctaggagcttacgtttcaaatggaaaggcagagaagtaaacaaacagttacaatagagggtgtcaatgcaatgatgcaatgatagctatttactgcattctatcattgctcttcactcataacaggagcatacactggttgcgatggtacctaatgcagagactggggaagtaagagaaagccttcaaaggagatggtcccggaactggtcctgaatgagaaacaggagttactcaagcaaggaagaaagatgagtgtgtgatagggcacatacaatgcagaaattatgacacac

SEQ ID NO: 507378 - DNA, 490 bp, Homo sapiens
tgatggttttataaggggcatttccctcttttgctcggcacttcttgctgccaccatgtgaagaaggacgtgtttgcttccccttctgccacaattgtaagtttcctaaggccttcccagctatgctgaattgtgggtcaattaaacctctttcttttawaaataacccagtcttgggtatgtctttattagcagcatgagaatgaactaatatatccatatttcaacatatactcatccatggcttccaagagactgcccagacagcgtcaatgtctaattcactttaaagcatggaattggatagaacattctggctatttattctcagctaaaattgctgtaatctactaacccattttttcttctctttcccactatccttcttgccctggcttgctttctctccttccctatattcactcatcttttactgaatgtttttaaatttgtgaactttttttctctttcagaactgcataagagaatt

SEQ ID NO: 507379 - DNA, 666 bp, Homo sapiens
ctgagatttgatggttttataaggggcatttccctcttttgctcggcacttcttgctgccaccatgtgaagaaggacgtgtttgcttccccttctgccacaattgtaagtttcctaaggccttcccagctatgctgaattgtgggtcaattaaacctctttcttttataaataacccagtcttgggtatgtctttattagcagcrtgagaatgaactaatatatccatatttcaacatatactcatccatggcttccaagagactgcccagacagcgtcaatgtctaattcactttaaagcatggaattggatagaacattctggctatttattctcagctaaaattgctgtaatctactaacccattttttcttctctttcccactatccttcttgccctggcttgctttctctccttccctatattcactcatcttttactgaatgtttttaaatttgtgaactttttttctctttcagaactgcataagagaatttatctatataagtaaaattcctaaataaaatcaatttagaagtcaggaggaatgccagggagccatacatggttttaaatatattatcactacacatttgaggtatattgaatacctatttttaagttctagaagaactttgggcatgtcaagtgcaatattttcacc

SEQ ID NO: 507380 - DNA, 666 bp, Homo sapiens
ctgagatttgatggttttataaggggcatttccctcttttgctcggcacttcttgctgccaccatgtgaagaaggacgtgtttgcttccccttctgccacaattgtaagtttcctaaggccttcccagctatgctgaattgtgggtcaattaaacctctttcttttataaataacccagtcttgggtatgtctttattagcagcatgagaatgaactaatatatccatatttcaacatatactcatccatggcttccaagagactgcccagacagcgtcartgtctaattcactttaaagcatggaattggatagaacattctggctatttattctcagctaaaattgctgtaatctactaacccattttttcttctctttcccactatccttcttgccctggcttgctttctctccttccctatattcactcatcttttactgaatgtttttaaatttgtgaactttttttctctttcagaactgcataagagaatttatctatataagtaaaattcctaaataaaatcaatttagaagtcaggaggaatgccagggagccatacatggttttaaatatattatcactacacatttgaggtatattgaatacctatttttaagttctagaagaactttgggcatgtcaagtgcaatattttcacc

SEQ ID NO: 507381 - DNA, 643 bp, Homo sapiens
atctaagtgctccttagaggaccgccaagcactgcactaaacaccaccaatcaggcaaatccagtcgtggtaaacaggcttggcatgaacaacagaaataaaatatgctaatcagttgtcctactccatgaaaataagtcagcagggaaggaattgggggaaaaaagccacatctttaagactttgcagagggttttggttaattttttacatttctctctagatataacttcactgatatttttatcctatttacaacatagtaatgttttataaaactaccctcttcaatggtttctttttttttgaaatcttcaaatccccttctatgtcaccagamgttaactatggcatctgaataaatgtatacatgtatatagtgtctagtttgttcaatagtctctacaggacgcagtgtagtgtaatggttaagtacaacagggctggcactcggcagcttgggctcgaatcctgcctctaccacttcctagctgggtggccttggtcagatttcttaaactctctaggcttctgtttcctcatctacaaaatgggattataacaatacctggtttttagaatcactgggagggttaaataagtcagtataagcaaaactcttagtatagtacctggcacatag

SEQ ID NO: 507382 - DNA, 560 bp, Homo sapiens
taatgtcctacatgccaatcagaaaaaaaaatgtactagaagaaaaagggactgatcatgtcaaatcagatatgaagattaaggttaaccattagatttgtcaaggtggtggtcattttagtccagtttgagtaaagtggtaagctaagagcttaatcagagtaggctaaaggggaaatagatatgaggaaagggagacagcaaacaagatyattattttggggagttttgccagaaaagaagcagatattaaagcaggagctaaaaaggggcacaaggtccaagaactttaatagaaaaaaatgaatattatgtttatatcctgaatggagtaatctagtgggcagagtagaaagacaaatgatgctatagatgggattggagaaggaacgtccttcagcaggtgagagagatggacttgcttgagataagtactgacaaaagtcctggcaccacaaccgcagggaaggcaggagcggacaaagggaagaaggcgagagcatgagcaggtccttttctgtttcctctgattgtatcatcagaggaaagccttgacagca

SEQ ID NO: 507383 - DNA, 560 bp, Homo sapiens
taatgtcctacatgccaatcagaaaaaaaaatgtactagaagaaaaagggactgatcatgtcaaatcagatatgaagattaaggttaaccattagatttgtcaaggtggtggtcattttagtccagtttgagtaaagtggtaagctaagagcttaatcagagtaggctaaaggggaaatagatatgaggaaagggagacagcaaacaagatcattattttggggagttttgccagaaaagaagcagatattaaagcaggagctaaaaaggggcacaaggtccaagaactttaatagaaaaaaatgaatattatgtttatatcctgaatggagtaatctagtgggcagagtagaaagacaaatgatgctatagatgggattggagaaggaacrtccttcagcaggtgagagagatggacttgcttgagataagtactgacaaaagtcctggcaccacaaccgcagggaaggcaggagcggacaaagggaagaaggcgagagcatgagcaggtccttttctgtttcctctgattgtatcatcagaggaaagccttgacagca

SEQ ID NO: 507384 - DNA, 645 bp, Homo sapiens
ataattacaaaaattaaacagacattgctatggtttgactgtgtccccctccaaatctcccatgttgtaatttaatccccaacgcaacagtgttgggaggtagggcctaataagaggtgattaggaaaakattactgtcagtatctcaggaggaggttatcaccagtgagcttgttataaaagaaagttcagtcctgtcttgctctcttctcttggccttcctccatataatgacactgcaagaaggccctcaacaaatgctggccttgaccttggacttgccagcctccagaactctaagaaataaatttcgtttctttataaattacccagtctgtggtattgttgtaacacaaaatggactaagatagatgtttagtacatttaatcacctgataaaaagttttccttatagactctattcacaagcctagaacataccattttttcttcataggtaggatctggttcttggatttccttttgctttccaggtgacgcatcatcaaatatttcctggtagaaagaaataattaaatagaattggtcttcgaaaatagtaaacataccattatagaccaatttctgaccaaaacacatcttaaataatacattctcaccccaaacttcctagaaacttaaaca

SEQ ID NO: 507385 - DNA, 619 bp, Homo sapiens
tttcttaaaatataattctgtagaagttataaaaaataaaatttcctaaccaattttytaagttacacaatacattgagtttattcagaaatgaggcagcctgagtttaaaaggtaaatactaaaattttgggcaagatccactccctacccctaaaattccctaatccagggcccatacccgcaggacccttttttaaagcaaaggaagatgacaactttttttttttttttgagacggagtctctctcagtcgcccaggctagagtgcaatggcacaatcttggctcaccgcaagctctgcctcccaggctcatgccattctcctgcctcagcctcccaagtagctgggactacaggtgcccgccaccacgcctggctaattttttgtatttttagtagaggtggggtttcaccgtgttagccaggatggtctcgatctcctgaccttgtgatccacccgccttggcctcccaaagtgctgggattacaggcgtaagccaccgcgcccggctacgatgacaactttttaaactcccccaaatagtgtgctacccttcaaaaaaaataagaggcagaaggtaagtcttagtattaaaataatatgattattttggagt

SEQ ID NO: 507386 - DNA, 619 bp, Homo sapiens
tttcttaaaatataattctgtagaagttataaaaaataaaatttcctaaccaattttttaagttacacaatacattgagtttattcagaaatgaggcagcctgagtttaaaaggtaaatactaaaattttgggcaagatccactccctacccctaaaattccctaatccagggcccatacccgcaggacccttttytaaagcaaaggaagatgacaactttttttttttttttgagacggagtctctctcagtcgcccaggctagagtgcaatggcacaatcttggctcaccgcaagctctgcctcccaggctcatgccattctcctgcctcagcctcccaagtagctgggactacaggtgcccgccaccacgcctggctaattttttgtatttttagtagaggtggggtttcaccgtgttagccaggatggtctcgatctcctgaccttgtgatccacccgccttggcctcccaaagtgctgggattacaggcgtaagccaccgcgcccggctacgatgacaactttttaaactcccccaaatagtgtgctacccttcaaaaaaaataagaggcagaaggtaagtcttagtattaaaataatatgattattttggagt

SEQ ID NO: 507387 - DNA, 608 bp, Homo sapiens
cctactgtagtgcacatttggaaatcccacacccctttcttcccctgaggaaaaaattctttcctcatcctagattcagtgctctgtttaatcttgagcatatgagaatgagtcaccatgggtaagagtgtaatctcatttatacctttctkccaaccctcctttaattttttaagtttatgatactggatcctgctttcctacataagggctggtgatttggagactaattttgggagtgcgaggtgttgagattttttttgggaaccagtgctttctgttctgctgaacatgaagctgcatggcctaagttctgaaattcaggctatgtatggaatgtctgtgtggatgaagaaacaagccaatgcctttttttgggtcggggccggggggagactgggagaaagatgaatgaaaatgttaagatagtctgattttgtgggggaaatattcaaattttgagaatttgtgcaaatcaaagacaagcagttagttgctttgtgattttattttacccacaaaagaaatacttgatattgtgctgaagatgttgttgaataggtatattaactcagataaaataactgagttctacttttgattccagt

SEQ ID NO: 507388 - DNA, 632 bp, Homo sapiens
aaaccaaaattacagaataaagtatgattttggctgcttaatactacataatgaagaactgttcatgctttacagatttattccaagaaactcaacaaatacttcaacacagtatattaagacacttctaaatgtggctatttggggaaataaccaggatgaagttgtgaaaaatctcaatcatagaatttaaaaaataaatgcagttgcatttagatatagctcatgacctcaatgtagaacgtattggcagattaaagtccttagatacttgttttatctattaatgaacacataaaaatgacttgtgattaacacagctgtacttggtagccaactcacagactatatataagaaatctgattaatcatactgtgaattttcttacaaccctttcccaaccatggatattgtaaagatgaaaagttcacaagtcaagagttacactcaacctaaatatacctctcatctattttgtaaggaattgggagttctgcactgraaagatcactgctgctgctaactatgcttatctagttcttctttagcagagcgcttatgaatcagtagtataattcctggattatttgtccctcctactagactgactgtaagctctatgagcacaaga

SEQ ID NO: 507389 - DNA, 570 bp, Homo sapiens
taccagctcttaccaagcactttaattcatttagtttttcactctggctacagtgagaaaagacaatgtttttacacttgatatactttttataagaaaaaatcaatgcaggatgaaaatatcctgttgctctagtaattcccacagaaggtcagcctcaataatagaagatgaaaaaagttttgtggtgtttgctgttttataaactcatatttggagaaggaacacaatatatatatgatttcctcataactgctgttggtgccccagatttgatattgttgcatgataacctgacattgcttcctgcttctgaaggaatgattggatttgaagccaacatgcttgctaaaccgggaagctgctattacagaaggcacaggaagtcaagctgcctatgcagttgtgctgagacatgagactcatacgttgtgacccgtgcctattgtatgtctccccatcwttataactgcttttgaaaactggcttcaaataagcaaaaggcctagtgttatttccatagcagcactaaaattaatgaataagagttacagagttggctgaatataa

SEQ ID NO: 507390 - DNA, 491 bp, Homo sapiens
gggtctaaagcacttaatgaatgtttttagtctaacttatcattaactttttacaagtcaccatatttgaagatctgtagcactctgattttcagaaaatttttcattctgaataatttaaaaatgktgatgtattagaaaggcagtttgctttagaaaactaaatcacattgaacattgtattagagaattaaattaaaagtttcttacagagcagtattttccaaacatttttagcactagaatctttttagatgaaattttatgtataaccccaatacataaagcctgaaaactcaattttatcaatataaatgtattttgggttcacatttatgcttattcattttggctcattactaagcataataagattctgagttatttctgaataacacaaatgtggagttatacatagttgatgaaaccagcagccaatttatagctatgccctgttttatttgtatactatcaagaaaattttgattcac

SEQ ID NO: 507391 - DNA, 553 bp, Homo sapiens
ttgaaagctgcagtgagctatgatcacaccactgcactttagcctcggtgacagagcaaaatgaccccatttcttaaaaagtaaaatcctgagcaacggtaagtgactagcagcagtgagaagccattaccacttctagaactaaggaggcaagtggaggaagctgttacacccagcaagagctgtagctggtggagacagtctgccaacagacactttaatcttaggtaaagggacacacacactatcaaatgctgaccagcagtgaagaaaccagggtacctctctcacagcttgccattggctaaaaccaaccagcccccagaaaggctgggaacccrgaatatgtaatacatagaagtcagtctcccagggcacttgggaaggcagagaagggtggaggtacagcaaacagagaaaatcaggtacagcaaacagagaacatccttaacaatcttcattatctgtcatcatgtcagaccagtaagtcagttaatcttttattgatcatcctcatggacatgaagcatctgtagaagattggcttgctgaa

SEQ ID NO: 507392 - DNA, 576 bp, Homo sapiens
gtgaacagcagtcgctcagtggctcaggctgcctttaagatgaccaatgcagggaggagacctaagtatgctgtggaacaggctgaagtcatatgggcagggaattttggttcctgtgtcccaggaacatgctctagaagagagacagagactctgacaatcggrtctccatgaacacatgttttttttaccttgtgaagatgaatggaagaagggaaggaccatttcaggccctccagtgtgcagggctcatgcatggggaccctcatgcttaggcctattgccattattgctgttatattactggaaatagaaggatcctcattcattccttaaacaatcaagggcttttcctgagcccactactttattcaaagtaatctgtttgtacacaatgaattaaacaacaaatatagccaaaacggatctagcaatttctatttgccagacagagatagagcttatatgtgttttctcattaacatctcttggttttaccactttctatccattcttactgtccctgattcattcaggtctttatctttctcctagactactggattagctccctga

SEQ ID NO: 507393 - DNA, 639 bp, Homo sapiens
tttattgccactgcatacagttcagcttctccttctgccaaattctgctccattcrcaggtattcttgagataacccctcaatctctgaatgtcagaatcagtagctcaatgtcaacagcccatgaaaaatataattagtaaaaatctgtatgctatatgtttaaatgtctcacactaacgaaagagctgaacacatgaaaagatgtaaaaactttaaaagtttcaagcatgatgaatgttgaaatagtgacagggtcaaatatatgatgcttatgtactttgaacaagtgactttgttaatcaatagtgtcttaatatttaagaacaattgtttctttaaagtgaagaagtcaaaatattttttacatatggcagtgacctgataggaaggtatccaacatataggtaaccataatgaataaaaacatgagacatttatagatgcatgaacaaacaaaaattttacaaatggcctttacttattctaactcagtggttttgtccttgtgaataatgaagtcttttaaattcagagctttgtgtcttcactaatgattaaaattaaccaaagactttatcagtatctgagttgattgcctatactaaaataggacctgcaaatatgctatttatggaca

SEQ ID NO: 507394 - DNA, 582 bp, Homo sapiens
attttatatttgggaaattcaacctgaataatgaatatgtagggcaaaaaccaggttaggatttggccactaattcccttctgaaaagaaatgcattgaaatttaaggagtatatcaggtgctgctctaccctagtagttggacaggtatctaacatgaagccttggaaatcagtgccatataaaatgcctgaatacaatttaacaaatgaaacagcaaattaaattaataataacagagagaaggctcttcatatagacagcaagggtgtgactggcatttttaccatattctttcccttctatcttgattaatttttcttttgctgagaaaaattttgtaattcacatggagtcttatgytgtttttcacaacaaattctgcccaatacagtaatgtgacattattttttccagaacagcagaaggtagcttagatgtcttattctcaattttcacagtttgttttctcaggatcgtaaatgtattttgcatatgagaaagatttaaatgctagagttggctgttcttattatttcgttgaaaacaaaagaacgtttggatgttctatgtttttccaact

SEQ ID NO: 507395 - DNA, 513 bp, Homo sapiens
aaaaacataacctgatctctaaataaatatccccaaaatattcattgcaagatggccagtatctcatccagaatgcataaatgtatgaagaaattgaatattaataatagcaagaacataaaaactaaggaaggatggagaagtgtggtgggcagaattctaagatgatccctgttagtttggtaaggttgccataataaagcaccacaactgtaaggaaaatggatgtgctgcagtcaagaataggcctaggtaaacatccattgcagcatgactcagcaagtttggagtgcaggcacacaactctgctcattatataacctgtttgtgtaagctcatacttggctctgagccacaattgtctgtaaacggtataattgtgctgccaacactgtacatagggcttgtgaccagagagagagagggaaaagctgmtgaccctctaagggaatgctggccaccttgtaggtggatggaggggagccaggaacgggcgagcataggggaatgcag

SEQ ID NO: 507396 - DNA, 601 bp, Homo sapiens
ctgatgacagatgggaagtagcgatacatactggaacttccccaccctcaagtgggacagctcacaggtccatgttcctcactatttccaagatttccccagaaattaaactccaattgcctacaggggtaacttggtaacaaccatttgtttggtttcttctcttttctatctgacgtcctcatttccccactacactctcttgggatcatttcccaaataaactgcttacattcaaattattctttcaagatctgctattgggggaagtgttaaattctttctgggaattctttcttctgaatttttttccgataattcgctactcccttggtatgcccaaccagaaggacctgggtgatacagcatgtgagggccaactctaaggggwcagagcatcacagagaaggttggaaggatggatctgagggaaatgggctgtagatgatggacatattgggccagtgtctctagaggcagacatgctacttctttggtagaattatgtgtggccattggtctgcgtgtgcccctaggatttattcgctctgcatgcattttctgatttttctataatagctacattttgcttttgcaatag

SEQ ID NO: 507397 - DNA, 612 bp, Homo sapiens
ctcacggttaagccggcttgagctacatagttgctctgctacacaacttatttgtatgattttcaaataagaatcaccttttggggttagatgggctgatgcttcagatggccatctatttgtcttgtctcgttccttgacaaggtgaatgtgcttgctgtgtttataaaagaaaaaaaaacccggtcgggtgcagtggctcacacctgtaatcccagcactttgagaggccaaggcgggctgatcacctgaggtcaggagttcgagaccagccttgccaacatggtgaaaccccgtctctgctaaaagtacaaaaaaatttagccaggtgaggtcacggccacctgtaatcccagttacttgggaggctgagggaggagaattgcttaaacccrggaggcggaggttgcagtgagccaagaccaccccattgcactccagcctgagcaacaagagcaaaactccgcctcaaaaaaaaaaaacagttgtgaaaaaaaaaaatctgacagtatttggagccaaaacaaaatgtctctcaaagctcctagatgtcaagtgatagcaactatgtaaactcataaatagattttaaaaattttaataaataaaatc

SEQ ID NO: 507398 - DNA, 631 bp, Homo sapiens
ctgttcagtccaactgtggccccaaagagcctcccctgggctgaaaatgcattttgtgtctcctggtcaagaaatgagcagtccaagtggacacttcattgtggtsaagggaaactatgcttttgtataaataaactatttgtctaaacttcaaacaggtaagggtagataagctttactttctagcaagggcaaaagttatctcctttccctttctctcagagggaaccaaatcctgaagacggttcatggctcaaagccctaattgcctggtatgacccagggaaaactccattttaagaaaatgtactttcctttaaatattctgagacagaaagcaaccaggtctctgaagaagctgctagactttctcaggatggtagaaactttcaggaaagcaaaggaatttaatgaagcctcagagagagtttgaaatctttaccttacatagcactgatggctaatactatgcttgttctaatgaagataattttgtatgattcttgactaggtttgaggctaccaaaaccaaaaatcagtgtgtatacctttaaatcccgaggcaactaacagctattaaactagttaacatttataaaccattaactctcacctacaccccttgtaaact

SEQ ID NO: 507399 - DNA, 514 bp, Homo sapiens
aggggtgagactttgccaagctcttggctacagcacacggctgggtatgagttgtactatctatgactgggctaattgtatgttgctgatggcatatgtatatttattcaatatcaacccacgtttatctgagtcccactttgtacttgcagtgagcagcaatgaacaataggcctgactgaagcctcagtgatggatcttattgcaaaccacagacttttaaaattccccattcagtgcagagtcttcatagagggaaagaactaagatccctattgataactacagacaccgtgatgacctcattgtctctgcctctctccaccgccagagtatttcttaaggtccctgggtaatgrtaacactaacaggcttctttgcagatcagtcattaatttcaattttgaaaagccttggaaattacattagagctcaaggttagaagaatgaagcacttgtacccaagagtggttgagaggtaagtggagaggaatgcagaagccaccttgggcaa

SEQ ID NO: 507400 - DNA, 614 bp, Homo sapiens
acttatgtcattggaagcagaatgcattaggttacgtagtgtctttaatctggaatacctctgtacttgaaaaacattattgctttaatcatccccacacccctaagaagaattaaaggtgggaactctgaccagcatcccagtattacaggtaaatgaattaagaaagagatgctgaatgactgaacagcctctgcaacacgcggacagcctgggggcagcaggctagtgctgaggaggtggggccaagctttcagactctgatctgtgttgaatgtcagatgaccaagaaagttgatgacctagtggcacactgaagacttagattaacaactgatttgaaaggagtcacagtaccaggtaaatagccctcattctgcttgatcgagtataacacttttctggaatgagaggaaactaagtgctttcaaggggttttgcattcttggtttggggcagcctggtcagaaagtaagaacttagtattcaytggtctcacttttggattctcctcccctactgtcccttaggacagcaagcacccgctcacacacagacacacagagcatacacatacacacataccacacacacattcaaacacatgcacacat

SEQ ID NO: 507401 - DNA, 608 bp, Homo sapiens
ttgtgtggaccccagttcaattctaaaccaaaaccattctctccactgtcagaggaacttttcagtgcgtcactgaaagatggaaatcttgcaggaggcaacaggtgtggggagggggaaagggaacaagacagaccagccctgggggccaccagagggataaaggagtgagcagaggcaacagcacttatattggcaggaggcctggcctcttatgtctgaacttcttggaactctcaccaaaccacggcccaccatgcccagcttgtctctctccactaggctccaggcccacctttcagaccaggcctgcccaggtggaatcaccagcctggaccacgttagtcagcatcttagttggtagacagatgtttcctcactgctgcagcagcagaagagccgttgctkgtccaaagttaggaactggaaccaaagctgagccctccagctaacatacacacacacactcctgcccctctctctatactccttatctctggtatggatccattgttcttttagctctccatacctgacagcaagggctcacatttcacccttcctcatgaatagtccatctactgagtagtccagctcctggaaactca

SEQ ID NO: 507402 - DNA, 508 bp, Homo sapiens
ctgttttttggggaatcccagatatcagtatttttaggtcttttttccttaggctgatcagaatcactggtgaagactcttttagtctcctgcctggaagctgtaattctggataccagctttctgggacagagataggaagagggctgaaggtttcaacattgagtatgaaaatttcctttaaaactcactgaattcagtatggtacacaaccaaggactgtgtcttctcacgtaattatttttttttcattttctgctgactataaatctctagttttccataaagtggaagcctgtctactggagaagagaggccatttggagtctgagtgctttttaaataaactttcaaataatccttctgtttttaatcctgtcttccatcaaaatcccagtggcatcaacatctggtgccattatttccagaagagttgggtgggagatctggggtgcaaattggttgcttagctttcctcattgttkgttgagaatacaactttcttcac

SEQ ID NO: 507403 - DNA, 424 bp, Homo sapiens
agacattccagaaagaaagaagaaaaggaaacaacacataaagagatatgaaatacaatgaagaggatgaactgtttagctcttcaaactaagagtgagaggtgacagcatgctggcagccctcgcagccctcgcttgctctggacgcctcctcagcttcgggcgcccattctggccgcgcttgaggagcccttcagcccgccgctgcactgtgggagccccttcctgggatggccgaggcaaagccggctccctcagcctgcggggaggtgtggcgggagaggcgcgggcgagaaccrgggctgcgcagtgcttgcgggccagcaagagttccggatgggtgtgggcttggtgggccccacactcggagtggccgggccgccgcccctggcagtgaggggctttgcacccgggccagcagctg

SEQ ID NO: 507404 - DNA, 563 bp, Homo sapiens
atatcacagtgagagtgtcagtcacactcttcatttattccactttttacttcaagctgaaaattttgggttcattactactcagaaaattgctccagagactgatcgaggaaagtggttcaggcaaaaaaatkatcaaaacaaccattgatatctgtatgatattgactagagggaagtttgaaaacttagatgagtttatttgagtattattttactccttccctttcttcatcaaacacaacctcacacaaactcagaattggctttgaaacagcatctccactacattcagaatcacctggcatcttgttacatatatagattcctgaaatcggcttcagatatgctgaatcataagtttgaaggatgcagcccaaagacaattagctttttttttaaacaagctccttgagtaattaaattcttcaattgcaaatgaggccttattgttcaaaaagcaatcagtaggaatgttattagagtccctttaaaactctgtctctaccgtccctcacaataaacaaacagttttgaacatttttctcaggtactgatataat

SEQ ID NO: 507405 - DNA, 610 bp, Homo sapiens
ttagagttggctctgaggagacttatgttggacagacatgtgctcactctttggaaaataaagttctttcttcatgttttatgcaggatgtatttaaaagtatataagcatcgttcaactgtcaaccatttcttgagcagaaacaagttattttagaccaatagatcatcatgaagaaagttgtaataattttgcattaataacttaattcagctttcaaaggtcatcaatttgcttgcttcaacatttgacttaataaagtacaaggaaccattctcatgacagttggccagagaaaatattcatktttaaggtgtaaattattcaaaaacacaccattccatgtatagaattaaatagaggaaattgttttccatgtgagtcagaatatttgaagctaggagttcttttaaaggcatcaattaacctctttgtagctactggccagaagaacattaggtttctataccttggttgaagcccagaattgagcatatattctcaagacttatttaggaaaaccttaatatttttctttaattttctggggcagaaaatgaaataattaatgaaaatttaagtgtctcacagggaagtttatgactagaca

SEQ ID NO: 507406 - DNA, 634 bp, Homo sapiens
tgataacaacttaagttcaattacttacaaaaactccatactttaacttctccctttccaatttatgttattgttgtcacaatttacctctattcatattgtatatctttaacattttttatttatagttattatgatacaatattagatacatgctttgatctttgtcaacagttcttggctcatggcttttaaaactcttgcaatttcctgagcatcttttgttataatatttgggttttttccttggcttctgatatagctccagagtgataaaggtaaaagaggtgtttttgttatttataacaagccctttcaaccacaactgagtttatgttaattgggtaggttttagcaagcccttagacgagtgttasttatcagataaaccaatgtgattagagattaggaactttcatctctactccaacctctgaaaatggaagagggactagagattgacttaatcaccaatggccaatgatttaatcaatcatgactacaaattgaagcctccatgataacccaaaaggatagggttcagagagcttccaggttggtgaacaagagcacactatgtgccagcaaggtggcacgctccaaaactccatgggaacagaaactcctgtgcttg

SEQ ID NO: 507407 - DNA, 634 bp, Homo sapiens
tgataacaacttaagttcaattacttacaaaaactccatactttaacttctccctttccaatttatgttattgttgtcacaatttacctctattcatattgtatatctttaacattttttatttatagttattatgatacaatattagatacatgctttgatctttgtcaacagttcttggctcatggcttttaaaactcttgcaatttcctgagcatcttttgttataatatttgggttttttccttggcttctgatatagctccagagtgataaaggtaaaagaggtgtttttgttatttataacaagccctttcaaccacaactgagtttatgttaattgggtaggttttagcaagcccttagacgagtgttagttatcagataaaccaatgtgattagagattaggaactttcatctctactccaacctctgaaaatggaagagggactagagattgacttaatcaccaatggccaatgatttaatcaatcatgactacaaattgaagcctccatgataacccaaaaggatagggttcagagagcttccaggttggtgaacaagagcacactatgtgccagcaaggtggcaygctccaaaactccatgggaacagaaactcctgtgcttg

SEQ ID NO: 507408 - DNA, 455 bp, Homo sapiens
tgactactgatctttttcactgatcttatcaaaattaaagaggctctgcctgaaggggaattgctgtcattaatacttaaagtatgtygctaagatttaaagtaactcaataaataatctaccagactacaggttatattgcgtttttcattgtcaaagtaatattactaaaaaaagtttgattcttactttttatattctccctgctcccctcctccctacctaatgttagtgacacagtatttacaaggaaaaggggaaataaatatagagtaaataaaaatagtttccacttaggataatgaggaaataagtaaattcaattgcagattgctatttgtctcctgttcaaattcaactgaaagatgtttttcctcaagacagattctgaaaagcccctggaattattctaaaaaaactattagatagtttctgtaagttcacacataattcag

SEQ ID NO: 507409 - DNA, 455 bp, Homo sapiens
tgactactgatctttttcactgatcttatcaaaattaaagaggctctgcctgaaggggaattgctgtcattaatacttaaagtatgtcgctaagatttaaagtaactcaataaataatctaccagactacaggttatattgcgtttttcattgtcaaagtaatattactaaaaaaagtttgattcttactttttatattctccctgctcccctcctccctacctaatgttagtgacacagtatttacaaggaaaaggggaaataaatatagagtaaataaaratagtttccacttaggataatgaggaaataagtaaattcaattgcagattgctatttgtctcctgttcaaattcaactgaaagatgtttttcctcaagacagattctgaaaagcccctggaattattctaaaaaaactattagatagtttctgtaagttcacacataattcag

SEQ ID NO: 507410 - DNA, 455 bp, Homo sapiens
tgactactgatctttttcactgatcttatcaaaattaaagaggctctgcctgaaggggaattgctgtcattaatacttaaagtatgtcgctaagatttaaagtaactcaataaataatctaccagactacaggttatattgcgtttttcattgtcaaagtaatattactaaaaaaagtttgattcttactttttatattctccctgctcccctcctccctacctaatgttagtgacacagtatttacaaggaaaaggggaaataaatatagagtaaataaaaatagtttccacttaggataatgaggaaataagtaaattcaattgcagattgctatttgtctcctgttcaaattcaactsaaagatgtttttcctcaagacagattctgaaaagcccctggaattattctaaaaaaactattagatagtttctgtaagttcacacataattcag

SEQ ID NO: 507411 - DNA, 455 bp, Homo sapiens
tgactactgatctttttcactgatcttatcaaaattaaagaggctctgcctgaaggggaattgctgtcattaatacttaaagtatgtcgctaagatttaaagtaactcaataaataatctaccagactacaggttatattgcgtttttcattgtcaaagtaatattactaaaaaaagtttgattcttactttttatattctccctgctcccctcctccctacctaatgttagtgacacagtatttacaaggaaaaggggaaataaatatagagtaaataaaaatagtttccacttaggataatgaggaaataagtaaattcaattgcagattgctatttgtctcctgttcaaattcaactgaaagatgtttttcctcaagacagattctgaaaagcccctggaattatyctaaaaaaactattagatagtttctgtaagttcacacataattcag

SEQ ID NO: 507412 - DNA, 500 bp, Homo sapiens
ccatatgaccaagacgtgagcacatgactyaagtcagaccaatcaactctctctccttcagcgtggatcttgaacagagcaatggaaggaatggctgggctagtaaattggagtgaaggcctccaggtaaggctatctggagctgtacttccagggagaagtttctgtgatggtggaaagggtttgtgtttgcactatgtaatacagaagtcactagccacatgtggctactgaacacttgaaatgtgactagtatggctcaagttttaatttttagttcattctgatcaatttaaatttaaatcattgcatgtggttagtggctacaatactagatggcacaggtctagagtctcctgccactgagagagtctctgggggccctttagcctcccatgagctcccttttggtggtaacactggtttctgttcaaaaccaaagaaacttgacatgacctacagttcatttcaacatgcccaatgtcttagtcaatgatgca

SEQ ID NO: 507413 - DNA, 357 bp, Homo sapiens
gcccttttttcattaaaattagctttatttatgtgttcaaattatgtaagtaatggaatctaattaattggtgattttggttatgagtattttaatttcctccttataacctcaaatttatgtcagtgtttattgctctcatttttaaaaattgctagtaacttgctctcttaraaaaaacaggttattcattttatgagtggcaggttactttcttattatccagcagtaatcaaggtggtcttatttacattttaatattctatagtgtttatttttgtatcaagttaaataaatggtctcaagaatcactttaagcagtctagaaagcagatgttgaaagacctacctttttct

SEQ ID NO: 507414 - DNA, 489 bp, Homo sapiens
actggcctaggaaaggcgatgtttgcacacaaaggaggaaagaaaatggggcagccaggattggagcatggaaatggcttggggtcatggattaaagtggagactgttctctgcttccctaccctctgctatttgcctccaatttctgtaagggaaagaggtgaacttaacaaccctttgtcctaacaaacacctgccttcctacccaggccaggtcaagaagctgtaaacggcctccaggttgcatgcctgagtagccacacctggggagtaggcactggtgggagttgtgtgggacattgggaactggagaattcgctgtggaaaaaaggagaacattctgatgcctttaagtaatttgagatagctctactttacattcattttaycaaaccaccctgccttcctagtttgtgtcaggtctgagtctggtcatgccagagacaacgtccccgggagtgcccctgcagcaagcttcactgtggtaca

SEQ ID NO: 507415 - DNA, 551 bp, Homo sapiens
aatctagtaaatggatggcagatggtgggggccatttcacagttgcagtgggaggttacagataagcagggagagagcgcgaatgatccatgtggtagtagatcactctctactccaagtagacttggagaccttggtatgaactcacatgcagtttaatatagattcaggctacatatacaaatatagataagtatctacacatgggttagtaaaatacagcaggaagagagatgtgggagtatagaagggaggtaaggaatttggaaaaacaagtgtgatttctccagttggagaagatgtgataggaaagtgagggatgggcattccaggcaacagacagcacagagaggtgtggaggcattgagggatgctacaagttatttggtctgaaagtgaagccagagaggtggcaggggctgcggggtgggggcagctatagtggatcctgtgggtcccaggagccaagttgaacttcattgwcaagacaaccaggggttatgtgatgaccgagtttccaggagcacctggcatgaatgtgaaggggtggg

SEQ ID NO: 507416 - DNA, 511 bp, Homo sapiens
ctgctcagggacagcagtctcccaccggctcatggcctctccctccatgggctgctaacccttgccgtagcttgggtttgagtgtcaagcacaggccagaatccacactcctgtccccacctgtcaatcacttcagacacaggttccctccttccaattccaaagctggaacaagggcaggaagaggcgtctcaggaacccccgaagaccccactgtctctccagctcctttcttagaatcctcctcttcttggggagaccaaaggggatgagtagggaggggttctggcttatttacttcttagtttagttttttgtaagtaaagtggccggagagatgagtaatccaaatacgattcctcaggccgggcacagtggctcacacctgtaaccctagcactttgggaggccaaggcaggcagatcacctgaggtcaggagttcaagaccagcctggccaacatggtgaaacsctgtctctactaaaaatacaaaaattagccaggcatggt

SEQ ID NO: 507417 - DNA, 366 bp, Homo sapiens
cggccccactgtgctgtgccttcctctctgcctgagacaggaccttgaagagagaaggcagagtgggatcagtgtggtccggggtggtgaggtgctcaccagtgacctaggagtagccctaggagagttgactgatcttgggtccttcccagccaagaagacctggagccctgctgaaggcccattgccaaggtcatcccagatcagccatggcggggaggatggggggaggttctggggtacacagcacttcccagctaccccatgtgtgtgcatgtatgcatgtgtgtatgcatrtgtgtgtgtgtgtgtgtgtgtgtgtgtgtgtgtgtgtgtgtttctcagccatttctcttttttgggggg

SEQ ID NO: 507418 - DNA, 378 bp, Homo sapiens
ccttttctcccgacagggtatcgggaacacgtttcagggaggtgccaactgcatcatgttcgtcctctgcacccgcgccgtccgaactcggctcttctctctctgttgctgctgctgctcttctcagcctcccaccaagagcccggctggcactcccaaggctcccgcgccttccaagccaggagaatctcaggaatcccaagggaccccaggggaacttccaagcacctgagcttttgtcctttctagttctgtgcataggtgctgccttcctgggggtaggcacttctgtgagtccctgctgcaggggcagaagtgcatgtctgctgcaccagaagcccccrctattgatgctctcggctccattgggagagcagc

SEQ ID NO: 507419 - DNA, 505 bp, Homo sapiens
attgagtttggccccccgaggacaggttgcgtctctggggacagaaccagtgatgggccagaggggacaggcacttactgtgcaccagacaccatgcaacacgctgtgttacacggatcgtgcattggttcccactgccccgttaggagccgggtcctgttactcctttgtagataaggaaacgaggcttagccgattaagggcctgtgggggcacagggctgctgcagacagggctgctgtgtccttggtcatggccctctcctgccccctggtggacggcctgtggtggctgcttaaacttgaggaatttagctaaaaggtgaggacgggacccaaggccgggctgccccaggggaagggaagactgtggaatttcacaatcagtgaygcaaataactcacctaacttttcctagtgatttattatatcctaaatggcaggggtttccggaattcagaaatgagtaggctgggctggctggagagcctacgaaagaatggctt

SEQ ID NO: 507420 - DNA, 663 bp, Homo sapiens
tggtgggcacttaggtttattttatatctttgcaattgtgaattgtgctaggataaacatatgtgtgctggtctgttaggtagagtgagtttttttcttttgtgtgtctacccactacttggattactggatcaaatgggggatgtactttgagatatcttcatgctgtttcccacagagattacactaatttgcattcccacagcagtgcctaagcattccctctcaccacatccacyccagcatctatcgtttttgactattgaataagggtcattctggtgggtaaggtgataccgcactgtggttttactttgcatttctctgatgattagtgatgcagggcatcttttcctctgttttttttttcttttttttttggaattgttgtatcttcttccgagaaatttctatgcacatcacttgcccactttatagtgggattatatttgttttttcttgtttatttgttagaattgcttgtagatgctggatctgttagtcctttgtcagatgcatagtttgcagatggtttgtcccatgccataggttgtttgtttactaagaggattatttcttttgttgtccaaaagcgttttctactcaataagaaatttgatgataataaaatgaaaaactcatggtatctgaatatgtaaggca

SEQ ID NO: 507421 - DNA, 264 bp, Homo sapiens
caagggcctcttccccaacagcaactgcaaaagaatcatgttctaggcccasggccagagggcagggtctgtttgtgcaggaataagtaccgcgttcatcttccaatgacaggagtgtgtgcgccggagctcccgcatctcagtcccacctggatttacccacgatcttcgtgtcttaaaatgcgaagttgcccttacctggatgaagacagcagatcgcttcataggagccttggctaaatctttgggcattttaatgggatg

SEQ ID NO: 507422 - DNA, 336 bp, Homo sapiens
ccagctggatttttagtattaatcagaactaaacaatcttggtatgtcctgcaacacaacctgtctgcttctttacaattgtatgacctaccctccagtggaatctgagtaaagttgaatttgactacattgaaccttaataacttgaggagtacaagaatgactgtcagaagtatccatgagcaaaaraaaaaaagaaaaaaacacagtgctgaagacttttggaaactagccccaaatcacagaaagtgagtaaaattaggccatgtgtttttggccaaaggatttggctttttggatctcagtttccttttggaaacatgaatgttacaccag

SEQ ID NO: 507423 - DNA, 566 bp, Homo sapiens
ccaataggtgtgtcagcacagttaacttttaattatctcacacactgtgaaactctaggtaagtggttccagatttggtgcagtaacaaactgatgttatcagagatgtaggcttcttcttattctcccttcaacctttgtatcatttctctatcttctatcatccaagatatgcgatgaatttttttttcccttaggcttactgccttatgggctagaccaagatagctgccacagagccacaatcattctctggcagaaytgcattcatggcaggaaaatagggcgaggggctgaaccagggagctgtctttttgcacctgaccctttccacagaaagaaacaccttttctagaagcccctaagtggaattctccttagatctcattggtaacatggttgccctgaggtgcgagggcaatcatttaccaatccttgaaaaataacttttccaggaagaaaatgaaatgattcaactgcttgatattcagctaacagtacccatcaaggatatcccttgttattaatggaattgtgtgtgaattcatgtctatacttgtatgcac

SEQ ID NO: 507424 - DNA, 615 bp, Homo sapiens
aatcatggtggaaggcaaaggggaagcaaagactttctggttgtggctggagaaaaagctacaatatactgactggtctcattcaggatgttcttgacattcaggataggtgggtgaccccgcaatcatatggacactatccattccagtgacgctcaaacttcagcacacatcagagtccctgcaaggcttgctaagacacagagtgctgagcccacctctmagacatttttctttttaaggaataaagagcattccattgtgtaaatataccactttttaaaattcatgtacctgttgatgtacacttaggttgatttcataccttagttattgtgagtaatccactttttttccttttcttacttatgtatctctttttttatttctagaaacattttaattttatactataaattatgacttagatacctttatttctatgccttcttttggttaatattttggctgattgaaacaataaagtttttaaacattttttggatcaaggccattacattattattaacataatttgagacaatatagcaataaaaatcaacattgattagtgaaacaacaattttctagcccctggtaatcattttctctccc

SEQ ID NO: 507425 - DNA, 535 bp, Homo sapiens
tgctatgtggggataaggcactaacctgggggttgggrgctctccataaacccttgccttgctatctacctaaggcaagctagctaatgtctctcaatgctagtaaggttaagttccttaacacattgaaaacatgctttagttttaccttagcttggaaagccaaatttggtcaaaagtaaatataacaatatacttccatataaatcattttggaattgaattcaaattattaaataaaatattaaatttgatatatgtatttgaccatcaaatttttttaaaaagttgaatagatagtgtggtgaaggtgaaacatgagagatatacatgcttttatgataaattattttgtggtcatttaaattttcaatttagcagtgttgactgtgtttaaaatgtgaatattgacatataagagaaaaaatgttgataacaaaaaatacaaaacaaagcatgatagtgtgaatggcttttctgaaacctcagttgttgccttagtttcaaaaaaaattaaacaagagacaaacacaaa

SEQ ID NO: 507426 - DNA, 535 bp, Homo sapiens
tgctatgtggggataaggcactaacctgggggttgggggctctccataaacccttgccttgctatctacctaaggcaagctagctaatgtctctcaatgctagtaaggttaagttccttaacacattgaaaacatgctttagttttaccttagcttggaaagccaaatttggtcaaaagtaaatataacaatatacttccatataaatcattttggaattgaattcaaattattaaataaaatattaaatttgatatatgtatttgaccatcaaatttttttaaaaagttgaatagatagtgtggtgaaggygaaacatgagagatatacatgcttttatgataaattattttgtggtcatttaaattttcaatttagcagtgttgactgtgtttaaaatgtgaatattgacatataagagaaaaaatgttgataacaaaaaatacaaaacaaagcatgatagtgtgaatggcttttctgaaacctcagttgttgccttagtttcaaaaaaaattaaacaagagacaaacacaaa

SEQ ID NO: 507427 - DNA, 578 bp, Homo sapiens
tccatgtaagttattttactctactgcataggtcctcaggggagattgtgatatatcactgggcccatcacctaggttaaatgattatcttctttggctgggccctgccaacaccaagagttgtggcatataactggacacatcacttaagtaatgtgactctccttttctgcttgggccctgtacacagggtggattgtgacatattactgtcacaatactgtgtcccgcacacaggaaatgtaacttttctaactgaaccctacccacaagaggcattgtgacatactgttaggcccagttcccaggttatgtgacttcactgccatggccctgcccagagagtggatattgacatctttttggtccagcattcaggtgatttgattatcttgcctattccattctcacaggttaaatttcaaactatgcgtgtttcccagctcacaggcattatgcccatgctcatatagaaaaccagacactaggagtgattttgactctcttagctagattttgagcagtgggtaaagtcygaagtctcctacatttagaagggtaacaaaagttgataaaat

SEQ ID NO: 507428 - DNA, 390 bp, Homo sapiens
agcattatgtcacgatacacaaatatgaagggcctaagaaaaataagagtcacatcaccttgatgttaggtctctgtgagcagagaccaggcaggagaagaaagtaacattactggtcaggcgcggtggctcacacctataatcccaatactttgggaggctgaggagggtggatcacttgaggccaggagttcgagaccagcctggccaacatgctgaaaccccatctctactaaaaatacaaaaattagctgggtgtggtggcacatgcctgtagtcccagctactcaggaggccaacgcagaagaatcacttgaacctgggaggcggaggttgcagtaagccaagatcacamcattgcactccagcctgtgcaacagagtgagactc

SEQ ID NO: 507429 - DNA, 413 bp, Homo sapiens
gctgtggttcctaccctggaggatactgtagttcaccatcttcagaatgtgtttaaaaccatcctttcctctccctgtttgttgctacgattgtattttagacactcactatctcaggcttcactgattataattatttcttaatgggtctgctggattttaatttttttcttctcttattttccctctttccartgtttcatgtatgtactgtcagagaaaattcccccaaatattgcattgaccatgctatattacttctaatccaaaaccatcaatggcctttctctcttcttcagattgatatttgaactctttacctgggcatctgagtccctcaattttgtacctgcaccgtttcatcaagtgatatggtgtcaccgaagaaggataagccgtggtcccccctgttc

SEQ ID NO: 507430 - DNA, 614 bp, Homo sapiens
agtagctgtttggcggtccagggcctgggtgaactggttaatcgcaggaggcactttcagccccttatagaggatggctctctgccgctgcaacctgatatagcagggccatttcacaaagcgggtgaagtgtcttttgggctggatgtcctgtccaatgccaaaattcttaggccgtttctcaaacaggggattcaccactttcttagcctcctgcttcttcatgacagcaggggccggaaccaccttctttcccttggccttctttcctttcggcatcttgggcggcgggaggagagtgggcttgccatttttgaaagctggtgatagcgggcttgtgaatgtggtggcaggtatttctttccccatcaggtggtgggggctggagtgctgttctccgtgttttaactatccaaatacgtgcttgtttgttttgatttcagtatttttwaaaaaactccattttcatattataggactaggattttcatggccaggactctattggtcatgagcagcagatgcccaccctaaagagctaagccacaagtgcccataggagtggaattcccagagcagatgctttgtactttatggacatccagttctattac

SEQ ID NO: 507431 - DNA, 562 bp, Homo sapiens
tgtgtcctaagcaacattatgtaattcctctgagtctcaatcttatctaaaaaatggggctatgcacttacttataaagttgatataaaggttaaactttaaaatacatagaaaattaatagtaaggacttactatgatgtattttggccagtttcctctgggttgtgacaaaatggttttgaatgccttttctagttctaaatttctgatttttgcggcccaattttctttttctttaaaaataaataagaaaaggaaaaaaaaaaaacaacccttctgattactttccaagttccaaaggctttcagtgaaacagaagatgcgtaattgtcatttctacttaactatgcaatcttctgagctgagtgtctttaaataggaagaagcagccataaatcttgcaaagttcaaaatccattacctagggatatggttaatgtctcccaacttgaagtgtaattatctttttaagaacagagctggctaaagaaagctttggtaggtttttttaaraaaattccaaagcagccattaaatcaacagttattctaatttaattca

SEQ ID NO: 507432 - DNA, 627 bp, Homo sapiens
aggtatttatataatagacttctcaataatatctggaaaaatatcattttttttacctccacaagatctatagaaataaaggtgttctctcaatgtcataatctagtactagaattatgtggcaaagttttttgtttttgtttttttttttcactttctagtggcataaaacacttcaatcacacgtagctttctggagcaacagaccatgggctgaggattgagtttccgggagccacagcaaggctctccaatgccatctttctgtctcactgctgaaagtcaagaatcacagtgctgatcttcagaaactgtgggttcagaaactcacctggtcactagaattactctccccactttacctctgctaccccggagatccccgagaccagtcccttttggggagcccttgatggcatcttcactagtagccctttggctcacatgggaatacccccagggrctcctcgcaagagggctatgagggaggcttcattattctagtgttgaagcccagagtctcaacctaatcagcgctttccttcaagttcgagcctccaggaggagccaaggagtttcaacagcgtttcaaagttcgcagtttgtattctgctgcaccagagacat

SEQ ID NO: 507433 - DNA, 594 bp, Homo sapiens
agccgatttttaaaaagattttaaggtcatccagattaccctttcagctgaagtrtattaaggtaagttccacgttcacatagtacgtatgcatgtaaaacttgcacaaatttctccaaagtcttggtcggatttgtttacatttgggaaaaattgctgaataaagacatgtttgcatcctttgcaaggactttaatgtagctcaaatagggttatgtggggcaaaacttcagtgaagtaaaagtcaagcagttatttgtgtgtaccacatgtttaccccatgaaatactgtagcgcaattgcccagcctccctcctgaggcaccatgccatctatgttgaaaaatagaaatgagtgtattgttacctatatacacatctcctgtgtcctttgtaggtgatatagaattttttattgcaattgacaacatcaagttagtttaaacagagagtagctttttaagaaggggatgcagtagatacaggaacagttagaagcattataggaatagattaaaccaccaggatctggacaggtggatataaaggtgtctctgaagagggactggaatctcaccttaaagtaaccaccttg

SEQ ID NO: 507434 - DNA, 594 bp, Homo sapiens
agccgatttttaaaaagattttaaggtcatccagattaccctttcagctgaagtgtattaaggtaagttccacgttcacatagtacgtatgcatgtaaaacttgcacaaatttctccaaagtcttggtcggatttgtttacatttgggaaaaattgctgaataaagacatgtttgcatcctttgcaaggactttaatgtagctcaaatagggttatgtggggcaaaacttcagtgaagtaaaagtcaagcagttatttgtgtgtaccacatgtttaccccatgaaatactgtagcgcaattgcccagcctccctcctgaggcaccatgccatctatgttgaaaaatagaaatgagtgtattgttacctatatacacatctcctgtgtcctttgtaggtgatatagaattttttattgcaattgacaacatcaagttagtttaaacagagagtagctttttaagaaggggatgcagtagatacaggaacagttagaagcattataggaatagattaaaccaccaggatctggacagrtggatataaaggtgtctctgaagagggactggaatctcaccttaaagtaaccaccttg

SEQ ID NO: 507435 - DNA, 639 bp, Homo sapiens
attacatacaactgaagcagtgggacttggagtatgaacaatatatttttaaaaaattacaaagcataatagtcatgattcaagagtttgccaaaatttgtacatatatctggaaatataaggactagaaggtaaaagcctcaaaaagaaaaaaagtagatgagctagtcaaacagagtcttctcccttccctcccttgatagccttttctttctttcccttttttttttttttttttttcttagagggagtcttactctgtcacccagactagagtacagaggcgctgtcttggctcactgcaacctctccytaccagcttcaagtggccctctcatctcagcctcccaagtagctgggattacagacacgtgccattatgaccggctaatttttgtattttttgtagagatggggtttcatcatgttgaccaggctggtctgagccacactatgcccggccttgatagccttttctatcaagcttctggggtttgccttttttcttataaaaaaaaaaacttccagttgagggctccaaaaagtgaattcgaatagtaatatttaaaatttatatctatatgaggaaatataaaggctgttgaaagattctgtattgcaaatatttctgctatattg

SEQ ID NO: 507436 - DNA, 639 bp, Homo sapiens
attacatacaactgaagcagtgggacttggagtatgaacaatatatttttaaaaaattacaaagcataatagtcatgattcaagagtttgccaaaatttgtacatatatctggaaatataaggactagaaggtaaaagcctcaaaaagaaaaaaagtagatgagctagtcaaacagagtcttctcccttccctcccttgatagccttttctttctttcccttttttttttttttttttttcttagagggagtcttactctgtcacccagactagagtacagaggcgctgtcttggctcactgcaacctctccttaccagcttcaagtggccctctcatctcagcctcccaagtagctgggattacagacacgtgccattatgaccggctaatttttgtattttttgtagagatggggtttcatcatgttgaccaggctggtctgagccacactatgcccggccttgatagccttttctatcaagcttctggggtttgccttttttcttataaaaaaaaaaacttccagttgagggctccaaaaagtgaattygaatagtaatatttaaaatttatatctatatgaggaaatataaaggctgttgaaagattctgtattgcaaatatttctgctatattg

SEQ ID NO: 507437 - DNA, 504 bp, Homo sapiens
ttcaacttcttaaagaaaagaaatttcacrtagtatggcagagacagatataccatataataacatggtgttattataaatggttaaaaaaagaaaaagaaatttcaacccagaatttcatgtccagcaaaattaagcatcataagtgaaggagaaacaagatccttttcagacaagcaaatgctgagagaattcattatcaccagatctaccttacaagagctcctgaatgaagcactaaatatggaaagaaaagaccatcaccagccactacaaaaatgcaccgaagtacacagaccagtaatgctaaaaaccaaccacatacacaagtctgcaaaataactagctgacagcatgacgacaggatctaatccacacatacgattactaaccttaaatggaaattggctaaatgctccgattgaaagacacagaggggcaagctggataaagaaccaagacccatttgagtatgccgtctccaagaaacccatctcacatgca

SEQ ID NO: 507438 - DNA, 504 bp, Homo sapiens
ttcaacttcttaaagaaaagaaatttcacatagtatggcagagacagatataccatataataacatggtgttattataaatggttaaaaaaagaaaaagaaatttcaacccagaatttcatgtccagcaaaattaagcatcataagtgaaggagaaacaagatccttttcagacaagcaaatgctgagagaattcattatcaccagatctaccttacaagagctcctgaatgaagcactaaatatggaaagaaaagaccatcaccagccactacaaaaatgcaccgaagtacacagaccagtaatgctaaaaaccaaccacatacacaagtctgcaaaataactagctgacagcatgacgacaggatctaatccacacatacsattactaaccttaaatggaaattggctaaatgctccgattgaaagacacagaggggcaagctggataaagaaccaagacccatttgagtatgccgtctccaagaaacccatctcacatgca

SEQ ID NO: 507439 - DNA, 504 bp, Homo sapiens
ttcaacttcttaaagaaaagaaatttcacatagtatggcagagacagatataccatataataacatggtgttattataaatggttaaaaaaagaaaaagaaatttcaacccagaatttcatgtccagcaaaattaagcatcataagtgaaggagaaacaagatccttttcagacaagcaaatgctgagagaattcattatcaccagatctaccttacaagagctcctgaatgaagcactaaatatggaaagaaaagaccatcaccagccactacaaaaatgcaccgaagtacacagaccagtaatgctaaaaaccaaccacatacacaagtctgcaaaataactagctgacagcatgacgacaggatctaatccacacatacgattactaaccttaaatggaaatkggctaaatgctccgattgaaagacacagaggggcaagctggataaagaaccaagacccatttgagtatgccgtctccaagaaacccatctcacatgca

SEQ ID NO: 507440 - DNA, 626 bp, Homo sapiens
gaagggggctgagagggtcttttttcactagagaacatcaaataaactgtgtgttgttcacctgcattttgactcggacatcaaaatccacatgtagtgtcatgtcagtgctcaaaaagtttcagattttgaagcatttcaaatttcagattttcagattagggatgctcaacctctaaatttaagttaaggtaataggttgcttggtcgccatgacattaaaaaatgtgtcttctgcaactgtaaagtttgagaagacagtattggctaagaagttcctccagttcagcttcaaagacctaggtataaaaatgtaaagcaaagagacagacatcatttggcatcattccctgaaaaataaatggctccatcacaataacagatacatgatccaaaacaaagctgcttgtcctcaggggtggatgacaatgtccagtgctcccaccacggcagtagcattaaaactactcctcactgagagataaaatgatggtggcactttattaktctgcatgccccaaagcaacagcaaagggactgtctgccactgcatgcagagtaagaaagtttgattaggatactccccaattctgacactctccaccatcactggcaaactatgagga

SEQ ID NO: 507441 - DNA, 632 bp, Homo sapiens
taagtttaaaacatgttttcaaatctcaaaaagtaaacctattgtgtatgtgtgtgacccataaatacgcttcgcactccattcagctcactccataatttgtgaacattttgtctgtaagccctcaatgtaactgtccaaaaatgggctttgcctacagtgactataaagccacaacctggtcacccgtctctgctctatcagggatgatctgtaactagcaggtggggtctggaaacagtcttctgctgactgtccagggctgaattgcctgaagggtaagtgaccataaagcatggaaaactgtcattagctgaaaaaaataaacccagcacctaggacaatagatacatgccatatactcycaaatagatgacgggtctccagcttgttttctgcctcttaggagcttataaaactaaagttcacaattaatggggaagggaggagacagatgatcttcattgccttagttacaaacttgctttggtctatgctgatcctgtgttaaactgtgaaatagaatctatcatcctggctctcagaggcccttgacttcacccttttagtgcttttcttacttattttcaaaccttcacctctctcacattgaaaatcacaactcctaatac

SEQ ID NO: 507442 - DNA, 397 bp, Homo sapiens
tatatagaaatgctcacaacattaagcatttcattaagcattaaaatgcttacattttatttatcaataaaaatgtaaagaaatttttaaaagtaggcataggacttgaatagaaaatrcacaagagaagaaacacaaaagtttgatgaagaaactctaaagtatttgatatcatttttcatgagggaaataggaaatcatgctgagataccactcgcaccttccagaagaaggctaaaattaaaatgactgaaaacaacaggaattggcaggaagagggaacaaccaaagctgccattttctgtcagagagaaagcaaacaagtaccatcactttagcaaaggacaaggcaaaacaaaatatcttctttgaccggtggaactaaaggttggaggta

SEQ ID NO: 507443 - DNA, 397 bp, Homo sapiens
tatatagaaatgctcacaacattaagcatttcattaagcattaaaatgcttacattttatttatcaataaaaatgtaaagaaatttttaaaagtaggcataggacttgaatagaaaatgcacaagagaagaaacacaaaagtttgatgaagaaactctaaagtatttgatatcatttttcatgagggaaataggaaatcatgctgarataccactcgcaccttccagaagaaggctaaaattaaaatgactgaaaacaacaggaattggcaggaagagggaacaaccaaagctgccattttctgtcagagagaaagcaaacaagtaccatcactttagcaaaggacaaggcaaaacaaaatatcttctttgaccggtggaactaaaggttggaggta

SEQ ID NO: 507444 - DNA, 592 bp, Homo sapiens
ttttttagaccgaatttgggtcttttctgttctcacttcctttgaacttgaagctgcactcccaacatccgcattatgccccctccacagacaatactgcatcatgtagggtggccaaccttcccagtcacccaggatgcaggacttccattactaaagcaggacaatcccaggcaaatgggaccattgatcatgcaaagtacttatttctcatggagggaaaggctgtagtaatgtggccacagacaaagccctgctctcccagaagcctgattcacttagcttgatcccattgctgagaacctggcagaccttcagcaagaaaggcatgatgagaaaaggaaggggaaaaacttcctgagttcccagtggttttctaattcctgattccagtggtacccaacaaccaccagcaacttgatcctcttagttacataaaacacttgtacaacaaattgcatattttgttgttattgttgttgtttagatcagtgcaggttggtttctgtaactcagaacaaaaataactttgattaatatattatccatcagcagcacygtccaaacaattttaaaagtttttaaatctcat

SEQ ID NO: 507445 - DNA, 507 bp, Homo sapiens
attcatattctcagatataacttccaaagaatgagactcagaaaatatatatcttacatatggaggagtagccaaggagacaggtccacatgtgtactgggagaaggaacctatcctcactcccaacccactccctgcatcttggggaccagtacatccaaaggcctagagagcaaaaagaggcatttggtaaggaaactcaaagtaaagaaagaataggacacaaggaagcaactctatgatgttggccatcatagcagagtgccacgtctgattgtcaagctacacctggaatctgagcatcttcctcagtacgtccttcacccgggtccacactgcatagaaaagatgaaactgaatgactgacagttgacaccagaaaagaggcagggcaagagaagaggaggtagaaatgtaaaagcatgaaaaaaaaaaaaagcaagaattytcccctagtgacattggcaaaagtagttaactgaaagcgccctgtgggatagggattgt

SEQ ID NO: 507446 - DNA, 584 bp, Homo sapiens
aggaactggcacataagaaccagagcagacgaagctctttgagaaaataacacttctactccccaggagcaggctgtcagcaaagcagggactgagattcccctctccactggcctacgcctcacttgttagtataagggtctttgcaagcwttttttggtctacagagttgtctttatttatcagtaagtcttcaggcctcctctgggtaattggtggatcaaataaagatatttttaaaagctacagagggagaagaggaggcagaagaaggaataaagaatgttgcagttgttcttgccattgctggcactaacatttgttcattcagctaacttttaccctgggtctactctgtacaagtgggtacagggcaggagagggcccaaagaggagcatcacacaattccagaggtcagggatcttactgcgtgctgtaggaaaaacaaggtgtacaaatagctgaaacgctgtgtgttttaagtgccagaaaagatatacacagacttagggaaattgagaagagtgagaggttatttctggctagggtggtcagggaaggctctgtggagtcactgatattt

SEQ ID NO: 507447 - DNA, 647 bp, Homo sapiens
gtgtttctttttttctcttttattgcatgtttttaagtttgatgttttatatagataatatattcatatagtagaaagggcacaaatatatacacatacaggttgagcatccctaatccaaatatcagaaattcaaaatactccaaagtctaaaacgttttgagcactgtgacaccggaagtggaaaattctacacctgacctcatgtgacacattgagttgaaacacagtcaaaacttggtttcatgcacaaaattatttaaaacrctatatgaaattaccttcaggccgtgtgtataaggtatatatccaacataaattttgtattttgacatggatcctatcccatcatatctccttatgcatatgcaaattctccaaaatccgaaaaaattcacaatccaaaacacttctggtcccacacattttggagaaggggtactcaacctgtaaaagggatacagggaaatacccatccccgccctcagtgtacctagttcctctccctcacccgacccaaggaaagcagtgttgtttcttggaaggtatcctcctaggggtctttatgcatacaaaataaagcatattatgccactgtcctataccttatatatttttttcactcagtataatttgtaactctattt

SEQ ID NO: 507448 - DNA, 597 bp, Homo sapiens
gggcacagccagcagagccggggactgcagtgctttggcaaggtgcttccgcaggctggtagggaagcaggcagccactggccaagactctgttctgaatctacctcctctagcattcagctctactgtgtgatgggacgttaaaaataccaaaacagaaagagggtttaaraaacagctgcacaaaccagaacaccgattcagaatcttttctccctcttgagtttttgcaaaatactttattattgatttttgctttttttctccctttccctcccaggagaagacatttgggtcttggcctgaggcaggggtgttgagcgatgatgctctgatatggagctgtcactctagagctcggtcagatggaagacactatagaaccaggttggacagatttggggtcagggttggaggctgagttcttttgaggactggttggagtggcagccagatggtggctgctgacaaggcaagaggaatttcagagattaaacattgtcctttgaggaagggagaggaggtgaatgaactcccagaggaggtgagtggcttgttgggaggaagctcagttccagaacttacctcagtgcactt

SEQ ID NO: 507449 - DNA, 597 bp, Homo sapiens
gggcacagccagcagagccggggactgcagtgctttggcaaggtgcttccgcaggctggtagggaagcaggcagccactggccaagactctgttctgaatctacctcctctagcattcagctctactgtgtgatgggacgttaaaaataccaaaacagaaagagggtttaaaaaacagctgcacaaaccagaacaccgattcagaatcttttctccctcttgagtttttgcaaaatactttattattgatttttgctttttttctccctttccctcccaggagaagacatttgggtcttggcctgaggcaggggtgttgagcgatgatgctctgatatggagctgtcactctagagctcggtcagatggaagacactatagaaccaggttggacagatttggggtcagggttggrggctgagttcttttgaggactggttggagtggcagccagatggtggctgctgacaaggcaagaggaatttcagagattaaacattgtcctttgaggaagggagaggaggtgaatgaactcccagaggaggtgagtggcttgttgggaggaagctcagttccagaacttacctcagtgcactt

SEQ ID NO: 507450 - DNA, 463 bp, Homo sapiens
tgccaggttggctgaactgtaagccagagtgtcctkccactcaccaatgccaggggtccctatccaacccagccctttacaggtaccctgtagtttcctggtttccaaacttcaactcaatgattattaaaataatgtttctagggtacataaagcacttgtacctaaacctggcataattttttttaactattccctttatgagagaagcacttagctaaatctaatttttttttttttttctgagcttcctcagttcttccattcccaggataagctcaatgcttaggcatcggtttccactaaaagaagaaaaagtaccctacatttatcactgtgcatgtccctaaagtggtcttagcttaaggcctctaaggctgggtacatttacttttaaaaactctgttcctggtacacagtaagaactcagtattctactgttattattgtttttattgtctta

SEQ ID NO: 507451 - DNA, 463 bp, Homo sapiens
tgccaggttggctgaactgtaagccagagtgtcctgccactcaccaatgccaggggtccctatccaacccagccctttacaggtaccctgtagtttcctggtttccaaacttcaactcaatgattattaaaataatgtttctagggtacataaagcacttgtacctaaacctggcataattttttttaactattccctttatgagagaagcacttagctaaatctaatttttttttttttttctgagcttcctcagttcttccattcccaggataagctcaatgcttaggcatcggtttccactaaaagaagaaaaagtaccctacrtttatcactgtgcatgtccctaaagtggtcttagcttaaggcctctaaggctgggtacatttacttttaaaaactctgttcctggtacacagtaagaactcagtattctactgttattattgtttttattgtctta

SEQ ID NO: 507452 - DNA, 268 bp, Homo sapiens
acttgagaggagcaggggaggcgccctggggacccaagccctggttgaagtgggtgtcttgggtttgtgggtggtacactctgccacgctcctggctttcctccagcccatgcaccmctggcctctagcactccccagcccccagggaaaggagagtctcccattcccccgggtggagagtgggcaggatctcctctgaggaggggagtggggcacagcacccaccaggagtacaaaaagcagaggaagaaggggaccgagaccacca

SEQ ID NO: 507453 - DNA, 585 bp, Homo sapiens
tatggtgacagtgagggctctcagcaggggtgagatggagagtgagcaggtggacatctccagacatcccagtgcgcctgggctcaatgctgtgtctcagggtgtttctgcatggtgtggcttggggtcacatgggggagcacatgcacgtggtaggcccaggcagagagactgtgtgtgctgggcgccctgctcttcatgtgtgtgtggcatgctgtgtgcgtgctggagccctcggggtgggggggcagggatgaccagrgagtgctgcaaagtccagcagcatttgaaagataagtatgttttgttttagactctggaagctgataatcctggtcttgagtaaatggccatagttcctaagaaacagaaccttcccctctctggccatcctgcatatttatgggcagtacgtgtggtggcgtgacttggtgtgtgacgttaaccaggcatgtgtatgtagaaaggtcccatcgggtcccattgtagatggaggagctggtgtctgtgtaacagaggccgaagctgtgggctcgcatttacatttgggtactgtgtgaagttttgaaagttttaggtctgtgt

SEQ ID NO: 507454 - DNA, 599 bp, Homo sapiens
ttctctgaaagagtggtgggtgaaaggataggatccagacagaagttattctgaagtagagaggaggaatattagagattttatatcaagaagcggaagtttcgcctcttcctcaaaatattagttgtttccctctgcttttctcctgcacagraagatggaatggcatggggaacacccagacttgcacttgctccaatttccctctaacactatgcaaataagagtggccttcctggcaacagcttaaaccaaaggcgcttacattctgaaatggcaacttgaaaggaaaggaaatcctaattggaaacacttttcaagctcttgaacaataattccttttcaaaaaagagaaagttatttgcttcccacaaaacagaacttctacttaagtgtgacaataaataaaaatttttaaaaatacatataatatagtgcaggtaattttaccacttacatacaaaaaagaaaagacgagaaaaaaagaataaagaaaaaaagttaaatccacacaataatcctgaggttgattcaaagtctttgttaataccaaaacataaagacataggtagtgcaaaggactgattttatgtccctgc

SEQ ID NO: 507455 - DNA, 625 bp, Homo sapiens
attcctataggccaatgtaatcacagaatgatagaataattcagtgttttgagagctcagcaaagggagcattccttctacctaggcctcacataatgtttttatggaaggaatagaatttacacatggttctgatgtagactgaattttatcaggtggagatggggctgaagatatttcaaatgcaggaagagcactaccgaaggcctagggtagaaaacgtgccgagtataaaaatgcacggagatgataaaaaaaaaaattggtttggttgaagtctggtcatgaaacagaatggggagaggtctttaaaaggtaaatcagggacaggttatggatgaccttgaatgccttgctaaggactatatattccccttgctttgcttcccttgcttttgtaaagatctggaccatacctcaaaatgcaaatcactgaatatccttatgtcttagcaaaccagactcttccagtgcacacactctgccctgggattaagtacagtacttttggaaatcgcaytatctcattctattcactttttttcagcacatttgtgaactgagacagttcctgttatgtggattgtgcagaatccattggttagaaaaggtgttagaacatttg

SEQ ID NO: 507456 - DNA, 618 bp, Homo sapiens
catctcctttggtgactaccacccctcactccacacacaaacacacatgtgcagagaacaaatatacctccaatacacctttatcaaaaatatagagtaaataaaaaatcaagacatgaagaatgtacctgctggaaatgactgttttttttttatcctgaatttccaaaagaaactgctgatcaattgtgaagaatgtkgttgcaataaaagtgaatattaagtggaggtgcagtgggggcagggagtgaagaccaactaaaccacagtacctggtgagggtgcagtttggggcctctcttggtggctgcccagtaccctttgaagtgcatatgctgcatggatgcatgggtgcctggagctcagctagaatgccaaatccattctctcctctctctccctttctgttgcagagacagaggcaagggcaaaaatcgttgcagctctcgtattatgaaccaggatgtttattggtgatttctctataatttgcagggagaaatagaatacgatctaagaacattggattcaactaaatattcaagctttagggttaataaacttgaaaagattttatgtaagaataatgatggctttatctttattgcacaatacaca

SEQ ID NO: 507457 - DNA, 618 bp, Homo sapiens
catctcctttggtgactaccacccctcactccacacacaaacacacatgtgcagagaacaaatatacctccaatacacctttatcaaaaatatagagtaaataaaaaatcaagacatgaagaatgtacctgctggaaatgactgttttttttttatcctgaatttccaaaagaaactgctgatcaattgtgaagaatgttgttgcaataaaagtgaatattaagtggaggtgcagtgggggcagggagtgaagaccaactaaaccacagtacctggtgagggtgcagtttggggcctctcttggtggctgcccagtaccctttgaagtgcatatgctgcatggatgcatgggtgcctggagctcagctagaatgccaaatccattctytcctctctctccctttctgttgcagagacagaggcaagggcaaaaatcgttgcagctctcgtattatgaaccaggatgtttattggtgatttctctataatttgcagggagaaatagaatacgatctaagaacattggattcaactaaatattcaagctttagggttaataaacttgaaaagattttatgtaagaataatgatggctttatctttattgcacaatacaca

SEQ ID NO: 507458 - DNA, 661 bp, Homo sapiens
ctttactgttctataaccaaaccatttggcacgaggttatgatatggggagggagtggggaagacaggcttgggaactctgtgtcagtgagaattcccagcagaggcagtatggtaaataaggaaggtacttggaaaacgtcactaggatggagcatggtgcactatttaaaaattatatatagaaagctatgttacatcaggcaataaactatgactagtgagaaacatgtgagtaatgtttaagatggtccttaagacaaagcctggaacatttaaattattgtgaattaaaattttcaggatcyttaatctactgaatgtgttttggctcaagtggtaggcagttcaaataagagataagaaataaaatagttctatcaaacttctaattttatccattttttattttaattaattatctatatatagctgtgacagcagatgcaatttaaaccttgtcctatacacaagatgcatcctggactcacacagcgaatgtgagacaagaagtcctacctggatgacaatatctggattctttttacctttgccctcctggtccaggagtgctgagctcccttccattatctgcccccctatgttactgttgatggtatggaaaatagcagatggcgtattacagaagccacctatgtcac

SEQ ID NO: 507459 - DNA, 608 bp, Homo sapiens
tgccctgacagttgcctctgctcagagccccaggagccgggtgaacatttctgccttggtattcactgggaaggtcccttgttcgcacagacactgtccaatcctgcgcaacatggagtgaataaaaaatggcttctgaacaagagcttgcaattgtgggaggagtgagtggagggaggaacagcggccatcttatccaagggtaaatgaatttaggatttatttgaaccacttagtctacctcatgtctacatgatcttctgtcatgctgaaagaaacggatgcttattaattccaacaatgagaaggagcttgactttaaattagagaatccacagagcctcttttcattcatttggtagctttattctattatttcaggcaatgtaatgttgcatattataagatctatatctgtaatttctatatttatgtatttaaaattgtaacttggtatatttagytggtttatgttacatgcagcgtttaagaggaattcttttcattgacatactataatgcccccctaatattcttcttattgattttagtatttcagaagtattattcatggtgacatctactggaaagcaaatttcagttatatc

SEQ ID NO: 507460 - DNA, 505 bp, Homo sapiens
tgcggtggctctcacctgtaatcccagcactttgggaggctgaggcgggcagatcacgaggtcaggagatcaagggcagcctggccaacatggtgaaaccccatctctactaaaaatacaaaaattagctggggctggtggtgcgtgcctgtaatcccagctacttgggaggctgaggcaggaraatcacttaaaccagggagttggaggttgcagtgagcagagatcgtgccactgcactccagcctgggcaacagagtgagactccgtctcaaaaaaaaaaaaaaaaaaatagaagtagttcccttaaatggtaccaatttgcacattagaatcaatttgttcagtgtgtacgaagcccgtgactttaatggtggtttcctctgggtggtcctagaagactatcctggttacaaaagaaagaagccccatttacttcacctcataccccatgaccaccccacacccataagggttttcagtcagcagacatggccactccatg

SEQ ID NO: 507461 - DNA, 566 bp, Homo sapiens
ctgctacatgtaggacaggaatggccctccttttccaaatccatttgtgtaagtcaaactyagaagtaaaattttctttactatgaaaactggcaaaaggacacagccctaggagaataattttcagacatggtttcctatgaatttgctcccagactcaaagaatgcttgatttcctgcttcattgggaatatatatacatattaattagtttaaatgcttaccgtttatggggtcaaatctgattttagttccaggaataatgataaaataacttatttaatattaagtgacataaaagctgataatcataggacaagagtataaagatttccatttaaataagttttttggagatagagtctcactctgtcaaccaggctgcagtgcagtggtgtgatttcggctcactgcatacctccacctcctgagttcaagtgatttttgtgcctcagcctcccgagtagcttggattacaggcatccaccgtcacactcggctaatttttatatttttagtagatatcagggttttgccatgttggtcaggctggtcttgaactcctg

SEQ ID NO: 507462 - DNA, 578 bp, Homo sapiens
ctgcaaatcatcttgtcaattatgactttcacgcttcaaaattcctcaagttgctcagtctccttccgtacttgggactaattaaayaatccttctcttccttccacagttcacatagcagtgtaatctatatttacatcataagggtttgtgcgtgtatgtgtgtgtgtgtgtgtgtgtgtgtgggtgtgtgtgacagaaagatagagttactggttgattctgagaattaattcaggtttatgctgtgtactattgcctcacaatttgaaaataatctccaacaattaatgaggccacaatcccaaactcataaagattaaaaagagagagaaagagagagactctttaaactccaaactcacagaacagataaatttgtggttctttatatctaaaaagggggttctttactttctaaaagttttactgctagattcctttaaataaaaatttcccttggagcatttaaaatgatttacatttccaaaaattcaattgacaactttttacataaacagctattgcacaaggaaaaggaaactttcacatatgtttactttcaaaccatatcattt

SEQ ID NO: 507463 - DNA, 537 bp, Homo sapiens
ctgctcattcagattctttgcctcttgaaaccactgggcttcaccctgtgccatttctgtggagagaaagaaaggggggcacaacagggattcatagtcacatctccctcagtctgaacgccatgccttttcattccatgattctgcctgtctactacgaatgtgttaggattttccacagccatccatgattcccacattgcratcatctcataggttttggcacaaaatcggaatgtggaaagcatgtgtccaaagtgccacacttgaagcagggacctagacataatgtgtgcttatcataagcaccatgcatctcaggaaagaggccaggcaaagtgactcatgcctgtaatcccagcactgtgggagaccgaggcaggcgaattgcttgagcctaggagttcaagaccagcctggccaacatggcaaaaccctgtctctacaaaaaatacaaaaattagccaggtgtggtggcacatgcttgtggtcccagctactggggaggctgagatgggaggatcacttgagcctggg

SEQ ID NO: 507464 - DNA, 537 bp, Homo sapiens
ctgctcattcagattctttgcctcttgaaaccactgggcttcaccctgtgccatttctgtggagagaaagaaaggggggcacaacagggattcatagtcacatctccctcagtctgaacgccatgccttttcattccatgattctgcctgtctactacgaatgtgttaggattttccacagccatccatgattcccacattgcaatcatctcataggttttggcacaaaatcggaatgtggraagcatgtgtccaaagtgccacacttgaagcagggacctagacataatgtgtgcttatcataagcaccatgcatctcaggaaagaggccaggcaaagtgactcatgcctgtaatcccagcactgtgggagaccgaggcaggcgaattgcttgagcctaggagttcaagaccagcctggccaacatggcaaaaccctgtctctacaaaaaatacaaaaattagccaggtgtggtggcacatgcttgtggtcccagctactggggaggctgagatgggaggatcacttgagcctggg

SEQ ID NO: 507465 - DNA, 602 bp, Homo sapiens
aaaaagttaagaaatattctaatatatagtagctgaaaagtttacagaagtaaagaagaaagacacaaattagtagattctgaagaattatctatacgaacccataactattctctttattttggatattctattgtttccttataatttgtttataagtttccttataaataaacaaattataaggaaacagtggaatatccaaaacagaatatgcaagccaattaacaatcaccatttttaccaacaaaaatattgaaagtcagaaaatgtggaatatctttgaagtgctaataaatgataayggcaaatctagaattttatgtcaattagatttagaattcaagagcagatcaaaatagagacatcttcagacaatccaaaaactgagagtttactaccaagaatagtaacttttacagtatgtaccatagaataaaggataattaactggatgtaaattccaaaatattagaagaagaaaggatgtgaaaaaacatatataagcagtcacaattttatttaacaaacacaccaacaatatgtgatttgtgggaataagaaaaacaacatgaatataaaataatgaacaatttgtagca

SEQ ID NO: 507466 - DNA, 591 bp, Homo sapiens
aaaacatcaaccacctgttgatttttgaatctgctcctctcaggcatgccttcaaatgctataacctggagaktcaactcattttcatgctgctaagtaggaataggtgattcaattccccaagaaagtgacagaggtccctgaaatatagatttaaagttacatagtgtcaaatgctagtcattttctttttgctcgatggtatcctctcagaaaaaccttttataatatttctaattcatttaccagatttatagaatcatcaaattgtctatccatgtgtttttcaaatattttgtgaagtgtctagggtaacaacctagtgttcgaacgtattttgtgaagtggctagggtaacaacgtaatgttcgaacttatgttcgtatttaaatacaaatgtattttggttgagtgattactcaaggtcactgaggaatccacaaggttaacctcctgactctagaaccattgttatatagagatatataaatagctgatttaatattataggcttagcaaaatatttaataaataaggtcttagtaaaacaacacacatgtatttatccacttatttaattttgtttttcca

SEQ ID NO: 507467 - DNA, 532 bp, Homo sapiens
tgccagagccagcaacagcaacgtgctagggtccctttccacagtgtggaggctttgttcttttgctctttgcagtcttgctgctgctcactgtttggctctgcgcagagctgtaacactcaccragaaggtctgcagcttcacccaaagatattccaaagatacagaaaactatatagagacattttgtatagttctaatagcatataatccacaggtccctgatctataatatgggttttttataaaattgtttttttgtatgctatgaggaattttacttgttaaaaagaagaggtggaaaggcagaatatgaaaactatgaaaatgacataagagactatgaattaggtgagaaaccagagaggtttagaaacctgtagacattgtgcatcccccaatgcctttccccttaaaaaaaattatattctaatccagtccatcaaataaagtctacgttcattagaaacatattctcttggtttttataatttcagtttttttcagacacagatagtgcatatgcagattt

SEQ ID NO: 507468 - DNA, 524 bp, Homo sapiens
catgttatgtatatttgctctgctttccaaattgctttctaaaatgctaagttggccaggcgcagtggctcaatgcttgtaaccccagcactttgggaagctgaagtgggccaattggttgagmccaaaagtttgacaccagcctgggcaacatggcgaaaccctgtctctaaaaaaatttagccagtcatggtggtacatgcctgtagtcctggctactcggaggcagacaaattgattgagcccagcaggtcgaggctgcagtgagccatgattgtgccactgccccgcagcctgggcaacagagccaagactctatctcaaaaacaattaaataaataaaataaaatgctaagttatttaaaaatgtgaatttcctattgttgggcagccacaattaagtcattcctttagagcgtgaataatctagggcttctgaactattttctcctcatggcacaggtaaaaaacagcagaaaagtttacagtgcacgaggtaatggggtggaggttcgtggagccag

SEQ ID NO: 507469 - DNA, 614 bp, Homo sapiens
  misc_feature (1)...(614): n = A,T,C or G
gctgtcattccctgtttgtgcacaaaacctgtagtatttgagttggaagaaaatcctaggagcctgggcacagtggctcatgcctgtaatcccagcactttgggccaggctgaggtggacggatcacttgaggtcaggaattcgagaccagcctggccaacatggtgaaaccccgtatctactaaaaatttaaaaattaggtgggtgttgcagcacatgcctgtaatcccagctactcaggaggctgaggcaggataattgcttgaacccgggaggcagaggttgcagtgaaccaagattgcaccactgtacgccaacctgggcaatagagcgagactccatttcaaaaaaaaaaaaaaaaaaaggaggaaaatcctagggacaaagagttggaataatcctttaactcctaaaatccaaacgactgtgaagagaggatgagggcrggggatatcanacatatttagcaacatttccaaaataggtataaaaaataaattaactcatcataattgcaaagtggcttacgaattcagcaccagtggttcttgattctcttcagaaatactgcatagagaaagactgcatgtagaaaaactgaacaccaatgactg

SEQ ID NO: 507470 - DNA, 466 bp, Homo sapiens
gagtagagggaatcataagacagtggtgttcactaattggctgaacccaaagcaaactttctctgcttataacaggaggtacttgtataacttggagcaaaatgtctactgaagttaggctcctaccctcccatggagactggaagataaggagctatttcttttgatgtttacatttaaaactagtaagaggcttctaagcagatttacatacatttcaaaggaggcagagaaaaaawttgcaattacaagttttctccagtgatttaagaaaagggaggtcagggacctagagtcaggaaaaaaaaaaaaaaaaacacctgtcttaattttacttaagctgaggggaatgttgaaggccatctcaatcaaagcattcctgttatttaaattgaaggaatttctctatttctgcactgtattatttgggctacattgtgctgttgtccttattgcacaagctttt

SEQ ID NO: 507471 - DNA, 534 bp, Homo sapiens
acttgtgggaaaacacagtttcttctggaagagcagctctgttgtaacttaaactatgacagtagctagtccctttttgttcttttagtgtagtacactcaaatttaaagcagagttaaaagagaatctaaattatggaataacatggtcacatatgtatatattgtgcatctgaatatttataaagctaaggcttttggagatactaagttcaaaggattcccttgaagggctgggcacttctattcaaactcttgagttattaaagccagaatttacatgtaggataaaagtctcataaccaatgtttcaaaaaaggaacaattggcaaatctgtgatcagtcttggtgagaattatttcgcattagttatgcccaagacagcttgaccatccattttgccaaaactagtccatccctgggggatgagcagagaagggagagacagagatggctgtgtgggctccagccccacstgccgtcctgcccacggagcactgggaattggctttgggaaaatggcagaacaagcac

SEQ ID NO: 507472 - DNA, 633 bp, Homo sapiens
cacagtagaatcacctgacgaatgattctaagaagattgatgcctgctctccaatcaagagcaattaaatcagaattcccaagggtatagcctggcacttggaactttctaaaagctcccctactgactaatgggcaggcttggctgagatcaatcaaaatgtccattgtgagtaaaatcccacacttctctgacacacatacaaccacagagagacaaayaggaagttacaaaagcagtttttaaattttggggataattgtcagaaaaagtagagattggggaaataattgagagagcaggctcaggggtcagatgagataagtttgtgtcagcactgcatacactggctgtgtgagcttgtacatcaacccctttcctgcacaatggggacaacaacgacacctacctctcacaggacccttatgaatattaaatacatagaacagtgcatcttcattactgttgtatccttcaagtacttcttcagatttcacctgctctgcaaaatctcttgcctcatgcaagaagaataaaccactcctttctgtggcctcacacaccatcaatcaagattaatattatttacctgtgtatcacgtggcattgcaattgatagagtttcttgtctgt

SEQ ID NO: 507473 - DNA, 633 bp, Homo sapiens
cacagtagaatcacctgacgaatgattctaagaagattgatgcctgctctccaatcaagagcaattaaatcagaattcccaagggtatagcctggcacttggaactttctaaaagctcccctactgactaatgggcaggcttggctgagatcaatcaaaatgtccattgtgagtaaaatcccacacttctctgacacacatacaaccacagagagacaaacaggaagttacaaaagcagtttttaaattttggggataattgtcagaaaaagtagagattggggaaataattgagagagcaggctcaggggtcagatgagataagtttgtgtcagcactgcatacactggctgtgtgagcttgtacatcaacccctttcctgyacaatggggacaacaacgacacctacctctcacaggacccttatgaatattaaatacatagaacagtgcatcttcattactgttgtatccttcaagtacttcttcagatttcacctgctctgcaaaatctcttgcctcatgcaagaagaataaaccactcctttctgtggcctcacacaccatcaatcaagattaatattatttacctgtgtatcacgtggcattgcaattgatagagtttcttgtctgt

SEQ ID NO: 507474 - DNA, 582 bp, Homo sapiens
tctattgcatgtgatagtatcttggagggtagattaaactctaatcttgaactcagtwcatgtatgactactctgcaagatgtctggagaagcagcttctccagatgtgctgagctggaggtcagcatttaaggtgtcacccagatacctggtaattgaggatttgggttgtagggagctcatcaagggaatgtgtctgtgctcagtaccgagaactgagctatagaaatctccagggctggtggaggcaagagtaagagaagttggaaatgaagcagaagaagcaactgatgaggccacaagagaactagaaaaatgcgtaggaagcttaacaaggaacagacagaaaaaaaagaggacatcgcttaccccacccttcagtcagtctccctactcccactggcgactgatgacttgtcttgataaacccaatggacactttttttagatactttttttttttacccaccagcagcaattgacattaataatcattctccttcattttggaaaccactctcttcctttgtccatgatactcctctctgcttttccctttgtccttctgtctcctctcccaat

SEQ ID NO: 507475 - DNA, 582 bp, Homo sapiens
tctattgcatgtgatagtatcttggagggtagattaaactctaatcttgaactcagtacatgkatgactactctgcaagatgtctggagaagcagcttctccagatgtgctgagctggaggtcagcatttaaggtgtcacccagatacctggtaattgaggatttgggttgtagggagctcatcaagggaatgtgtctgtgctcagtaccgagaactgagctatagaaatctccagggctggtggaggcaagagtaagagaagttggaaatgaagcagaagaagcaactgatgaggccacaagagaactagaaaaatgcgtaggaagcttaacaaggaacagacagaaaaaaaagaggacatcgcttaccccacccttcagtcagtctccctactcccactggcgactgatgacttgtcttgataaacccaatggacactttttttagatactttttttttttacccaccagcagcaattgacattaataatcattctccttcattttggaaaccactctcttcctttgtccatgatactcctctctgcttttccctttgtccttctgtctcctctcccaat

SEQ ID NO: 507476 - DNA, 568 bp, Homo sapiens
tctattgcatgtgatagtatcttggagggtagattaaactctaatcttgaactcagtacatgtatgactactctgcaagatgtctggagaagcagcttctccagatgtgctgagctggaggtcagcatttaaggtgtcacccagatacctggtaattgaggatttgggttgtagggagctcatcaagggaatgtgtctgtgctcagtaccgagaactgagctatagaaatctccagggctggtggaggcaagagtaagagaagttggaaatgaagcagaagaagcaactgatgaggccasaagagaactagaaaaatgcgtaggaagcttaacaaggaacagacagaaaaaaaagaggacatcgcttaccccacccttcagtcagtctccctactcccactggcgactgatgacttgtcttgataaacccaatggacactttttttagatactttttttttttacccaccagcagcaattgacattaataatcattctccttcattttggaaaccactctcttcctttgtccatgatactcctctctgcttttccctttgtccttctg

SEQ ID NO: 507477 - DNA, 332 bp, Homo sapiens
tctactggtaagggagtttgctctttttaaaagaagaatagcaaatgattccctgtggatctggaacttactctgtcaacctaaggatgygtttttgtgactatcatctctttattctaaagccaagtggaaagagaacaaagcaatgagaggaaactgatttaaaaaccctttagctgatcaaggtgggaaattaggaaaactaaatctaaataaactcttgaagtcactttgtgtagcaagagaatagtctgaacttgattatgatgaagaaaatccttatagagttcatgctaccagaagaattttgagactacattggcatgaagtgt

SEQ ID NO: 507478 - DNA, 332 bp, Homo sapiens
tctactggtaagggagtttgctctttttaaaagaagaatagcaaatgattccctgtggatctggaacttactctgtcaacctaaggatgtgtttttgtgactatcatctctttattctaaagccaagtggaaagagaacaaagcaatgagaggaaactgatttaaaaamcctttagctgatcaaggtgggaaattaggaaaactaaatctaaataaactcttgaagtcactttgtgtagcaagagaatagtctgaacttgattatgatgaagaaaatccttatagagttcatgctaccagaagaattttgagactacattggcatgaagtgt

SEQ ID NO: 507479 - DNA, 654 bp, Homo sapiens
aaaaagcaaaaatatttagttttagtgaagttcaattgatcaatgttttaatgattaatgctttttgtgtattaataaatctcaacctatcccaaggttgagaggaaaatatagagaaaactcctatattttcttttagaagttttattattttttactgttatatttaggtctatgattttgagtaaatatacaactttggaataagagttaatgttcttttttattctagtttcaatatcatttgtttgaaggtttacttcttacctattaaatgcattggcatttttggctgtaactcagtgtgtcttatatgtatgatataattctggactctctagtctcttccactgatttacatgtgtagccctgcattaatgtcatactaccataataaycgtttctttgtaataatgccatacatgtttaacctgtttcagtgatctgaaacagtaattgggaggtatgtagggacatatttagaaacattatctttagctcaacttcaagatggctgactagagacatctggtactcgcctcttccacaaagaagaaccaaaatagcaagcagataatcacacttcaaatatatcctctaagagagaacattggaattctacagagaagtgacagcaaacacctaaagcaagga

SEQ ID NO: 507480 - DNA, 540 bp, Homo sapiens
cagttcttccagatcttccatcctaaatactagcacgtcattgataacagcctcttattgaacacttatgtgccaggctctttgcatgtaactcatttaattatcaaaacttcaagaaatagataaattaccattttgcagattaagagattaagactcagcaagattaagcaaaaggggttggtaagtgaaaaggtggggcttgaactcccagctggctctcttgcgtcctcrccacgctgccttccagccacggtttctccaacacaccttctcattgcaatagggccccctcttttgaatctctttcctagattaacagcatcctctaatgaatacatattattatccttattttacagttaaagaactgaggatcttctaattcctgtatcactgtttcagtacttattgacatttcaggatcaaattgcttgatctttcctatttgcatatgatattaaaacaagccagagtccaccagcatgggattcacatgcagccatgttccccacaagactcaacattgacatgactgat

SEQ ID NO: 507481 - DNA, 540 bp, Homo sapiens
cagttcttccagatcttccatcctaaatactagcacgtcattgataacagcctcttattgaacacttatgtgccaggctctttgcatgtaactcatttaattatcaaaacttcaagaaatagataaattaccattttgcagattaagagattaagactcagcaagattaagcaaaaggggttggtaagtgaaaaggtggggcttgaactcccagctggctctcttgcgtcctcaccacgctgccttccagccacggtttctccaacacaccttctcattgcaatagggccccctcttttgaatctctttcctagattaacagcatcctctaatgaatacatatyattatccttattttacagttaaagaactgaggatcttctaattcctgtatcactgtttcagtacttattgacatttcaggatcaaattgcttgatctttcctatttgcatatgatattaaaacaagccagagtccaccagcatgggattcacatgcagccatgttccccacaagactcaacattgacatgactgat

SEQ ID NO: 507482 - DNA, 540 bp, Homo sapiens
cagttcttccagatcttccatcctaaatactagcacgtcattgataacagcctcttattgaacacttatgtgccaggctctttgcatgtaactcatttaattatcaaaacttcaagaaatagataaattaccattttgcagattaagagattaagactcagcaagattaagcaaaaggggttggtaagtgaaaaggtggggcttgaactcccagctggctctcttgcgtcctcaccacgctgccttccagccacggtttctccaacacaccttctcattgcaatagggccccctcttttgaatctctttcctagattaacagcatcctctaatgaatacatattattatccttattttacagttaaagaactgaggatcttctaattcctgtatcactgtttcagtacttattgacatttcaggatcaaattgcttgatctttcctatttgcatatgatattaaaacaagccagagtccaccarcatgggattcacatgcagccatgttccccacaagactcaacattgacatgactgat

SEQ ID NO: 507483 - DNA, 645 bp, Homo sapiens
atatgaaaatttagtacaccattatgatggtacttcataataataggaaaggatataatattcaataagtggtatttttagtggcggcagggatttgagttacaccgagttaccacaagcgtattcgtatgggtctgtagcaacttcagtccttgcctcctcagaagaacttgactgaaggacataaagcagaaaaagagaccaaggcaagtttcagagcaggagtgggagtttattaaaaaggctttagaacagcaaagaaagtaaagaacccttggaagagattcaagtgagcccctgaaggtcaaggagaaaagagagacaaaagaagcacctttaaatttgatcctgggactttataggctcacctctttcccatgattcttcccttagggtgggttttctgcatgcggtgcctccttacycttgggaactgagcacatgcagtatgcttaggatttgtatgcatgcccatctgaggctttcttcctttttcgggcggagtgatccgggaagatcatacttcgccatttttgtctcttaatgtgcatgcccaagaagctgcttctctctggggcctgcattcaattaacattttaatgttaacaggtgtggaccatcagaaaatggcctctccctggggcc

SEQ ID NO: 507484 - DNA, 577 bp, Homo sapiens
gacaaaaaaaaaaaaatccaaaggcttcttactgcaygtataaaataatccaggctccttatggtggctcatggtgccctctctgatgtagttctcgtccctctcactggagtcctctcttctcatcatctcttgggtttgttttgtcctcattcttctttctcaaacatgcttcatgattccacctcagggccttgcacttgctctttcatggccttaaacatgactctccctcatattttcccagaaccgggtccttctcatctttcagtgtccagaaagagaaggtgggtgaattagaagttcttgcctacaaatctttattgaacagtccaactcttaggatgtaccaggctttgtattcagtgctagttgtgagtcctagtattcaaagagctcaagatttcatggagtgctcaggaggaaaacaggcaaaaactgttccctgtgatgtgtgctttggtgctgggaaaaaggagagatctggtgttgaggaattggaattacagaaccaagatttgcaggattagggaaaaaaaatccagaggaagtaacatttaaagtgaaggatgggcaa

SEQ ID NO: 507485 - DNA, 577 bp, Homo sapiens
gacaaaaaaaaaaaaatccaaaggcttcttactgcatgtataaaataatccaggctccttatggtggctcatggtgccctctctgatgtagttctcgtccctctcactggagtcctctcttctcatcatctcttgggtttgttttgtcctcattcttctttctcaaacatgcttcatgattccacctcagggccttgcacttgctctttcatggccttaaacatgactctccctcatattttcccagaaccgggtccttctcatctttcagtgtccagaaagagaaggtgggtgaattagaagttcttgcctacaaatctttattgaacagtccaactcttaggatgtaccaggctttgtattcagtgctagttgtgagtcctagtattcaaagagctcaagatttcatggagtgctcaggaggaaaacaggcaaaaactgttccctgtgatgtgtgctttggtgctgggaaaaaggagagatctggtgttgaggaattggaattacagaaccaagayttgcaggattagggaaaaaaaatccagaggaagtaacatttaaagtgaaggatgggcaa

SEQ ID NO: 507486 - DNA, 607 bp, Homo sapiens
ctgcaaccatttgatcatttgcaggtctgaggactgtgcagtttcatctttgcttccatataaatatatttatttgcacatgtagtaagtattttccctaccctactaccctatttgatagaaaatgttttgagagttgctaactttatttctcaatatttaagttatcagctagcaaagggagactgtgattgaactagaaagacggrcaccaacaaaaggataaaatgaagtatgagatcttgtgcattctattgaaataactgcattatgtagagttgaaagatgattttagtattacttaatttccaagttaaatattaaaaacatacaatagattatgaatgcaaagttcacaaggatagaccgtgctacattttggtccatcaaccaaggtggaagctacgtttctttaaatcatcttccctatgcggtgctagactagaattggccaaaagaggaacctgtatgaggtttggaataacattaagtgaaactctttgtggtcagatacgtgacagatgcagagacagtagacagttttatatcatgctcactctcttctccatatctcactcttcctgatttctggcccaactgacagtca

SEQ ID NO: 507487 - DNA, 607 bp, Homo sapiens
ctgcaaccatttgatcatttgcaggtctgaggactgtgcagtttcatctttgcttccatataaatatatttatttgcacatgtagtaagtattttccctaccctactaccctatttgatagaaaatgttttgagagttgctaactttatttctcaatatttaagttatcagctagcaaagggagactgtgattgaactagaaagacgggcaccaacaaaaggataaaatgaagtatgagatcttgtgcattctattgaaataactgcattatgtagagttgaaagatgattttagtattacttaatttccaagttaaatattaaaaacatacaatagaktatgaatgcaaagttcacaaggatagaccgtgctacattttggtccatcaaccaaggtggaagctacgtttctttaaatcatcttccctatgcggtgctagactagaattggccaaaagaggaacctgtatgaggtttggaataacattaagtgaaactctttgtggtcagatacgtgacagatgcagagacagtagacagttttatatcatgctcactctcttctccatatctcactcttcctgatttctggcccaactgacagtca

SEQ ID NO: 507488 - DNA, 625 bp, Homo sapiens
aaatgatacagatatgatagctaggtcagtccacggggatctgtggacttctgaagagtcgtgatccgtgtgacttctgaagagatgagggggcatgggaggctttagcggagcttccgctattctggcaaggtttcatttttgcccggggagctatcagccagcggagagatctgtaagaagagataagacctcaagggaagtacgaggcagagccttccgcggcccgcgccctggcggccccaagtcagcggcggagacagcgcccaccccgctccagcgtggagcaggagcaacggcgtggcccgtggagccccgcctctcgcggcaaccacagagaagccggactgggccacgtctaggaagaggtaggaaaggatcggcgcatcatttctccaatgggaaaggatgtgtttgcggaccaataagtcgccagwataacacccgcccacgcgcctgccaagccaatcggctaggagcagcgagcggcgcggctgaggcgcggcggccccgtggagcagcgcagtatggcgggcggggcccgggaggtgctcacactgcagttgggacattttgccggtttcgtgggcgcgcactggtggaaccagcaggtgaggtcagccgg

SEQ ID NO: 507489 - DNA, 590 bp, Homo sapiens
gtggttatgactaatagactattatgtttctaggtaagagatagatggctaacacacttgagttttgcttgatttctataacaagaaaaactcacgtattggcccagcagaaagctgaaagcaactacagtgcaaaatgaagcaagcatccagcacttggccatatcatctggcagatctacaatgctagagatacccatggcaaattaaggccgaccgtctggcatgtctcaatgagagattcattrcacaggctccctagtattctggaacaaggtcatgttttctccacgagagaatgacttatcatttgaaaagcagctcctgttgtgctactgggccagcagacactgagcacctgaccttgtaacatcaggtgtataaccagaacagtccatcactacctgaatattgtcagatctaccaagtcatgggttctagcggatgtggcagcaaaccatcctaggatgaggcccaagcaggttgaaaacgcataaataacttaacataaatagcaagccataagtcacctactctgtttcacaaaggctttctctctcaatacccatctatggccttgtggtgagttc

SEQ ID NO: 507490 - DNA, 596 bp, Homo sapiens
ggatctgtggttatgactaatagactattatgtttctaggtaagagatagatggctaacacacttgagttttgcttgatttctataacaagaaaaactcacgtattggcccagcagaaagctgaaagcaactacagtgcaaaatgaagcaagcatccagcacttggccatatcatctggcagatctacaatgctagagatacccatggcaaattaaggccgaccgtctggcatgtctcaatgagagattcattacacaggctccctagtattctggaacaaggtcatgttttctccackagagaatgacttatcatttgaaaagcagctcctgttgtgctactgggccagcagacactgagcacctgaccttgtaacatcaggtgtataaccagaacagtccatcactacctgaatattgtcagatctaccaagtcatgggttctagcggatgtggcagcaaaccatcctaggatgaggcccaagcaggttgaaaacgcataaataacttaacataaatagcaagccataagtcacctactctgtttcacaaaggctttctctctcaatacccatctatggccttgtggtgagttc

SEQ ID NO: 507491 - DNA, 596 bp, Homo sapiens
ggatctgtggttatgactaatagactattatgtttctaggtaagagatagatggctaacacacttgagttttgcttgatttctataacaagaaaaactcacgtattggcccagcagaaagctgaaagcaactacagtgcaaaatgaagcaagcatccagcacttggccatatcatctggcagatctacaatgctagagatacccatggcaaattaaggccgaccgtctggcatgtctcaatgagagattcattacacaggctccctagtattctggaacaaggtcatgttttctccacgagagaatgacttatcatttgaaaagcagctcctgttgtgctactgggccagcagacactgagcacctgaccttgtaacatcaggtgtataaccagaacagtccatcactacctgaatattgycagatctaccaagtcatgggttctagcggatgtggcagcaaaccatcctaggatgaggcccaagcaggttgaaaacgcataaataacttaacataaatagcaagccataagtcacctactctgtttcacaaaggctttctctctcaatacccatctatggccttgtggtgagttc

SEQ ID NO: 507492 - DNA, 559 bp, Homo sapiens
aggatattctgagtccttttagagaagaaaggcttggaaaaaacattacatattcaacatattgccataatttaaataaagtcaattacaaatagataaatattcaacatcttggtacattttaaagaaattgatcacaaaccatatgattactactcagtgatatgaactgaagcccaagaaaaaggaccttacacttttaaaaagctttttctattcctaccactaggtgattctctatacctaaaaaagtctttgaaagtaacctattttgtcccacacactctgactcactgcattytctgtcttcctctgtcttttccctcagtgtatctaatgtgtttgctcacactttctttagaataacatttggttgtttaaagtgagaaaaaagaaagaaaaaaaggctcataatcctacagcttaaataatctttcatattaacaaaatcatacaataacacacaatatgaaattccagatattcaaaaaagacataaaagatgagtttgggaaactagaatgaacactgaacatccactagtctagatcctcatttt

SEQ ID NO: 507493 - DNA, 591 bp, Homo sapiens
gtgtgggtgtgggagagtcggatcagaaggccagcactgctcatcatggagcacctgggagagcagcagcgactcagctcctggcaccaggtgaggcaggaaaatagggtctggaggcagggaacataaggctcattcccacttcagctataaccggaaatatcctctccatagggcatatcaggtaaatgactttgtaactttacttcatcctctctgtttatatagggcatacccgaagtaaccaatgaatcctctagggggtatttaaactcccccaaattctgtaacagggccttttgaatcctacactcaggcccattcccacacagtggagtgtactttcattttcaataaaatcttcattcataccttgctttgtttgtgtgtctcttccaattctttgttcaagaagccaagaacctggaacactgtccacttttaacacaggggttgtttaatttaccttttgccttaraaatataaaaagatacacagtaaaggtgtgtaaaaggaaaggcctctttcacccttaccccacccccatccctccctaaaggtccctgtgattagcttggtgtgtgtccagcc

SEQ ID NO: 507494 - DNA, 614 bp, Homo sapiens
tgcctcgcttaaacgtggggaggctgaagagggtgcaaagctgggtgaacatgagtgattagacaggatgtgccctggccaagacagggagctgaaattcagtctgtggaacaggctgtgatggcccagaggaaatccataggtgggaggaaaactatggaccctgtgctccatattgccaggacctgcagaggaactagctcctgcagaagatgcaggatttggacgggaagattgggcaagggttctgtctactgggcactgaaggtttgatggggacacwgggatggtccctgccaccaaagcagctcaagctcaggcagaggaaatagaaactggacaaatgcagtatttcttatgggcactgctctaaggagtaatttggaatccagtagggtgatgtaagtgaaggtgctttgaaacctcccaaagctctcgcccaggtaaggaggtttgtggtccttgtcaccatttacccaggaaagcttcaaagcagcagcggcggcggcggcggcggcggcggcagcagaatttccctccttccctcctgttactctcccagcctcctctccctcctatcactctcctaagttcagagctgaccccactcctct

SEQ ID NO: 507495 - DNA, 687 bp, Homo sapiens
tgcctcgcttaaacgtggggaggctgaagagggtgcaaagctgggtgaacatgagtgattagacaggatgtgccctggccaagacagggagctgaaattcagtctgtggaacaggctgtgatggcccagaggaaatccataggtgggaggaaaactatggaccctgtgctccatattgccaggacctgcagaggaactagctcctgcagaagatgcaggatttggacgggaagattgggcaagggttctgtctactgggcactgaaggtttgatggggacactgggatggtccctgccaccaaagcagctcaagctcaggcagaggaaatagaaactggacaaatgcrgtatttcttatgggcactgctctaaggagtaatttggaatccagtagggtgatgtaagtgaaggtgctttgaaacctcccaaagctctcgcccaggtaaggaggtttgtggtccttgtcaccatttacccaggaaagcttcaaagcagcagcggcggcggcggcggcggcggcggcagcagaatttccctccttccctcctgttactctcccagcctcctctccctcctatcactctcctaagttcagagctgaccccactcctctgctacccatggtggtagccaggcctgtgcctctcctagcatcagaagctgccccaggctcccaggactggagc

SEQ ID NO: 507496 - DNA, 614 bp, Homo sapiens
tgcctcgcttaaacgtggggaggctgaagagggtgcaaagctgggtgaacatgagtgattagacaggatgtgccctggccaagacagggagctgaaattcagtctgtggaacaggctgtgatggcccagaggaaatccataggtgggaggaaaactatggaccctgtgctccatattgccaggacctgcagaggaactagctcctgcagaagatgcaggatttggacgggaagattgggcaagggttctgtctactgggcactgaaggtttgatggggacactgggatggtccctgccaccaaagcagctcaagctcaggcagaggaaatagaaactggacaaatgcagtayttcttatgggcactgctctaaggagtaatttggaatccagtagggtgatgtaagtgaaggtgctttgaaacctcccaaagctctcgcccaggtaaggaggtttgtggtccttgtcaccatttacccaggaaagcttcaaagcagcagcggcggcggcggcggcggcggcggcagcagaatttccctccttccctcctgttactctcccagcctcctctccctcctatcactctcctaagttcagagctgaccccactcctct

SEQ ID NO: 507497 - DNA, 602 bp, Homo sapiens
gcctcgcttaaacgtggggaggctgaagagggtgcaaagctgggtgaacatgagtgattagacaggatgtgccctggccaagacagggagctgaaattcagtctgtggaacaggctgtgatggcccagaggaaatccataggtgggaggaaaactatggaccctgtgctccatattgccaggacctgcagaggaactagctcctgcagaagatgcaggatttggacgggaagattgggcaagggttctgtctactgggcactgaaggtttgatggggacactgggatggtccctgccaccaaagcagctcaagctcaggcagaggaaatagaaactggacaaatgcagtatttcttatgggcactgctctaaggagtaatttggaatccagtagggtgatgtaagtgaaggtgctttgaaacctcccaaagctctcgcccaggtaaggaggtttgtggtccttgtcaccatttacccaggaaagcttcaaagcagcrgcggcggcggcggcggcggcggcggcagcagaatttccctccttccctcctgttactctcccagcctcctctccctcctatcactctcctaagttcagagctgac

SEQ ID NO: 507498 - DNA, 687 bp, Homo sapiens
tgcctcgcttaaacgtggggaggctgaagagggtgcaaagctgggtgaacatgagtgattagacaggatgtgccctggccaagacagggagctgaaattcagtctgtggaacaggctgtgatggcccagaggaaatccataggtgggaggaaaactatggaccctgtgctccatattgccaggacctgcagaggaactagctcctgcagaagatgcaggatttggacgggaagattgggcaagggttctgtctactgggcactgaaggtttgatggggacactgggatggtccctgccaccaaagcagctcaagctcaggcagaggaaatagaaactggacaaatgcagtatttcttatgggcactgctctaaggagtaatttggaatccagtagggtgatgtaagtgaaggtgctttgaaacctcccaaagctctcgcccaggtaaggaggtttgtggtccttgtcaccatttacccaggaaagcttcaaagcagcagcggcrgcggcggcggcggcggcggcagcagaatttccctccttccctcctgttactctcccagcctcctctccctcctatcactctcctaagttcagagctgaccccactcctctgctacccatggtggtagccaggcctgtgcctctcctagcatcagaagctgccccaggctcccaggactggagc

SEQ ID NO: 507499 - DNA, 668 bp, Homo sapiens
gagggctctgccctcaggaatggatccatgccatcatctctggagtgggttcttgataaaaaggatgattctggaccacttccctctcatgtctcacatgcttacctctgccttccatccttctgccatggtggggccctcacaagatgctggtgccatgctcttggactttccagcctccaggactgtgggaaatcaatttcttttccacccagtctgtggaattctttttaaaattttttatactattattactattattatttgagatggaatcttgctctgtcagtcacccagactggagtgcagtggtgcaatctccgctcactgcaacctccgcctcctgggttcaagcaattctcctgcctcagcctcccaagtagctgggatcacaggtgtgcgccaccatgctctgctaatttttgtatttttagtagagacggggtttcaccacgttgcccaggctggtctccaactcctgggcttaagtgatctgccaacctyagcctcccaaagtgcgtgagccaccgtgtctggcccactctgtggaattctgtatggcagcaggaaatggactaaaaagcagtacagagatgtcactcggcttcatgcacaatgggaactgaggcctgggttctccggtctctccaggctaatttccccaccca

SEQ ID NO: 507500 - DNA, 602 bp, Homo sapiens
tgctggagctcgtcttccgccggacccggtaccccgacatccacttgcgcgagcgcctggccgcgctcaccctgctccccgagtccaggatccaggtgagggcccgctgcgttcgcaagtgcgcgctggagcggaggcgctgcggactctaggtctggactgcgggctcctgaggccacacccgggacgttgcaggcacggtgcttcccctgaggctctgcgtactagactgaaatagggggtgatatcggcacctgctgcatagggtggttgcgaggcctgtgtgaaataatttaggcctgcactgaacgatttctctcattattaaatataataagggctcctaggaggctagccggtcccctgaaatggccagaaagtaattcccagcaggaagataagaagttttacactttttctttatccgggaagaagacacagatgaggggcagttggggttttcctctggctttgagcgtgagaatggtagctgaaaacggggaaggctggctcgccaagttacccccatgctactttcttggcaagtgtyacgttttgggattagatttgaaaggatgtagcgaattgagataaagcgagaa

SEQ ID NO: 507501 - DNA, 387 bp, Homo sapiens
tgctaacgaacagctcagaacaatgtcaacaaccaggagctggggccatggagagttgaaagaaacagcactatagcaggcggttaagtctgccagatttagcaaatcaaaacatacaatgcccagctaaatttgaatttcagataaacaacgaattattttctagtgtaagtatgcccacgcaccattttatctggcaacctcagcagggggtgacttcctgggctgcatttggagactaacagtagggagcactccctccatgaggccttgggacaatgtatacaggatgggtcatactgtgggtggatgtcagtgtagaaagtgaacttgggaaagcttattgtcttaatagggagccatgyagcccctaagtcctcacattgc

SEQ ID NO: 507502 - DNA, 642 bp, Homo sapiens
tgggtggttcccacctgaagccccaggtctggctcccctccccataggcttctcaggattccaccctcactgtgygccagggcaggcctgagcatcaccctaggggaggccagggctgctggggaggggcagctttccaacctcaatgggaatgaagagggcaccatcaaaccagcactggcttccgcctcttctgcaggtgagagggtggaaagcctgtgctcgttccaccagctttttggatttaatgaaaaattcacaacgttcaggagattgatttttgggctttttgtttgttttgttttgttttttgttgtttgcttttttgagacagggtctcactctgtcacccaggctggagtacagtggtgcgaccttggctcactgcaacctctgctcactggttcaagtgattctcttgcctcagcctcccaagtagctgggactacaggcgtacatcactacgcctggctaatgtttgtatttttagtagagacggggtttcactgtcttggccaggctggtctcgaactcctggcctcaaatgatccacccacctctgcctctcaaagtgctgggattacaagtgtgagccactgtgccccgccaacgttcaggagatttaaaagcagcaagtgagca

SEQ ID NO: 507503 - DNA, 413 bp, Homo sapiens
gccctactgagtttggcaatgctgtggttgagcgagggtgggagtccccaagccaggtgggacargcaaagtcagaatcttcacaaggagaacccactcctggtagagctacagcctgggaggccgtgcctggcacaccttgggtgcctggccagtgagggtgctccctgcatggcctcccggtctcttccagtcgagcctagtggagcaaaggatctcccctaggagatggggcacaagagaggaaacaggtaggaaggggcccagcttcagcatcctctggccaaggaagggtagaatcctcctggactccctgctggagtggatgcagagggaatgggagggaaccaggctcagaggcccgttagagaacgtcctaggcgcccatcaggtgagccggcagcatgctccag

SEQ ID NO: 507504 - DNA, 413 bp, Homo sapiens
gccctactgagtttggcaatgctgtggttgagcgagggtgggagtccccaagccaggtgggacaagcaaagtcagaatcttcacaaggagaacccactcctggtagagctacagcctgggaggccgtgcstggcacaccttgggtgcctggccagtgagggtgctccctgcatggcctcccggtctcttccagtcgagcctagtggagcaaaggatctcccctaggagatggggcacaagagaggaaacaggtaggaaggggcccagcttcagcatcctctggccaaggaagggtagaatcctcctggactccctgctggagtggatgcagagggaatgggagggaaccaggctcagaggcccgttagagaacgtcctaggcgcccatcaggtgagccggcagcatgctccag

SEQ ID NO: 507505 - DNA, 625 bp, Homo sapiens
agtcacatgcacttaccttcaaggagatgaaggagtacaagaatcccatatgccccagtatagaggagagctggatattgatgagcagtagttatctgctttcytttatgctcttctgaatttttctgtctctcaaggtcaccaataaccatgccctatcaccttcaaaactataacaaaataatagttaactttttctcaggttttcctaagagtataacattgtgctaaaaatttttgttatattattttacttagtcattaaggaaatgtatgaggcccatgtatcatcgtctccattatgcagatgataaccctttcatatcatttagtgtgcatgcaattaggcttcaagtccacctttttctgatttccaggcttaatgtccatgccatgtctccaattgtaattcgcttcattttccaattcttagctgcctgagctattatagtttaaaggctagcataataaagtgcttaggaaatgatatttgaaagtgaagaatgggaaagaaaggattcgaagctgacctataacctatttttttctatcatatgaacaccaagagtgagaatacaaagaaaaaaattactaataggtctttttaaaaacatgctaacataaa

SEQ ID NO: 507506 - DNA, 587 bp, Homo sapiens
agagataaacatccttaatgcggtatatatttttaagcttttaaattcgtattttaaatgccaatgcagaatcttttggcagtacatgatccatgtacttgcaggttttgatgattggaataaactctgaagaacgatttatgtataggttagagaggggctgtaagttgttagctcaagtatagtggggctgcwgtaggggatgccagtgactgattttccattttgatgaatttttttcaccagttttaattttttttctctaaatttctgttaatcaaatgagatgtgaactggaacaaccattaagcagacagcagtgatcaaggtgaaatctctttttatatagaactgatgaaattcactccttgcactacatcctctgaactaacatgtgctatcagctcaaggtcgcctccggtcaagaaattgactacctgtttaggacacatgctttaattattagggagcagcttcttctacctgatttgcaacacattttctttataatgagctaaaaccaaatgcaacaaatactagagttcactgtcatagctgcatgttgccaaactcttctgcatttcaag

SEQ ID NO: 507507 - DNA, 587 bp, Homo sapiens
agagataaacatccttaatgcggtatatatttttaagcttttaaattcgtattttaaatgccaatgcagaatcttttggcagtacatgatccatgtacttgcaggttttgatgattggaataaactctgaagaacgatttatgtataggttagagaggggctgtaagttgttagctcaagtatagtggggctgctgtaggggatgccagtgactgattttccattttgatgaatttttttcaccagtttyaattttttttctctaaatttctgttaatcaaatgagatgtgaactggaacaaccattaagcagacagcagtgatcaaggtgaaatctctttttatatagaactgatgaaattcactccttgcactacatcctctgaactaacatgtgctatcagctcaaggtcgcctccggtcaagaaattgactacctgtttaggacacatgctttaattattagggagcagcttcttctacctgatttgcaacacattttctttataatgagctaaaaccaaatgcaacaaatactagagttcactgtcatagctgcatgttgccaaactcttctgcatttcaag

SEQ ID NO: 507508 - DNA, 587 bp, Homo sapiens
agagataaacatccttaatgcggtatatatttttaagcttttaaattcgtattttaaatgccaatgcagaatcttttggcagtacatgatccatgtacttgcaggttttgatgattggaataaactctgaagaacgatttatgtataggttagagaggggctgtaagttgttagctcaagtatagtggggctgctgtaggggatgccagtgactgattttccattttgatgaatttttttcaccagttttaattttttttctctaaatttctgttaatmaaatgagatgtgaactggaacaaccattaagcagacagcagtgatcaaggtgaaatctctttttatatagaactgatgaaattcactccttgcactacatcctctgaactaacatgtgctatcagctcaaggtcgcctccggtcaagaaattgactacctgtttaggacacatgctttaattattagggagcagcttcttctacctgatttgcaacacattttctttataatgagctaaaaccaaatgcaacaaatactagagttcactgtcatagctgcatgttgccaaactcttctgcatttcaag

SEQ ID NO: 507509 - DNA, 587 bp, Homo sapiens
agagataaacatccttaatgcggtatatatttttaagcttttaaattcgtattttaaatgccaatgcagaatcttttggcagtacatgatccatgtacttgcaggttttgatgattggaataaactctgaagaacgatttatgtataggttagagaggggctgtaagttgttagctcaagtatagtggggctgctgtaggggatgccagtgactgattttccattttgatgaatttttttcaccagttttaattttttttctctaaatttctgttaatcaaatgagatgtgaactggaacaaccattaagcagacagcagtgatcaaggtgaaatctctttttatatagaactgatgaaattcactccttgcactacatcctctgaactracatgtgctatcagctcaaggtcgcctccggtcaagaaattgactacctgtttaggacacatgctttaattattagggagcagcttcttctacctgatttgcaacacattttctttataatgagctaaaaccaaatgcaacaaatactagagttcactgtcatagctgcatgttgccaaactcttctgcatttcaag

SEQ ID NO: 507510 - DNA, 652 bp, Homo sapiens
gtgtttttatgaagcaagaaacaagaaaattcttcgcatagccatagaatgggagatttaactttgataattccttcagcatttcataaactgcttgtatttgtgtagtaatgaaaaaatacaaatccacacatatktcactgcaggagaaataaatgaagcccagtctggagatacttgtctttaatcatgaaatgtgcaacatttggctgcagtgaattcgcgatttgtctcactaatggaaatcctcaagggtgctgagagccccgcagacaaatcctcagggctgtgtctgtgccctccagggacttgggcgtgagttaactgtagagatgagaagatccgaggatactgattctagatcatgtctctgtcaggcaagccctaacttacacgattctctttatcctaaaaggcccccataaagacatacatcagaaacactgcacattttcagccatagggcaccaaataagagacagcgacgttttgttgtcttgtgatttatcttcaggtctgttagaggcattgtggactcagtcacctttcctggatccagaggttcctgtgttcttagtatgtttcctgtacctttctctgggtttccttgaattaggtgttactgcctacaacaacaggagaaaataagtca

SEQ ID NO: 507511 - DNA, 652 bp, Homo sapiens
gtgtttttatgaagcaagaaacaagaaaattcttcgcatagccatagaatgggagatttaactttgataattccttcagcatttcataaactgcttgtatttgtgtagtaatgaaaaaatacaaatccacacatatgtcactgcaggagaaataaatgaagcccagtctggagatacttgtctttaatcatgaaatgtgcaacatttggctgcagtgaattcgcsatttgtctcactaatggaaatcctcaagggtgctgagagccccgcagacaaatcctcagggctgtgtctgtgccctccagggacttgggcgtgagttaactgtagagatgagaagatccgaggatactgattctagatcatgtctctgtcaggcaagccctaacttacacgattctctttatcctaaaaggcccccataaagacatacatcagaaacactgcacattttcagccatagggcaccaaataagagacagcgacgttttgttgtcttgtgatttatcttcaggtctgttagaggcattgtggactcagtcacctttcctggatccagaggttcctgtgttcttagtatgtttcctgtacctttctctgggtttccttgaattaggtgttactgcctacaacaacaggagaaaataagtca

SEQ ID NO: 507512 - DNA, 591 bp, Homo sapiens
aatctctcagttcttgtatggaagctactatttggtcttacccatcctggtgtcatgaagttattgactgctgaaagttttcaggtgctcaaactgtccttgtttctcaaagtttgctgtaccactcttaggagcacctttgggtaccactcactgtgccaagtgtgctcaatgtggaatatgtcttcgagaactccaaatgcaaccaaacactattgctcttgcgactgaggtgaagagacttcttcttttccaactttagcttgcaattccagtgtttgccggaggrtcagagtcctttcactttgtcgttgttcaggttttagctgctgtgtattgagcacctactcttggccagcatttttgcaaagtatttctattcattagctcatttcatctttacccctctacagatggggaaactggagttcaatgcagctaaacaattttctcatgattgtacagctaatgggatttagattctggacctaaactcaaatatgtctaatgaaaacaattgccctgtactttctacttttaattttccctccctcacctcagagttatttgaagactagagcagagctccag

SEQ ID NO: 507513 - DNA, 459 bp, Homo sapiens
agaacattttcacagcaacctagttctaaactgtgtgtttgtctctggcaatataacgctgtattcacatttttacattagtgacttttattcacagctttactatttcatatctttttatttgtttgttttgagacagtcttgtgctgtctcccaggcaggagtgcagtggcgtggtcatagctccctgcagcctcaaactcctgggctcaaacgatcctcccacctcagtttcctgagtagctgggactgcaggcgtgtgccaccatatctggctaatttttaaatttttttgtacagatgggggtctcactgtggtgctctgactggtctcaaattcttggcctccagtgatcctcctgcctcagccttccaaagcactgggattacaagtgtgaggcaccatgcctagcccatttcatatcttttggaatsgcattatctaatcaccatttgaga

SEQ ID NO: 507514 - DNA, 525 bp, Homo sapiens
tttacatctgacttaaagtatagtgttcctaccatttggttagtcaatacatgttaatgatcctaatgactttattaatcatctgcttattctaaaaatatataaagtgacatacaatgtgcctatgaaaaaataatattaaatcaatttttaaagaaaaatgagtcaagatgtcatgttgatttggaccataagccaatagttctaatctcactataattttaattttgttagataaatgccattatagctacaagtagcagtaatagttaattataaactgtaattgaggggtctctagttccaaataggagtaagttacacaaaattatcaacaaataaaaagtgacagtagagtctatgtaataggtrggctctaacatacattttataataccgaaataattttcacgtatatagatttagctcatttcaaagaattttcacccatatcataaacatgaaaatatttttcttcttccctatagatttatagcatttgagttttaaaatgcttctcttgtc

SEQ ID NO: 507515 - DNA, 626 bp, Homo sapiens
agccactaacatggctttttgaaagcatggtgaccacagggcagtcagactcatcatacataatggctcaggggtccacggccaaatttgagccaaagtttcattcttgttatgacctagccttgcatatcacactgtgccaatttcactgaactctgttaattgaagcagttacacgcatgcctaaattcaaggacaggagaaataaaacctgcctctcaattgcagaagtrtcaaacatttgtggacataatttgtaaatctccacttctgacctttggctataaatcatttgtgttcctacaactttttataatatgctcatctctaagacttttccaaattctcttttatagtaacagtgtaggtgtcaaattctagaaacttttcacctagaccaggtccaggcatggatgagcttcttctgattctcatatcttcaggagtggtttggtttgtctgcatctgaagacctatgaactatgcagacaagttacttgcctcccaatccctaaacatatattggtaggacaagcataggatcatgactatagactattccattaaaaaggcaagaaaacgggaggtatacaatagtcactgtgctgtagcaattcttaattgca

SEQ ID NO: 507516 - DNA, 573 bp, Homo sapiens
ggacaagtgacattctgttggagagggcacttgtgcacctgcagaggtctgagaagctgtgagtccacactgagctctgttgtcttcattcccagccacgacatctcccctgggggactgttctcatctgaacaaagtaggcagggttttcagggtgaagcctcactgggatgctgtaagtgattccatctccatattgagaaattttgtgttttccatccagattcgagaaaaaagaaataagaggaagaaacaggtgtaccatgaggggaataaaagagataacaagtcagggaaaagtgcttggtgaaaaaactggagcagaaagacaaaatgggctgggygcaatggctaacacttgtaatcccagcactttgggaggctaaggcgggcagatcaattgaactcagaagtttgagaccagcctgggcaacatggcaagaccttgtgtctacaaaaagtacaaaaattagcagagcatggcagtgtgtgcttatagtcccagctactcggaaggctgaggcagttggatcacttgaccctggggaggtcgaggcttcagtgagctgtgat

SEQ ID NO: 507517 - DNA, 573 bp, Homo sapiens
ggacaagtgacattctgttggagagggcacttgtgcacctgcagaggtctgagaagctgtgagtccacactgagctctgttgtcttcattcccagccacgacatctcccctgggggactgttctcatctgaacaaagtaggcagggttttcagggtgaagcctcactgggatgctgtaagtgattccatctccatattgagaaattttgtgttttccatccagattcgagaaaaaagaaataagaggaagaaacaggtgtaccatgaggggaataaaagagataacaagtcagggaaaagtgcttggtgaaaaaactggagcagaaagacaaaatgggctgggcgcaatggctaacacttgtaatcccagcactttgggaggctaaggcgggcagatcaattgaactcagaagtttgagaccagcctgggcaacatggcaagaccttgtgtctacaaaaagtacaaaaattagcagagcatggcagtgtgtgcttatagtcccagctactcggaaggctgaggcagttggatcacttgascctggggaggtcgaggcttcagtgagctgtgat

SEQ ID NO: 507518 - DNA, 653 bp, Homo sapiens
accaccatgccatggacactcctcaataccagaacatgcagccatggacatgtcctatttcagctctctctcagtattctgcaagatacttccttaaagccacagccaggtaggacttcgatgtttgccaagtgtctctaaagattgcctgtttactcctccatctgctctgaggattctaccctggataaaacatcttagagactgttaaaaagcagagtgttggcagggcatggtggctcatgcctgtaatcccagcattttgggaggccgaggcgggtagatcacgaagcaggagattgagaccatcctggctaacacggtgaaaccccgtctctactaaaaatacaaaaacaagttttccaggtgtggtggcacgcgcctgtaatcccagctactagggagggtgaggcaggagaatcgcttgaacctgggaagtggaggttgcagtgaggtgagatcgtgccactgcactctagcctgggtgacagagsaagactccatctcaaaaaaaaaaaaaaaaagaataaaaataaataaaatgaatgttttaagaatcacactatgtttaaccgcctgtgtctgtcatctatgcagacatcagtaaaaacctctaaataaacatgcagaggtagcaacaagaggcccaggtg

SEQ ID NO: 507519 - DNA, 534 bp, Homo sapiens
tttcagcttcaaagacagagaccaggaaatgaagcagacacatataagggccagcagaaacaaagaagaatccaaatgaataactgcctgccttaaagggatttcaartaagaggctcaaagatgggaagaaaagattagaagagaaaaatgataagccaaaaaactgtagtagcagatgcagccccaagctgaaattcagaagaatcactaaaccaagaaacagtgatgggagcagcattaaaaggaagaatgggtcttgcatttgaaaagtgagcacaggggattacaaaaggttgagggacaggcccaaggtcacatggcataatggagaaggaagattatagccatcctgctgctgctgctgcgttctaacacacctcactaaagcagggtgtgtctaaagccatcgactttggttaacaatcagttttttgttttttgtttttttttaaacacaagagcacccagtctgctcaaagaactgtaaaagggttataaagaccagaaaccacgggggttcctggaagaggtt

SEQ ID NO: 507520 - DNA, 618 bp, Homo sapiens
atgagtggctctgaagtttaacaccctaggaactgccaagaggctagttagaaagatctaccctggggctgaggaatctccatctctaacragccttgatgatgaagcagaagtcaagaaacattgttctaaacattcagcaacgtcaggaaaaaaaatttaggtgatattaaaataccacttttaagactcttttcattgctccaacctctcaggcttcaaattccaggctattgctttcccagattcaaattttcgagcttcaaatttagggctattgttttcaagtattttgcctaagtttatttctgactggctcatcttttgacccaaagtgagaaagaaaaaacctttttatacgaggaacatgagccctttaagttatcaggctcagaaaggcgtctataatataatagcagtgtcctctcactcccccttgagctaaataaatagttacctcaaagccacctgctatggatgagagccatctacatagcacatggggactcactgccaacccccaacccctcacaagttggggtaccagcaaggctagcttagaattaattaggcagaagctagaatcgttttggaagccacaggcagccagttcccaca

SEQ ID NO: 507521 - DNA, 603 bp, Homo sapiens
agacctgaggaggggctgaggagcaagggagcatctggagccacagcccatagaaaaccaataaaagaagctcaaacagcagaagaaagcatgcgattctagtgccaggaagcatagggagctggtacgttgagtgctgagtggcttcctggtggcgagcttgctgtccacatataatccaaggcaggaagactttctgaacaaggtccttagagtcccccgctccacatggattgggcgatgracccggagatctgaaactgccctcacacgtgtgcttctcttggccccgcagcctggccggggtctccaggagcgtgacactggtgatcgcatacatcatgaccgtcactgactttggctgggaggatgccctgcacaccgtgcgtgctgggagatcctgtgccaaccccaacgtgggcttccagagacagctccaggagtttgagaagcatgaggtccatcaggtaagcagttcttaggggacatcagagatgcaggcaggtgcccctgaacggtgcccacagtctttccgtacacagccagcatcatggcgtttggagttgaaaggcccacagaggacatcggctcccagggcgccca

SEQ ID NO: 507522 - DNA, 575 bp, Homo sapiens
cttgccaggtccccagaggtctgactcctgagcttctagcctctgcagcagtccgatgagcgtgaggggacactctgaatgcctggtatggcacaggtggctctgtcctcggtgcctctgagtgttttcatgggccagaccagcaagccctggttgtgtctcctgtggggcccactcaggaggcagcagccaggccccagcacagcccaggaagacttgtgtgtgtctcctggggtgtgaggcagtagccacagcaggaaaacaggttttcatgcaacagccccagtctgcagggtcacccagctctcagccaatgtcactccccactaccatgtcttactgcaggcttatatctgacaccaacacycatcatctcataattgcgtgctgctctgcaggtcccgaactgttgcccctaagctttttaaactgacagagaaggtatttcactcattcgaggctcagaggggctgtgaaatgcacctcggaatgcgcctgaagatgtccacattgctgggactggaacctgctggatcttttggtcccaaatcagtgggcagggagggaaggagtga

SEQ ID NO: 507523 - DNA, 594 bp, Homo sapiens
ttgtccaacaccttttgatgataacgttccaacaggtgtggagagttcaaaggagaaccagggcagagctggagcgggcacagcctcacatcactccatcaggtgatggtcaaggggctgcggtgcacccagcaaggggcttgggtgcaagtgggggccactcccagaacagactgtagactgagtctacactttgcctgtcaatctcacccatgagaagtctaaagctgatcttttaaaaagtgaactcacttttggtggaaacagtccaagtgtccacgaacaaataaatggaagcaaaatgaggcctatgcacacaatggagtattattcagctttaagaaggaaggccattctgacacacgccgcaacacggatgaactgtgacactgtgctcagtaaaataagccagtcccaaaagcacaaatactgcatgatttcactaagaggaggctccgatagttgtgagattcagaggcagaawgcagaatggtggctgcccggggctgggaggagaggaatggggagttggtgttttaagggacacagtttcagtttgggaacatgaaaagtcctgcagaaggatgttggtga

SEQ ID NO: 507524 - DNA, 553 bp, Homo sapiens
gggtgaccctggcagttcccttagcctctgtgtacaaccagggggggggcgtgaaaataacaggaatctacttcatggagttgtggcttactctatgtggtaaagtactcaaaacacaccataaactcattggcaattataattttggccagtgtggggcatctacctaggaattgcacacacaaacaaaaacaataaaaaaaaagttttagtttcttgcctgtaattamccccttccttatcaatgtcaaacataaaggaagagaggaggtgattttggctatttgacaagtaatcgaagctatgaggagcttttcaagttactttttaggaattttaaaacttacttgggatgaattagcatctcagctcaaaggaaagacttttcctatcttcaaaatcagtggagactgggttctgccctgcctggcattacttatgctacctaacctctccaaatctccattccccaatctgggcaaatataaggtcgtttgacctcatagggctaccgtgaggctgagattttataaagtgttaaaaaaaatggttc

SEQ ID NO: 507525 - DNA, 486 bp, Homo sapiens
gactcatttacaactgaaacctaggaagcccctgagtcctgagcgaaaacaggagagttagtcgccctacagraaacccagctagactattgggtatgaactaaaaagagactgtgccatggtgagaaaaatgtaaaatcctacagtgaaatgagcagcccttacagtattgttaccaccaagggcaggtaggtattagtgtttgaaaaagctggtctttgagcgagggcataaatacagctagccccaggggtggaacaactctgggagtcttgggtactcgcacctcttggctttgttgatgctccgccaggaaggccacttgtgtgtgcgtgtcagttacttttttagtaacaattcagatccagtgtaaacttccgttcattgctctccagtcacatgcccccacttccccacaggtgaaagtttttctgaaagtgttgggattggttaaggtctttatttgtattacgtatctcccgaagt

SEQ ID NO: 507526 - DNA, 486 bp, Homo sapiens
gactcatttacaactgaaacctaggaagcccctgagtcctgagcgaaaacaggagagttagtcgccctacagaaaacccagctagactattgggtatgaactaaaaagagactgtgccatggtgagaaaaatgtaaaatcctacagtgraatgagcagcccttacagtattgttaccaccaagggcaggtaggtattagtgtttgaaaaagctggtctttgagcgagggcataaatacagctagccccaggggtggaacaactctgggagtcttgggtactcgcacctcttggctttgttgatgctccgccaggaaggccacttgtgtgtgcgtgtcagttacttttttagtaacaattcagatccagtgtaaacttccgttcattgctctccagtcacatgcccccacttccccacaggtgaaagtttttctgaaagtgttgggattggttaaggtctttatttgtattacgtatctcccgaagt

SEQ ID NO: 507527 - DNA, 486 bp, Homo sapiens
gactcatttacaactgaaacctaggaagcccctgagtcctgagcgaaaacaggagagttagtcgccctacagaaaacccagctagactattgggtatgaactaaaaagagactgtgccatggtgagaaaaatgtaaaatcctacagtgaaatgagcagcccttacagtrttgttaccaccaagggcaggtaggtattagtgtttgaaaaagctggtctttgagcgagggcataaatacagctagccccaggggtggaacaactctgggagtcttgggtactcgcacctcttggctttgttgatgctccgccaggaaggccacttgtgtgtgcgtgtcagttacttttttagtaacaattcagatccagtgtaaacttccgttcattgctctccagtcacatgcccccacttccccacaggtgaaagtttttctgaaagtgttgggattggttaaggtctttatttgtattacgtatctcccgaagt

SEQ ID NO: 507528 - DNA, 608 bp, Homo sapiens
ggtctgaacgggagatgtgccaagtatgaaacagcacgccagagcccccagacttcgtatgaaagaaggacataaacttgctcattaattttttatattgagtacatatcaaaataatattttagatasactggattaagtaaaatatattattagaattaatgttgcctgtttctgtttgctgtttaaaatgtggctcctagaaaatttaaaactgcccatttgtggctcactatctatttctattggacagcgctgctttagacagaacccaacaaatccttcacggttttatttctagaggaaagatgagcatactaaaggtttaaggtatcctttgtaaacatcagacccttcttgtggacagcccatgagtctctctgcataatggaaggaccagtcaaccacaaggagcctcctgccacagctcatcccagcctgcctagcgttggcctctgtaggctcacagcctcttccctggcagggtcagcaagggtcccgtgagctctgacaacttcacagtcttctacttctctgactttaccatcctctattcatttttttaaatgtctccaaataatacagaaaaaagaaacttacaggttttg

SEQ ID NO: 507529 - DNA, 589 bp, Homo sapiens
tgcctcctgtctgtgccactcccctgcggtctggctgaggagcttgtgcaaacccagcttggttctttcaactcatgggcgatattttaaagaggcttctgaaatcagcaaaacgtttgtaaatggattcatcttgtttaaagtttcagagagcgcagttttagagttcttttcaaacttaaacacaaagcccagtgggaatttcagcagactttacatgaacttttagagtatttttctcattaatttctttcttttcacaagaattaattttgtgataaaaacaccacatatccagtgtggaaaactaatttaaaaatcagaaaaacaaaaatggaaaataaaaayatcacattctaccacccagaaatcaccattaaggcctcagtgcttaccctttaatgtgtgtatgtgagtgtgtttatatataaattatatagacataaataattaagcacctaattctatatataatttatatatgtacacacacacacacacacacacacatttgctttttacctaaatgatgtcatgttattattttggggacgtttcaggtatgtggaccgacttgcttctttctgaa

SEQ ID NO: 507530 - DNA, 453 bp, Homo sapiens
gatctggaagagctcacatgggccaggaaggctaaggcccactgggcctggatttctgaagactctggaccttggtgccagtggattcagaagataccacaaggtgagggctttctaatgaaagtgtcacaaggaactggcactggcttttctgagtgcctcttgctgggcgtttttagggaggtagagcccccgtggtgactaagctggaaggtgcacattgagtcacaggtgcactgcgtgagagacagcacaggcagggggtggacgcctgtgagtgtcctggggctgtagacttgcrcgactagaacttactattaatctgtgagcaagagctggtcttggctttcattccttcctctgtaaccaagggctgtgctctttgcccactgcagcctctcacctcaaagtgttcactgaggttcaaggaggatgctgtgaacgtaaaaactg

SEQ ID NO: 507531 - DNA, 611 bp, Homo sapiens
ctgaaaaaatgggcagagtactgtataaacagagggtgcctgctctggaagctgtgaggctggaacccgaagggaaatgttgcaatgggtacaattgttaccctgcatgtttatgccaatgatgttattgtcttcatttagtcatcttaaattcaaccgttaagtcattattagtaattctaatttcttgtttaatttccatgcaaggtacgacttccctgtaaaatgcacagatagaggcagtgttctatatttagtgagagagatattatctacaaattacagggaaacaattacatcaaggtcctccattgatgaaataaaccacaagaaagaaatgaagagtaagagaggaacactgtgctaaaaatggttaagaaccaaagccagttgactctcctccatctgatgatccctttacctccacaagtctccccagtgaatgagaagcatggcctttgtgcccttcaggrttaagggaacagcactagcatcatagcagtttcctctagaccctgagaaagccattgtcttctctgctggacagtgatgtctccaaaccacaaaccaccagggtaactggctgtgttcttaggagagacaagaagcag

SEQ ID NO: 507532 - DNA, 628 bp, Homo sapiens
aggagatatttatgggaacatctttagaagcaaaatatatttgaggcacactgtataaagcagatttgttcttcatatcccattcatttacctgtctcattttatgcatgaataaacaggctgaatatataacaaataactacaagattaagtctgtcaattggattatgaataaaattatcccagttcctggggcaaaaaaacaaaaataaagcaaactggacayccccaaaacgtgtgttaagtgacaggactcacttaagaaatgttggttgaatctgaatatcaattcccttctataagaaaacttctggaatattagccaaattctctaaagctagataaatatgacaaacccccaaattttctttacagtaaattcgaacagtattccatggcaaaagctgttacataaaacaatgcatttacttcctctcactagaagaaaaaaacaaacaaaagagagtatgttcacttaaaaaaaaaaagcttgacaaaatggagtgcttagaggagttttatatttaatatgtcatcctgaatcattattgtgaatatgttatgaacttagtttgaattaatagattctacgggataaaaagagaataagaacatcaaggtcaattct

SEQ ID NO: 507533 - DNA, 625 bp, Homo sapiens
caaaatagttttctattggaaacatgcagtgtccagattctggtggcaatgggaggcaggggagggatgaaggagcatttttatttttatttttatttatttatttatttatttatttatttatttatttatttatttttgagacggagtctcactctgtcacccaggctggagtgcagtgtaattaccagtgtaattaccattcgtgtaattcacatccacataatcagaattatgattatgatcacgtagtggcattatcacggctcacagcaacctccatctctggggcttagggatcctccctcctcagcctcctgggactaccggcatgagccaccatgcccagctaaatgtgagcactcttctgagtcaccacagggcaactggggaggtgattacctctgcaaagatactcggctcaggctcatggtatcttagtcacctcyactctgcaaatgaggtagcggtagcagtaatcctctaacagaaaatgagagtttagtaggcaggcagagacttcagttttgaattaagaaaaagcccagaagtcttctatcagccatcagattggcccaacctctgtcaggaatgcttgtgatagggaccagttcattaaaaaaaa

SEQ ID NO: 507534 - DNA, 478 bp, Homo sapiens
agccttctctaaagggaagatcggcctttggtgggtggtaaatacatggtaaataaggatgttytgtgcaaaaataatgagtcagaatgaatacgtggagattaggacagatttcaggagacagggcgcgtgtaggtttcattttagaacactccccttggagatacggattctccttgacacagtcatagtggtttctgtcttccaaaccaaaccctgactccttcaaatgttgaaaaatcatctcaaacttaatgtgtctaagatcaaattcatgctcactcccaaaccttcctacaaatagcaactccatcattccagttgctcagataaaaagtcttggagtttccctctctctttctctctttctctctctctctctctctctctctctctctctgccttcctgcctcccgcagacacacatacacacacatcctatataaaacccaccagcgcatcccactggcagaacttc

SEQ ID NO: 507535 - DNA, 501 bp, Homo sapiens
agaatcgtctcttcaacaaatggtgttgagacaactggatatttacatgcaaaagaatgaaatcaaacccctaccttacaccatatgtaaaaattaatttgaaattgatcaaagacctaaatgtaagaataaaaatgataaaacttttagaataaaacgtaagyatatgtcttcttgacctttaactagttttcttaaatatgacacccaaagcacaagcaacaaaagaaaaaatagacaaattgaatttcaaaataacgggcttttggacatcaaggaaactatcaagaaagcataaatgataacctacagaatgggagaaaatatttgcaaacacatatctggtaaaggcctagtatccagaacagaaaaagaattcttccccctcctcgcccggccccggcctccattccctcccagggtcgcttcgacgagcggctaggtgcactgcggcggcagcactttccacggcaggagctggagctgggctctggtgcgcgc

SEQ ID NO: 507536 - DNA, 292 bp, Homo sapiens
aagcacaagcaacaaaagaaaaaatagacaaattgaatttcaaaataacgggcttttggacatcaaggaaactatcaagaaagcataaatgataacctacagaatgggagaaaatatttgcaaacacatatctggtaaaggcctagtatccagaacagaaaaagaattcttccccctcctcgcccggccccggcctccattccctcycagggtcgcttcgacgagcggctaggtgcactgcggcggcagcactttccacggcaggagctggagctgggctctggtgcgcgcg

SEQ ID NO: 507537 - DNA, 522 bp, Homo sapiens
gctgccaatgcagttagtatatagaaataatacgcagctgttagaaaaagtctgtggccaagtggataaaacagtagcagtgcactgcactgacatccagaacagaaaatagggaaggaccagagaatgcacttcctgcaaaaaaaagtccagtagatcacaagcacaaagagttcccaactgtctcaccagctctctaactcatgtgtacctgcaccttcctcttgaaatctgaacattataataccacaagccactttcagcctccagtgggaaggctccagccacacgccgatatttcgtcctgcttcccgtcatctcatatctaaaagtcatggcttaagttaggcaataaaacctgtggctttaggcatctttagtaaaaaagctgaacaaatcccaaatttattcccattttcttgagaaataaacttcataaaacaacagacarctgtcatgattactgagttttggctgatggcgaaataatttttatgtaagtatactgaataaacatacaaa

SEQ ID NO: 507538 - DNA, 572 bp, Homo sapiens
tccttttgagaaagattctcaaaacaataaagcaacatgagtgcaaaaataaggattaatcctcatggagttaccttagggtgaagattgctcagtttctggcyggatgcagtggctcacacctgtaatcccagtaactgggaggcagaggcaagtggatagcttgagcccaggagtttgagacctgcccgggcaacatgacaaaatccctgtctctacaaaaagtacaaaaaattagccaagtgtggtggtacatgcctgtagtcccggctacttaggagcctgaggcaggaggatcccttgagcccaagaggttgaggttgtagtaagtcgtgattatgccactgcactccagcctgggcagcagggagagactctgtcaaaaaaataaaaataaaataaaaaagacttctcactttggattcagcctgttgagtcttgactccctcacctaactaagtgtccttgtgtatatcaatatacttcacccaaatgccctcttcttatctgtagaacagaaaacataatgcctatctcatggggttattttaagtattaaataaatatatttc

SEQ ID NO: 507539 - DNA, 572 bp, Homo sapiens
tccttttgagaaagattctcaaaacaataaagcaacatgagtgcaaaaataaggattaatcctcatggagttaccttagggtgaagattgctcagtttctggctggatgcagtggctcacacctgtaatcccagtaactgggaggcagaggcaagtggatagcttgagcccaggagtttgagacctgcccgggcaacatgacaaaatccctgtctctacaaaaagtacaaaaaattagccaagtgtggtggtacatgcctgtagtcccggctacttaggagcctgaggcaggaggatcccttgagcccaagaggttgaggttgtagtaagtcstgattatgccactgcactccagcctgggcagcagggagagactctgtcaaaaaaataaaaataaaataaaaaagacttctcactttggattcagcctgttgagtcttgactccctcacctaactaagtgtccttgtgtatatcaatatacttcacccaaatgccctcttcttatctgtagaacagaaaacataatgcctatctcatggggttattttaagtattaaataaatatatttc

SEQ ID NO: 507540 - DNA, 525 bp, Homo sapiens
tcctggcactagagtggggtccctcttgttgtacaagagactcttaatactatctgtaatcatagactggcttgcacttgrtaaagctagtctttgtgatgttgagagcaaaggtggatgttctccctatattttcttttcctatttatcacttttctatggtagttggatattcccattcactctctctctctctctctatatatatatatataatatatatacagacatttaatctttgtcaattaagatagagacagaaataaatttcttccttgaatcacttccttggtagaaagaatatatatatatatatatgtgtgtgtgtatatatatatgtatatgtgtatatatatatatatatatatatatatatatacatacacatataatatagtcatttggatatgtggggattggagaaacaactttttgaaaataaaatttatcctaccagactgagatttttggagggcaagaaccatatcgtccatgattcagtgtccttccaattctcagggctat

SEQ ID NO: 507541 - DNA, 590 bp, Homo sapiens
  misc_feature (1)...(590): n = A,T,C or G
gctctcacttccagtcttacggctcttaccttggctttatcctgttttcacttaagagataaaaggctaaagtgtattcaactgaaaagacaaaaaatatattaatgtaagagtaagtcatcattatgacacatatcaatttcttacctcaggcagtgtacaaaagcagggctctggatattaacccagccaggattagagacaaaaaggtctggacagctctagatacacactgggaaaatatgaattttctccatgctgggatccagcatcttcatctataaattgacagagaggtgacatttttaaaaacaaaatcttccaggaacaatgatttgcctaaatattattctgcaacaagtgctctgcatctatgaccctaaattttaggtatattttgagaaattattcatttctcattggaatagatttcgttttgttttgttttgctttttgagacaaggtcttgctctatcatttatgctggastgcagtggcgcattctcagctcaccgtaacctctgccttctgggctcaagtgattctcccacctcagcctccagagtagcggagaccacaggnnnnnnnnn

SEQ ID NO: 507542 - DNA, 639 bp, Homo sapiens
ctctaaaggagctgagagataaattagcctgttgagtggacctggagcccctggtatttacccaagcagtttataagcagtaaagttttaagaacctgaagggtacccaattctaaataaaggtaggcttggttgttccaaaatcaagtaaagaggaagcaggcaacagttgtgttttacagtttaaatggaacaaggactgagaagccaaaaccaaaccatagcagctcttttcctacacagttcaaagaacgtttagctggactgatatactaggctacccatagagcaaacattaattaatgaacagcctcagctatgagtgctaatgtttccagagcttagaagggcagtagctgcaaaactagctatagtctcacaatgatacccaggcaaggaacactctggagatcaaattggtagagaatgattaygtgaattagcattcatctttaaagacctctcagaagactgatgtttgaagggtccaacctcttgttgaacttggctttttaattgagtatattgcttgaaaggttggtttatttggttgacagcttctgaattatgagtaacagatttggtttagttaagaaagtagacattgtagatttcctgagcaagcattttgtggtaaaa

SEQ ID NO: 507543 - DNA, 534 bp, Homo sapiens
ttggggaggtttgcagttgagagttatctcgttggttcattattcagctcatgttcacttagcctctgctgtgtgctaaggtctgtgcccagcatgagaagcgcagttcctgggacagacaccagccctgaatcaaagcacaggcagccttgaagctggtggctacagtcagtgacaggggtgctctgagaggggaagaaggtagcagctaagctaagacctgaggagaggatgagcagggacaggccaaggctgacagggaaaagtgttccaggcatggggaaaagcacgtggagaaatctgaggtgagtctgggcatgagagtttggggaatccagggacacagcacaacgtaagtggaacatggactcagcagcatctgtacttgaagctgttggacagatgagaactttcagggagggtgcagcgtgccrgggtggctggggaacgaacctgaagctctttagcctttaactgggaagcgtgcacagagaaggaaatgcaggcgcgatggcacagaagtagaaggaaaac

SEQ ID NO: 507544 - DNA, 589 bp, Homo sapiens
agaacacatagtgaccaaatatggggaatatcacaaaacataagagatattaaaagggtctaaattggtttaccaaaaatgccagaaaaactgaaattatcaaatagggtagmggcaacaattgaagagataatggctaataatttcccagaactgatgaaaaatcaactcacagattcagaaagcccagtgaatctttagcaggataaataaaaagatatcctgacctaaacacatcatgcaaaaagagagtaggcagagttgaaaaaaatgaactatctccaaagaagaaaacactgactgatgaattctcaaaaaatgagaaaggaagcctgaagacagaggacggacatcgtcaaagaaggtgctgaaataatggccaatactcaataatgaagtgaaagaaagacactgtcattcaaacagtgactgaaatggtttatcatcacagactcacactaagggaccttctagaaaatgggactatgttatcattggaatgtggcacctgagctaccttgtttggtacagattccccccagatttccaccttagcaagggaaaacgaccctagatgaagacaaagatg

SEQ ID NO: 507545 - DNA, 520 bp, Homo sapiens
ctggctgggtcctgcactcgcttgctcacaygctccttcctgcaagggattgagcacggtgggccgcgtaaacgtttgctcccctcatgagtacaatgaagggactgagaaaaatcctgcatcattattaggaggtggagcctttgggaggtaactaggtcttgcggatgaaatgtaaaaggggaggaggcacaaggtctccttctccctctccctgtcccccacctcactccttccccatccgcctccctctccccctatttctctctctctctctctttctctctctccctccctctactgtccatcctgtaagaaaataataagatggtggccatcagaaatccaggaaacagcgcttaccagacatcgaatctgcaagcaccttaatcttggatttccagttccagaactgtgacaaataaatgtgtgttgtttaagtcccctgatctgtggtatttctattacagcagcctaaactaagatgtccataatgtcgtgtttataagcaatttgctcc

SEQ ID NO: 507546 - DNA, 547 bp, Homo sapiens
aattgaagccctgccttctgagcacagaagattttcacttcacatagacttttcataaaaggaccttatcctctttaagtatagaagatayttttttttcaaaaattttctttgcacagtgacatatttactgcagtatttatatgacatcactaaacacagagttgggaatccaaccagctctttgaagcaagaatatgtgaacgtgagtgggccccagcataccacaggcagttagttctgctctaatgtaatgtatgtgtttctacgttaaaaactgcagggcttatgggaaaatggggttagggacacaacattcaaaaactttattagtgacaaataataaaagatgaggaacccaataaaaatggtagcacacagttatacatttcaactcattaagaaatctgtaaataccacagtaaagacgtcactttgaaaagatcaccttgagaaagacctgaagtttgcttgtagaagtgagtgtcccatgcctgggggcccaccatgtccacctccctgtctgcaagaggaagggaaccaaaga

SEQ ID NO: 507547 - DNA, 547 bp, Homo sapiens
aattgaagccctgccttctgagcacagaagattttcacttcacatagacttttcataaaaggaccttatcctctttaagtatagaagatatttttttttcaaaaattttctttgcacagtgacatatttactgcagtatttatatgacatcactaaacacagagttgggaatccaaccagctctttgaagcaagaatatgtgaacgtgagtgggccccagcataccacaggcagttagttctgctctaatgtaatgtatgtgtttctacgttaaaaactgcagggcttatgggaaaatggggttagggacacaacattcaaaaactttattagtgacaaataataaaagatgaggaacccaataaaaatggtagcacacagttatacatttcaactcattaagaaatctgtaaataccacagtaaagacgtcackttgaaaagatcaccttgagaaagacctgaagtttgcttgtagaagtgagtgtcccatgcctgggggcccaccatgtccacctccctgtctgcaagaggaagggaaccaaaga

SEQ ID NO: 507548 - DNA, 555 bp, Homo sapiens
gacggattcctacaattacgtggaagtcagaattacaagtgatgaacttacatatttagctgaggagatttctaagcaaagtgttgaaagagtggcctggtttcttcttgctgtttatagtgaaatgtgagaggaaaaagatgaataaagggaataactattaagccaaaagaaaccaggacttgatgattgggaaaattctcaacgtatgaagacttcaaaaggctaaaattaggagacgtgctttcaagaaagcatacttgaagagaaagccaattttatgtctggataacattttcctagtgccatataaggattaaaaggtccaagtgaaaggagggctctttgaagtgattaggcatgtaattcatggatcccctcagccacttcaacagaggccaaaaatggagatgaaattatccaagaaagatctgtagaggagcctgtttttctaatggagtgaatcctggagatgtgcatagkaaaatcacaatgttcttgagaatcctacaacggtggtaacaccatcagcttggactgatacaggcagaaaag

SEQ ID NO: 507549 - DNA, 582 bp, Homo sapiens
ttataaacataaaaaagtattctctttcaaagacactgtaaagaaaataaaaaagataagcaagaattcggtgatagctctagcttcagatgctttgggattgactatggccttcaagctatgacaggctttccccaagcaacttcagttaatgagtagagcccaaccatttttgcttaatgaatgactcctccaaagggcaattttggcaatggaactcctcattggcctcgccaacatattttctgarcagcaacacagtgtaaggccctcactacccagtagtccttcctccttctcccttctcctctttcatacatgcaacccccaatattttgcattttgaactctgctgaacccaactggcacagtagataaggtctcaatcatacagggcattgtaagctagggcaagaatttgaagacaaattatctgtagagaaagtgttctgaaatactttaaattactctcatcagcatttcaattataaatactacgttttacaagttaaatgtcacgtaaaaagtaatttttgtaaaggaaaatttaatatcatagatcatgatgagtccttaaagaca

SEQ ID NO: 507550 - DNA, 607 bp, Homo sapiens
tgtttaatttgttttaaaaatgagtcttttgtacrtaattaggtacttcttttagagacatagaaattatttcaatgtctgtgaagaatcaaaagatttgcaaataagagaaataagatgtactttgtgcagtgaaacattgttgctattataacactgtaccaggtgcttttcctttagtatggtatatctgagggttttaattctgcaatccattgaagtcttcttcattgttcctatagattttcattacttttctagattactttagtgaaaaatgaataggtttaaagttaatattaaagaatgggaaagatgaggccttgagaaggataagaaaggtttacagacttaaatctttaggattgccagaatattactcaaagaagaaaaaatattataatcagaagaaaatttattggtgtgctgggattttaacaatgttttcaattcaccctaaggattttttattccgctactgacaggaaaactatgtgcctgttgctgggatgcttggtctactttgctccccaaggattttacatgttcttctctggctataaataatctggtgccatttcctgcctcagaaggaactgtcttgccc

SEQ ID NO: 507551 - DNA, 607 bp, Homo sapiens
tgtttaatttgttttaaaaatgagtcttttgtacataattaggtacttcttttagagacatagaaattatttcaatgtctgtgaagaatcaaaagatttgcaaataagagaaataagatgtactttgtgcagtgaaacattgttgctattataacactgtaccaggtgcttttcctttagtatggtatatctgagggttttaattctgcaatccattgaagtcttcttcattgttcctatagattttcattacttttctagattactttagtgaaaartgaataggtttaaagttaatattaaagaatgggaaagatgaggccttgagaaggataagaaaggtttacagacttaaatctttaggattgccagaatattactcaaagaagaaaaaatattataatcagaagaaaatttattggtgtgctgggattttaacaatgttttcaattcaccctaaggattttttattccgctactgacaggaaaactatgtgcctgttgctgggatgcttggtctactttgctccccaaggattttacatgttcttctctggctataaataatctggtgccatttcctgcctcagaaggaactgtcttgccc

SEQ ID NO: 507552 - DNA, 570 bp, Homo sapiens
cttatataatctttgaaattgaggaatttaacaactttattaaaatgaaatgacaatgaaattatttcctgcattaaccagaaatattttaactcgataatttaaaaccttccaataatttatgttgttatcctaataattaaattttttacaattattttgcaatatatttgatagcagtattccagatggataaagatgttatcagaaacacagtttattaagaaaagccaaaatacrtgattaagtagattcttgtattttcattttcatttgcagcatcagctggagttattggcatgaatacaaatttcattatgtcatttaccacctgaaatcctccagcagctttccattgcttcgagaataaagtataacatttaaaatctctttaaagtcttctttctaccattctgtgtcactttctttaggagcaaattctccaattactcaaaaatattttcactcataataaataccccaaccatactgagttacatgctgttccctaaatctttcatacttcttcacacttgcataaatttgcactctgatttttgtgtctgggct

SEQ ID NO: 507553 - DNA, 550 bp, Homo sapiens
tcaagttaaaaatggagaattctagaagtataaaakaaaaaatgggatactaatgagaatatgtaaggattatactgatatatgttagtgaattgctctattagagtatcagcactatttggaaagccatcaatgtcatctcatatttaaactattaagtgcatgtttaaactgtgcaaatctcttgcattcatttcatggttaatcaatccagtctgaaatagtttgccaaacagtaatgggattttctctaacagccagatacttaagtcactagacaccaaattatgggataaaaacaatcaattcagcatcccaggtaattatgggcttaaaacaatattgtgttgagccctggcacatacccactcatagcagatgtctttgttttggaccattttgattatcttggtaactctagcatgatgaattaacgatgcaaattattttttcgttttaatttttcattgtagatggagctattggcctttattataacttattttctgtttcagccaaggcctaaattagagcagtaccagaggagaag

SEQ ID NO: 507554 - DNA, 612 bp, Homo sapiens
tttttcaagacagagtctcactctgttgcccaggctggagtgcagtggtgtgatctcagctcactgcaacctccgcctcctgggttcaagcaattctcctgcctcagcctcccaaaaaagctgggattacaagtacacgccaccacacctagctgatttttgtattttttggtggagatgaggtttcaccatgttggccaggctggtctcgaactcctgacctcttgatccacccgcctcagcctcccaaagtgctgggattayaggcgtgagccaccgcacccggcccctgagtgtccctaattgagaaagccaagctgtgcgcctgtgccctagacttaaagatgacagagaaagtgagcatctgatctttcagctcttagagtcatagctgtgactcataagatggggaacctcaagagattcagatgctgggaagcctcacaactgataaatgtctactctgacatctggtttgtatatgtgtgtgtgtctgtgtgtgtgtgtcatagttttataccttttgttttctttggcaaaccctccaaatgctcattgtccccactaagtctccttatcctttaagattctgcttcctccctgaaaccttcc

SEQ ID NO: 507555 - DNA, 477 bp, Homo sapiens
caagcttgcaaacatgccacatgcttttgatattggaatggctcactatttagccatcttttttcccccaactttccatttcatttttgtgggaagcttttccaacacaacaacataaaattccaattaaacacatgttcagccctactagactctgggagcaagcatagtaaatcattcccaagtaagccattcttgatctaaaataagtgtggacactaaagaaaaggttattataagcccaaactgctaaattatactttcatgactgaacacaactgtaatccatattattattttaaattacactataaaaagcagtcatttatcgcctttccaaaacacagtgataatatattaccaaattatcaagggttctttattaaatctcttgaatttgatttataatacaygaggtagcttatccttgagaaagatctactaaaaggtatacttagtcttaaagctagtgaaata

SEQ ID NO: 507556 - DNA, 441 bp, Homo sapiens
tcactatttagccatcttttttcccccaactttccatttcatttttgtgggaagcttttccaacacaacaacataaaattccaattaaacacatgttcagccctactagactctgggagcaagcatagtaaatcattcccaagtaagccattcttgatctaaaataagtgtggacactaaagaaaaggttattataagcccaaactgctaaattatactttcatgactgaacacaactgtaatccatattattattttaaattacactataaaaagcagtcatttatcgcctttccaaaacacagtgataatatattaccaaattatcaagggttctttattaaatctcttgaatttgatttataatacatgaggtagcttatccttgagaaagatctactaaaaggtatacttagtcwtaaagctagtgaaataaaatct

SEQ ID NO: 507557 - DNA, 642 bp, Homo sapiens
gctgctccccttccctcacattactgtctgagctccacctcctgtcagaccagtggtggcattagattctcaaaggagcataaaccctattgtgaactgtgcatgtgagagatctaggttgcgagctccttatgataatctaatgcctgatgatctgtcactgtctcccgtcaccccagatgggaccgtctagttgcaggaaaacagactcagggctcccactgattctacattatggtgagctgtataattacttcattatatattacaatgtaataataatagaagtaaagtgcacaataaatgtaatgcacttgagtcatcccaaaaccatcccccaccccaccaccccattggcctgtggaaaatttgtcttctgtgaaaccagtgcctggggcagaaaaggtgggggacctttgctctagctggttattccaaggagcctgattttagtttgttttccctgatcagaatctgagcccttcttctagcaagtgctaagacacactaacttcactcactcaagtactccagatacaaagtggacagsggggagaaagaagaaggggatggagcatcctggtgaaaactgggcatagtcattgctaaaggaaatgatcgggggcaagtaaaagggttttg

SEQ ID NO: 507558 - DNA, 587 bp, Homo sapiens
ctggcactctgtgaaaggatcctacattaccrtccaattttattcccatcaccccctgacgtgagccctttgctctaattgaaacacattcttagttgctgcctttaatcaggctgggccttttcctcctctgttccagcttctataattctcttcatcctttgggatcctaaaacctcatgtctgaagccttctctagcagtacaggccacagcaatccctcctttataatactgacatctagaaattgctgtaattattatagacattttcccaccatcagtgactagaattttctagcttagatttctaaaattattgttttttttaattactaaacactaagtatgttactgatgattaagttaaaatgtgacttttatgacacattatgcttgcaacagggaatcacatcttcttgtctacagcaaatatacataagcctagattatatttcctgaggccaaacataaaccttaaaaattctgagtagcagtcaccagaatgaaggttgctggtttacattcctagttctatttgcttgagggaaaatgattttttgcccattaggtgatcaacctgggtga

SEQ ID NO: 507559 - DNA, 587 bp, Homo sapiens
ctggcactctgtgaaaggatcctacattaccatccaattttattcccatcaccccctgacgtgagccctttgctctaattgaaacacattcttagttgctgcctttaatcaggctgggccttttcctcctctgttccagcttctataattctcttcatcctttgggatcctaaaacctcatgtctgaagccttctctagcagtacaggccacagcaatccctcctttataatactgacatctagaaattgctgtaattattatagacattttcccaccatcagtgactagaattttctagcttagatttctaaaattattgttttttttaattactaaacactaagtatgttactratgattaagttaaaatgtgacttttatgacacattatgcttgcaacagggaatcacatcttcttgtctacagcaaatatacataagcctagattatatttcctgaggccaaacataaaccttaaaaattctgagtagcagtcaccagaatgaaggttgctggtttacattcctagttctatttgcttgagggaaaatgattttttgcccattaggtgatcaacctgggtga

SEQ ID NO: 507560 - DNA, 595 bp, Homo sapiens
tgttcactctgcagttttattttgccttttggaaacctcagagcagtgcttctcaaatgttaacgtgcatacgatgaatcacgtgggcatcttgttaaaatgcagagttttgagtcgagggtctggggagggctgagattgtgcacttctaaggagatgccaggtggtgctaattctgctgcactggacaccacacttagagtggcgaggtcactaaataataggagcraaaggatcgtgagaacaccgacatcagtgagaaggaggctggctgcagagaccatggtaggaggagttttccttggtgattctgctcttctctccgcgccctttcactttccctttccttgtaaatatcctttactgtggtctttctttgattaaagagaaactgtgtgagcagagccaaaggccacgttcatctatgggtagcatctatgcttcttcaggtcgtctgggctggaagaaaacaaaaaagttctgcagccagagataactgaaaccagtgagacttctgcagctcgtgtgtgcgcacccagaaacagacccaaagccagcagtttcagttccctcaacttaattttactaatgtgat

SEQ ID NO: 507561 - DNA, 595 bp, Homo sapiens
tgttcactctgcagttttattttgccttttggaaacctcagagcagtgcttctcaaatgttaacgtgcatacgatgaatcacgtgggcatcttgttaaaatgcagagttttgagtcgagggtctggggagggctgagattgtgcacttctaaggagatgccaggtggtgctaattctgctgcactggacaccacacttagagtggcgaggtcactaaataataggagcaaaaggatcgtgagaacaccgacatcagtgagaaggaggctggctgcagagaccatggtaggaggagttttccttggtgattctgctcttctctccgcgccctttcactttccctttccttgtaaatatcctttactgtggtctttctttgattaaagagaaactgtgtgagcagagccaaaggccacrttcatctatgggtagcatctatgcttcttcaggtcgtctgggctggaagaaaacaaaaaagttctgcagccagagataactgaaaccagtgagacttctgcagctcgtgtgtgcgcacccagaaacagacccaaagccagcagtttcagttccctcaacttaattttactaatgtgat

SEQ ID NO: 507562 - DNA, 626 bp, Homo sapiens
tgctgaagaggctgaggtgggaggatcgcatgaacccaggaagttgaagctgcagtgagtcatgttcacaccactgcagtccagcctgggccacagagcgagacgctgtctcaaaaaatcaatcgatcgatcaacccgactgtggcagatgaaaaacttggcagtttgatttggagctcatggaaactttcaattaatcttttcccagattttgaatttctagagcaaggagactggctttcacagaggtttgggttgaattcagttttcttcagaagaacttcagaatgcactacaacaggaaagtcgtattctagatggagtcaagtcaatctgtttatatatcagatatatctgtgatatacatgtagctactatctgattatgtgtcaattaaatagatcataaatgtggaatgatggggactttgagagatttgtaactgaagctgccttcatgcttgttagaatggtggggtggaagagttcccagttttgaaggagaagtacaagaagacccgtaatggttagcaagatatacagaacacagtggacatagcagcacacttctcaagtcaggtaakctggggctgaaatcttgcctttcccacttattatgtgatcttg

SEQ ID NO: 507563 - DNA, 604 bp, Homo sapiens
aaaaaattttttgggaacatagtaggtacatatttttatggggtacatgagatattttgatacaggyatgcaatgtgaaataagcaaatcatggagaatggggtatccatccccttaggcatttatcctttgagttacaaacaacccaatctcactctttgagttattttaaaatgtacaatgtactccatggagcactcagtaggtgtgagtcaccctatttaccacattatatgcacttttattttaattttcagaaaagcttgatgagttaactattattaacatgcctaacttttatatgagaaaagtgaagcttaaaaagtaggtggtttgtctaaggtcactcaactcaaaattagtagtgtcagaaccaactctgagatttcatagacaattttatactgggagaaatggtgtagtgacttcagaaaggatagaattcaattgatattataaagaggcataaaacatgtacatagagacattttactatttcatttgaacattgcatgtcagaggtaaatatctgatctttgctgttggttacccagcaaatgacatcgatgggacatgagattctggataccaccccacttattta

SEQ ID NO: 507564 - DNA, 604 bp, Homo sapiens
aaaaaattttttgggaacatagtaggtacatatttttatggggtacatgagatattttgatacaggcatgcaatgtgaaataagcaaatcatggagaatggggtatccatccccttagrcatttatcctttgagttacaaacaacccaatctcactctttgagttattttaaaatgtacaatgtactccatggagcactcagtaggtgtgagtcaccctatttaccacattatatgcacttttattttaattttcagaaaagcttgatgagttaactattattaacatgcctaacttttatatgagaaaagtgaagcttaaaaagtaggtggtttgtctaaggtcactcaactcaaaattagtagtgtcagaaccaactctgagatttcatagacaattttatactgggagaaatggtgtagtgacttcagaaaggatagaattcaattgatattataaagaggcataaaacatgtacatagagacattttactatttcatttgaacattgcatgtcagaggtaaatatctgatctttgctgttggttacccagcaaatgacatcgatgggacatgagattctggataccaccccacttattta

SEQ ID NO: 507565 - DNA, 512 bp, Homo sapiens
ctgcctaccgtacttgcaaatgtccaataacaaaacctcccrcctgtgttctatttcagcacaatctcacatctctccttccaacaactgcgtgaggcacacagtagtgtcctcattttgcagaggaggaaactgaggctcagagggggggagatctgtgccgggaagtaggggacattggcctctttctcaaagcagacatggggggtggtcccaggaatatgctcacctgcaggcctgagtttgtatgaggtcgggggttggccattgacaggcaggatggtgacagtgaaggccacaggatggctctggcggtccatctcagaggcattagccatcaggacaaaaccgtcagtgtcttgctcccatcgtgcaggtactggatcagatgctcttccacctaggggcaggcccagggctggcagtcaggccccagcagtacccttcatgttctgcctttgggtgcaggaagagactgacccttttagggcctcagcttccattggtggaaa

SEQ ID NO: 507566 - DNA, 512 bp, Homo sapiens
ctgcctaccgtacttgcaaatgtccaataacaaaacctcccacctgtgttctatttcagcacaatctcacatctctccttccaacaactgcgtgaggcacacagtagtgtcctcattttgcagaggaggaaactgaggctcagagggggggagatctgtgccgggaagtaggggacattggcctctttctcaaagcagacatggggggtggtcccaggaatatgctcacctgcaggcctgagtttgtatgaggtcgggggttggccattgacaggcaggatggtgacagtgaaggccacaggatggctctggcggtccatctcagaggcattagccatcaggacaaaaccgtcagtgtcttgctcccatcgtgcaggtactggatcagatgctcttccacctaggggcaggcccagggctggcagtcaggccccagcagyacccttcatgttctgcctttgggtgcaggaagagactgacccttttagggcctcagcttccattggtggaaa

SEQ ID NO: 507567 - DNA, 290 bp, Homo sapiens
actgccatttgggaaacactgatccaggcaggctcactagcagtgaccaaacacctgagaaagggtattgtgaatacctgatgtatgtgccaggaacttccatggtygaatagctccaaatctcagaaatgctcctaacctagtgttgagctctggtgcatagatatattttcttttctttctttccttttttttttttttttgaggcagagtttcactcttgttgcccaggctggagtgcaatggcacgatatcagctcactgcaacctccgcctcccaggttcaagcg

SEQ ID NO: 507568 - DNA, 506 bp, Homo sapiens
ctgcttcccgcagtccccgtgcagcctcccgtccctgcccctcccttacttcgtatctaagttacctagggcaggtttcctaggtgggcgagctgggaagatgaaaataatgacatygccccccagtggaggagtgtgggaagtatcacagcaagctgcccagttttattattattggtaatttttctcagtttgggctttgtgtaagctcccccttgtctcagctccccgccccgccatacttacataaagcccaatcctttcctcaccattaacatcagacctaggggaggggcttctttatgcagagctgtatttagaaggtaagagtatttgttgagaatgctctaccccccctccacatacaaatacaaacgtttgctgggaataaataatctcttccttagagtagaatacgaataaatataaaaggaatgatggattttgaatatcaacaatagatgctaaagctagtgggcaaaaagttgatgaggaacagatatttt

SEQ ID NO: 507569 - DNA, 550 bp, Homo sapiens
tttcttactcatttgaattgaaaacttctatgtttttaaagcatattttcattaagtgtggaaattcataaaatackgttaggtaggaagacgatgttcacaaattaggtttataatctatcatttcaaacttcgctgtattcaaaaattagttatctaaaattaactccagagaagtttgtatgtacaaatagttgttataacaaaagctacctttcttttctcaatccgtgtcatgtggatctaagcccctgcctcagaaatggggtgggcatgtgtgtcctcttggtgagaccactctaccgccctagccaatgtgattgcttcagagatggttacatagccctagctggaccattaaaagtctccaaacctttgctggaattattgagagagagagcattcaaaaagaactcagtatataaaaaatactggagttaataagcaagtaaaatattaacagaagactgtatatgccccaggccaccagatgggggagagtgcacctgaaaagaggccaatacagaagaaagcagatagaaatagcttc

SEQ ID NO: 507570 - DNA, 602 bp, Homo sapiens
aaattacatatttttctacagcatcatttattatttgtgatggaagaaaggagcratagatagaagactgataggttaagtaaaaactgagttataagtttggtataaactcatagcaaattttcttttcaaaaaattatatatatcctagccattccaatagaaaaaggctagaaacaataccaacccagtggcgatgagcaactcctagtaacaagactgtggtttctaaaaaacatttcccatttaaaaagaaaggaggaggtcctggacaatttcacgtctggcttaggaaagatataagattagcctagaacatcttttattccagaaagaaagaaagaaggctatcaaacacttgagaatcaatatgaagatgtttgccacagaccaaagatgggacaatttggacatcaatatataaatgaaaatatattaaacatatttaaatacatgagctcattactgatttataaaatagaaacacacacacacattgtttgcctctggaagattctttttttttttttttttttttgaatgaatgaatgtctgtttttattattattttgggggtgggagaacagagttgaccttcctat

SEQ ID NO: 507571 - DNA, 602 bp, Homo sapiens
aaattacatatttttctacagcatcatttattatttgtgatggaagaaaggagcaatagatagaagactgataggttaagtaaaaactgagttataagtttggtataaactcatagcaaattttcttttcaaaaaattatatatatcctagccattccaatagaaaaaggctagaaacaataccaacccagtggcgatgagcaactcctagtaacaagactgtggtttctaaaaaacatttcccatttaaaaagaaaggaggaggtcctggacaatttcacgtctggcttaggaaagatataagattagcctagaacatcttttattccagaaagaaagaaagaaggctatcaaacacttgagaatcaatatgaagatgtttgccacagaccaaagatgggacaatttggacatcaatatataaatgaaaatatattaaacatatttaaatacatgagctcattactgatttataaaatagaaacacacacacacattgtytgcctctggaagattctttttttttttttttttttttgaatgaatgaatgtctgtttttattattattttgggggtgggagaacagagttgaccttcctat

SEQ ID NO: 507572 - DNA, 673 bp, Homo sapiens
gctggagaagccctttgttcgtctgagaatagaataatgtattatgtataggtttactcataaagttaacatgttaggcatactaagtttaaaggtgccatctattcacacagtgtttacacatttagtaatttaatttactttaaaaaatctttagtgtggtcacgaacacctgaaggaagtcctcagctccttgtctgtgaccatttgggagcaatttgcagaaacctgagcccaccagaaagcgccagcattacaggaaaaaaaaaaaaaaaaaaaaaaaaaaaaaggcctggttcttctggattttggggttctcacaagtgtcaagcagattcaaaaatcactgattttaacaaaggggaaagggggggtaaagtggaaraaaaaacgttttttttggaaacaacttttgccacatggaatttagtccaatcaacctcactcaaaaatatatatttcttccaacacatcgtttaaattcatacttccaccatccctatcccaccctcatcagaaaatctagcagcataaaaatgcttccatatgctagaggctgggttccccaattttgctgaaggggaatgaagaaaaatgtagttgagtagccagctttcatagaggagtaaacactttgttgcagcacatatagattgagtaatagcagccctcg

SEQ ID NO: 507573 - DNA, 673 bp, Homo sapiens
gctggagaagccctttgttcgtctgagaatagaataatgtattatgtataggtttactcataaagttaacatgttaggcatactaagtttaaaggtgccatctattcacacagtgtttacacatttagtaatttaatttactttaaaaaatctttagtgtggtcacgaacacctgaaggaagtcctcagctccttgtctgtgaccatttgggagcaatttgcagaaacctgagcccaccagaaagcgccagcattacaggaaaaaaaaaaaaaaaaaaaaaaaaaaaaaggcctggttcttctggattttggggttctcacaagtgtcaagcagattcaaaaatcactgattttaacaaaggggaaagggggggtaaagtggaaaaaaaaacgtyttttttggaaacaacttttgccacatggaatttagtccaatcaacctcactcaaaaatatatatttcttccaacacatcgtttaaattcatacttccaccatccctatcccaccctcatcagaaaatctagcagcataaaaatgcttccatatgctagaggctgggttccccaattttgctgaaggggaatgaagaaaaatgtagttgagtagccagctttcatagaggagtaaacactttgttgcagcacatatagattgagtaatagcagccctcg

SEQ ID NO: 507574 - DNA, 673 bp, Homo sapiens
gctggagaagccctttgttcgtctgagaatagaataatgtattatgtataggtttactcataaagttaacatgttaggcatactaagtttaaaggtgccatctattcacacagtgtttacacatttagtaatttaatttactttaaaaaatctttagtgtggtcacgaacacctgaaggaagtcctcagctccttgtctgtgaccatttgggagcaatttgcagaaacctgagcccaccagaaagcgccagcattacaggaaaaaaaaaaaaaaaaaaaaaaaaaaaaaggcctggttcttctggattttggggttctcacaagtgtcaagcagattcaaaaatcactgattttaacaaaggggaaagggggggtaaagtggaaaaaaaaacgttttttttggaracaacttttgccacatggaatttagtccaatcaacctcactcaaaaatatatatttcttccaacacatcgtttaaattcatacttccaccatccctatcccaccctcatcagaaaatctagcagcataaaaatgcttccatatgctagaggctgggttccccaattttgctgaaggggaatgaagaaaaatgtagttgagtagccagctttcatagaggagtaaacactttgttgcagcacatatagattgagtaatagcagccctcg

SEQ ID NO: 507575 - DNA, 626 bp, Homo sapiens
ccctcgtgggcttctgtcaatcctatgcttcaaacaagtatgagctaagcctaktctagatgtgacctggaatataaacaatccaatgagtttgacttccttcagaggtggcacctggagaggccatacatttattcaagtgatgccaccattgctaaacacaaggctgtatgcctctttgggaatgtgggagttcagtcattcaactaatgtctgttaagagtgtccaatttccaggcactgtaaaagtgctgggcaaagtcagaggaaagccaatccctgccttcaaagagatgacaacctgttggaagacacagccacgtaatggagtaattggagtggggtgtaaatgtacaggggacatacaagagccacctctgcatgggggcagtcaggcagggtctcacagaagaggtgaagcatgaactaactgtactgaagggtcatcagagttcaccagggtgaccagagaggacattccagttgcagggaatagcatatgcacatccacaggaaaatgagaaatcatgtttcagtagggctagagcagaggatgttgtgttgggtggtggagccatatgagggagaatagattggtgggattcataagagccagaattggcgtt

SEQ ID NO: 507576 - DNA, 587 bp, Homo sapiens
cattgagttgaccttgggtggcctggcagggctgggttgatgtgtataggagaaatggaagccaaggggaaagggggttagggacttatgataaaggccttccacgactgtctagaagcttgtacttcattctgcaggccgcggggggcccaagagggtttttgagtcaggttctacttcagagaggtgggactttttaaacaacttgttgatcacactatattaggaaatctcttaccccacaatatgttcctgggataaggcgcacgtttgctctctgggggtggtggttaataataggcatgcaacccaaagcgggaacaggagacgcacgcagagatgcgagcaggctcatgtttaatgagttcacaaagtgattttggttcctaattttcacatttccctgctctcccaccctggtgcgaaatttcctgatggagctggtgtttcatgctctcttaaggatggtaggagcagcagagtgtggtggtgtaacttctactgctggggttaaggagccatttgggtgtgttctcgtggagacatgayagagatctggtgaatcatctgtatctttgacccagtga

SEQ ID NO: 507577 - DNA, 622 bp, Homo sapiens
ttcaccatttattcaaaaaatatttttttaaacatgtgctacgttctaggctctatgttctgtgctggtattcaatggcaaacaaaaacacacattagaccttctcttatggagctttcagtctaataggagaagaagacattagagaatcatacaagtgcatgtataatcacaagaataaaaatgctataaaggagaggtgtaagtgtcatgagaacatgrgaactgacctgtcagggagagaggggaaaaccttcctgagaaaaaaacacctgagttgaggtgtaaaggaagaacaatggattcttactaacccacataatgtcactgtacttgcctccaaaagcgattagatttgtggggagaaagatgggggtcaggtatggaagggtagagacaagatggtagttgtatagaataatgcaggttccctccaggaactggatggtcagaatgcaagcagcagatatttagacaaattgctgcttagcttaaaaagaaaaaaaccgaaaaaagtaaaagtcagttgcctcaggttttcaagttggagggaaaaaggaagaaattaaaccctggtacatagatgtgaagaccatgactcaagtagtattgcctggcagag

SEQ ID NO: 507578 - DNA, 629 bp, Homo sapiens
tgagtgagataaatagaaaggtatgggaaaaaaaaaacataacgttgggtacaggggttcacacttgtaatcccagcactttggaaggctgaggccggcagatcccttaagcccagaagtttaagatcagcctgggcaacatggaaaactccgtctctacaaaacccagctaggcatggtggcgtgcacctagtcccaactactcaggaagctcaagtgggatgattacgagctcgggagattgaggctgcagtgagccatgacagcaccactgcattctagcctacgtgacagcaaaccctgtttcaaaaacaaaagactaacacaggccttcccctccccctaaaacaaaccaggaackagctcagtcactgaatgtgtctcagccattatctaacctgtctgtgtaaatgaatgggtacttttagaatatatgattagtaaggtcttctctggctctaaaatttcctgaatctaatggatttaataatatatatcacacgtgtcacacaggatgtagttacctttctatgttatgtaagttaccattagatggtatgttacttctcaataggaagagtacaatacaaataagagcacacagaatcatagcctagcatcagtacaca

SEQ ID NO: 507579 - DNA, 620 bp, Homo sapiens
tttggtgcgggagcatctgtagcagagtacagccagtgatgaccatccctaggcttgacttgctcctataggagactttagmcctagtggaactgtcaagtcctgaactctatggggcagtcttgcccatcagatagggctggtccaatctgagcacctcttggtctgctgacctctcccagggccctgactgaccatagctgcttgcagggaaaccttgcataccctggaggcccaccccatagcttctgcactggcagactcatgcctgactggtgaagagatccagcagagcagcccctacagccacacaccagcctgcattctccctccccatactgaagcttcccccacatccattgctactccccacattgctttgctggtgtctgcctgcaggtggcagattttgctttccttgtcctgccagcgcacaggaatacatgcggtcctcacccctcccaatggtaaccaccatcacagactgagtcttgccggggacagagacagccagtcccagccccaccagttgcctgttcttgcactaacaccacgcagagaacaatagatccttctctgccctgagaaatcactcctgcttgcagggcatagagaaggca

SEQ ID NO: 507580 - DNA, 587 bp, Homo sapiens
cggtagttcatgtctgtaattccaccattttaggaggccaaggcaggaggatcgcttgagcccaacaatttcagaccagcctaggcaacacagcgagccccggtttctatgaaaattttaaaaaattatccaggcgtggtggcagacacctgtagtcccagctacttgggaggctgaggtgggaggatcacttgaacctgggaggtcaaggctgcagtgggcagtgagcacaccacagcactcagcactctagcyggggtgacagagtgagaccctgtctcaaagataaacaaataaatttaaaaaatcactttgtgtgtgtgtgtgtgtgtgtacgagagaaagagagagagagagagagagagagacagagagagacggtgtatgggggggatgtatagggagaatgtaaacagaaacatcttgaggagaaatccagcagtgactgagaatgtcgatggaagatgctggccttcgcttccatgtgttattgtgtttctgtgttcattacctgttaccttttttataagtagcagagggtaaaataatatgtccaagtggcgactggctaaagagacagagcataa

SEQ ID NO: 507581 - DNA, 587 bp, Homo sapiens
cggtagttcatgtctgtaattccaccattttaggaggccaaggcaggaggatcgcttgagcccaacaatttcagaccagcctaggcaacacagcgagccccggtttctatgaaaattttaaaaaattatccaggcgtggtggcagacacctgtagtcccagctacttgggaggctgaggtgggaggatcacttgaacctgggaggtcaaggctgcagtgggcagtgagcacaccacagcactcagcactctagctggggtgacagagtgagaccctgtctcaaagataaacaaataaatttaaaaaatcactttgtgtgtgtgtgtgtgtgtgtacgagagaaagagagagagagagagagagagagacagagagagacggtgtatgggggggatgtatagggagaatgtaaacagaaacatcttgaggagaaatccagcagtgactgagaatgtcgatggaagatgctggccttcgcttccaygtgttattgtgtttctgtgttcattacctgttaccttttttataagtagcagagggtaaaataatatgtccaagtggcgactggctaaagagacagagcataa

SEQ ID NO: 507582 - DNA, 595 bp, Homo sapiens
tggtgttgggtgtagcattctcaggcactgggctatacaggtccgtgagcaccacctctggggcattgtcattcacgtccacgatgtccaccagcaccttgcagtgacctgccatgggcactggaccccggtcagtcgcctgcacatagatctggtaggaggaggcttcctcataatccagccccccaattactcgcacttccccggtactggcatctatgctgaagagctgcctctcccggtccgacgtgtagctgctcaaggagtacctgagctcaccattggagccctcatccgggtctgaggcattcagcttcaccaccaatgtgcctgggggtgagtcctcccgtagctggacgcgataagtggactggtcaaaggcaggagagttgtcgttagtgtccaggacacgcacagagatctgtgccgtacccgagcgggctggratgcccccatccacggctgtgagaaccaggtggtgcaaggctgcctgctcccggtctaggcccttacgcagcaccagctcaagcactttactgttctcctgcaggggcttaaggtccagctcgaagtgctcgctggggctgagctcgta

SEQ ID NO: 507583 - DNA, 505 bp, Homo sapiens
gactttcactcttctaaggaattttaaaaataagcgcagtattagaaatgatcaaccctgggcataacgacaaagtgcttctgcagaaatggatgacattgaccttgagcaagtaaatgtgtggtctccctccaggagaagcactgcatctctcccaggctggcacacttgcagagcatcaatcacaagggcaccaggcccttccacaccacagtcttgtggtggaaaaatrtggaggaggaaggagactgggctcctgggccctgagctcatctgtctccagctggtcacccacacccccgtgatgcagccagccacaccacctgtcctgagcccacctcttcaaaggagaggggcagagaagggccatggctgggggagtcccccatgtccacagtaagtgcacaggaaggtccacagatcaagccacacacagacaggaaaacagttgctgagcctctcggacgccattcggctagtatggtactcaacagtgctgcgtctt

SEQ ID NO: 507584 - DNA, 507 bp, Homo sapiens
atgggaatggacaaaacatgcagtaactaaccctcgcagggcctgtctgctcagacttaccccggcctctgtgcaagttccttcctgcagagtgtggggcgggaccctctctggaatgaagatcttttgatccacgatcaggttagagtcctgccttgggtcaggcaaaagaaggacaggagacagtcagagattctgtatcccaaggcccacagggtcccagcattatcgcaaaggctgcgggagttgggaaccagggcctgtggatggagaycactgtgtcccctaacaccacctgccctgtcgctgcctccacggcactcctaggccattctcttttgtcatgtcctcagcgacaaggcgcatcctctggtcagaatcctggtggctggcccatcctaaggacgccccgcactggccatttaacgcagccaggggccttggtgtggggcaggaccaccacagccctgcctgtctccacggagctctgccttcttggaccccagg

SEQ ID NO: 507585 - DNA, 619 bp, Homo sapiens
cttcaccagatgcagatgctggtgccatgctttttatacagcctgcacaaccatgagccaaataaacctctttttataaactactcagcctcaggtcttcctttgcagcaacayaaatggactaagacagcacctttgtaagctttctttacaattataaagaaagaacactttttcaggtataattcataattgattataattttaatgaacaaactaatttcttaatatatttttaaccttatgagaatgtcaccattttgcattgtgtattactaggctaatgacaagaaagatgagcatattgagatgagcacaatatgtagattagaatttttggttaaattaaataaaaataattttatgcattatataaatagagtttttatgtttcagatagacaacaatggtgagagaactgagtcagtcatggtacaggtacagtatactcatagagaaaataaaagaacctatatttcattatatttcaattcttgacagatagtttcattaaagaacatattttttacatgcaaacataattattttgaatgttataaattctgtagttatagactttaattgtacgattgtgcaaaacttgttaatcaactaatgc

SEQ ID NO: 507586 - DNA, 619 bp, Homo sapiens
cttcaccagatgcagatgctggtgccatgctttttatacagcctgcacaaccatgagccaaataaacctctttttataaactactcagcctcaggtcttcctttgcagcaacacaaatggactaagacagcacctttgtaagctttctttacaattataaagaaagaacactttttcaggtataattcataattgattataattttaatgaacaaactaatttcttaatatatttttaaccttatgagaatgtcaccattttgcattgtgtattactaggctaatgacaagaaagatgagcatattgagatgagcacaatatgtagatkagaatttttggttaaattaaataaaaataattttatgcattatataaatagagtttttatgtttcagatagacaacaatggtgagagaactgagtcagtcatggtacaggtacagtatactcatagagaaaataaaagaacctatatttcattatatttcaattcttgacagatagtttcattaaagaacatattttttacatgcaaacataattattttgaatgttataaattctgtagttatagactttaattgtacgattgtgcaaaacttgttaatcaactaatgc

SEQ ID NO: 507587 - DNA, 477 bp, Homo sapiens
tccaattctctttgctggcctattttcctcttccastgactgtggactttggtgccatgaattggcttaagttgaagtgcaatctctgacattaactttgctgcaactgttctttctaccaattatgttaaatgaaagctggatttcccccaccacacagctcatctttctcagaaatcctaagcaaatgacacctattctctttccttcctctccacttgcaacttgccaagatctagagaaaagctcaaatcaatgctggccttgtttctatcagttgctctcacatccttgccatttcttcaattcagaagcagccctgacaaatgcaaatcttgcttttctaatggtgcacttgtcctgtgaaatgctgctgcagaaagttgaggaagcttctgggtgttctgcacctgggccttgcagagcacacaggtactccctgcacctctgttccctctccccagggtccccacacag

SEQ ID NO: 507588 - DNA, 477 bp, Homo sapiens
tccaattctctttgctggcctattttcctcttccagtgactgtggactttggtgccatgaattggcttaagttgaagtgcaatctctgacattaactttgctgcaactgttctttctaccaattatgttaaatgaaagctggatttcccccaccacacagctcatctttctcagaaatcctaagcaaatgacacctattctctttccttcctcyccacttgcaacttgccaagatctagagaaaagctcaaatcaatgctggccttgtttctatcagttgctctcacatccttgccatttcttcaattcagaagcagccctgacaaatgcaaatcttgcttttctaatggtgcacttgtcctgtgaaatgctgctgcagaaagttgaggaagcttctgggtgttctgcacctgggccttgcagagcacacaggtactccctgcacctctgttccctctccccagggtccccacacag

SEQ ID NO: 507589 - DNA, 281 bp, Homo sapiens
ccaccccacagggacattataaggagcttccttcaacagaagatctgtaccttacagccactattaccttttcttttttctttttttttagaagtgtagttagtttggcagggttgtttctaacaaaattaactctgtcagaaatatatttttaagaaagccattaggccatcacatgcatagtgcttcagtttagaccttcattctaccaaaccatttattttgaacagcaaaggacttttgaactgarcactattttatcttgattatattagacatga

SEQ ID NO: 507590 - DNA, 635 bp, Homo sapiens
ggttataagtatcctctagaatttaataatggaaataaatttgggcatcttcatttgttgtcattttatataggctaacctttacattatcatttattcttattacagaaactttaatatactattttggacaaggctgctgagtctaattgttaaaaaacaaaacgagaatgaaacacaggggcttggagttattggtattctattctgcctcatttaagggatttgtggtggcaatacagtgatattagtagtattctcaaaggaactttgrtgattttaaggacaacagcctcaggaaagtgaaaacagaaactcacagattgctaatttcttcctacaggttgactatggatttattgattgaactgaatgggcaaatacgacaacggctgaggaatgttgctgtgaagggaggagggtttctctatttttctgtgggtctagaaggatatccattccttgtctctacccccaacttaccccaaaggggaaaagtgatatatttgagtaatggatttgggaagaaaaatcagtatgtataactatctcacttctactcatcttgacctcaggattttccatctgtagaaaacgtggtctggtctccttccacctataacacaaatttactg

SEQ ID NO: 507591 - DNA, 635 bp, Homo sapiens
ggttataagtatcctctagaatttaataatggaaataaatttgggcatcttcatttgttgtcattttatataggctaacctttacattatcatttattcttattacagaaactttaatatactattttggacaaggctgctgagtctaattgttaaaaaacaaaacgagaatgaaacacaggggcttggagttattggtattctattctgcctcatttaagggatttgtggtggcaatacagtgatattagtagtattctcaaaggaactttggtgattttaaggacaacagcctcaggaaagtgaaaacagaaactcacagattgctaatttcttcctacaggttgactatggatttattgattgaactgaatgggcaaatacgacaayggctgaggaatgttgctgtgaagggaggagggtttctctatttttctgtgggtctagaaggatatccattccttgtctctacccccaacttaccccaaaggggaaaagtgatatatttgagtaatggatttgggaagaaaaatcagtatgtataactatctcacttctactcatcttgacctcaggattttccatctgtagaaaacgtggtctggtctccttccacctataacacaaatttactg

SEQ ID NO: 507592 - DNA, 626 bp, Homo sapiens
aaacgcaatttatttggtctagtcagatatgactaaggcttatcataaactaactcattcaaaagtacgtattaagcatctttgaagccctttgctaggaactagggacacaacgagtaataagatcattcctgctcacataaaagaagtcgaggagactggaagtaaatgtgtgattacagaggagtgagatgagtgctaaaataaataaacatagcatgttgttagaacacaacacaaggaccaaacccatgttggagatgttagaaaggtcagactgaaaactcagtgtattaatctgtttttatgctgctgataaagacctaataccygagactgggtaatttataaagaaaaagagatttaatggactcacagtcccaagtggctggggaggcctcacaatcacagtggaaggtgaaaggcatgtcttacacaatggcagacgaaaggaaaatgagagccattataaaatactaggaattgttttataaaattgctgcatgaaataggtaaacagaatggctaatgaaatagaaaataacttctaatagcacagtcaatgccagagaccatgaatttcttgtaatgaaaattgcattattgtgtcattttttagcagtcat

SEQ ID NO: 507593 - DNA, 626 bp, Homo sapiens
aaacgcaatttatttggtctagtcagatatgactaaggcttatcataaactaactcattcaaaagtacgtattaagcatctttgaagccctttgctaggaactagggacacaacgagtaataagatcattcctgctcacataaaagaagtcgaggagactggaagtaaatgtgtgattacagaggagtgagatgagtgctaaaataaataaacatagcatgttgttagaacacaacacaaggaccaaacccatgttggagatgttagaaaggtcagactgaaaactcagtgtattaatctgtttttatgctgctgataaagacctaatacctgagactgggtaatttataaagaaaaagagatttaatggactcacagtcccaagtggctggggaggcctcacaatcacagtggaaggtgaaaggcatgtcttacacaatggcagacgaaaggaaaatgagagccattataaaatamtaggaattgttttataaaattgctgcatgaaataggtaaacagaatggctaatgaaatagaaaataacttctaatagcacagtcaatgccagagaccatgaatttcttgtaatgaaaattgcattattgtgtcattttttagcagtcat

SEQ ID NO: 507594 - DNA, 487 bp, Homo sapiens
tgcaggtaggctatactattagtagtaaacatactccctaaaaacttataacctagcttctagggaactcagtccctcttgactccattcttccagtctgtcaggggacaaacacaaacttctaaagaggaagaaaaaatcatccagagtcgctacaatttaaaatatctggaattctatcaaaaataacyaaacctcccaagaaaagaagagaaaacaaatgattatattaacagactcacagatgactcgctttggggaattattataaatggattgtaaaatcaagtatcataaactgagaaggcagatgaatttaacagaagaatgggcatatcacaataaaaaatgaataaaataaagagcaaaataatatactaaatgtggaaaaatgtagaagagacttacatgacagagtgacattagtaacatacatgtaattagactcccacagtagccagagagtgagaattgggaaaaataatat

SEQ ID NO: 507595 - DNA, 501 bp, Homo sapiens
tcagacctcattcttgtctctactcaggccctcactgtggtgctctggcctggctcccagattgggggcggtggtgggcagaggcctcacaaggcctgcagagtagggcctgggtggaggtctcagtgagaacccagagagccggggtgggctgttgccaggagggacctctggctggggcaggctggcactgaggagtaggcgtgaccctcaagggaatggagcccagcaggagcctgtcctctggccacctccatatttccaaggcagcccatcccggggcagggcctgctctactcaggtytcaaggctaaggcgtctgagctgcctcctcagctgaagggactgggccagatggagcaaggcggcggtttcctcatcagtcccggctctccagccttgcttccctgtctgcctgctgtggcctagcatgccccaggagaggggtgggaggacagggcccagccccagagcagctggaggctcaagggggaggcgcac

SEQ ID NO: 507596 - DNA, 544 bp, Homo sapiens
cgtagtagtgcgcacctgtaatcccagctactcgggaggctgaggtgggataatcgcttgaacccgggaggcggaggttgcagggagccgagattaccccactgcactccagcctgggtgacaagaacaaaactctatctcaaaaaaaaaaaaacaaaaaagatttagacctaaataccagtctgtcacacctccaatccctgggcacacaaaatgtgtgtgataaggggccatagagcctcacaaatagaattgtgggggcataagagataaagggcacccccttgcttatgtgaagaggcgaggggactctaggtggagggaacagcacaggcaaagaaaggttctcaggtgggaacctgtgtagcgtttagggagatggaagkggctgtttgttcagtctgtggagcacaggatggtgggaaagtgggtcctgagcagataagagcaaggctgcgactccagggaaggcagtggacttcattctatcagcagtggcaactaatggcccagcgaatctgaatcctggctttgtcaccaacca

SEQ ID NO: 507597 - DNA, 578 bp, Homo sapiens
tagggaagatggatttttttctgaattcagtatactggggtcttccctatgattgcaaaaggcaagcataactttttgatagacttgccttcgtagttttttgattttcaatgctgttctagttaaaatgctattcttaattttcttcatctatgtctgcaatatattgtaatagaactttcatgtcagttttaaagcttaagtttgctgaactaagtaaaaaaccagatgcatacgaaactctggagacttgcattcttattactgggcatgttgtcttcaggctgtgctataagcacaatgtctttgaggcttcttgtagttggccttgcatattgtaatattattaattctggaaatttatggtgattttgtaggaaataattcataaaaggaaatcttgttttatatatattttttaatttgtggaccatataaagtgtaaaatcttgctgtattktagctaacggttactatgccatatgttttgctggggttggtacatgatgtcattctctcattcacagtatgtctcttgcttctcccctttcctccatgggctgcacaggcattggagg

SEQ ID NO: 507598 - DNA, 578 bp, Homo sapiens
tagggaagatggatttttttctgaattcagtatactggggtcttccctatgattgcaaaaggcaagcataactttttgatagacttgccttcgtagttttttgattttcaatgctgttctagttaaaatgctattcttaattttcttcatctatgtctgcaatatattgtaatagaactttcatgtcagttttaaagcttaagtttgctgaactaagtaaaaaaccagatgcatacgaaactctggagacttgcattcttattactgggcatgttgtcttcaggctgtgctataagcacaatgtctttgaggcttcttgtagttggccttgcatattgtaatattattaattctggaaatttatggtgattttgtaggaaataattcataaaaggaaatcttgttttatatatattttttaatttgtggaccatataaagtgtaaaatcttgctgtattttagctaacggttactatgccrtatgttttgctggggttggtacatgatgtcattctctcattcacagtatgtctcttgcttctcccctttcctccatgggctgcacaggcattggagg

SEQ ID NO: 507599 - DNA, 395 bp, Homo sapiens
acctcatgagacttattcactatcaggaaaacagcacaggaaaagcctacctccatgattcaattacctcccactaggttcctcccacaatgtatgggaattcaagatgagatttgggtggggacacagccaaaccacatcaatgaagctctctgttgtatttgytaatgctgataatgtttttttgttttgtttttgagatagagaaggagatcttagagacgaaaaaggggaagctgcattaaaattggtaaaggaagaaacataatatgaaaggagggaaataatgaggtaaaagatgcagagactgctttccagacaaagtaagaatgaacttcactttggaataacaaagcagtgcttgcttggcaaggtgagtcttagaatctgactaa

SEQ ID NO: 507600 - DNA, 591 bp, Homo sapiens
aatgctatggatgaatgaatctcaaaacttcattaacaaatttattttattccatttcctaaggaatagaaactttttacctccaacccaggggagctatgaaacaaactcccyatttatttccaatctaaacacatttgataaaacaggcagaggaattttttatcagatctgtattttaaattttcatgactgttgttcaagagtttccattcttctttataaatatgtagaggcttaaaattcttttctgaaaaataaactgctactttaaatgattttaactcatttttataatacctttttttattctctgatgatctcttgctgtttttctttctctagaaatgttctaagaataaattagctgatatactaagaaaggttcacaaaatgagtccttcacctatacagcacctcttctaaataacagagagattacaaatccaatgtattcaaactctgagttgtctatatgtgtagtgttaaaaaatgtagctgtcagttttaacagcttttctcctgagatttcagtggctagctaatgatctcttttaaggattaggacaatttctagatagtgaaatggca

SEQ ID NO: 507601 - DNA, 591 bp, Homo sapiens
aatgctatggatgaatgaatctcaaaacttcattaacaaatttattttattccatttcctaaggaatagaaactttttacctccaacccaggggagctatgaaacaaactccccatttatttccaatctaaacacatttgataaaacaggcagaggaattttttatcagatctgtattttaaattttcatgactgttgttcaagagtttccattcttcttyataaatatgtagaggcttaaaattcttttctgaaaaataaactgctactttaaatgattttaactcatttttataatacctttttttattctctgatgatctcttgctgtttttctttctctagaaatgttctaagaataaattagctgatatactaagaaaggttcacaaaatgagtccttcacctatacagcacctcttctaaataacagagagattacaaatccaatgtattcaaactctgagttgtctatatgtgtagtgttaaaaaatgtagctgtcagttttaacagcttttctcctgagatttcagtggctagctaatgatctcttttaaggattaggacaatttctagatagtgaaatggca

SEQ ID NO: 507602 - DNA, 591 bp, Homo sapiens
aatgctatggatgaatgaatctcaaaacttcattaacaaatttattttattccatttcctaaggaatagaaactttttacctccaacccaggggagctatgaaacaaactccccatttatttccaatctaaacacatttgataaaacaggcagaggaattttttatcagatctgtattttaaattttcatgactgttgttcaagagtttccattcttctttataaatatgtagaggcttaaaattcttttctgaaaaataaactgctactttaaatgattttaactcatwtttataatacctttttttattctctgatgatctcttgctgtttttctttctctagaaatgttctaagaataaattagctgatatactaagaaaggttcacaaaatgagtccttcacctatacagcacctcttctaaataacagagagattacaaatccaatgtattcaaactctgagttgtctatatgtgtagtgttaaaaaatgtagctgtcagttttaacagcttttctcctgagatttcagtggctagctaatgatctcttttaaggattaggacaatttctagatagtgaaatggca

SEQ ID NO: 507603 - DNA, 591 bp, Homo sapiens
aatgctatggatgaatgaatctcaaaacttcattaacaaatttattttattccatttcctaaggaatagaaactttttacctccaacccaggggagctatgaaacaaactccccatttatttccaatctaaacacatttgataaaacaggcagaggaattttttatcagatctgtattttaaattttcatgactgttgttcaagagtttccattcttctttataaatatgtagaggcttaaaattcttttctgaaaaataaactgctactttaaatgattttaactcatttttataatacctttttttattctctgatgatctcttgctgtttttctttctctagaaatgttctaagaataaattagctgatatactaagaaaggttcacaaaatgagtccttcacctatacagcacctcttctaaataacagagagattacaaatccaatgtattyaaactctgagttgtctatatgtgtagtgttaaaaaatgtagctgtcagttttaacagcttttctcctgagatttcagtggctagctaatgatctcttttaaggattaggacaatttctagatagtgaaatggca

SEQ ID NO: 507604 - DNA, 350 bp, Homo sapiens
ccaaaagctggttactccaagaccctaggcattctgtcaaaatctaacttggatgatcatstaaaatacttatcattttattaatatcagtatgttcattcaaatggtaacaagattttcacttaatttctaaatcactgatcttaagtgaaaaatatcaaaatagaggacttcacaaatattatcatttagaacatcctcactttaaacaatctaaagttatttttaatgttgaatcaatcatactctgaccttctccataggaaaagaaaatgtaaatatcccagacagcagagagcaaactgtcataaaaataaaactgtactttcaaatagctgtagtccacagca

SEQ ID NO: 507605 - DNA, 350 bp, Homo sapiens
ccaaaagctggttactccaagaccctaggcattctgtcaaaatctaacttggatgatcatctaaaatacttatcattttattaatatcagtatgttcattcaaatggtaacaagattttcacttaatttctaaatcactgatcttaagtgaaaaatatcaaaatagaggacttcacaaatattatcatttagaacatcctcactttaaacaatctaaagttatttttaatgttgaatcaatcatactctgaccttctccataggaaargaaaatgtaaatatcccagacagcagagagcaaactgtcataaaaataaaactgtactttcaaatagctgtagtccacagca

SEQ ID NO: 507606 - DNA, 639 bp, Homo sapiens
ctcacagcatttccaaatgctggtttaaccttcactgccttgagcaattctattcggtgctgttgttaactttttaagtgctggtaagagaccacagcattttgtttagatatttgctttgttttgttttacttttggttttggttgagggagaggatgtgagagtagaggtactggattcggacgcagacaccgagagaaatttaatcamgtaactctagatcaagtcaagagtattaggagcaatctctgttttttagttcacaactttcttccaaacaaataaacaataagaaaaccagatctaattttaaatgaccacatcttaatctgtctagagaagtttctacaatttctctttgatattattgctcttgcagtcccactgctaagagagtgccttcctaggcagtggttcataaagtgtgatgccctggccaggagaaacccttccacctggaaatgtgttagaatacctgttctcaggctccatccagacctactgaatcagaaactctagggatggagtccaggtctccaggtgattctgagtcatgctaaaatttgaagacctctgttctagtaacattagctataatttaaactgatcttaaggacatgttaacttgatttggaaaa

SEQ ID NO: 507607 - DNA, 251 bp, Homo sapiens
ttccctcacaactttttgtccccccaaccaatgtaggcacccaaggagtccatgaagttgcaactcttgttattataacatcaaccctcacctaggccagttgtagcagaggttcccaacctttttggcatcagaaactggctkcatggaaggcaatttttccacgaaccagcgagggtggagtgtgtttagggggaactgtttcacttcagatcattaggcattagattctcataaagagcatgcaacct

SEQ ID NO: 507608 - DNA, 496 bp, Homo sapiens
tgggaggctgagacaagagaattacttagcctaggagttcaaggctgcggggagtcatgatcacgtcactgcactctggcctgggcaaccgagtgagcccctgtctcattaaaaacaaaccaaaaaacaactccccattaaagctaaccttcttctctgaagagaagcaaaatagtacagggtcacttggcccactgtggcacatgtatcayggcttctcccttctgggcctacagcagacatcactgatcaataaagaaactcttattctcagaatttttcacaacccagtgtttcaagcagctaccaccgatctatatgtttggcaagtaaaatgaaacttgcgtgttaccctgtttatagtgaaaggaagaatacctggaaagttaataggatttctttactctcaacttcttgagaaatcttagccatgttgcacaacccatccaagactgacttttcatgtctataaagcaagagaattacggtggctctg

SEQ ID NO: 507609 - DNA, 496 bp, Homo sapiens
tgggaggctgagacaagagaattacttagcctaggagttcaaggctgcggggagtcatgatcacgtcactgcactctggcctgggcaaccgagtgagcccctgtctcattaaaaacaaaccaaaaaacaactccccattaaagctaaccttcttctctgaagagaagcaaaatagtacagggtcacttggcccactgtggcacatgtatcacggcttctcccttctgggcctacagcagacatcactgatcaataaagaaactcttattctcagaatttttcacaacccagtgtttcaagcagctaccaccratctatatgtttggcaagtaaaatgaaacttgcgtgttaccctgtttatagtgaaaggaagaatacctggaaagttaataggatttctttactctcaacttcttgagaaatcttagccatgttgcacaacccatccaagactgacttttcatgtctataaagcaagagaattacggtggctctg

SEQ ID NO: 507610 - DNA, 496 bp, Homo sapiens
tgggaggctgagacaagagaattacttagcctaggagttcaaggctgcggggagtcatgatcacgtcactgcactctggcctgggcaaccgagtgagcccctgtctcattaaaaacaaaccaaaaaacaactccccattaaagctaaccttcttctctgaagagaagcaaaatagtacagggtcacttggcccactgtggcacatgtatcacggcttctcccttctgggcctacagcagacatcactgatcaataaagaaactcttattctcagaatttttcacaacccagtgtttcaagcagctaccaccgatctatatgtttggcaagtaaaatgaaacttgcgtgttaccctgtttatagtgaaaggaagartacctggaaagttaataggatttctttactctcaacttcttgagaaatcttagccatgttgcacaacccatccaagactgacttttcatgtctataaagcaagagaattacggtggctctg

SEQ ID NO: 507611 - DNA, 483 bp, Homo sapiens
taaatatttatttggaatctataatgaacaatccaaagtggacttagtcatgttaaagagaaacctgatcatcataaaagacacaagtgaaaccatttcagatttatgtagaacctttgcagaaagtgaagagaaacaaatctccactgatttctataaaccattttctcatatccaactgtaatctgttgtaacttggacctagcattttggttctaagtacaaattactgacttggataggaagaaaaagccattttcagccactttggtgaacagtttttagacttcaatttataatatgttgccagtactgttgaacaaaatgtcttagtggattattctaatcctttaaagttttatttaacatagtgtctactcttttagtgaattgastaactcatcactgaatgaatgaatgaataaatgaatacatgactcagaacaggtcaatataataacttttatttggtggttctttcag

SEQ ID NO: 507612 - DNA, 562 bp, Homo sapiens
ctgcttcattaccttgggactaagcacagggtgccgtgtaatgtgaactcgattcttctcccaacccacaaaggacatgttgcatgaataagaaatacatcttagttctttaaagccatagattgtgggactgtttgttaatacagcattaactagcctgttctgactgacacagagagtgaaaagaagtaataacctgttattagataggaagtaattaaaataacaaggaagtagactgaaagacttaaacaatgagtcattgataagaaattaggggaaagggtgtgaactactcatttaatgtaaaaagaagagaacctacctgttacatctataaaaaatgttatttgatttgggaggccaaggtgggtggatcacgaggtcaagagatcaagaccaccctagccaacatggtgayaccctgtctctactaaaaatacaaaaattagctgggcatgatggtgtgcacctgtagtcccagctactcaggaggctgaggcaggataatcacttgaacctgggaggcagaggttgtagtgagccgagatcgtgccactgc

SEQ ID NO: 507613 - DNA, 630 bp, Homo sapiens
gctggggagaccacgcagtaccctactttgtcacagttcatccagtgagggacatttttacagggcacatgaccttaatctttttcattaatcttggttaattcatttccaggaggtcaagtctcttgtggttctgtggaatcaccagatgctcctgtgggtgtggcttagtctgagctgakgtaacaagtagctctgtgttgctggcaccatctggctgtagcagggttcagtgtgggaggccttgcctgtgaactgttctagaaggcaagctgcagggctgcataacactccattttccactgtgagtgctggggggacagtggttagcagatgacataggcccagtcttcagggtgagcgcaggaagatgaatgagaaaacccttcaattctgtgtagctgggctctctggggatgagaaactcaggggttggggggcacagaggaggcctcaatgcaggctagtgagggtggggagcaagacagtaaatggagctgaagctggggccagatgccaggtaggccacacatttcatcatcacatctctcagcaaccccagcccaaaaagctggcctcctttccaatcttcccagccaaagtccctggacaagctgattggaccaacca

SEQ ID NO: 507614 - DNA, 578 bp, Homo sapiens
tgcatctgccttcccgcagtcccttatgtacatcatttttccctgttgccccagggtctttccatttccctaagcttagaatctcctcacttaatgtctacttatctttgaaaccgtagctctaaaatcatttccactgagaaactttctgacctccttgactcaattagattttccattatccactcagctagtgcatgtctctctccttcccagcactgatcacagatgtaattttacaattgtttgtgtagttatttgattaatataggtttcatccattacactgtaaactacaagaaggtaagatcaagggtcatgtctgctttcctgaacattgtgtacccagcctctgacatgcaataaatatttgcaaaggaagggcaatagttctttagccaggactggtcacaacctcaagaagcattacttttcagcgggaagaaggaaacactaaatcaataaagaaatgaagaaaatgttttctaatagtgatacgtgctgtaaaggaaatgaagtgttttgtgggagagtsatgagatagggtggaggtagagggagggcaactttgattggtg

SEQ ID NO: 507615 - DNA, 488 bp, Homo sapiens
acagataagaaaggctacataggtgacttgtccagacatgcccgcaatggaaaattccatcccctaacacatgtgccgtaaagggaccaaaacaatatggagtaactcaagctaagggccctcatgagcactaggaggatagggaagagctaccagaaattcacaccttgtgcaaatgagacacccagccctcactggtttctcaaaaagccctttgcattcatttgtttaaatggcaacccattcaggccccctctctgctgcgggaagctttcttcctttgcctgttaaacttttgctccaaactcatcctttctgtccatgctccttaattctcttggttgtgagacaaagaactccaggtgatagatacttcacaacatgatactgctgcattgtggtgccttggtgagactgtaacatttccttactcagtagtaatgcagagcaccttcatgtacktatctcctgtattcatagtctataca

SEQ ID NO: 507616 - DNA, 610 bp, Homo sapiens
tgggcctggtctacctccagactatgaggataagtgtaaaatgacggctgttttaaggcaccaagtttgggaatgatttactatgtggcaacactgagctccacraggctgggaactttgtcagtcttgctccctatacatgtatccccagggccaagaacactgcctggtccagagcaggtgcttaaccaatatttgttgagagagtgaatgaatgtatgaatgaagagattaatgaatggaggactcactacagccagtagcaatcccccaacctgcctccagccagcatgctgcctctcttctgtgcctccactttctcaccttgttgactgctgaccatgccctggatcccagctcaaagatcactttctcatagaggctgcccttcaactcacccgccttgtttagcaccctgtctcacactctcaagttaccctgtatttctcctccatgacacttctcagcactattcattatgtaatcaaatgaccatggtgaaattcctgggtggctggctgtctcctgcgactgaccctaagccacatgacagtaggggtagtgtctgcgtgtttgcagagagctgactgaccgcctgtcagaacatttc

SEQ ID NO: 507617 - DNA, 619 bp, Homo sapiens
cccaatccatcaatattcactgatgaagcatcactgttcattaacaggaactcggtcagcagacatttattgatcaccaggcatgtgaaggcactctggggcattcagggacatggccatctgagaagctgacaggcccactatggtgacaaatcacagctagtcaaggcagtagaagccacatagggctgacctgcacaagggacctgagaccaaccawgacatgacatgcagccttcacagttctgattggtgggggagggctggactgatgggaggaccaagaccacatagaggaaaatgaccctgggccttaattttatgcaaacccaatgaacaaatttctgggtcaagttggtcatgtcacttaacctctttggcctttacttttatcccttacatgaaatgggattaaggttctccctgatgaactcctgggatcacagggagcatcacagaagaaaacagaagagtaggcttggtaaggacagtgcttcattatctatgtaaaggaataaggacaggtggacctcaaggtggccactgggatgggcagaggggaggagggagaagggccttcccagcctggaggggcaaagaagtttgagcaggaagcccc

SEQ ID NO: 507618 - DNA, 635 bp, Homo sapiens
gagtacacaggagtcccaatccatcaatattcactgatgaagcatcactgttcattaacaggaactcggtcagcagacatttattgatcaccaggcatgtgaaggcactctggggcattcagggacatggccatctgagaagctgacaggcccactatggtgacaaatcacagctagtcaaggcagtagaagccacatagggctgacctgcacaagggacctgagaccaaccaagacatgacatgcagccttcacagttctgaytggtgggggagggctggactgatgggaggaccaagaccacatagaggaaaatgaccctgggccttaattttatgcaaacccaatgaacaaatttctgggtcaagttggtcatgtcacttaacctctttggcctttacttttatcccttacatgaaatgggattaaggttctccctgatgaactcctgggatcacagggagcatcacagaagaaaacagaagagtaggcttggtaaggacagtgcttcattatctatgtaaaggaataaggacaggtggacctcaaggtggccactgggatgggcagaggggaggagggagaagggccttcccagcctggaggggcaaagaagtttgagcaggaagccccag

SEQ ID NO: 507619 - DNA, 619 bp, Homo sapiens
cccaatccatcaatattcactgatgaagcatcactgttcattaacaggaactcggtcagcagacatttattgatcaccaggcatgtgaaggcactctggggcattcagggacatggccatctgagaagctgacaggcccactatggtgacaaatcacagctagtcaaggcagtagaagccacatagggctgacctgcacaagggacctgagaccaaccaagacatgacatgcagccttcacagttctgattggtgggggagggctggactgatgggaggaccaagaccacatagaggaaaatgaccctgggccttaattttatgcaaacccaatgaacaaatttctgggtcaagttggtcatgtcacttaacctctttggcctttacttttatcccttacatgaaatgggattaaggttctccctgatgaactcctgggatcacagggagcatcacagaagaaaacagaagagtaggcttggtaaggacagtgcttcattatctrtgtaaaggaataaggacaggtggacctcaaggtggccactgggatgggcagaggggaggagggagaagggccttcccagcctggaggggcaaagaagtttgagcaggaagcccc

SEQ ID NO: 507620 - DNA, 573 bp, Homo sapiens
aggctaccctgaaaagcagagtgtctcaatgtgctgcactagtgcctgccaaggccacctttctaccttgctgctgtctcamtaaagatcatgatgatggcaaacatttgtggtgggttgatcgtgagccacgtggtatgttcagagcagttactgaaacctccccagtcccaggcataagtcctgtgagttactcccattttatagaggagaatgcaaggacccaggaactcattcaagggcacagcctggtggcaactgcaggacttgggtcctggccatcttgctccttactgctgtgcaatgctgctggaataactagtccccaaaggggtatctgtcctggtggcacagtcaggcctaccttccatgctgcgctcggccacgctggggatgttgcagtacaaaagagcttcataaacggggtctgtcacagggggctccgtcacagggtcgggcatgattctctttcgactcttgctactcattccattcttaggagtcgacaccgggatcaggtggactgaaacgaagtaaggcaggttgtgacgcacagttcctggggcgccaggc

SEQ ID NO: 507621 - DNA, 526 bp, Homo sapiens
ggggctcaggttggtcccttgctgctagggaaactgggagagagagctcctctagtgggagggcccaattcacaccgtgggggattccccaaattcagttcatgggtgctaggcggctagaaggaatgatgactgtcattatatccccctctagggtgggacgaagtccrcaatctctgaataaccaattaggttgaaatgatgaaacttctggaaggaagagcatatgaacttaaatgtgtgagggacaataataattttttatttatctattaaaaaagtgtgtagatatttatcgaacatctactatgtacagagtactgaggggacacggtcctgtgttcatctttccatcttatcaggaactgggcttcgaatacctttctgcaatcttctttatgcttatgactttctctgccccagcataaattacaggaatgatctctcttcagaaaatagaaatttccctggcatccatggtccttttgaaattctggtccaatgtcgatttatatgcaccaaatta

SEQ ID NO: 507622 - DNA, 622 bp, Homo sapiens
ctcttggggtggtaataatgatggcatrgccagggattagatacctaatgagttagcaaatcagggccaaaatcagagaaaatttgctagataaaatatgggcactaacgttgtaatcaacgttttttggacaggcattgtctgcactcttgctaaattattggtaattttagagtgcacttaaggcctggcttctatgagatgagagatagtgctcactaattgtaaaataaaatgaacaaaatgtaaatgcaaattatgtattttagatataaagtatataagttataagccatgtatacactgaagagacaaatagtttctccagtcagcaagttcctagtctaggtagagagacacatatacaaccagctagagcagtatgataatgctgtattaatatgaacaaaacatggaacccactaggaaaggtgattaattctactctgcttttaatagccacattctttcaatatgaatccttcatttgctcagtgctgcacaggtacagaaatgtttgtcaaatagaggaatggataccctcttaacaaacatactgtatttctgctttttgtaatctgggtatcaccttctcattacagcttattaagattccaccaac

SEQ ID NO: 507623 - DNA, 389 bp, Homo sapiens
cccctcccatattaatacaacctataatatcaattatgcatatataaaaataatgaagaagattaatacgaagaaaacatgagtttttcaaggtacattttattatcactaatttaaacgtcaaaataacaggagccttcaaaccaaacagccaacattatattgaaagagcaaaagatggaagcattccctttgaaaactggaagaagacaaggatccctttctcaccactcttattcaacacagtactggaaatcgtagccagagaaattcaayaagagaatgaaataaagggcatccaaattggaagagaagaagtcaaactatctctgtttgcagatggcataattctgtaaaaccccgcagtctccatccaaaagctcttccag

SEQ ID NO: 507624 - DNA, 641 bp, Homo sapiens
agcagctgtcttctatatcttcctatcaacataacacatccagtttgcctgaagtgctttttgcctgactggaaaagcaaacagttattttcttcattccatggtatataatggagaacagaaatttatatgcaaatttgagtattagtgacactttgatgagaagagtttaaggaccaattgtarttgtcaaaaatgtttgaaaacccctattaacgccattcacgtggaacataaaattgaagatccaatagagaaagtgtgttgtatagagagcaacatcatattgcttattttattcagtctgttgaattgcagagattcacagatttttgtaaaagagacaattggaaatacattcatcaggataattttatttcatttttaaacttgtaaatgttaactatacttgttattgctattacttaaaatttacaatttatccactatgcaagaaacgttacagaatgtattttaaaaacactgcttttgctcccacagaatatgtattaagtaactaacacaggagagtaatcatttgaaaaataaggcttggaagtgcttatttgtattatcacctgtaaattagatcctaagtccaacaaattacatttaacattaattttagcatggtttaacac

SEQ ID NO: 507625 - DNA, 688 bp, Homo sapiens
ctgcaccaaacataacataatactctcttacaagatgcgttctatgcttggtttccaagamtttacatttgcatctttgttttatttttttcctggttgctttttctcagtctcctttggagggtggttttcatctgtaaattctattaacactagcgtgtccgagaattctgctcttgatctctcaacctttaaatctgtagaaattgcataaattccttaagttattccttaaattatgtcagttaataacttataagcatgtatgtactgataatccctaaatttatatttctaagtcaggcatctgtcttggaatctagacttacatattcaactgactacttgatatttttcaatgagtgtctagtatgcttctaaaatttaattttctactatacttaaaaacacacaacagtgtaggtaaaacatacaacagtgtctgataaagttattttatcctccagtaagctccaactatgtctgctcttcctgcatcctgctctatggcaatttcctcattcattttaaatatatatgtatatattctattacatattctagtatatattctaatatacatataaaactttcttttttctttcagtaacaaatatatttcaattagttctgttggacttgaaagcagaatacattaacttttcactatttctattgctaccattct

SEQ ID NO: 507626 - DNA, 371 bp, Homo sapiens
ttttttctatatgaccttcaggagaatgatgccatcattgcttgaaatcactgcatctgaaaaggcttttgttaacgttcaacatcaattcatgttaaaaactctcaataaacaaggtagtgaagaaacatacctgaaaataatgagtcatgtatgacaaacccacagccaacatcatactgaatggraaaaagctagaaacattccctttgaaaaccagcacaagaccaggatgccctctctcaccactcttattcaaaatagtattagaagtccttgccaggacagtccaaagagaaagagaggaagtcaaattatctctatttgtagatgacataattctatagaaaaccccatactcttggtgcaag

SEQ ID NO: 507627 - DNA, 371 bp, Homo sapiens
ttttttctatatgaccttcaggagaatgatgccatcattgcttgaaatcactgcatctgaaaaggcttttgttaacgttcaacatcaattcatgttaaaaactctcaataaacaaggtagtgaagaaacatacctgaaaataatgagtcatgtatgacaaacccacagccaacatcatactgaatggaaaaaagctagaaacattccctttgaaaaccagcacaagaccaggatgccctctctcaccactcttattcaaaatagtattagaagtccttgccaggacagtccaaagagaaagagaggaagtcaaaytatctctatttgtagatgacataattctatagaaaaccccatactcttggtgcaag

SEQ ID NO: 507628 - DNA, 424 bp, Homo sapiens
cattgtgccctgccccttggagcctgagctgacttggtgccctgctttccagggaatcagtgccttggccagtctgagcagtcacaccccccactgcacgagagctgaagcactgccctgcttcacagggaatcagtgtcttggctgagctgagcagccacacctgccagggatgagccaacatggcacccccatatcccgggaaaacagcattggctgaactggggtaccttgcccttcaggacaaacaactgtagawccctgcttccttggaactggactagccctggagaatctgagttgcccaggcacctgcctccccagggagagaagtagttgctgcactggtccctgcccctgagggcccaagccacagtcgtgctccaccattctggggtccttgttgatgctgcgcctggtctca

SEQ ID NO: 507629 - DNA, 578 bp, Homo sapiens
agagtgagctgatcttgattgggaaaggacttcaaggacagatacatccatccaatattatggctgcagccatagggcattaatcagcattcttgattatgagtgatagaaccaaccccatctcaaactggcttaaagagccactgaggaatttatgactcgtgtaactgaaaacttsaggcatggctgaatctgggtgctcacatggtgtcctcacaccttcctgtctcccggttctgcttttttcttattgggttccttctaaggcaggtgctcctcaaggggtgggaagcattgccactggctccttggttgccctggtgaagaagacttatgcaatcaattgtgtcatggaccccaattcttcaccatttcctgatcacattctttgccatgtaactttgcaatgcttggtccatgtgacttacttgagccaaagcaatgagatggaagtgagagtggtgtaattccaagcccaggcctcgcggaacttgtctgcttctactagttctcttgtgcgtctgccatccccaggctgtcctggtggttccaggagaaggagagacacacagagcaca

SEQ ID NO: 507630 - DNA, 578 bp, Homo sapiens
agagtgagctgatcttgattgggaaaggacttcaaggacagatacatccatccaatattatggctgcagccatagggcattaatcagcattcttgattatgagtgatagaaccaaccccatctcaaactggcttaaagagccactgaggaatttatgactcgtgtaactgaaaacttcaggcatggctgaatctgggtgctcacatggtgtcctcacaccttcctgtctcccggttctgcttttttcttattgggttccttctaaggcaggtgctcctcaaggggtgggaagcattgccactggctccttggttgccctggtgaagaagacttatgcaatcaattgtgtcatggaccccaattcttcaccatttcctgatcacattctttgccatgtaactttgcaatgcttggtccatgtgacttacttgagccaaagcaatgagatggaagwgagagtggtgtaattccaagcccaggcctcgcggaacttgtctgcttctactagttctcttgtgcgtctgccatccccaggctgtcctggtggttccaggagaaggagagacacacagagcaca

SEQ ID NO: 507631 - DNA, 578 bp, Homo sapiens
agagtgagctgatcttgattgggaaaggacttcaaggacagatacatccatccaatattatggctgcagccatagggcattaatcagcattcttgattatgagtgatagaaccaaccccatctcaaactggcttaaagagccactgaggaatttatgactcgtgtaactgaaaacttcaggcatggctgaatctgggtgctcacatggtgtcctcacaccttcctgtctcccggttctgcttttttcttattgggttccttctaaggcaggtgctcctcaaggggtgggaagcattgccactggctccttggttgccctggtgaagaagacttatgcaatcaattgtgtcatggaccccaattcttcaccatttcctgatcacattctttgccatgtaactttgcaatgcttggtccatgtgacttacttgagccaaagcaatgagatggaagtgagagtggtgtaattccaagcccaggcctcgyggaacttgtctgcttctactagttctcttgtgcgtctgccatccccaggctgtcctggtggttccaggagaaggagagacacacagagcaca

SEQ ID NO: 507632 - DNA, 603 bp, Homo sapiens
cctttgtaggttgtgattttatatttcaagattagtcaaacttctcccagatgcctagtattttgcagattactttgaaggggtcttgcagataaagctgagagaagagagaaagagatccccccccgtattgttctatattgttttatgctcagtacctgttttaagaaacaaggaagcaaaaccaaaggcaggcagccgggtgccaggcaccagacccaaaaccaggcctgggcctgcctgaccttagcctgatagttaaaattcaacccatgacctagcaaccgatgttatccgtagattccagacattgtatggaaggacattgtgamacttctcgttctgttgtttcactctgattaccggtgcatgcagcccctgtcacataccccctagattgctcaatcgatcacggccctgtcatgtaaaatctttagtgttgtgagcccttaaaagggacagaaattgtgcactcaacaaactcggattttaagacactagactgtcgatgcttccaactgattaaaagctacttccttcactatcttggtgtctgtggggttttgtccacggctcatcctgctacaaggctactaatcttca

SEQ ID NO: 507633 - DNA, 603 bp, Homo sapiens
cctttgtaggttgtgattttatatttcaagattagtcaaacttctcccagatgcctagtattttgcagattactttgaaggggtcttgcagataaagctgagagaagagagaaagagatccccccccgtattgttctatattgttttatgctcagtacctgttttaagaaacaaggaagcaaaaccaaaggcaggcagccgggtgccaggcaccagacccaaaaccaggcctgggcctgcctgaccttagcctgatagttaaaattcaacccatgacctagcaaccgatgttatccgtagattccagacattgtatggaaggacattgtgaaacttctcgttctgttgtttcactctgattaccggtgcatgcagcccctgtcacataccccctagattgctcaatcgatcacggccctgtcatgtaaaatctttagtgttgtgagcccttaaaagggacagaaattgtgcactcaacaaactcggattttaagacactagactgycgatgcttccaactgattaaaagctacttccttcactatcttggtgtctgtggggttttgtccacggctcatcctgctacaaggctactaatcttca

SEQ ID NO: 507634 - DNA, 664 bp, Homo sapiens
caagtggggtttaaactattgtttcatatttaacataaaatattttcctatttaaattaacatacttttatgttcacggtaaacaaactgcataggttttcactttcattttcttctgacatcttctgcaaaagaatggtctgcccattttttggataaaaaggctagaataatgtgaccggagctgggtgaggtggctcatgcctgtaatcccagcactttgggaggccaaggcaggcaaatcacttgaggccaggagttcgagaccagcctggccaacatggtgaaaccccgtctctactaaaaatacaaaaattagccagtcgtggtggcatgtgcctataattccagctactcaggaggctaaggcaggagaattgcttgaacccgggaggcagaggttgcagtgagctgaggttgtgccattgcactctagcctgggagacagagcaagactccatctcaaaaaaaatgaaaacataaaaatagaacaatgtgactgggagagacttaaagtgaggaaaaatgaatgctgaaagaactagtaaactggctgaagatggaacaactccccawgtctccagagaggcagataagggactgtaaaccagcaaatgccacctgcctgttatctagctcagaaaggtgcacacctctggaagca

SEQ ID NO: 507635 - DNA, 539 bp, Homo sapiens
tgtgaggattaaatgagttaatccatgtaaagctcttaggaaagtgtctggcatattaaaagtgcacagtacatgttattaattatttcatcagaatgatgatggtacccaatacgtcaatgccttatttgaaacaccataattttgtcctcaacatacacataattgagcattcatttaatgccttatttgagacgctgataattttagcagtcacacagtaccatttgaaaatgagttcgtgataatgaaggcagttaagtatttttaaaagcctgttgtactctataatttaaaatattgtattatagcataattaataaatgataatacatattaatacaaatcctattaacaaaataacattgaaaaagtaataaaactagtaaactaaaataaaatgaatatatctaaataaaaatacattctataagaacaccataccttggatgtgcaagaattacagwgctcacagtgttgattctctagagaaacataccgttgacacggagagcaaaatctagagtaaaggacagaga

SEQ ID NO: 507636 - DNA, 542 bp, Homo sapiens
caacgtctattcaaattctttgcccattttgacgtgggctgtttgctggtctcctcttttctgaagtgtgttagtgggtaattatctgatcttgtggggcacagggcattccctgcctctttgtagtccagggatcaccacagggacaggaaccagcttaccagttaggtattgtcctcggggattctctaaccccagatcagtttcagaaaccctgggagtggtccagggaaaaccaatgtggaaggcattgactgaggccatggctaaaagccaggagctattagacttgttccataacctctatgagttgaaatccagttagtgattcaggtacagaggctgtgtaataaccaggacagaggcaagccttggaactctgggtgacgggaaagttagaaggtacgtccaggatgatatctcaatccaggcctgggatccaagkccctttggacagccaggttgggcccagatggagccacatcacctttgctcaggcttctcacctgcccttgcataggacagctttcttctaccctacc

SEQ ID NO: 507637 - DNA, 512 bp, Homo sapiens
cccgggctgggcttgaactcctggactcaaacaatcctttggccttggccttccaaagtgctaggattactggtgtgagctaccacacctggcctaaatcccgcccacttctttatagttccctggacatttttgctcctcctgaaagcccttcttgactattccagttgccctggttcttcgttgaggatgcgtaggcctctttctaaagtccaccttatctccccagtttataagctctccatgttcaggcaggggacacaatattacccactctccacaagctccacaagcattatgggcagtggtaggccactgatgggggcatttcctatgggctgggcaaggggccaagcccttcacacacatttcctgatttcrccccggcagcaaaccctatgatatagcaatgagtcaactattaacttttaaagatgaagcaactagagactcagagagaggctgagtagcctgcctggatgtggagaccatccttgacttgatctgactct

SEQ ID NO: 507638 - DNA, 646 bp, Homo sapiens
tgccctttgaaagtgcttctcttggtcacagcagttcacagggagaaacacgatgattctgacaccattcttgatattagctcctgcctgaggtaacatattgtgttacctctgaaacagggcatccgtgggtagccagcaaggtcaagtcaagattatatcatgccaccatgtcatcagaacatggctcagttctcccctatcacctgttccagtgaaatactggccaaaatggtgtgtctgtgggattctggcaaaagtgggccatgggaagaagccccaggccctgggcttttcatgccctttcttgaaccttctcttcttagacacttctctaagaaaactaccccagtgtcatagtgrtgactctgacttgttgttcctgccctcaagtagatggaaaggcccttgagggcagaaaccaggaactttccattctccaccaacacctatctgggtcttcatgggttcttaggatttccctggtagggggcagaggtatggctgtgaagtagttagaaattaagtaatcgagtcagagagaataaatctactttctgtacctgccacttcttggctaagaactttgggcaaattacttaatattgctgagcctcagtttcctcatctataaaacagggatcat

SEQ ID NO: 507639 - DNA, 610 bp, Homo sapiens
tccatctcagctcttaagaacttaaagttaaatgggaagattatcttatttgtcccagcacatgtcaatgtcagccttctttgtgggccagagtagagctcacwcaagaagtttccttcattcccgggccaggcgtggtggctcacgcctgtaatcccagcactttgggaggccaaggcaggtggatcacaagatcaggagttcgagatcagcctgaccaacatggtgaaaccccatctctactaaaaacacaaaaattagccaggcatggtggcacacacctctaatcccagctactggggaggctgaggcaggaaaatctcttgaacccgcgaagcagaggttgcagtgagctgggatcacgccactgcaccccagcctgggtgacagagtgacaattgaagtcatagggaacacacgctcataatttatcaaaggattcctctgctgttagcaacgtgaattgtcaggcagtttctggaatacgctagtgattctcaaattctacataaatgacctgaatggcctgtcaaaaatactgattctgactgcattaggcccagggccaggcccaaaattctgcatttcaaacacgcaccaggtgcagcag

SEQ ID NO: 507640 - DNA, 610 bp, Homo sapiens
tccatctcagctcttaagaacttaaagttaaatgggaagattatcttatttgtcccagcacatgtcaatgtcagccttctttgtgggccagagtagagctcacacaagaagtttccttcattcccgggccaggcgtggtggctcacgcctgtaatcccagcactttgggaggccaaggcaggtggatcacaagatcaggrgttcgagatcagcctgaccaacatggtgaaaccccatctctactaaaaacacaaaaattagccaggcatggtggcacacacctctaatcccagctactggggaggctgaggcaggaaaatctcttgaacccgcgaagcagaggttgcagtgagctgggatcacgccactgcaccccagcctgggtgacagagtgacaattgaagtcatagggaacacacgctcataatttatcaaaggattcctctgctgttagcaacgtgaattgtcaggcagtttctggaatacgctagtgattctcaaattctacataaatgacctgaatggcctgtcaaaaatactgattctgactgcattaggcccagggccaggcccaaaattctgcatttcaaacacgcaccaggtgcagcag

SEQ ID NO: 507641 - DNA, 479 bp, Homo sapiens
actatataatttatttacttaytgttagtctgtcacccctgctagaatataatctctgtccataaagaaagacatttttccaactttgatgtatctcaagcccctggaatggagcctgcctatagtaggcatcagtaaatttccctaaatgtaggcaggacacgtgtggcaagaggcacattcatccctctctccattcgcttaatatacctttatcaggcatcttctctatgtcaagcattatcctaaagatgtaaagatcataaacttcccgtctcctccagggtctggcaacctgggcagagggcaagaacttcctgcttacagtaacagtgtgagcagaaccaggagcagggtccacgctctagagcaggcacagagctgggtgtgacccccactgccccgggaatgaggctggagagacactgtgggcgccaagtctagagagcccagaccctggctgagcagatcatggctta

SEQ ID NO: 507642 - DNA, 632 bp, Homo sapiens
atcatattaatccagtcatcaagtgttagacatctagttccaagtttctgttattataagtgacaagtctaggagaatawccttatacatatggcttccctcatattttggattatttcctgaggatacattccaagaaacgggatgactgagtcaaagggtatgaatattttactggcttgggatatgtttcgccaaattgtctcccaacagccactaatcaatgtgcactgccatcagcaacatgctaatgttctgcatacagtatacccttggtgctgggtactggcatcaagaaatgtctttctattatctagtagagtaaagcattatatgttacataagtttaaattacacatgaagccaaatactttcccagatatttgtttactagatatctcctcttcggtgaattgtctgtttatgttcttggctcatttgctattgtagactcagcatttctcttcacagtccatggacactgattaataaagtcatgaaccctgatggtttgcagaactcgccacagagcttccgccttcctaaccccctgccctccaatctgctggtcccattgtcataccaagggctggagagtgggaacagtcggcctggtatcagcaacaaggggg

SEQ ID NO: 507643 - DNA, 632 bp, Homo sapiens
atcatattaatccagtcatcaagtgttagacatctagttccaagtttctgttattataagtgacaagtctaggagaataaccttatacatatggcttccctcatattttggattatttcctgaggatacattccaagaaacgggatgactgagtcaaagggtatgaatattttactggcttgggatatgtttcgccaaattgtctcccaacagccactaatcaatgtgcactgccatcagcaacatgctaatgttctgcatacagtatacccttggtgctgggtactggcatcaagaaatgtctttctattatctagtagagtaaagcattatatgttacataagtttaaattacacatgaagccaaatactttcccagatatttgtttactagatatctcctcttcggtgaattgtctgtttatgttcttggctcatttgctattgtagactcagcatttctcttcacagtccatggacactgattaataaagtcatgaaccctgatggtttgcagaactygccacagagcttccgccttcctaaccccctgccctccaatctgctggtcccattgtcataccaagggctggagagtgggaacagtcggcctggtatcagcaacaaggggg

SEQ ID NO: 507644 - DNA, 547 bp, Homo sapiens
acaccctagatgatgaatccagtgagggtcaacagcagagaggagctgcccagcagagaggagctgcccaccacaccctccaccccatcttcctgagccttctgtggaagcactggtttgctagcctctgaagggccatgggcccagcaccaggtgccctcagctctgaggccaggccgttacctgcattcaagatggacactggctagagaaagcatgtccacagggctggtcagtaggaaaggggttgtgtttctggaagggtgcatctaacccaggggttggtgagcattttcctaacccagggccaggtagtaaacatttttggctttgccagtcatgcagtctctrtcacagccactgcactctactactttagcacaaaagcagccataggcaatacatttaaaaagacgagcgtgactgcgttccaataaaattttatttataaaaaacagacagcaggctggatttgacctgtgtgttgtagtttgctaaccttgctgagtaacatcccctgaccctcactggtggggcctgtgttttt

SEQ ID NO: 507645 - DNA, 583 bp, Homo sapiens
cctgttgttccatctgtcctccagcagcttcccatacaggcagctcacttcacttcattttcaattttaatgacttctgttctttattacgccttttgtctacttttattttgttttggttattcttcttgttctttttctaacttcttgagttcatattaagttaattagcttttagtctttctaagtcaattactgaatgttttgaacttttcactttatgttactttatatwtgttaggctattaaactaatccacgttctaaactgttattgctactggaaaatggtcccgatccagaccccaaaagaggattcttggatcttgcacaagaaagaaagggtgagtccatcaactgaaagcatgtttattaagaaagtaaaggacaaagaatggctacttcataggcagggaagtcccgagggctactgattgcccatttttatggttatttcttgattatattggtatgaacaggaggcaaggaaatattggggagaaggggcggttccctggcaaagacaccaccctcaagcttggaaatccatggccctaaatttgaacaggcattcctgttttcac

SEQ ID NO: 507646 - DNA, 583 bp, Homo sapiens
cctgttgttccatctgtcctccagcagcttcccatacaggcagctcacttcacttcattttcaattttaatgacttctgttctttattacgccttttgtctacttttattttgttttggttattcttcttgttctttttctaacttcttgagttcatattaagttaattagcttttagtctttctaagtcaattactgaatgttttgaacttttcactttatgttactttatatatgttaggctattaaactaatccacgttctaaactgttattgctactggaaaatggtcccgatccagaccccaaaagaggattcttggatcttgcacaagaaagaaagggtgagtccatcaactgaaagcatgtttattaagaaagtaaaggacaaagaatggctacttcataggcagggaagtcccragggctactgattgcccatttttatggttatttcttgattatattggtatgaacaggaggcaaggaaatattggggagaaggggcggttccctggcaaagacaccaccctcaagcttggaaatccatggccctaaatttgaacaggcattcctgttttcac

SEQ ID NO: 507647 - DNA, 405 bp, Homo sapiens
ttactcttagatcaattttattaaatctggagggagatagtagattatgaggacctaggcaaggagggtataatggacagatgccttgcttgaccagcctctatttctccttcttcctaataytatttattattattatttggaaagccacttctgagaagtggaatgccactgtcagtccttgtgtttttcggtgggataaacccagtttctggggtctaagaatgggaggtgggtgggtaggtgtggcaggcatgctactcaggctggcccatgactatgttccatctctcctatcagagggcttgagtccgagaaagatatgggaccctagtcagcccaaagagtgtcagcaccggacttctatgaaagttagtgggaaagtgatattgtttccactgaggt

SEQ ID NO: 507648 - DNA, 405 bp, Homo sapiens
ttactcttagatcaattttattaaatctggagggagatagtagattatgaggacctaggcaaggagggtataatggacagatgccttgcttgaccagcctctatttctccttcttcctaatattatttattattattatttggaaagccacttctgagaagtggaatgccactgtcagtccttgtgtttttcggtgggataaacccartttctggggtctaagaatgggaggtgggtgggtaggtgtggcaggcatgctactcaggctggcccatgactatgttccatctctcctatcagagggcttgagtccgagaaagatatgggaccctagtcagcccaaagagtgtcagcaccggacttctatgaaagttagtgggaaagtgatattgtttccactgaggt

SEQ ID NO: 507649 - DNA, 405 bp, Homo sapiens
ttactcttagatcaattttattaaatctggagggagatagtagattatgaggacctaggcaaggagggtataatggacagatgccttgcttgaccagcctctatttctccttcttcctaatattatttattattattatttggaaagccacttctgagaagtggaatgccactgtcagtccttgtgtttttcggtgggataaacccagtttctggggtctaagaatgggaggtgggtgggtaggtgtggcaggcatgctactcaggctggcccatgactatgttccatctctcctatcagagggcttgagtccgagaaagataygggaccctagtcagcccaaagagtgtcagcaccggacttctatgaaagttagtgggaaagtgatattgtttccactgaggt

SEQ ID NO: 507650 - DNA, 529 bp, Homo sapiens
tatgtgtgaaactgtcactcaaatcaagacatagaacatttcagatgtattccagagatcatggtggatgggaggcaggactggattgcagctcccacttggacagacaaagcagcgtgtggaggcttgtatcatgaactttgactgcaggaataaatcaggaacactgagagaacccacagaccctcagaaagaagcggattgctcctgcaggtctcaggagacaccccaaatgctgtgggagcccaaactgcaaactgtggaagtgggaaaggggaatagtcagctcckgaacacacatcctcactggggaacctaaaggtctagatcacaggagaagattttgaccttacttggagctgagtcaatttagagagccaagtgacatacactgctagagaaagcagggcgtaaggccctgtgggctcactgggttccctagccatccatttctgccttgcctcacgggggtccttgaggagggctaccagaggcactgggaaatggtcacaaagagaaggaaacttcc

SEQ ID NO: 507651 - DNA, 529 bp, Homo sapiens
tatgtgtgaaactgtcactcaaatcaagacatagaacatttcagatgtattccagagatcatggtggatgggaggcaggactggattgcagctcccacttggacagacaaagcagcgtgtggaggcttgtatcatgaactttgactgcaggaataaatcaggaacactgagagaacccacagaccctcagaaagaagcggattgctcctgcaggtctcaggagacaccccaaatgctgtgggagcccaaactgcaaactgtggaagtgggaaaggggaatagtcagctcctgaacacacatcctcactggggaacctaaaggtctagatcacaggagaagattttgaccttacttggagctgagtcaatttagagagccaagtgacatacactgctagagaaagcagggcgwaaggccctgtgggctcactgggttccctagccatccatttctgccttgcctcacgggggtccttgaggagggctaccagaggcactgggaaatggtcacaaagagaaggaaacttcc

SEQ ID NO: 507652 - DNA, 669 bp, Homo sapiens
acctccccaaatttttaaattaccaagcggcaaaactttcacatcatagaataataaaattttgtagttgaaagaaaactttcgtgttctacagattatgatttttagaagcagaaaaacgctttgaaaagaacagcrgacatctgatcagaagatttacattgttttaccttttccatttattagctacttcatacatttataatcttaaacaaggcatttaatcactctgagtttctttcttctaatatataaagtaaaaattgcaatttctacctcccttagagagttgtagaacttttctgggttaatgttaataaaagtgattctataaatgttagttattataattattataaaagatgaaccaacccacaccacagagaggttaaataacttccagaatcataagaaatctatggaatacgtagaactaaaactcaggctgctgcctcattgcctagcaacagttctacttatgataatcacataaattttgctatttaaaaactgatattatgccatttgaatcaagggaagtttgaaaagtaggcttaatgtagagaattgtctacattgcttgtgcatcaatttctagttatgcaacaagggatcctttggagagtcccaggcctattatccctttcttttcaaagggtaggggtatga

SEQ ID NO: 507653 - DNA, 669 bp, Homo sapiens
acctccccaaatttttaaattaccaagcggcaaaactttcacatcatagaataataaaattttgtagttgaaagaaaactttcgtgttctacagattatgatttttagaagcagaaaaacgctttgaaaagaacagcagacatctgatcagaagatttacattgttttaccttttccatttattagctacttcatacatttataatcttaaacaaggcatttaatcactctgagtttctttcttctaatatataaagtaaaaattgcaatttctacctcccttagagagttgtagaacttttctgggttaatgttaataaaagtgattctataaatgttagttattataattattataaaagatgaaccaacccacaccacagagaggttaaataacttccagaatcataagaaatctatggaatacgtagaactaaaactcaggctgctgcctcattgcctagcaacagttctacttatgataatcacataaattttgctatttaaaaactgatattatgccatttgaatcaagggaagtttgaaaartaggcttaatgtagagaattgtctacattgcttgtgcatcaatttctagttatgcaacaagggatcctttggagagtcccaggcctattatccctttcttttcaaagggtaggggtatga

SEQ ID NO: 507654 - DNA, 497 bp, Homo sapiens
atgaaattaattggcctttaaattaacttgcttatccactattcattttcacacacacataaaaagcgatgctccactacctacaacaattttgttctctaggagggaccacttcacaaaagtagttgcatgatcaattctcaggatcaccagggttagcttccagacaccatctttctgactcatgcaaatgataatgtggtcatgcttgggagcccagtcagtacctgtgattgtgcttctggagttyatgaggttttgctattggctcccattcttcttacagatgtggattttgtgattattcaggccaagggcaatttgggtatgatccctgttccaggcatgacacgtgattggctctaggaaaaactgttgcagagacaaaattcttgctgttttcaaaggtagaaagctgggattgaggcactcctgaaaggctcagactggagaatttgaagactgaccagtcccttgaatgggctctggccagttat

SEQ ID NO: 507655 - DNA, 680 bp, Homo sapiens
tcacactaagaatagtatatgaatttcagttcagggcctattgactacttttcctaccccatctccttaaaatctccctctcagtcaccaagccctatctgccatagcttttgctccttttaaatatatcaatttttgatgctytagggtttttgtacttgctgttatttctgcctagtatagtctgctgtcagaagtaagcattttagtttctttttgtcattcaggactcagttcaaatgccgcctaggtggaaagccatccttgatcactcaacactatgctggagaccctgtggtgaattaaagatagcaacgcatgctttggtacctctcctttggagagttagagtttatacagcatctccttgagtctgggtgggctctgtgactgctcacaccaagagaatatggtagaagtgttgcattagtttctaggctctggccataagatgttggcaaattttactcacatttagaagcaagttgccatgtaactacaagtgtgaatccccttaactgccatactttgagaaacacaagccacatggagcaactcttaaggataaaaagccatgtgattatatagagagagacagagagagagagagaaacaccctgagagactctgaggtgctagacatgtgaatggtttttggaagtgaatcttcctgccccagc

SEQ ID NO: 507656 - DNA, 613 bp, Homo sapiens
ccaatgatgctgggattacaagcgtgagcaaccttgcctggtcccaactattttcatagctctttatctctatggaaaagtctagtaattttgtattgttggttaacacaaaagaccacaggcaagtagtcagaagccacagcatctttctccaccattccagtggcttggtgcctgtcttgtcacccttcttcatctgtaagtacctaaagaaaagttacccatctctgacagcccttctctaaacctccttagaggcagctactcattaagcccttaaaaatacaagctgactggtcaaatagaatcttgaattatttacttcaactcttttgcttcaaaaatggtacaaataaagcatcaatacatgcacattattaattctcttctgtaataatctgaggaacacattggaaattttactgtatctaaattctgttattcgtgtccatgtgaaaagaccaccaaacaggctttgtgtgagcaataaagctttttaataaactargtgcaggcagactgagtccaaaaaaggagtcagcaaagggagagcggggtggggcagttttataggatttgggtaggtagtggaaaattacagttaaagaaggtt

SEQ ID NO: 507657 - DNA, 607 bp, Homo sapiens
atctggattttggggcccttctgcttgctggtttcccctcagcagggaaggcctggattcagtcagtgaggagtgttctgtccatattccaccttgcccctgagtggccaggtactactggcttagtcagagtcatgaacctraactgttttcatagtccttgaagtaagtcagtatttcaagattctgaaaactactcaatagttataatcacaaaatcttcttccaaaatagcatgatgatcatgttgacactgttgtctttttcaatacatgtatttgacatgtgtaaattttgtgttaagagagcacttttggttttgtgaaacccactctattggagccaaaagtgttagaaacaataatgtgaattctgctgtaaaattataaatttcaatttggacaatattcgatattcaacagaaaagtgttgaaaatcactgaaggagcctctggtagaatgaacacccacattaatcttggcttcctccgatgctccagtacaatcacaatacaggaataaaaatgacataaatatttaagaacaaagaagatgggagatggcaataggaattgaggggtgtcaacaaaattttgggagatgaaaa

SEQ ID NO: 507658 - DNA, 584 bp, Homo sapiens
atagagaagtattcagagattgagtgaacaaggggaaaagcagtaagccaaaggtaaggtgatgagaggaagtcgggcatggcagcaagcaaggaggagttgctcatgggaaaacagtgaacagatgcaactggataggaaggataggaagccaaggaaagagagaaaggaacacagtgatagatcctwaccctgctgcagccagacactgcggggagaggtgcacgttggaagatgtatatgatcttccaggaggcagttctagccaacttaagaaccaacaagcgccattccagttgtcccagttataggatatcttcaggctatccagcctcctctctgctaccccattctgtaagaaactggaccccagtggagctggagagttagagctctcccccttcactagactctggaatttagaagtagtctgttgccgatccgagccgtagggttgaaaccctatagccaaagagaacccttggtattgagaaataattacaaccccctgaatcacatgtgcagccgcattctgaagtgggcagtctgtctgtccatctggcccctttctgctcaggtctctt

SEQ ID NO: 507659 - DNA, 574 bp, Homo sapiens
ctgggtgacagcaagaccgtctcttttttaaaattaaatttctttcttttcccaaaaacctggttttacagtatgggcatcaggcagcaagctcttttggcctggaaacactttttctttataaagtacatttttataayctgtttttgtttttctttgggttttttgttggtttgagacagagtctgtcacccaggctggagtgcagtggcgcgatcttggctcactgcaagctccgcctcccaggttcacaccattctcctgcctcagcctcccgagtagctaggactacaggcacccgccaccatgcccggctaattttttgtatctttagtagagacagggtttcactgtgttagccaggatggtctcgatctcctgaccttgtgatctgcccgcctcggcttctcaaagtgctgggattacaggcatgagccaccacgcccagccttctataacctgttttgttttgtgctatcagttgatgactcccttctctggctactctatgtgtttgcctgatgtcccccacatgccttcctatctgttgttttcctataaccaatgaaagggc

SEQ ID NO: 507660 - DNA, 574 bp, Homo sapiens
ctgggtgacagcaagaccgtctcttttttaaaattaaatttctttcttttcccaaaaacctggttttacagtatgggcatcaggcagcaagctcttttggcctggaaacactttttctttataaagtacatttttataatctgtttttgtttttctttgggttttttgttggtttgagacagagtctgtcacccaggctggagtgcagtggcgcgatcttggctcactgcaagctccgcctcccaggttcacaccattctcctgcctcagcctcccgagtagctaggactacaggcacccgccaccatgcccggctaattttttgtatctttagtagagacagggtttcactgtgttagccaggatggtctcgatctcctgaccttgtgatctgcccrcctcggcttctcaaagtgctgggattacaggcatgagccaccacgcccagccttctataacctgttttgttttgtgctatcagttgatgactcccttctctggctactctatgtgtttgcctgatgtcccccacatgccttcctatctgttgttttcctataaccaatgaaagggc

SEQ ID NO: 507661 - DNA, 553 bp, Homo sapiens
actgacatgcaaaagctcactctttctctttctttttctgctgttgtagtaaaccatatatagggaccaaaaattaattggaaatcctgaatcttgctctgtcgcccaggctggggtgtagtggtgcgatctcctctcactgcaagctccgcctcccgggttcacgccattctcctgcctcagcctcccatgtaactgggactacaggcgcccaccaccacacccggctaattttttgtacatttagtagagacggggtttcaccgtattagccaggatggtctcgaactcctgacctcgtgatccacccrcctcagcctcccagcacgcctgtgctgggattacaggcgtgagccaccatgctgcgctggcacagttttcttaaatccacattgccgaggcagtgggaggtccaagccaaataaggagcaggctttctctaatgtcattcccagtgcgtttcactcccagagtctacaggtgctattccggcttatggctgttgaaatatggaacagcaaaccggctgtcattcataagaattggtgccggc

SEQ ID NO: 507662 - DNA, 553 bp, Homo sapiens
actgacatgcaaaagctcactctttctctttctttttctgctgttgtagtaaaccatatatagggaccaaaaattaattggaaatcctgaatcttgctctgtcgcccaggctggggtgtagtggtgcgatctcctctcactgcaagctccgcctcccgggttcacgccattctcctgcctcagcctcccatgtaactgggactacaggcgcccaccaccacacccggctaattttttgtacatttagtagagacggggtttcaccgtattagccaggatggtctcgaactcctgacctcgtgatccacccgcctcagcctcccagcacgcctgtgctgggattacaggcrtgagccaccatgctgcgctggcacagttttcttaaatccacattgccgaggcagtgggaggtccaagccaaataaggagcaggctttctctaatgtcattcccagtgcgtttcactcccagagtctacaggtgctattccggcttatggctgttgaaatatggaacagcaaaccggctgtcattcataagaattggtgccggc

SEQ ID NO: 507663 - DNA, 569 bp, Homo sapiens
gggtctctctccctgcggtctcacatcctccaggaggctggcttgggcttgctcacgtggtagtggaagcatccccagcagcaagagggctagcccctgtgcacgagcacttccatgcctctgcttgcatmgtttgttattgccccattgaccaaagctagtcacatagctaagcccagtttcaaggaatagagagaaggaaggaagctctgaatggaaggagcagcaaagtcatgctgcagagggagtgcatacagggatgggaggaatttatagccagttttgtaatctactactgtgggattcggcataatgaattggagccacttggccagtttttagggttgaattcttatctttttttttccccagagtttacagtgactgtcaaagaaacatattgctcagtgacaaaccttgtgccaaatacccagtatgaattttgggtcacagctcacaacagggctggccccagcccctctagcgagcgtgcagtgtacatgacaggtaatgggctactcatttcctatagcagggctttcattcaagcggacacaggagtcatgggt

SEQ ID NO: 507664 - DNA, 548 bp, Homo sapiens
tacttttcatgctccttcctgccacagggccttggcacatgcttctcctatgtaggagactcctctgtccctttttcatccagttacctcctcagcattcttcagagctctgctcaaaagccatcctgcccccaccattatacactacagcacactatcaacttgtcttggttaccatcttacattccttccagtgattgcctgaagaatgctgctcttcccatctagactgtaagctctatgagggcaggaactacatttgttttttctgagggcctccctatacagtgcctggaacctaaggagtttagttaayatttattgaatgcataagtaaaagtgcccctctggcccagagctgcagcctgaagataacctggacaacttggcctcatctgggtgagggtgttgtattggtaaatgggcatcatcctaaagacttctcttgcccactggactgacatggggttggcaaccgcagcaatatagacagtggcaattatgagcttatatttctgtatagtacaatttaaatacattggattatt

SEQ ID NO: 507665 - DNA, 503 bp, Homo sapiens
agacggctctcaggacagttggtagcagctccctcctggctgcaccaggagaccagagagccgagctggctatgagtcagccccgtggcccagcagcgggataaggggattctcaagccagcctggtctgcccagcagcaggctgggtgtgtggctgcctgggagcagtggacactgggttccaaacaccttccrctggggtcttcagatgacctctgcctttatcaggtgacttatgaatctagaaagagcccgcttgactgacaagagaatgctcaggtgacatgcatagaatagttactgaagccacttgtacattctgatagcagtgactttagaaaactccagaagtggaggtgtagaaaatgttggaagagccatttccacagtgggctgctgtgcagttgagacccatgatcccagttcaccaagcactgaagagtgtggtgagcatcctgtgggcagcaggtgaggaacttggattcctcctgctgtgtgtccag

SEQ ID NO: 507666 - DNA, 588 bp, Homo sapiens
gtaacttggtcctatccacagtgcagtaaatcccgcatcagatgccattctcatcagtgattgcccrccgagggatgtgcccttggtgagcaggattcctttctggtctttggtttcactcctcctggcatcacggggctgccaaagcagaggcccttttgaaataccaggttcacggaagtcatctggggaagggaaattcgtatctaacaaatgctgctttggggcctgaagttgcagtgtggccagtccatcctcccctccaggtgtcagccactgctccctgtgcccggtggtatcagcgcacagactgagcgctggcttgtgtgccaaaaccagatccattgggttttcaggactctgaggattaggtgaccttcctgtgtgagggcacagttatcggagggttgttactatagaacttccaaggaagagactgtgttcctgctgccaagaatgcatcttgatgaaataagcatgttaccccttttgaagtaaggcacactttgtctctgacagccatcaacgtcagtgactctgtttttggagctcttggggagtaaggtgatgcataatggaagcgcttag

SEQ ID NO: 507667 - DNA, 588 bp, Homo sapiens
gtaacttggtcctatccacagtgcagtaaatcccgcatcagatgccattctcatcagtgattgcccgccgagggatgtgcccttggtgagcaggattcctttctggtctttggtttcactcctcctggcatcacggggctgccaaagcagaggcccttttgaaataccaggttcackgaagtcatctggggaagggaaattcgtatctaacaaatgctgctttggggcctgaagttgcagtgtggccagtccatcctcccctccaggtgtcagccactgctccctgtgcccggtggtatcagcgcacagactgagcgctggcttgtgtgccaaaaccagatccattgggttttcaggactctgaggattaggtgaccttcctgtgtgagggcacagttatcggagggttgttactatagaacttccaaggaagagactgtgttcctgctgccaagaatgcatcttgatgaaataagcatgttaccccttttgaagtaaggcacactttgtctctgacagccatcaacgtcagtgactctgtttttggagctcttggggagtaaggtgatgcataatggaagcgcttag

SEQ ID NO: 507668 - DNA, 588 bp, Homo sapiens
gtaacttggtcctatccacagtgcagtaaatcccgcatcagatgccattctcatcagtgattgcccgccgagggatgtgcccttggtgagcaggattcctttctggtctttggtttcactcctcctggcatcacggggctgccaaagcagaggcccttttgaaataccaggttcacggaagtcatctggggaagggaaattcgtatctaacaaatgctgctttggggcctgaagttgcagtgtggccagtccatcctcccctccaggtgtcagccactgctccctgtgcccggtggtatcagcgcacagactgagcgcyggcttgtgtgccaaaaccagatccattgggttttcaggactctgaggattaggtgaccttcctgtgtgagggcacagttatcggagggttgttactatagaacttccaaggaagagactgtgttcctgctgccaagaatgcatcttgatgaaataagcatgttaccccttttgaagtaaggcacactttgtctctgacagccatcaacgtcagtgactctgtttttggagctcttggggagtaaggtgatgcataatggaagcgcttag

SEQ ID NO: 507669 - DNA, 588 bp, Homo sapiens
gtaacttggtcctatccacagtgcagtaaatcccgcatcagatgccattctcatcagtgattgcccgccgagggatgtgcccttggtgagcaggattcctttctggtctttggtttcactcctcctggcatcacggggctgccaaagcagaggcccttttgaaataccaggttcacggaagtcatctggggaagggaaattcgtatctaacaaatgctgctttggggcctgaagttgcagtgtggccagtccatcctcccctccaggtgtcagccactgctccctgtgcccggtggtatcagcgcacagactgagcgctggcttgtgtgccaaaaccagatccattgggttttcaggactctgaggattaggtgaccttcctgtgtgagggcacagttatcggagggttgttactatagracttccaaggaagagactgtgttcctgctgccaagaatgcatcttgatgaaataagcatgttaccccttttgaagtaaggcacactttgtctctgacagccatcaacgtcagtgactctgtttttggagctcttggggagtaaggtgatgcataatggaagcgcttag

SEQ ID NO: 507670 - DNA, 592 bp, Homo sapiens
ccagctaatttttttgtatttctgtagagaccacgttggccaggctggtctcgaactcctaacctcatgtgatccgcccaccttggcctcccaaagtgctggtattacaggcgtgagccactgcgcctggcctagatatgtttgaaagaataacgaggggccagtataaaagataaactggaaacagagaaagcaagtttttttagggttgctggatgagggcaaatgcataattaaatgacgaatgtgttcattaaggcagtggtgggaagaacaaaaagaagaggacataaaagagtgattgaggtgattgacaaaagaagggacataaaagagtgattgacacttgagtatcctttgagttgggttgttcctagccatcctttccgatctyccttcctaacttaagtaggttaaggattaaggtttcttccactctagttcttgattcatgttcactggtaaataacaccacttcagactctttcaaagtgctataatattgatttatttgatcctctcaaaagaagagtacagacaaccattttagaatgactgttaagggtcttaactttaaggttcaaaggacaca

SEQ ID NO: 507671 - DNA, 679 bp, Homo sapiens
tatgaaatctgaaatgtagtggtgattattttcagttcatcactttgcatattcttctatagtaacacactaagttgtctaatttctgtaattaatctttcctaaaacacttttttatgaattcagatgtagccatcctataaaaaatgctaacaagctacaagcattttgagatccccagataaaagtagctagccatacatctgtacaccaaatctactttaattgttaaaaatagctttataaaacctgagaaaatgatttacttattggtcagttttaatatagatttgatatatactcatatttctgatgttaaatagctgtgaaaatgaggcactgatcctatggtgtctcaaatagaatacctatgtctgcatctttctttgacgaagaaatcacttgtgagatgttaacgttgtatatataactgtaaatattaaaaagaggcatatttacaattccctttttttcactcattcctattcccaggataagccatcaaagcaaaaagttggcagttcaatgttattttgtcttctayttttgtatgccctgtttaaaacaaatgtccttaattgacttgtgatagtagcaaatcaattgtagaacgtcaggaatgtctgcgaacagatggcggtgtggatctcattcctcctaggactcactcagagttaca

SEQ ID NO: 507672 - DNA, 557 bp, Homo sapiens
tctatgaaccaggaagcaggccctcacaggacactgaattggctggtgcctcgatcttggacatcccagccttcagaactgtaaaaaatttgttatttataagccactcagcatagggcattctgttttagcagcctgagtggacaaagacacttagtgactctgatttgggagaaacaaacaaaaacccttggattctgcacttaaagaggaaggaagacaatttacagagtaagaaaatttagggtgagactatcctgaagcctgaagaataaaaccaaagcaattcaaaccaagataaaccaatagatttctcaggaggccaagagatcatggaaagagaatgttcttaccttagagacaaacacaaatagctatactaagaaatctcacacccacgtgcagactgagttatctttcacatggaaaaagccaacgttcatctctactccatgtatctcttagctacctactcttgtaggtttctaacctgttcaaatatkatttatatctttatccagtactgcatctgaggatggtgacattctgacctacta

SEQ ID NO: 507673 - DNA, 484 bp, Homo sapiens
aatgcactccagcctgggcaatatagcaagaccctaactcttaaaataaataataatgaggctattttggggggaaaaaaatcaactctgaagcgaaagtgtaagattgaccataatctttttaaattgggtgaaacaaatattaaataattttgttcaataaacataaactaataatatagatgcaatttcagtcatcacatagtacttgattgactccaaagtggataaacctatatattgctattttatagatgayttgtatattttatttgatgtgaataagaaagtaatatcgtatagttgaatgagcacagaactcagcatcaaatacctgagtttatgctctgctttcattactaatagccctaagatcttaaggaacttcttagaatttcggtttcctcctctttaaaataagaataatggctgggcacagtagcttatgtctgtaatcccagcactttgggaggctgcggcagaa

SEQ ID NO: 507674 - DNA, 377 bp, Homo sapiens
tggggtcaggagttcgagaccagcctggccaacatggcaaaactacgtatctactaaaaatacaaaaattagccgggcgtggcggcatgcacctgtgatcccagctactcagraggctgaggcaggagaatcacttgaactcgagaggcggaggttgcagtgagctgagatcgtgccactgcattccagcctgggtgacagagggagactccatttcaaaaaaaaaaattaattgaaaatattctactttttaaaattgctgtcaacattgagagaaaatagatactaaatctgaaagtaatttataataatttatattcgattggaattagaccttttgagatatataaaacaagaattattcaacttcataagag

SEQ ID NO: 507675 - DNA, 623 bp, Homo sapiens
tacacaagttatgtttgaaaaataataactgtattttgttttaccaagtgctrtctacatgccaggcactgtgctcaaagtttatatgtgttatctttaacaattacagcacttctaaaaggatggtatgattagccccagtgaggttcttgaggcttagggtgaggcaataatttctgcaagacctcaggatgataagtggtgaagactaggttacaccctctgcctgggtccaaagcccttcttaccttgccattctgccactcttccacttggataggtattacaaataatttctcctgtgaacttttacaaatatcattgtatttatccacaaagtcctataatattggaaaaacatagtactctcaatttgcaatgaaggaaatcttgtcttggagagattgagcaattagctcaagcccacttggctaataaggagcagaatggggacctcactccagatggtgggcttctaattccattactcttctcagcccataacacaaccttggaaagaggaggcccaatacctgcccgttggacagaagttttaaaatgcatccccttttaggtttaaaatagggtgaccatttataatttgtcatccaaacacagaaagc

SEQ ID NO: 507676 - DNA, 623 bp, Homo sapiens
tacacaagttatgtttgaaaaataataactgtattttgttttaccaagtgctatctacatgccaggcactgtgctcaaagtttatatgtgttatctttaacaattacagcacttctaaaaggatggtatgattagccccagtgaggttcttgaggcttagggtgaggcaataatttctgcaagacctcaggatgataagtggtgaagactaggttacaccctctgcctgggtccaaagcccttcttaccttgccattctgccactcttccacttggataggtattacaaataatttctcctgtgaacttttacaaatatcattgtatttatccacaaagtcctataatattggaaaaacatagtactctcaatttgcaatgaaggaaatcttgtcttggagagattgagcaattagctcaagcccacttggctaataaggagcagaatggggacctcactccagatggtgggcttctaattccattactcttctcagcccataacacaaccttggaaagaggaggcccaatacctgcccgttggacagaagttytaaaatgcatccccttttaggtttaaaatagggtgaccatttataatttgtcatccaaacacagaaagc

SEQ ID NO: 507677 - DNA, 678 bp, Homo sapiens
cattaagcatatagccttatattctctacctgcacagttgcgtgaacaaggggatcagatcttgcttgtacattctgggaagaatacccagtgtatgatttgtagagtgtgctctgtggaacatgtgttccccgagattctctgtagtgaaggctgatgtggtggaggtcacagcattttgaaaaagctgtgtgatgtattcggttctaggagactcacagttacccacgtgggagttctgaggagtcagaaagaaatccatttattggtgtttaacctcctgtcttgcctctaagtttgatcttggccctctttttgttggatgaccacctgactatagagatagtattctgcagacaggtggccctacatctcagtttgctgggacaaccctggtttactcccattatcctggtgaaattaagagcatccatttcatagtgtgccccagtttcagtgataaattatatagtcttcctatccatagacatttacagaatgcatactggcacatgtggcttaggtttatcctcattttgtagataaggcaaacattttctgttaagggcagaaagaaaacatttttgtctttrcaagccatacaatttctattgcaattactcaattctgccattgtaccatgaaagcagtcatagataatatgtaaatgaatggacc

SEQ ID NO: 507678 - DNA, 607 bp, Homo sapiens
accttaaaatcattttataacatygcttatacatttctattgcaatatgcattcaatattttaaattgacagctttaaaataccaagccttcccatccagaaatgaaatacctccgtttacttatttgttttcccagttttgctttatagattccttctacagttcctgcaaattgtctcttaagccaattcctcaggcttttatatttgttgcttttacagaatgaatccttttatattatgtttcctaactggtgattggtatttagaaaatttttcatttttgtatatttattccctaactagtcaccttattagactcttttattgggctctaatagtttttcattatttctcttggggttttggtagataataaaatcctctgcaaataataactttatgccataattatatttcccattctgttactagaaatccctgaataaatgttaaataattttagtggtcctgagcatccttatatttttaggatatcagttgttagtttggaatagacaggctccgtcacattaaggaaatagctttctaggtcttttaaggatgacgattattctctgttcctccatcaccactttcacccacc

SEQ ID NO: 507679 - DNA, 524 bp, Homo sapiens
ttaacaacttttccaaaaacaggggttctatgtgattccgacctggcaagcatagattcacatccataaaacattttgcagcacagactatgtgccaagcctgtgccaagtgttttgcaaatattatctcattgtatccccactaccaaaaagaaaaatcatttgaattaaagttacagagacttaatacagaagcagaaacctttaaaccttgtagacaagtaagaagaccttcgaattccccaccctcaaatatagattcctgtccattcatttacttacgaatgttccttttgttcattcttttagtgtagttcagtgaattttaaactgtagtgtgcatgagatttattcaacamaacatattttatcatgggtgccataagagatttcctaaggttaatttggacaatacgcacttcccagcttaactgttgacttcagaggccaatccccgcctagaattctagtccactttgttacaacttctgatcatcacatcaaagcggggtggtgagccctgg

SEQ ID NO: 507680 - DNA, 611 bp, Homo sapiens
ctgccggagggaggctcactgttctctggttctttgacctttcagatctctcatcagtgggatctcactgggaccctgcaggtgaaggaatctgggaaacgtggcttctgggcttcatgaccctttggtataggagagcacttagggagctgtgcatcaacaagcaatatgtgacttgggtcacagaggatgtggctgcagcaaggagattagttagggggttgaatcaaaagcccaagcacgagatgttggtgccatcatcacgtcactgcccaattctccttcctctccaaggcctccaaacctgctctgaggcttggcagggaaagtgagccagactgaggacaggagaaagggctgccggaaacaaacgcaagggacacacagycctgtcccgccaggtgtgactccaggtgccaggtgtgactcctgccaggtgtggctcccggatcaggatggctgctcttcactcactggcatttgggtgagaagggcactgagatggagcagggataaccaatccagaagacagaaaccctggcttggagccctttccagccatttcctaattggatgtatgacttttctagggctgccggaacaaattacca

SEQ ID NO: 507681 - DNA, 606 bp, Homo sapiens
cacagctggggatgggggtggcaagctgaccttgtgtggtgcagcaaatctgttgctttgctatcactgatgtgcagttaggcaatgtcctttaacttgaatataccttaacataagcataataagaagacaccagagaaaaatcacgctttccaacatgaactagaaataaagttattcatmtattattattattattctccaataagacaataattgaaaccatggaagccatatatattccagagacatgtacataggctgactacatacatcatctacactttagataggccatttaaagtaaagtaaagtaaagtaaaggattctagcaatttggaggaaatgatgaacttctccatacaaaatgctcacacctctcagcttaacctgcagctttcaatttccgtatggccacttctcaccatctgcttatgttggcacagggtgggaggcaattcacttcattcagggaggcatcctacactacacttatgagcaaagacctgcaagtcaagtgaaagaaataaggagggggaaatgagcccacaatgaacacttcactgggtggcatcctatgggcagtctgcattgacaggtgtttgt

SEQ ID NO: 507682 - DNA, 507 bp, Homo sapiens
agctgttttcacttagagcctcagttccaggcttaagggtggagtttagccaagagcctagcctttctgtgtcactgggattacaggtgtgagccactgctcgggcctttccttttcttttcggttttgtgtgtgtgtgtgtgtgtgtgtgtgtgtgtgtgtgtgtgtgtgtgtgtgtttggtgtttttttttgtttgtttgtttttcagayggagtatcaccctgtcacccaggctggatggcagtggtgtgatctcagctcactgcaacctctgcctcccaggttcaagcaattctctgcctcagccccccgaagtagctgggattacaggagcctgccaccatgcccggctaattttttgtatttttagtagacatggggtttcaccatcttggccaggctggtcttgaactcctgaccttgtgatccacccacctcagcttcccaaagtgctgggattacaggcatgatccttattgcattagctatgacttcagtacaatgt

SEQ ID NO: 507683 - DNA, 507 bp, Homo sapiens
agctgttttcacttagagcctcagttccaggcttaagggtggagtttagccaagagcctagcctttctgtgtcactgggattacaggtgtgagccactgctcgggcctttccttttcttttcggttttgtgtgtgtgtgtgtgtgtgtgtgtgtgtgtgtgtgtgtgtgtgtgtgtgtttggtgtttttttttgtttgtttgtttttcagacggagtatcaccctgtcacccaggctggatggcagtggtgtgatctcagctcacygcaacctctgcctcccaggttcaagcaattctctgcctcagccccccgaagtagctgggattacaggagcctgccaccatgcccggctaattttttgtatttttagtagacatggggtttcaccatcttggccaggctggtcttgaactcctgaccttgtgatccacccacctcagcttcccaaagtgctgggattacaggcatgatccttattgcattagctatgacttcagtacaatgt

SEQ ID NO: 507684 - DNA, 605 bp, Homo sapiens
gacctcaccccttccaacccacctccactccccacaaattactctcaaaggactcacagatcccgagagaaggtcttaccagagcacagcaraaaaagtgtggaattctaaaaataccttttgttctttcctacttcattagtagagatatcattagctagaaggaaaaatctctccaaaaagcaggagcagtgtaggttaatggtgcagattcttttcgttgtgaatggaatgttttctcaggaccatcgagatatacaagacctgcacattaatatttggtgagctttccttcagatttcatgtatcattcaataaggaaatcaaactcatgtggtcaaataaggttgtaaaatattccaattgcataaatcctcacttttatttgatcagagaaaatgttcattatgctctgccttttgttaatacaaaataaaaagtataccccaggggttagaccaaggacaattttggtcaattatctttttaaaatgaatttttttttttgacattaaaaaaaaaactctaattatccttcaagccaaaccctggaatccagtgcatgcttgcctacacatttactgaagtgatatcatggcttcttc

SEQ ID NO: 507685 - DNA, 618 bp, Homo sapiens
gacctcaccccttccaacccacctccactccccacaaattactctcaaaggactcacagatcccgagagaaggtcttaccagagcacagcaaaaaaagtgtggaattctaaaaataccttttgttctttcctacttcattagtagagatatcattagctagaaggaaaaatctctccaaaaagcaggagcagtgtaggttaatggtgcagattcttttcgttgtgaatggaatgttttctcaggaccatcgagatatacaagacctgcacattaatatttggtgagctttccttcagatttcatgtatcattcaataaggaaatcaaastcatgtggtcaaataaggttgtaaaatattccaattgcataaatcctcacttttatttgatcagagaaaatgttcattatgctctgccttttgttaatacaaaataaaaagtataccccaggggttagaccaaggacaattttggtcaattatctttttaaaatgaatttttttttttgacattaaaaaaaaaactctaattatccttcaagccaaaccctggaatccagtgcatgcttgcctacacatttactgaagtgatatcatggcttcttctatgctttccacc

SEQ ID NO: 507686 - DNA, 618 bp, Homo sapiens
gacctcaccccttccaacccacctccactccccacaaattactctcaaaggactcacagatcccgagagaaggtcttaccagagcacagcaaaaaaagtgtggaattctaaaaataccttttgttctttcctacttcattagtagagatatcattagctagaaggaaaaatctctccaaaaagcaggagcagtgtaggttaatggtgcagattcttttcgttgtgaatggaatgttttctcaggaccatcgagatatacaagacctgcacattaatatttggtgagctttccttcagatttcatgtatcattcaataaggaaatcaaactcatgtggtcaaataaggttgtaaaatattccaattgcataaatcctcacttttatttgatcagagaaaatgttcaytatgctctgccttttgttaatacaaaataaaaagtataccccaggggttagaccaaggacaattttggtcaattatctttttaaaatgaatttttttttttgacattaaaaaaaaaactctaattatccttcaagccaaaccctggaatccagtgcatgcttgcctacacatttactgaagtgatatcatggcttcttctatgctttccacc

SEQ ID NO: 507687 - DNA, 605 bp, Homo sapiens
gacctcaccccttccaacccacctccactccccacaaattactctcaaaggactcacagatcccgagagaaggtcttaccagagcacagcaaaaaaagtgtggaattctaaaaataccttttgttctttcctacttcattagtagagatatcattagctagaaggaaaaatctctccaaaaagcaggagcagtgtaggttaatggtgcagattcttttcgttgtgaatggaatgttttctcaggaccatcgagatatacaagacctgcacattaatatttggtgagctttccttcagatttcatgtatcattcaataaggaaatcaaactcatgtggtcaaataaggttgtaaaatattccaattgcataaatcctcacttttatttgatcagagaaaatgttcattatgctctgccttttgttaatacaaaataaaaagtataccccaggggttagaccaaggacaattttggtcaattatctttttaaaatgaatttttttttttgrcattaaaaaaaaaactctaattatccttcaagccaaaccctggaatccagtgcatgcttgcctacacatttactgaagtgatatcatggcttcttc

SEQ ID NO: 507688 - DNA, 612 bp, Homo sapiens
ggcactgaaagcctgcctagcttcgccctacgtagctcctgggggcgacacctgacagccgtggaggcaggcagtgcctgcagacaggctggaattggctggagcctcaaatgctgctycacgttctgccctttgccttggcttgctacccacagttgtcatcctgaattttccaacagggaattcctttcctgtgtttagatatgatgctgagccttctcagaactgtcctggtagacattctttcccgggcaacggcccagaacgcatctctgtctttctaaaatggagatgggctccttgacacctagaggagcaacagagggtgtgaaggaaaaatttcagacttaacacttgaatgtggctggggagggtgatgttttgtcataatacaagtgtctcctccgctcaacatgtctccagagggcagagacacagccctgtttagcacgactgaagcagcatatccaccactgtttgttgcttgtctgcaacaagataaggaacttctcagaacataaagcaaacacactgcttccttgcttccttccctgagagtgtctttcctaacaggcagtgcacgagccgtctgcagaccacacctgaagtagc

SEQ ID NO: 507689 - DNA, 568 bp, Homo sapiens
ctgctggatgcttgattttgaggtgttaccatgctactgcctccatctgtatctgtctgggagaaaagcaatagtgaagatgagaaagaagggaggaaagagaaagggggaacagagttctgcataatgcttagtgctccaaggtcccagcataagaggcccaccctgactttatccattcttatattttagatcctaggaaccaaagatcatttaatcaaaaacgtgcctctcatagtkagggaaattacattctttttgcccagtggaaaatttacatgtttattggttatattctaggatgatatttattattcactgaaagtttcaagggcaaacaaatacactagaaattttggaaagactcaagaaacgataaaatattaccccttgacagaacaatattttataatgatattttgtctggtgggcatggctgtctgtataacatgaagattaaaccttggctggcagtgaatttttatgtattaccaaggttagaagcataaaaggcccttctaaagaaagtagtgtctgcataaagtagttcatgcacaaaatgcttgtg

SEQ ID NO: 507690 - DNA, 524 bp, Homo sapiens
acacacaaacccattggtaacggcacctcaaaagtggtagtctttcttaataaagatcaggtgtactcattttgatgtgtgtgaataaggatctcagagagaatgagtaaattggaacagcactgcagatgattctaatacatcttagaaaaatgagaaccgttrtttccttcctcagacgctatggtgaggatcttttgcctggaagctccattttccccaggctggtatgtggctaaccgtaagtttaggccaatacaagcataggcaaaatataaagaaaagaaatttaatatttgatattatttaaagttttgagatgataattattaaaaatcatagctctaaattctttacacttattttagggtatagctttgtcttcattttgaaatacactgcctgtggccagagtgatgggaacacctttatggtttttatttttcaagtggtaaagttattaattttgtccttctttaggatcacaggctcagtccagagcaaggccctgatagattctatct

SEQ ID NO: 507691 - DNA, 677 bp, Homo sapiens
gaaatgaagaaaagccacaaaagcaagtattttggaacatttttcagccaaagctggttagcaatgagaaacaataatctaaaaaaatacataattaaatagaataagaaaattactagagtagagaacaaactactcgaatagaatagaagctttaaaaaccaatcttattaggacttgtgtttagctttgtaagtaaaaatgtgcttaaggcaaaaaaaaatttaaaacaatgtatatgtatctttagaattttacttaaatataaagcatacaaatatgcatttatttgccagtcttttgctgtaaagctaaagtcttttatttgagtatgagtccactgattgcagtgtcaatcattttttctagtttcaattttttgtgaaggatgtgagaatgttttttaattgtgaaaaaatctctgaagaagtctaaatttttactattatctttactctgcattttagatttcttccttaagactagaatcagtatcaacttattttttgccaataacttttatcaagatgtcctacttaattagtgtaaaataatatcccttaaaaatttgcacatttatttcatggtgtttaaaaagtactatttaattaayttaattacataattagagcacttactattgacctaaacagataaaaaatgtgaattttttaaat

SEQ ID NO: 507692 - DNA, 640 bp, Homo sapiens
agagctaaatagttgtgacagaaaccatatgtcctgaaaagccaaaaagatttactatctggccaactacatctgtactggttcttttttttttttttttttttttttgagatggagttttgctctttctctgtaattgtggttcactgcaacctccacccacccaggttcaagctaattctcctgcctcagtctcctgagtagcggggattataggcgcctgccaccacgcctgtctaatttttgtatttttagtagagacgcggttttggcttgttggctaggctggtcttgaactcctgacctaaggtgatccacccaccttggcctcccaaagtgctaggatcacaggcgtgagccatggcacctggccaacatctgtaccagttctgatcttggcttcctcatcttccttacctatgtgttctttttgatctcatctttgaggaccttaatgaacgctactcccccagtggattctggctgtagctgtgtctcaattcctcacttccagttgtctgttgttcatgtatacttgactgtcccattggctcctcaaacccgacagatccccagtagaacacatcaacttcttycactcctgcgtacatacttctcatcttggctacacccttgggga

SEQ ID NO: 507693 - DNA, 611 bp, Homo sapiens
tgtgtttgtgcaaggagtgggttcaagagctggtagaagaagcacttatggaaacaactcgggggtcttagtttacaaaaarctcaattagagttgactgtggctgatgaaatgtacatttcacctcaggctctgttactaagggtctgaaatgaggaagctggcatcccactcgaacacacctggagtattaaattccatgttgggtcccctacttgctagaggcttactatgctcactacatgcagacactatgctaaacctttcatacacattaggctgtttaagcttcaagacaacaaatgcagcagtaactattattatcccctacttgcaagtgaggacatggaaggttagagtgtgcagtggccatctgcctattggcctggccaatatccattccatctcttcttctttgggtaactacctctccacctttatggacaggcttagttgaacaccaatcaaaccctaagctaaagggtgaaaatttgaatcaaaccgaacccatagtattactttttttaggaatttgaataatgaatggagtattataagaacataaagtaacataaagtaataacacctcaacatctcaacagtagtcctct

SEQ ID NO: 507694 - DNA, 507 bp, Homo sapiens
accttgattccatttactttttaattttcactgtccctgtcttcctttgcttgcttctgagaaagaatagccccttttccttgccaagactaacctgtgagcctgtatccatctctgcttgactccccttaggaatttccctggtgaaccatccactcttctgcctcctttgcattccattcaagctgtttttaaatacctttgagtgcctgtccatgtctagcactatgctaagatgtgtaacaggaaagacatttcttcacccttgcaatagtccagtttgttctggtccgtggagaagagattccagcgaaagggtatgatcttgaagtgtgaagttccctccagttctttgtcatgctaaggccagacacctagtgtcaatggtccgtcgtgtagcagaacatcaccaggaatttggggatacacaaaagtcyaggcatgaattggaagtagaaagagaagagctcacctggtaggcatgaagaaataaaccaggatttgtga

SEQ ID NO: 507695 - DNA, 619 bp, Homo sapiens
caatttcatccatattgttgcacataaacaataaaaattaaaccataattatctaaagatgaaaaagttcatgtgcaatttatcattttcccacatgatatgctatcagttcctagtgaaggccattgctagcctttaaagcagaagcatttcaattaagaacagaagcgtcaaccacagcttgatctaagattttgctgatctttggggaacattatctgctgcacattggtctagttatcaaatatcccatcatgccctagacattggttttcaaattctcagagctgatagaactctggaaaacccaattcttggcargattttagggcatcttaaaaggcttggcacaaatacaaatgaatatatatctacgaggaccctgtttgcttaagtcccaactgttgccttctgagacttaaggacttcacaagacccaataagaaaccacagttcttgacaagggagcaaaaaccagaagggaggtgcacaagttctgaagcaaacttccacaattccaattctaattaaccccaattttcatccagagcgtccgtgtataactcaagtcagaactgcttttctttttgtaaacaataacaagagcaaacatttgttg

SEQ ID NO: 507696 - DNA, 619 bp, Homo sapiens
caatttcatccatattgttgcacataaacaataaaaattaaaccataattatctaaagatgaaaaagttcatgtgcaatttatcattttcccacatgatatgctatcagttcctagtgaaggccattgctagcctttaaagcagaagcatttcaattaagaacagaagcgtcaaccacagcttgatctaagattttgctgatctttggggaacattatctgctgcacattggtctagttatcaaatatcccatcatgccctagacattggttttcaaattctcagagctgatagaactctggaaaacccaattcttggcaggattttagggcatcttaaaaggcttggcacaaatacaaatgaatatatatctackaggaccctgtttgcttaagtcccaactgttgccttctgagacttaaggacttcacaagacccaataagaaaccacagttcttgacaagggagcaaaaaccagaagggaggtgcacaagttctgaagcaaacttccacaattccaattctaattaaccccaattttcatccagagcgtccgtgtataactcaagtcagaactgcttttctttttgtaaacaataacaagagcaaacatttgttg

SEQ ID NO: 507697 - DNA, 579 bp, Homo sapiens
caggaatctgggctgaagcagataactagggcttctctggtgatctatgaaatccctggaataacatgttattaaatagagcaaatatggtggcctgaaacagggaacatcagttctaaaattgagtctacgagatccaggagcaaagttttttgaaagatgtgagctactcaaaggaatatggaataagaagaagaatgcaatggaattaaacatgcttgaaggttttaaaaactcaattaaaaatgccattgtaaaakaaaaaaatgttaaattctataaatttgcaataaaaatagtagagaataagaaaacaaatactaacttcatcaaactttggagtgaaaatatttacataatcagcattgtttcttttgaatatctttcccatgcgcgtactctaaatattatgaacatcatttcttcttgtaattttttcctccctctgtcatctataaatggaccctgcttaacattttatatccaagtgctagaagcattgagaattgggaagccctggaaaaccccttatttctccacagtaaggatgtactcatgagctctgctaggaaattcatt

SEQ ID NO: 507698 - DNA, 579 bp, Homo sapiens
caggaatctgggctgaagcagataactagggcttctctggtgatctatgaaatccctggaataacatgttattaaatagagcaaatatggtggcctgaaacagggaacatcagttctaaaattgagtctacgagatccaggagcaaagttttttgaaagatgtgagctactcaaaggaatatggaataagaagaagaatgcaatggaattaaacatgcttgaaggttttaaaaactcaattaaaaatgccattgtaaaagaaaaaaatgttaaattctataaatttgcaataaaaatagtagagaataagaaaacaaatactaacttcatcaaactttggagtgaaaatatttacataatcagcattgtttcttttgaatatctttcccatgygcgtactctaaatattatgaacatcatttcttcttgtaattttttcctccctctgtcatctataaatggaccctgcttaacattttatatccaagtgctagaagcattgagaattgggaagccctggaaaaccccttatttctccacagtaaggatgtactcatgagctctgctaggaaattcatt

SEQ ID NO: 507699 - DNA, 588 bp, Homo sapiens
cagtaagaaatgatggtgctttggatgagattagcagtaatgaaggatatgagggatggtctgatttgggatcaactttgaagggatcaactgtggaagaatgtgctgttgggttggatgtgaatgtcagggaaagggaagagccaaagatgcacgacttccaagatttttggcctgaacaaataggtcaataatggtattctttactaaggtgggggagactggcagcaactgagtgcagataataacatcaaaaattctatttgagatgcctattaagcaggcacctggatatagaagtttgaagtttaaaggagtctttcgacctcggtgtattgaacttgggagtcattagcatagaggtggtattccagatttcataatataccttaatattgatcaactcaagcattaagtttcacatgagtcccttcctcatatagtcaatcattgaatattaaactttgctgtgattttcttttttttttcttttttgagacggagtttcactcttgttgcccaggctggagtgcaatggcgcaatctcrgctcactgcaatctccacctcccgagttcaagctattctc

SEQ ID NO: 507700 - DNA, 643 bp, Homo sapiens
gtcttctcattgtgtcccttcatgatggacaggacaagggagatctttgggatgtcttttacaagggcacaaatcccattcattagggccccactctcatgacctcatcacctcccaaaggccccgccttcaataccatcacactggggattaggttgcaacatatggattttgaagggatacagacattcagtctatagcaccagggtacctgatatgctagtacccacagccttgcagtagcaatgactcataccccacccctaaagaagtcagtagatactgaggaagggactttgacttatatctctgtgttggccatggagcttcccatgcctttgacgccttttttagaagtagacatctattaacattttagaggatattacaaaaattatacgtattcattgaaggtttatttatacaacataataaaggtaakgatttatggtaacactaccacaagattttggcacctattttagtcttttttcaaatatttgtgtgtgtgcacacacacatatacacatacatacatatatatgaagtataaaacatatttaatataatgcataccacaatgtactgtgtatgaaattatttttaactttttattaaagaatgtggatatgtcataagagtg

SEQ ID NO: 507701 - DNA, 592 bp, Homo sapiens
agctgggacatcaaacactggttcaggcctccctctatgcggcctttcctccggcagggtrgacttcttacttggctgttgatttccaagagaaagagtcccaagcacacgaaaacagaagttgcagatcccatgaggcccagtctcaaatcacacaggatcccttcatccacactggattggcccaaacaagtctgagtgccagccaggactcaacggtccccctgtagatgggaggatagcacagaatgggcagccgtctgtaagccactacacatcaaaccctttcagggaagataattttaaatagaagtggtttcagagtcctctgcattttcagggcacccaagtgtagatgtgctttggcacttgtcactctgcactgtaactacctgcttcacttgtccacgtaagtccctgtggacttcttttttttgaggacatagatgtgtctaactgtacatccagcacctaggccagtgtgcaatagaattcaagaaatgcttattggataaatggctgaatatgtggataaaatatcggtcacaagtacatcgagaattctttgtagagttgctgcttcctggttaac

SEQ ID NO: 507702 - DNA, 565 bp, Homo sapiens
cagctgggacatcaaacactggttcaggcctccctctatgcggcctttcctccggcagggtagacttcttacttggctgttgatttccaagagaaagagtcccaagcacacgaaaacagaagttgcagatcccatgaggcccagtctcaaatcacacaggatcmcttcatccacactggattggcccaaacaagtctgagtgccagccaggactcaacggtccccctgtagatgggaggatagcacagaatgggcagccgtctgtaagccactacacatcaaaccctttcagggaagataattttaaatagaagtggtttcagagtcctctgcattttcagggcacccaagtgtagatgtgctttggcacttgtcactctgcactgtaactacctgcttcacttgtccacgtaagtccctgtggacttcttttttttgaggacatagatgtgtctaactgtacatccagcacctaggccagtgtgcaatagaattcaagaaatgcttattggataaatggctgaatatgtggataaaatatcggtcacaagtacatcgagaattc

SEQ ID NO: 507703 - DNA, 455 bp, Homo sapiens
aagggaagtagtccttggcatagacatggatgaaattgccccttgaatgcgggtacttgaaactattgcatttcgttctccggtcctgtgatgtgaatgctctgaaggttttatggttgtggaggtggggtgggggacaatcattaactcaccagcaccaagcatcaccagctcccacccgtccctggtccaagacttgagtcagcaaaatggcgccacaggacactaaagaagccttaaaaccaagataatacgaccacctccacccaatcctgatgttcgcagggctgaagttarcagagcacagaccacctttagttagatgtggctttcagccttttagggaaagactcgaacaaattttcatctattcaagagcatgctgtttgcagcactctttatggtctcctaggagcataacttggaatgtacaggaatatttgtgtcctaaaaaa

SEQ ID NO: 507704 - DNA, 455 bp, Homo sapiens
aagggaagtagtccttggcatagacatggatgaaattgccccttgaatgcgggtacttgaaactattgcatttcgttctccggtcctgtgatgtgaatgctctgaaggttttatggttgtggaggtggggtgggggacaatcattaactcaccagcaccaagcatcaccagctcccacccgtccctggtccaagacttgagtcagcaaaatggcgccacaggacactaaagaagccttaaaaccaagataatacgaccacctccacccaatcctgatgttcgcagggctgaagttaacagagcacagaccacctttagttagatgtggctttcagccttktagggaaagactcgaacaaattttcatctattcaagagcatgctgtttgcagcactctttatggtctcctaggagcataacttggaatgtacaggaatatttgtgtcctaaaaaa

SEQ ID NO: 507705 - DNA, 564 bp, Homo sapiens
gcccctgtggggattgccttggctacagaaataggaagttatacagaaaactaagcctggactgttttcatggggtttatcttcctgagaagcagagtctggatgcagttcagtggacaggatgtacattagagagcacccttggaatccacacctatgaaagasagagaggaaaggatcaggcagaagggaatccaagcctttgatgtaggtccagcagcctcagttaacccaatggtgagctctggagccaaatggcccatccgaattatgccaggtaaagagaacatggccaggcctttatatctcttcctccatcagtaactggatgtggaccaccaggaaaggacacaacctcgatctgagatggtccataaaggaatgacaactgaaggctgtctgccaacagaaactggagcggcaggtcctttcttgaaggggaatttgggaggcacatcaccgtgtacagcacttactgaaaagcaggagttttgactgaaaatctacatcagggacagttagatctcaggctcataccctccctgacctctgcagggaaagaat

SEQ ID NO: 507706 - DNA, 543 bp, Homo sapiens
taaactgaaggcaggagtcagattgttaatttcattttaactctttaatgaactagtttagggagaaaattttcatatttatataatttggatagttaacctataaatcacaaacttttagattcagggatagtatagaaagtatccaataaaaatgtttttattcactcccttaaaaataagtttctatttagtccaccataagccaactagaatmatctgtgacttgctaacagttgaatttcgcatcctttcttaggaaaacattaaatctgcttagttcagttaaaaaagtgaacatagccattttcatgcctcctgatgaaattatggccccttatatgatcccaatacttaatcactgttaaatataaatttaactgctgagggtttaagttgcaaggcttgtatttttgggtcttcaacctctcatatatttgtttcctcaaatttttctgactttgaaattgcatgagatcgattaagtcattagccacaaattaaagatttgccacaagattcttcagtcctttgtaggctaac

SEQ ID NO: 507707 - DNA, 569 bp, Homo sapiens
acacatacattatcactaataatgtgattttgcattttctgtttcttcattacgtttttgaaagatcacaaatattattatttccttcaatacaggcacaggaatgacttgataaagcaattgttaagttactaaacctacttatatttattgtgcgaaaagtggctgttaattgtttaattgtggcctgagggaaattacttggagatacatttaattttgacttatagtcacatgaaaggtgacctctagacatgtctgtagaaaatgtggaaacaaacactgaaaattattatgaacattatatttgtggggctccttttcattcagtctattagaaggttttccagcaaataaatcatctgaacagcaatataactagaggtgtagaacatagcatcgagttctgatattaaaccaacctgggagagatagagtttatattacctttctattactgyagtaacaaattactgcaaacttggtggcttaaaacaatttacatttattctcttacagttttggagatctgaattccaaaattatcttactggtttaaagtcaaggtg

SEQ ID NO: 507708 - DNA, 561 bp, Homo sapiens
ctcccacagccactgcccaagaacctactcctggaaaattctgagcctggaaacccgagctggaaacttgggctcgaaatgggcgcgctaggcgggactagccagacggggccacataccggaaggcaaaggatgctgggagagcgcggatccggaaagatcgggtcgctgtttcccggagtgacgggtttagataacggaccggatgattaccctctcaatcgcattgcccggggcgcacaaagtgtcaaaacttccggaaggggcgggtctcggatttcgccagcgcgggaggtgcgtggcttgctgcttagaaaaaaaaaaaaaaaaaaaaaaaaaaaaaagccgcttcttagcttggatcttttttcctgctcacttccatcacttaccagaaggtggcracgtttccccacgtttccaattccaagccctaaaatggacacattttttcccccgttatttctgttatttctctccagtgatccgaattaattaaaccctcaattccaagacatttcattccatcaactttggagtgtaggaagggtgcgttggttg

SEQ ID NO: 507709 - DNA, 674 bp, Homo sapiens
ataaattaaagaaacctaatcaggtggataaagaaactgtggtatatatacgatggaataccacttagccataagaaggaatgaattaatggcattcgcagcaagctagatgggattggagacgattattctasgtgaagtcactcaggaatggaaaaccaaacattgtatgttctcgctcaaaggggtagctaagctatgaggatgcaaagggcatgaggatgacacaatggactttggagactcgggaggagagggtgggaagagaatgagggataaaagactacaaattgggttcagtgtatactgctcaggtgatgggtgcaccaaaatctcacaaatcaccactaaagaacttactcatgaagccaaataccacctattccacaaaaaactatggaaagaaaaaattaaaatagataaaatagagaaattcctctaaccaaagtgaaatgacattttttcaaggaattcagtgacactggtttaggtatgtatctctggtactttccaaagctgcagtgtttctggccatgctgctgaaagtaaaactggtaggagactgcttccattactcagtgatacgttgttagtattgaaaagccctctttagaaggctgaggtctattagcagtaaactggtgcctttcaaaatcaacagccaactcagaaca

SEQ ID NO: 507710 - DNA, 674 bp, Homo sapiens
ataaattaaagaaacctaatcaggtggataaagaaactgtggtatatatacgatggaataccacttagccataagaaggaatgaattaatggcattcgcagcaagctagatgggattggagacgattattctacgtgaagtsactcaggaatggaaaaccaaacattgtatgttctcgctcaaaggggtagctaagctatgaggatgcaaagggcatgaggatgacacaatggactttggagactcgggaggagagggtgggaagagaatgagggataaaagactacaaattgggttcagtgtatactgctcaggtgatgggtgcaccaaaatctcacaaatcaccactaaagaacttactcatgaagccaaataccacctattccacaaaaaactatggaaagaaaaaattaaaatagataaaatagagaaattcctctaaccaaagtgaaatgacattttttcaaggaattcagtgacactggtttaggtatgtatctctggtactttccaaagctgcagtgtttctggccatgctgctgaaagtaaaactggtaggagactgcttccattactcagtgatacgttgttagtattgaaaagccctctttagaaggctgaggtctattagcagtaaactggtgcctttcaaaatcaacagccaactcagaaca

SEQ ID NO: 507711 - DNA, 674 bp, Homo sapiens
ataaattaaagaaacctaatcaggtggataaagaaactgtggtatatatacgatggaataccacttagccataagaaggaatgaattaatggcattcgcagcaagctagatgggattggagacgattattctacgtgaagtcactcaggaatggaaaaccaaacatygtatgttctcgctcaaaggggtagctaagctatgaggatgcaaagggcatgaggatgacacaatggactttggagactcgggaggagagggtgggaagagaatgagggataaaagactacaaattgggttcagtgtatactgctcaggtgatgggtgcaccaaaatctcacaaatcaccactaaagaacttactcatgaagccaaataccacctattccacaaaaaactatggaaagaaaaaattaaaatagataaaatagagaaattcctctaaccaaagtgaaatgacattttttcaaggaattcagtgacactggtttaggtatgtatctctggtactttccaaagctgcagtgtttctggccatgctgctgaaagtaaaactggtaggagactgcttccattactcagtgatacgttgttagtattgaaaagccctctttagaaggctgaggtctattagcagtaaactggtgcctttcaaaatcaacagccaactcagaaca

SEQ ID NO: 507712 - DNA, 674 bp, Homo sapiens
ataaattaaagaaacctaatcaggtggataaagaaactgtggtatatatacgatggaataccacttagccataagaaggaatgaattaatggcattcgcagcaagctagatgggattggagacgattattctacgtgaagtcactcaggaatggaaaaccaaacattgtatgttctcgctcaaaggggtagctaagctatgaggatgcaaagggcatgaggatgacacaatggactttggagactcgggaggagagggtgggaagagaatgagggataaaagactacaaattgggttcagtgtatactgctcaggtgatgggtgcaccaaaatctcacaaatcaccacyaaagaacttactcatgaagccaaataccacctattccacaaaaaactatggaaagaaaaaattaaaatagataaaatagagaaattcctctaaccaaagtgaaatgacattttttcaaggaattcagtgacactggtttaggtatgtatctctggtactttccaaagctgcagtgtttctggccatgctgctgaaagtaaaactggtaggagactgcttccattactcagtgatacgttgttagtattgaaaagccctctttagaaggctgaggtctattagcagtaaactggtgcctttcaaaatcaacagccaactcagaaca

SEQ ID NO: 507713 - DNA, 426 bp, Homo sapiens
agattataggtgtctggcaccacacccagctaatttttgtatttttagaagagacgggctttcattatgttggtcaggctggtcttgaactcctgaccttgtgatccacccacagcctcccaaagtgctggtattacatgtgtgagccgccgcacctggccctgatttttaaactttttaaaaacgtgtttattggttctttttgtgagacaatttmttctatgtagctcaaatttctgcatgatctggttctcccaggcaaagtactaaatagtaaaggttagacatgtctttcttcccagagacagttagggtagtaaagatagacatctccttcccttctccagagaatttgcttacaatccaagtaaataaatataagaactttctctttctccagagaggaggatggacacatcaccagca

SEQ ID NO: 507714 - DNA, 621 bp, Homo sapiens
ctcaaatgctggtttatctgcatctacatggtgaaatattgccatcatgtggctagtccgtctatcacacctgctttcctctgggagagattgtattttggggtatttttatatggtgcttgaatgtttgggttatgttatatgatacccattttatatgggcatgtatggtgtctgttggggtaattattttcataagatagaaaatatttaagcatattaattcaaaatacacattaaattaaattttctgttactgtcactcaattgggttttactttgtatcttctggagctcttagaaattttccttttcagtgggcaaattattcaagttgtaaatcttaaactctttggaagtgccctcttaagaacccagtttcttttttttttttttaatgtttgtgtctactctgaaagtcaccactagttaccaaaatgtccatttatttgtatacaatttggaaactatttctgaygcataccccattataaacaatagggggcgatatgatgtcatgtttttggtttctctatgaaagtatttttcatagtataagccctgtttatttttttcttgataacaatgcttccctaaaatgaaaagcacatttgttttatt

SEQ ID NO: 507715 - DNA, 603 bp, Homo sapiens
tacccaaataatgactccacagtgtggcaataacagaaaacagtgtgggctttggaatcacacagaactgggttagaattaagattttttgacttgaaactatgtatgcggtattcagccaattacttactctctccaaatttcattatttgcatctgtaaaagagtgataagaacacctatcccatgctgtggttcaaggattaaattagataatatacgcaacatattygctacatggtgaccacgcaaacagtgctgggatcatcctcgtcatggtcttcatcaggctttatgaaaaaaaatttctgaacctttcttttatgctcatcacgatgtatcccagtgctcctgtgtcttgcctggggctcctccacatccactatttggtctgtcaaggaaaataaaggcaagtactttgtcaagggccccgggagcctatgtgcagatacaattattttaagatgggcaggattttgaatatgctactcccttgagtcattaccttttgctgtgtaatgaaccactccaaaattaagtgatctaaaatcagaaccacttattatttttcatgagtctaacagttagctggtacctctgggca

SEQ ID NO: 507716 - DNA, 636 bp, Homo sapiens
ctggtctagggcaccagttttcaactccagttgcatattaaaatcacctgggggaaccttaaaaacataagtagtggccggtgcaaaggcttacacctgtaatcccagcattctggaaggctgaggcasgattgcttgagcccaggagttcaagaccagactgggcaacatggtgaaaccccatctatacaaaaaatacaaaaattagccaggcatcatggcacacacctgtagtcccagctacttgggaggctgaggcaggaggattgcttgagcctaggagatggaagttgcagcaagtcaagatcgtgccactgcattccagcctgggcagcggaataagacccgctcaaaaaataagcaaacaacatagtatgcctggtattttgaaacatttagatgtaattggttgtagggagtggcctgtgcatatggaattttgaaaactctccaagtggttctaacatttagccaggtctgagaactactggtccagtgctttgcaggttacaagtttcacaacccacctgtgcagtaggtgaggcaggttcgttttgtggttttctgactggagaagtgaagtccagaggagtgtggtgttgccctgtgagtgctgaagttgggatttttactcag

SEQ ID NO: 507717 - DNA, 532 bp, Homo sapiens
actttttattttctatatgctatttttactgtacttttctatgtttagatacacaaatattaaccactgtgtcacagctgcctacagaattcagtaaagtaacatgctgtataggtttgcagcctagaagcaataggctataccatacagccacacataatgacaaaatcgtctaataatgcatttctcagagcatatccttgttgttgagcaacacattactgtataatatgacctttttgcatttaaaaaaaatatcttaacctctttaactcctttttgaaataatttgagatttaattaaataaatacctagaagatagggccagtttaaggtcaagtataggaaaatgggcacggagataccaygaagtcccagttcattcttgtttcctctgattcccacctgcttgactgccctaagggtatggttcactgccggattccccttgtagcctgtggtgaagattccagccttttcccaaacccctgtcaatctaatgcccaatctattctctgtatatctggtctt

SEQ ID NO: 507718 - DNA, 641 bp, Homo sapiens
gctgcattcttgatccagcgagtgacatgagtgaagtagtgatttaggacagtctcctatccactgggtccaagcaagtgtaagttcagagacagcaatagacaaaagaatagaaatcacagataggaagaaagcttatactttaaatgatgggatcactaaaggccagctcttctcttctacccctgtcttgcatttctcttcccccaccttcccacctattcctccctcacagtctataaagacttcctagagaagatatcctccaggaaccttgaaaggaagggccacattatgactcctgagccctgggcacttctgtctttgtgggctcctccttcacttaaaaaaatawtaaaaatcatattttacaactgcatcagtgtaaggaagaatataatataatataattaatatttataattagtaattgaatggcataacaaccttaatatttctttgacctaaaattttgtttcttttccttcttctaattataaaagaaatgaaaattatttaaaacattttcatgggcctttcgaagcattgtgggcccagggcactgtgcctgttgtgcctagtgcataagtcagccctattcgaagtagggcagagtggaactgtgccttgtgggctttgcc

SEQ ID NO: 507719 - DNA, 641 bp, Homo sapiens
gctgcattcttgatccagcgagtgacatgagtgaagtagtgatttaggacagtctcctatccactgggtccaagcaagtgtaagttcagagacagcaatagacaaaagaatagaaatcacagataggaagaaagcttatactttaaatgatgggatcactaaaggccagctcttctcttctacccctgtcttgcatttctcttcccccaccttcccacctattcctccctcacagtctataaagacttcctagagaagatatcctccaggaaccttgaaaggaagggccacattatgactcctgagccctgggcacttctgtctttgtgggctcctccttcacttaaaaaaatattaaaaatcatattttacaactgcatcagtgtaaggaagaatataatataatataattaatatttataattagtaattgaatggcataacaaccttaatatttctttgacctaaaattttgtttcttttccttcttctaattataaargaaatgaaaattatttaaaacattttcatgggcctttcgaagcattgtgggcccagggcactgtgcctgttgtgcctagtgcataagtcagccctattcgaagtagggcagagtggaactgtgccttgtgggctttgcc

SEQ ID NO: 507720 - DNA, 378 bp, Homo sapiens
agtacctttatgcctaaaaattatgcttgcttgcttgcttcataatgagtctagtaaaacacaccaaaaaaacctggctccaaaagagccaattataaggaagtgctcaaataccgagcccacaatgtttgtcccgcaggaagttaccaaaggggtcaaarcacctccttcgaattcacactgctatttgaaacagatgctctccctccctcccactggcttagctgttggctactggcaaactcccctgggtcaagtccatgacctggggagccatgccaactcggaggtcctggactacctggatgacaaagaatccatccagaagattaaaatctgtgccagtaatatctgcatactgcttaagaaataaagaga

SEQ ID NO: 507721 - DNA, 501 bp, Homo sapiens
catagataaatggcacattacaaagctccataactcacattttaaaaagaattgcctttcacttactctagtcatatgataaatggacttgctgggagttctctctcccaatcacatgtcaggagagtttcctagagcaacgtactgatgaggatactaacagatacatgataggcactgcttgcctataacattgactgtaaaggaacaactctaagtagaaaaaaaataaatcctataaactttaagattgtgatatgaaaacaagcaagccatcttcttgggattyactcaatcccagctgtcacctccatgctggcccctgaaactttctttgttgagggacaggggaagaagcaaggagccatcttttgttggggaaggcactgtcgcaacctggttaaaacagactggtaattttacagataattttctaaatactaaaggagaacataaagacatactaaaaccactgagagccaaataatctaatgaacaagt

SEQ ID NO: 507722 - DNA, 514 bp, Homo sapiens
gtaagtcatctggacttgaacccaggcccgcctcactccttggcccatgctctccaccagaacagaggctgagaaccagaagataatgaacgatcatgtagggtcctagagggggcagaaaggaggggcctgggagtccaagcagaggtgcctctatgctcttgtcaaggagttcgtggcccacaactgggggggctgccctgacctraaatggtgtcaagtcttccatattttacaaaatggctccttaatgggctcctcagagggaatcagggaaggtctttgctggtggcacagatttgtttgtgtttaaactgtggttttaaaatgaaattttagaaggattgtagtggtttcttcatgcatgttcccccgagtggttgggacattgagggtggatttccttgcccatctaaaaatctctccttatggctgcctccccactcccctggcttcttgcagccctgaggcccccccgcccccagagcccacgtgggaagagcagcagacaagc

SEQ ID NO: 507723 - DNA, 661 bp, Homo sapiens
tgtggctcctccgactgccagcacggctacgtcatcaaacaggtgctcccaatcattcccggtcatatgaaaaaaccaagtcacatagatttaagtttccactcccagaatggagatatttttattaaataagttccacttaaataaaaccagtttccctagttgggtatattaaaggctgcctaggaagattccaagggcagtctaggcatggtggctcatacctgtaatcccagcactttgggaggccgaggcagacagatcatgaggtcaagagatcaagaccattctgtccaacacggtgaaaccccgtctctactaaaaatacaaaaattagctgggcgtggtggcacacacctgtaatcccagctactcaggaggctgaggcaggagaatcgcttgaatccgaaaggcggaggttgcagtgagccgagattgtgccmctgcactccagcctggcaacagagcaagactctgtctcaaaaaaaaaaaaaaagaaaaaagaagatagccaaggggcatatggctctgtaggactctgccttatattaccgtggtcagactggctgggtgcataagaatctttgtggctccctcccaacagctccccactgccccctcgaccccgcaactccattcctcttgagaagaaaggggagta

SEQ ID NO: 507724 - DNA, 617 bp, Homo sapiens
ttctaaccatagaattgtgagatgataaatttgtgttgctacatttgtcgtaatttgttatgcatcaatagaaaactaatacaaattccatatgcatattgcccacatggcatttccagtttcaaaagcaattaaaatgaagtttcaagacctaggtatatttattgaagttttgtttatctctttcctgaaaggaaaaatatctaatatatcttaaaaacatctaatggggccaggcgyggtggctcatacctgtaatcccagccctttggtaggccaaggcgggtggatcacaaagtcaggagttcaagaccagcctggccaagatggggaaaccccatctctactaaaaatacaaaaaattagccaggttggtggcaggtgcctgtaatcccagctacttgggaggctgaggcagagaattgcttgaacctgggaggtgaaggttgcagtaagccaagatcgtgccactgcactccagcctgggcgacagagcaagactctgtctcaaaacaaaaaacaaacaaacaaaaaacccaaaaaccaaataaacatctaatgatgtcagttgcctactctttctttttaaaaattatttcagagttctaggaatgatg

SEQ ID NO: 507725 - DNA, 569 bp, Homo sapiens
tcagtgagactactttaagtaataactccagtccttccacttggccagtcttgcattaattaaactctttactgcaatattacagtcttaatgaactggttttatctgtgcagcaggcaggaagaacacatcgggcaattacatttatatctgaaatgcccatgctgttttgggtgatgtcagaggaacactttartaagggaggcaatgcccattccattatcaaacagaatttatacatgatcgtgctacctggggaatgcaaggaggagatcctcacaaacagagggactcttttcccctaaaactgactctggaactatgtgaggagccactggattctacactaccctgtaagcagctcttgactgaccaaccaagagctacttggtttgaggatggcaattcaataccagggtaaatgaataccatcctgtttggaagtctgctattttgaccaaaggaggtaaaaacaaataatctcagtgggctgtattggatgcattttcctaacagtaatggaagaattgaacagtggtagaaacacttgtgtttaggattttactaac

SEQ ID NO: 507726 - DNA, 569 bp, Homo sapiens
tcagtgagactactttaagtaataactccagtccttccacttggccagtcttgcattaattaaactctttactgcaatattacagtcttaatgaactggttttatctgtgcagcaggcaggaagaacacatcgggcaattacatttatatctgaaatgcccatgctgttttgggtgatgtcagaggaacactttagtaagggaggcaatgcccattccattatcaaacagaatttatacatgatcgtgctacctggggaatgcaaggaggagatcctcacaaacagagggactcttttcccctaaaactgactctggaactatgtgaggagccactrgattctacactaccctgtaagcagctcttgactgaccaaccaagagctacttggtttgaggatggcaattcaataccagggtaaatgaataccatcctgtttggaagtctgctattttgaccaaaggaggtaaaaacaaataatctcagtgggctgtattggatgcattttcctaacagtaatggaagaattgaacagtggtagaaacacttgtgtttaggattttactaac

SEQ ID NO: 507727 - DNA, 512 bp, Homo sapiens
gagggaaatccaacattacattaacaccttgaaagacccttagagaaacagatgacattgtctctcagctcaattataacagatatctaaaaaggtaaagctatttgtttgccaagaccgctccagctttggaacctgacaagattgaagggaagcctgcaaacctgagtggactcactctgggaaacattaatacaatatagtggactagactagttattaatgatggaatgagactctaatgtggcaatatcttttgagttgtatgttcttttgatgtaaggtatctgaagaacgagggtaggctgtgatattatgaaatatatatttggttttcatcacccatttgctgacataccaatcctaaaatctttggaacgtccaaattgctatctttttgtaggctaacgtataccgacagcttcaagatgggactggtcaccagaaagrcaaaggcatgattagagagttgggactttcagtcccaccccccaatctcctgggaggggaaa

SEQ ID NO: 507728 - DNA, 523 bp, Homo sapiens
accacccaaaagtctccaaaatttgtttcatcagggaaaaatttaatcagtacmgtagtccccctttgcctgtggtttacctgcggtacagtacagtaagatttttgtaagattggcagaactctaagtacattgatgtaatttttttattagttactgtgaatgccttattatgcctaacttatgaattaaactttattattgttatgcatgtatagtggaaaacgtagtgtatataggggtcaatgctatctgagctttcagacatccactgggagtcttggaatgtattctccatggatggggggcctgctataccactatacatgcatttttatttataaatgacattcttgcacgtcttgactaataagtatattataaaatgtagataaatgcttaaattgataaacatggataaaatgaatattgatagttgttctaatgtttgttttcctgaaccacaatttgttattttgtacaacactggaaagcaccaactttatttagagcgcactattgt

SEQ ID NO: 507729 - DNA, 523 bp, Homo sapiens
accacccaaaagtctccaaaatttgtttcatcagggaaaaatttaatcagtacagtagtccccctttgcctgtggtttacctgyggtacagtacagtaagatttttgtaagattggcagaactctaagtacattgatgtaatttttttattagttactgtgaatgccttattatgcctaacttatgaattaaactttattattgttatgcatgtatagtggaaaacgtagtgtatataggggtcaatgctatctgagctttcagacatccactgggagtcttggaatgtattctccatggatggggggcctgctataccactatacatgcatttttatttataaatgacattcttgcacgtcttgactaataagtatattataaaatgtagataaatgcttaaattgataaacatggataaaatgaatattgatagttgttctaatgtttgttttcctgaaccacaatttgttattttgtacaacactggaaagcaccaactttatttagagcgcactattgt

SEQ ID NO: 507730 - DNA, 523 bp, Homo sapiens
accacccaaaagtctccaaaatttgtttcatcagggaaaaatttaatcagtacagtagtccccctttgcctgtggtttacctgcggtacagtacagtaagatttttgtaagattggcagaactctaagtacattgatgtaatttttttattagttactgtgaatgccttattatgcctaacttatgaattaaactttattattgttatgcatgtatagtggaaaacgtagtgtatataggggtcaatgctatctgagctttcagacatccactgggagtcttggaatgtattctccatggatggggggcctgctataccactatacatgcatttttatttataaatgacattcttgcacrtcttgactaataagtatattataaaatgtagataaatgcttaaattgataaacatggataaaatgaatattgatagttgttctaatgtttgttttcctgaaccacaatttgttattttgtacaacactggaaagcaccaactttatttagagcgcactattgt

SEQ ID NO: 507731 - DNA, 602 bp, Homo sapiens
tgtctatgcaggcaccataaagataaaagatctcattttaacttgaactctggtaaaggtgctattaaacagccatratattaattcataaaagaatataacaaccttttattgcattattctcccaccccattggtaaattaacatttgcagacattcaaacagatgtcttaaatatacatcattattaacatgaaaatgtggtatttttataaattaaactcagattctggagtgctcgggagagatcctgactcacaactctttttctaataagaacactcaatcttgccaccaaactaagtaatcctcccacacactgggcaggggtgtctgggttgaacttcatttgaaatgacataggattttttaaaatttttcacaaagtttcatggtttaaagattcagagcagcatttgcactgcctccaaagcttcttcttaaaggaaactgttgctctgtcatttaggaagggattgaattactgtttgctaatgttgaacccttgtaaaaataattaattgcaaaattggtttatgtttctatttgccttatatttataatctaattagttaattaaggcaagagagctaggccacatc

SEQ ID NO: 507732 - DNA, 542 bp, Homo sapiens
ttcatctctggcaaaggatgaagtcatcactagcacctgctgttatgtctcatagcacctccttctagatctgccacagcctgcccatcaaggaagagccaaatgaacaaattatatagtacgaccaaataatggactgaatgcagtgatcacaacaycattttcagtgtttaatgacacaggaaaatatacacaacataatgatcatgaaaaaaagaccccaaattgtccttttaagagctcaagtggtggacttggaccacctggccccaaatccaccttcagtatttatgactctgtgcctcagtttcctcgatgagttggggataatgatacgacccacctcataatattgttgtgaggattaaacaaggtaacacatataaaaaacacctagcccggccggcaccatggctcatgcctgcaatcccagcactttgggaggccgaggtgagctgattgcttgagcctaggagttcaagagtagccttagcaacacggcaaaaccgtgtctctacaaaaaattagacaggcgtggtggc

SEQ ID NO: 507733 - DNA, 542 bp, Homo sapiens
ttcatctctggcaaaggatgaagtcatcactagcacctgctgttatgtctcatagcacctccttctagatctgccacagcctgcccatcaaggaagagccaaatgaacaaattatatagtacgaccaaataatggactgaatgcagtgatcacaacatcattttcagtgtttaatgacacaggaaaatatacacaacataatgatcatgaaaaaaagaccccaaattgtccttttaagagctcaagtggtggacttggaccacctggccccaaatccaccttcagtatttatgactctgtgcctcagtttcctcratgagttggggataatgatacgacccacctcataatattgttgtgaggattaaacaaggtaacacatataaaaaacacctagcccggccggcaccatggctcatgcctgcaatcccagcactttgggaggccgaggtgagctgattgcttgagcctaggagttcaagagtagccttagcaacacggcaaaaccgtgtctctacaaaaaattagacaggcgtggtggc

SEQ ID NO: 507734 - DNA, 626 bp, Homo sapiens
gtacatagatactaataatcgttagatgttatttgtggactgtggttttcatttctataaaatattcttttctgcttgattttatttttggcctgatgtttttcttgtttgatagcaagacaatgacamttgatttctttgcatatgaatttctctagtatatctttgctgtctttttacttatacgtcttgagattccctttgttaaagttatgcatcttatacccaacatcaaattgtattttgctttgttagtaaatttgaaaatatttttattcagataagggactccattaagtgcattggcatgacataacgtctgttcttgtttctgacttttttttttatgatttacttaaagtcttttactgaggtctattttccttttgaaaaaacaattttaataggataatttgaatttttattgtcttcattcctttggtttctctttaattttaatactttctatagttttctactacaagtcataatgaattaataactacttctttcgtctcctggctaaaagtgggataacttgagcattaaaaagaatgagggtggaaattcttttttgtaactatataacagttatcgtgctagcaggcccatatgctatggaaaaa

SEQ ID NO: 507735 - DNA, 640 bp, Homo sapiens
gtacatagatactaataatcgttagatgttatttgtggactgtggttttcatttctataaaatattcttttctgcttgattttatttttggcctgatgtttttcttgtttgatagcaagacaatgacaattgatttctttgcatatgaatttctctagtatatctttgctgtctttttacttatacgtcttgagattccctttgttaaagttatgcatcttatacccaacatcaaattgtattttgctttgttagtaaatttgaaaatatttttattcagataagggactccattaagtgyattggcatgacataacgtctgttcttgtttctgacttttttttttatgatttacttaaagtcttttactgaggtctattttccttttgaaaaaacaattttaataggataatttgaatttttattgtcttcattcctttggtttctctttaattttaatactttctatagttttctactacaagtcataatgaattaataactacttctttcgtctcctggctaaaagtgggataacttgagcattaaaaagaatgagggtggaaattcttttttgtaactatataacagttatcgtgctagcaggcccatatgctatggaaaaatatacaagacttaa

SEQ ID NO: 507736 - DNA, 606 bp, Homo sapiens
tggatttacattcttagtaactgcacatttacataagttgctatggtgatattataaaattatttcaaatcaaaaggcttccctgaaatcacgttagatgtggaaataacattgctgaaaaccttgtgtttcaggtaagaaagtctgagtaagcagagattcttaactasaacacaatatggtaatataaacaaacaagcaacaaaaaacaaaaaaatctctactaagactagagatgttgtatagtgattaacagcattggttttagaaatccaaaactaagtgattatcatttggaactgaaatatttatatttgatgaccttctcacactccttggatttggaaaagggcattgtccttgtttcctgtttcttatccccagctcagtacaatgaaacgaggaagctccaggctgtccagcttcacaggacacaggggagaggagtctcctatactccagcttttctttcggaagcagagttttgaagttgaccttaagagtctgagtaaatggatagaagcatttttgatcccagagaggctctgctcgagttctgcatcaaatgcctttctgctctcctttttcctcttgaacaatacaaga

SEQ ID NO: 507737 - DNA, 512 bp, Homo sapiens
aatccaatgcaacaatctatatgcagaatttattayttatttgttgaactttcaaacctgctaaaagtataatacctcctttatctgttgctttgtcaaatttgaatcttatcagtgtaaccagtactactttcatttatttatataaactgtaagacttgaatgtgtctatgggttgttgtggggtaagaggtagctattagatggtattttagtgaagagatcctggaataaaatattcttgacccaagttacagccttccttcctctctgtgtgttttccagtaaaactacaagctggaaaaaaaaaaaaattcaagtatccctttaagatgggcttaaactttagaagtggaactttccatttaaccataaccttgccttacagtacaggcacaaggaggcactcctttttcctaatcccaaacattcatcttcagcctctagctttctgcctcctattgtcataacagaagagatcagagagaggaaaggagaagaaggtaactgat

SEQ ID NO: 507738 - DNA, 502 bp, Homo sapiens
tcttctgcagggtgtcatctgtaacttcagtccacaaatcacttaagttatcccagatattatggactttaaatggtctccagagaaaactatcctgatagccttcttttattgttagtacaactgtaaagaattatggtcatccccttattgaaaaatgcatgagacaagataataaaaagtgagaattatataataaatcattttgagcaggtatggaagtaataaacatagrtcaactaaaaggctagcacattgactaatggcagtatcatggctatttctatagggagcgaccagttcatctttttgctgaatgagtgccatagcagaaaacagaatcattctggcttatttttattgttgccttattattattgttttttaaatcacaacagtttaacactggcatggtaatatgagaaacccaaatctgaaatacatataaatacaaacattgttcagtgacactgcaataacttctttccattattttaatgac

SEQ ID NO: 507739 - DNA, 536 bp, Homo sapiens
ggcagaggacagagagagatacctgatggcattgtttagttcctatatctaaatatcacaaaagcccaggactctttagttacatcagtaaataaaatccctttttcttcttgagctaagtagatttgatccwttaagagtctaatttcattggtctgaaatactaggttacaaagaactggaaccaactttgtcctcccacatcccttgattctgacagcaaagtcagtcgtcttcagcaatgattggctgattttaagcattttacaaaagtgttccaggatgttgctgctgccattgttatcgttggtgtattaatatgaagctatgagtgtcataactgtgatttctaacccactaattttgacctgaccctaggcatccatacctacaggcatttgtgatctcctgattctgaagcctaggtgagtgttagagcacggagtcagctggaaaggccataaaccagactaggtgagaaagagcctgccaggaatgctgctacaagcatattgtgtgagcagctggcctcagca

SEQ ID NO: 507740 - DNA, 536 bp, Homo sapiens
ggcagaggacagagagagatacctgatggcattgtttagttcctatatctaaatatcacaaaagcccaggactctttagttacatcagtaaataaaatccctttttcttcttgagctaagtagatttgatcctttaagagtctaatttcattggtctgaaatactaggttacaaagaactggaaccaactttgtcctcccacatcccttgattctgacagcaaagtcagtcgtcttcagcaatgattggctgattttaagcattttacaaaagtgttccaggatgttgctgctgccattgttatcgttggtgtattaatatgaagctatgagtgtcataactgtgatttctaacccactaattttgacctgaccctaggcatccatacctacaggcatttgtgatctcctgattctgaagcctaggtgagtgttagagcacrgagtcagctggaaaggccataaaccagactaggtgagaaagagcctgccaggaatgctgctacaagcatattgtgtgagcagctggcctcagca

SEQ ID NO: 507741 - DNA, 502 bp, Homo sapiens
ggaaacttcttaatccaaaacatttaacatgatggttgttagaaccatcatcacatgggtcagtctggaaaataattcaagtccgcagtgaagtccatttttcaaccaacagaacagctgattcagttgctatacaaactgccctcattcacagaggatcatctggagaaggctctggaatgttagtgcaaataaatcagtccatcttaaaatttcagcacttgtttcttgattgataagcacaataattccagataaagcatgatttccagaatagatagttgaattggaagcaggagacttctttgttggcatcggcatgcttgatagagcctctccaraaaaccttgtcaggaatggacttgggatttaaagctggactgggaagcaggagacttctttgttggcattggcatgcttaatagagcctctccaaaaaaccttgtcaggaatggacttgggagttaaagctggactagaaagcagatggtaaggagccttg

SEQ ID NO: 507742 - DNA, 610 bp, Homo sapiens
aattttcttcggatattataaatggaacagaaatacattgatcaggttctaaactaaagaccattgaactgtattcacaagcgggccctggtaactatctgttcaattcttacgtttaatttaataatgaggatattaactcaattttattgacttttwtctgagccttcaaccaaccatgaaagattgggctttaatcatgtttaattccacgttaaacttgatggtaggtggacattttacttgtttttttgtgagcaaaaactgcggataaataagtttacaaggtgaattaatattagtggttacagagataatatatattgctaatgttttttagacaaaatagctaaatattgggaatgggcaaaaggtttttctatagttctgcttggaaataagattttcacatggcatttgagattgggacatcatgcatgcatgatgatcaaaaggacactagccatgacttgggaagagtctactgctgccgttgcttgattaaagacatggttcaatgcccaaatgctgctccatcattttctcagtgtttcttcctgatgaaagttgctctccgtggataaattgttagtcagatctgggaatagtt

SEQ ID NO: 507743 - DNA, 487 bp, Homo sapiens
tctcagaagtgtttggatctctaaggcaggccttaaacatgagtgaaatatcgtaaatatgaggcataatatgagcagcactccctgaagaggtcctgtacaaaatcttctcctctgttggctggtaccagctctgaaaatcccttcaagctatcagtacctttgggattggtggtggtagagtgaggagacccctgagaggaaatctgtgttctacaaaaaaaaaaaagcgaagtctaatggaaatagraaaaagagaaatacttggaaagggtgctagagaaggggaataaaaataaaagtgcccttgtaatgatgaggtctgaacatttcagaggggaaagatagcacaagtatttaactcactcaaggagcacaacaaccatctatagttacttctgccactaaggaagagggttaatttcctccaggatggatgaccttatatccagcagaacaggttactttaaatgagaaattacagggt

SEQ ID NO: 507744 - DNA, 607 bp, Homo sapiens
tttgcaggagggacgcctcagccgggttktgaaggatgagttggagtttctgccaagctgagtagcaggccctcctcctggcaaggcccagaacacaaaggtaggagaagcttgaaagaagagttagtgtggtgatgaggcgtggagtgagaatctgaagagtcttcaatgccaggtcttgagtacgtttgggttttgccctagaagccactgaagtgcttggaacttccagagcaggaaaaagacaaaacgtatttttgtattgatttgttcaaagaatggatcctccagaagcggttggttactgccagaaatataaaataattcagatccttgcctcatccttgcgaagcaccccctagtggtttagctcaaagataaatcattgatttttcaggtgtgacaagacctaatattttactaggttatagaaggatctttaaaaaaatgaatgaagtgatttggcttgtgttcatcattctagtcgttattttcaccattcattcccccgggaatgaatgagaacatgttgagtgctaagatcgtgtgctaaatttagttaaatatgtccctggagctaagtaagcgtgtgccactgtcacaccag

SEQ ID NO: 507745 - DNA, 482 bp, Homo sapiens
gatctcattatgaatggagattatatagtcttatctatgatattgaagttttaaattgacttctaataagtagaakaaatatatctgtcttgttcagttactagtatttcatatttatatattatgcatatttcacggaaatgtcctttagaagtcaattttatgtgtttttctaatatgatagaatatttttaaaaatatatcattagagatatctactagctttttcactagtgtctgcttgtatgcatgctctatttgattttggcatcacttgagtaagcatcaaaggaacatagatttaaactcaggagatcattaatgaaaactcaaacatggcttaccatgttagagtcataaaacttgtgtgcaaattacgggtacgttacttttaattcagctaagaagttagctgaggagaccaccatatagttctgccttgatagagttcgtatttcctgaagcataatgaagagcaaaca

SEQ ID NO: 507746 - DNA, 482 bp, Homo sapiens
gatctcattatgaatggagattatatagtcttatctatgatattgaagttttaaattgacttctaataagtagaataaatatatctgtcttgttcagttactagtatttcatatttatatattatgcatatttcacggaaatgtcctttagaagtcaattttatgtgtttttctaatatgatagaatatttttaaaaatatatcattagagatatctactagmtttttcactagtgtctgcttgtatgcatgctctatttgattttggcatcacttgagtaagcatcaaaggaacatagatttaaactcaggagatcattaatgaaaactcaaacatggcttaccatgttagagtcataaaacttgtgtgcaaattacgggtacgttacttttaattcagctaagaagttagctgaggagaccaccatatagttctgccttgatagagttcgtatttcctgaagcataatgaagagcaaaca

SEQ ID NO: 507747 - DNA, 631 bp, Homo sapiens
ggtccaggagccccctgaactgagtatccggtgggaggtcagatttccgcattcagaacgagagctcatacggcatccacgcgtgtctttctcaygcatatccccagcccgagtagaagaggacttctgcatctctgttagttctttctcctcctaagaaaaagcagattttaagtaacttatcatttgttcatttaattactcattctttattccttcttcattcattttccttttctccttcctttctccctctgttctctctgttttaacaggttttattcttattgtggtatggtaaggccaagatgaggaaatgactgctattgcaaagatggtttgttactcacagatccatggggactccacatgccacagggagttacctgggaaagccccagggttgggcaggaggcagagggagagggggagaactgtcaagagttttgagctggaagctattatcctcagcaaactaacacaggaacagaaaaccaaataccgcatggtgtcacttgtaagtgggagctgaacaatgagaacacatggacacagggagggaaacaacacacactggggcttgtgaggagtggggttgggggagggagagcatcaggaagaatagctaatg

SEQ ID NO: 507748 - DNA, 572 bp, Homo sapiens
ttggtgtgccattctaatgcatgagctcattttgagccaaggatagctttttggtgtagaattttgccagtcctacggtcaatgcagtactaattgtgtgtgtgactttgtgcagtggggaaaggtggggctttaaaataaaacagaaggtatgaattgcttggcatttgctgtggttcctaagtctccattccgcttgccaagattaaattgaattattcccgctgccattcagttttactctgcacaaaatacagccaacatttttgcatttctttcttccttcctccttttcttctttcyttccttccttcctttttcccttcatctatctttgttccgcttttgtttgtttttttttagatcgctgcatgctgccgcgttgggttaaccatggtagcattttaccatgagaagccatagcaagatgtgccaggtgcatgctgctggaacacctggctgaggctccaacagcattttcctatgactgagggtagggtaggtagatgactcattacaatttataaaatggggggcttagcttgggtatcatcgtggttattccaagcagt

SEQ ID NO: 507749 - DNA, 502 bp, Homo sapiens
ccagtcctacggtcaatgcagtactaattgtgtgtgtgactttgtgcagtggggaaaggtggggctttaaaataaaacagaaggtatgaattgcttggcatttgctgtggttcctaagtctccattccgcttgccaagattaaattgaattattcccgctgccattcagttttactctgcacaaaatacagccaacatttttgcatttctttcttccttcctccttttcttctttccttccttccttcctttytcccttcatctatctttgttccgcttttgtttgtttttttttagatcgctgcatgctgccgcgttgggttaaccatggtagcattttaccatgagaagccatagcaagatgtgccaggtgcatgctgctggaacacctggctgaggctccaacagcattttcctatgactgagggtagggtaggtagatgactcattacaatttataaaatggggggcttagcttgggtatcatcgtggttattccaag

SEQ ID NO: 507750 - DNA, 611 bp, Homo sapiens
gggtcagctgaatggcagggattccaggtctcagttaatgcccacaaatttctgaactttgaacataaataccctcactgcaatacatgtttttctttctctctctttctttctctttttttttttttgaaaaacttttttggagcagcacctgcatgttgtaaaaacacaaaataaaaaaaaaataaataaaagcagaccccttggttcagatatctttgtttgtgtaaatgttttggcattctttrtgaaaatcttcagattttcaagagcttaagatgacctcctctagccggctgcagcagtgtctaggtatctgtgaatgtgtaagaaattgagacagcctgcaaaatagctcacccagcttttctttaaagttccaacctttttgctggctctctttcaaactgtactgctcactttgggctgtacgttagaaccacctgagaagttctttttctttcttttttttttttgagatggagtcttcctctgtcacccaggctggagtgcagtggtgggatcttggctcactgcaacctctgtctcctggcttcacgccattctcctgcctcagccttccgagtaactaggattacaggcatccgcca

SEQ ID NO: 507751 - DNA, 380 bp, Homo sapiens
caagaatcctcatacaaattgtccagggtttccacctcgcagttttcttccagggttgctatggcatggaaagtacattgctattttgttatgtaaatgctcaacagactggctcattccagaagtgggcgtcgtgatgccagtgtcttcgtaatactatctttctttcccctttagcacccagaacttatgaaatatgactcggtttatcctgaacacatstctgtgcatcggggaggatgggagaattaattccagtttctcaattgcaaaagtgaggctggtcatggggcttggaaccacgccacggacgcatgaagcctccccgtttacatgccaaatccagagcttatgcatccgtgctcagggctctctgtggt

SEQ ID NO: 507752 - DNA, 506 bp, Homo sapiens
tggattatttactttctagaatatctcgagttcttaatctgagcagtttcgaaaccaarcccacattaattaatataaataatgactgggaaacgttgcaggactccccggaaaagaatgtataaattgatgtgtttttgtatatgcttatgtatatgcctttgtgcacgaaaggagataaatggtgtatttcacacagttccttctcctcctctaagggatattattgttcctgaatttttctgagccgccgaagcacaatagggtttagagcgttcacaccaggcagcccccactcttcagaacttcaaatctaaagatcttttaaatacacagaacttacttttgaaagctgtggcccatcccaaatgaattctaatcgtcagcctctagaatgcctggagtgagaaaacagaatattgttcttttctgtttatattatttcatactgagttaatacacttgccaagactccgaggcagcttctggcttgacaatgccttctt

SEQ ID NO: 507753 - DNA, 506 bp, Homo sapiens
ggattatttactttctagaatatctcgagttcttaatctgagcagtttcgaaaccaaacccacattaattaatataaataatgactgggaaacgttgcaggactccccggaaaagaatgtataarttgatgtgtttttgtatatgcttatgtatatgcctttgtgcacgaaaggagataaatggtgtatttcacacagttccttctcctcctctaagggatattattgttcctgaatttttctgagccgccgaagcacaatagggtttagagcgttcacaccaggcagcccccactcttcagaacttcaaatctaaagatcttttaaatacacagaacttacttttgaaagctgtggcccatcccaaatgaattctaatcgtcagcctctagaatgcctggagtgagaaaacagaatattgttcttttctgtttatattatttcatactgagttaatacacttgccaagactccgaggcagcttctggcttgacaatgccttcttt

SEQ ID NO: 507754 - DNA, 506 bp, Homo sapiens
ggattatttactttctagaatatctcgagttcttaatctgagcagtttcgaaaccaaacccacattaattaatataaataatgactgggaaacgttgcaggactccccggaaaagaatgtataaattgatgtgtttttgtatatgcttatgtatatgcctttgtgcacgaaaggagataaatggtgtatttcacacagttccttctcctcctctaagggatattattgttcctgaatttttctgagccgccgaagcacaatagggtttagagcgttcacaccaggcagcccccactcttcagaacttcaaatctaaagatcttttaaatacacagaacttacttttgaaagctgtggcccatcccaaatgaattctaatcgtcagcctctagaatgcctggagtgagaaaacagaatattgttcttttctgtttatattatttcatactgagttaayacacttgccaagactccgaggcagcttctggcttgacaatgccttcttt

SEQ ID NO: 507755 - DNA, 396 bp, Homo sapiens
cctctgagtggggctcaggacactctgagatggaagagactggagaaagccaatctgtttctccctgaaaatcatcttacttttttaacgcttcgtacctagatttggcctgggcagcccagggagactgttcragcactggatacctagactctgctgggctctagagaagtgctgggctacagcgcccagtgccctacctcttggggccagccagcctcaccaaaaaatcacgcttctggcttgctccaaactcaggaagttgctgggaagtctggctagcaacaccctcattcccagtcctggccatgcctctctgctctccctagcacagggagcatgcaggcttaaggctggaagaaaccccaagcatttggccaggaagaggcaactagt

SEQ ID NO: 507756 - DNA, 396 bp, Homo sapiens
cctctgagtggggctcaggacactctgagatggaagagactggagaaagccaatctgtttctccctgaaaatcatcttacttttttaacgcttcgtacctagatttggcctgggcagcccagggagactgttcaagcactggatacctagactctgctgggctctagagaagtgctgggctacagcgcccagtgccctacctcttggggccagccagcctcaccaaaaaatcasgcttctggcttgctccaaactcaggaagttgctgggaagtctggctagcaacaccctcattcccagtcctggccatgcctctctgctctccctagcacagggagcatgcaggcttaaggctggaagaaaccccaagcatttggccaggaagaggcaactagt

SEQ ID NO: 507757 - DNA, 614 bp, Homo sapiens
gcccagggtgctgggatcacaggcgtgagccaccgtgcrcgacctcagggtcccttctaacctgtgctgttgtcataaaccctggaggagaagcaagatctttctagcaggagcaacatcatcccaaataaagtgatagactttgatagtgttcttctattcattcaaccaacagagaacaaatgaaaagaatcaggagtctattgaggagacagaacatgagtgatttctgtgtgctgactatatttaaagacaagattagcagtaatatataaacgtaaataagaatttttttccccagccaagaaccatagattggacttcacattcaaaatgtaaattgtgcctaggaaacatcaatgcttattttaagcaactgacccttgggataaaaataaaaagtcaaaaggaaacaaacaatgttgctgagaagtgatagaatattctagtttatatctcagtcattttacagctctggcatttctgggtaacactttagaatacttccactccggttggtccataaaaagctgcctgtgtttttatgttttgaaaatacacgcagagagacccactgcatgtcctattaggcatcttatccttgagtaagcagg

SEQ ID NO: 507758 - DNA, 630 bp, Homo sapiens
tggactcgatacttctggcagacatgggatggcttttgtcagaagggtctgctggaatgagacagagatgtcttgatctgaatattaaatacaacatgctgtttatgacattatccgtttactgctaaaatacccagctacttctgtttacacattcttctgcgttgaatgggtaagatagcatctcatagatccactttacatatgaaaagaagttgtatcaaacttgctgggcatcagaaataaagggttttagagacactggcttcaaacacaagttattccatccaagattctaaacttagcaatgcaacttgcacttaattttaaaacgctggaaaaataatgataaagattgtgtgatcaagtatagcagccctgtggtgtttcctcagaatggtgtattacagaaaaggaaaaagccatatacatggagaaraaactcccgatatttaatattatcaattgctggttcctgtaaatttgcatttatggatcacattataaaagcaattactcttatggattgttcatgcagaaatgcactatgatgataatatacttttaaaagtatatttatttccagaattcaatttgtaagaggtttgagggaaaaataatactgagttt

SEQ ID NO: 507759 - DNA, 653 bp, Homo sapiens
ctgctgctttgcacatttaggagatatttgtggacctttcattaggacaatttttatggcccgagattaaaagttaaagttaagtagtaaacgtaatgaacatgtgcctttggagattccaactggtttgtattttcattctctccgttggtcatggcccattgaattttgatgatagcattaaaacaaatgcctcaaatcatttttggaaggagacaggatatgaattgacaaattaataaaataaattatacttcaaagatgctaaattatctcttctatgtaagtaggaggctctcttttcagatgtggaatttgtaggagcttgaatattctcaagagagggtatgggcaacatttgataaaagatgtaattattgggtcgtaggaaataatgattgagatagggtatccactgccctggtgggggaatcagtgaggctaggaatcactggaaaatgacattccttgagactccttcaatgggtagagtttgctttagcttttcawgtatcttactgtatgatggttgcttttgggttgaattccaccttgggttcaattcaacatgaaagttaaccttttggtgaaggaatgatccaggggaaatagtaaaatattagcctgtcctccaatacaaattgcctgtgagt

SEQ ID NO: 507760 - DNA, 598 bp, Homo sapiens
atcagagcctttgtatgtaaatgtctcatatacccctctaagaasgggagcgaatagtattttccaaacttacgtcaccacttaccatccacctgcatactttacacgtcttggaatcaaccttacagggaacacttggtcgaaaaacagtgttttctaaatttatattacagttcccactccccccccccccacttgtatcactttgtatgacagtcttcttgggaacatccattgggaaactcttcccttgcaggtgtctgttacaagtcctggttcacacagtgttgcgaaagaatagttgtatgtcacaattttctttatatagtatttattgagaaacctattctgttaatagaatgactcaaaatcagccaaccccataaatactgctcaagcatttagaaagactttctctatagaggcttcagacgtcagaaaaaaacttagagagtgactttcagatacagcaacctagtctatgttatagaacattctaaaaagagcagattttaatatctttcctcccacacttgctttgactccctcctttagtaattagataattatgtataataagcacattaattatgtgcaa

SEQ ID NO: 507761 - DNA, 598 bp, Homo sapiens
atcagagcctttgtatgtaaatgtctcatatacccctctaagaaggggagcgaatagtattttccaaacttacgtcaccacttaccatccacctgcatactttacacgtcttggaatcaaccttacagggaacacttggtcgaaaaacagtgttttctaaatttatattacagttcccactccccccscccccacttgtatcactttgtatgacagtcttcttgggaacatccattgggaaactcttcccttgcaggtgtctgttacaagtcctggttcacacagtgttgcgaaagaatagttgtatgtcacaattttctttatatagtatttattgagaaacctattctgttaatagaatgactcaaaatcagccaaccccataaatactgctcaagcatttagaaagactttctctatagaggcttcagacgtcagaaaaaaacttagagagtgactttcagatacagcaacctagtctatgttatagaacattctaaaaagagcagattttaatatctttcctcccacacttgctttgactccctcctttagtaattagataattatgtataataagcacattaattatgtgcaa

SEQ ID NO: 507762 - DNA, 572 bp, Homo sapiens
taattagtaatgctaatgtcggggtgagatgcaatagataatctaacaccagcaatgatgcccagagcatttatctttgatgctgggaatgcgttcattttctttatcttgccattactgtacctctattgggaaatttactctctcttcatagataggatcmgatccagtacatatttataaaaccacacttacatttaaatacaggcctttcccatttcacagtgtttctagctcccctttccaatacatctctctctctctttctctctctctctctctctctctcacacacacacacacacacacacacacagccaaatcagacaccaatataaactgtagagttaacattctttttccaccctcacactttttttagctccgatctgtgttcaatttctgcctgagagagtgatatattcatatatttaggtatagttagaaaaagcaaaatggtaacaatagaatcttgatgggattgatctcctgcagcaaggagcaacagaaaaaaaaaaaaatggaatcaagaacccaggtgctttttataggttaattgtgcagggttatca

SEQ ID NO: 507763 - DNA, 572 bp, Homo sapiens
taattagtaatgctaatgtcggggtgagatgcaatagataatctaacaccagcaatgatgcccagagcatttatctttgatgctgggaatgcgttcattttctttatcttgccattactgtacctctattgggaaatttactctctcttcatagataggatcagatycagtacatatttataaaaccacacttacatttaaatacaggcctttcccatttcacagtgtttctagctcccctttccaatacatctctctctctctttctctctctctctctctctctctcacacacacacacacacacacacacacagccaaatcagacaccaatataaactgtagagttaacattctttttccaccctcacactttttttagctccgatctgtgttcaatttctgcctgagagagtgatatattcatatatttaggtatagttagaaaaagcaaaatggtaacaatagaatcttgatgggattgatctcctgcagcaaggagcaacagaaaaaaaaaaaaatggaatcaagaacccaggtgctttttataggttaattgtgcagggttatca

SEQ ID NO: 507764 - DNA, 572 bp, Homo sapiens
taattagtaatgctaatgtcggggtgagatgcaatagataatctaacaccagcaatgatgcccagagcatttatctttgatgctgggaatgcgttcattttctttatcttgccattactgtacctctattgggaaatttactctctcttcatagataggatcagatccagtacatatttataaaaccacacttacatttaaatacaggcctttcccatttcacagtgtttctagctcccctttccaatacatctctctctctctttctctctctctctctctctctctcacacacacacacacacacacacacacagccaaatcagacaccaayataaactgtagagttaacattctttttccaccctcacactttttttagctccgatctgtgttcaatttctgcctgagagagtgatatattcatatatttaggtatagttagaaaaagcaaaatggtaacaatagaatcttgatgggattgatctcctgcagcaaggagcaacagaaaaaaaaaaaaatggaatcaagaacccaggtgctttttataggttaattgtgcagggttatca

SEQ ID NO: 507765 - DNA, 630 bp, Homo sapiens
agaatggagccacagccttagctgtcctcattccccagcctttaggttgctcctggttgaacctgtccagttcactaggtcttccggtccaggaactgcttctgtcactatctgggaccacctttctggggcytgttctatgttgaccgatgcatggacaaattcattttcaccaccaagttgacaccttattagaaaattgatggaaaatataaaccaaacacaaaagataaagaagcacattaagtggtgaggtaaaaatggcacaaacttctaattgtgccccagtccaccttcttgaggaagaagataattgcctatctggactgcatattcatcttctgaatatcagaacaccctaaactgcttggcattgtccatttaatcactcctagaagtcattctgacattgggtccctgggcagcgtgatgtaaagtaagacctggtttttctgtctaatttcctgattatgtggagaaacaaacacacttggaaatcagaccgaactgattgcagccctagatccatgactgccggttgtgtggcatgaataagtgaattaacagatctatgcctcagttaacttatgtgtactatgggaaaacaatagtttcctccagtggattttg

SEQ ID NO: 507766 - DNA, 528 bp, Homo sapiens
tatctctccatcttaatatacagactgtttattcattttaattgcagtggaatattcgaatttcattttcaatgtatttcttaaataatgtcattatcacaaatgaacttttatataatgacttttttttctgctttctcatctccacccctttctagactttcaycttacacacacacacacacgcacacacacacacacacacatagctttaattttagacctcttaaacatcaaatgctgttggtggatgttctgggatccagctaaccctcttatggtatataaaggctaggataagtgtggacaagaaacccctgaacttttttcaatctctctttgggtacattaattacatataactcagaaatgttttgcactgagtgtgaatatataaaaatttgaggactatatttagaatgtcatgtttctcttctcgaagagataatagttaaaatagaatcttaagaaaaaaaccaacagatagggtgtataaatcactgacttaacagggtgtttccactgaca

SEQ ID NO: 507767 - DNA, 614 bp, Homo sapiens
catgtacaaatttactctttaatttggcgctaagtctcccaatgctgaattatactcacaaccactcaytctacccacacacatactttcagcacaaaaattctttgaactcaactctaaatggtcaagggcctgaccagatgattccgtaagagaaattttatctactttcctcctggacctcaagagaagaagcactgacacaagcagggaagagcattctaatctgaattctgagagctttgcctgttagtttcctgccaggcacaagtttgagtagacagtgctgtccagcacatgcgttgtctaggtctgccggccgtggctgtcagtgggttctatggttctaaggtgagcctcctagaatggcacatttcaatgtccacacgacaataatttgtaatactaatcaaagtcttttattctatctttatagttttagaatgttctgactctcatgaaagagtatttcctctgaaaatgcatttctgggaaaatgcctaatactccaatgttactttttttttccccctaaaagttcactcagataatacacaagacctttttggactttgaacattccttagccagatgttcaacagcaaatattttct

SEQ ID NO: 507768 - DNA, 621 bp, Homo sapiens
ctctgtccttaacccacccgagctgactacgcccctgagcatgcaatggcccagcctccactcaccacgagactgcagcaaaggcacatgataggaaagtgaagaggaagaaaatccgtagggcagacgaatttaacgtcccacctgccccatggacagccaattccaaaataagttatttctgagcctgggaaggtgggaacacactaagtagatactggtgactttatctcacagaatcctcatcctgagtattaaacaagagatgctgatgatcacctcccaggaatggaatacattatcctactagagaaaaagaaaggctcagtagcatattgttaagaaaatttawaacagatgaaacaacggttcaaaaatatcactgtctagcatctccaaattctgagatacgacaaactgttttaagagtcccgtgctttgtaaaattcagaggaagagttatagaaaaacaataacttctaatactaccttaaagtgactcttctgagcacacattgtatgaggacccacaattcttagaaagagcgtgaggtaacttcctttaaatcccaggaagagaataccgctaagtctatcccctccacccccatttccaggctt

SEQ ID NO: 507769 - DNA, 633 bp, Homo sapiens
gctgcatagatgctctgtccttaacccacccgagctgactacgcccctgagcatgcaatggcccagcctccactcaccacgagactgcagcaaaggcacatgataggaaagtgaagaggaagaaaatccgtagggcagacgaatttaacgtcccacctgccccatggacagccaattccaaaataagttatttctgagcctgggaaggtgggaacacactaagtagatactggtgactttatctcacagaatcctcatcctgagtattaaacaagagatgctgatgatcacctcccaggaatggaatacattatcctactagagaaaaagaaaggctcagtagcatattgttaagaaaatttaaaacagatgaaacaacggttcaaaaatatcactgtctagcatctccaaattctgagatacgacaaactgttttaagagtcccgtgctttgtaaaattcagaggaagagttatagaaaaacaataacttctaatactaccttaaagtgactyttctgagcacacattgtatgaggacccacaattcttagaaagagcgtgaggtaacttcctttaaatcccaggaagagaataccgctaagtctatcccctccacccccatttccaggctt

SEQ ID NO: 507770 - DNA, 621 bp, Homo sapiens
ctctgtccttaacccacccgagctgactacgcccctgagcatgcaatggcccagcctccactcaccacgagactgcagcaaaggcacatgataggaaagtgaagaggaagaaaatccgtagggcagacgaatttaacgtcccacctgccccatggacagccaattccaaaataagttatttctgagcctgggaaggtgggaacacactaagtagatactggtgactttatctcacagaatcctcatcctgagtattaaacaagagatgctgatgatcacctcccaggaatggaatacattatcctactagagaaaaagaaaggctcagtagcatattgttaagaaaatttaaaacagatgaaacaacggttcaaaaatatcactgtctagcatctccaaattctgagatacgacaaactgttttaagagtcccgtgctttgtaaaattcagaggaagagttatagaaaaacaataacttctaatactaccttaaagtgactcttctgagcacacattgtatgaggacccacaattcttagaaasagcgtgaggtaacttcctttaaatcccaggaagagaataccgctaagtctatcccctccacccccatttccaggctt

SEQ ID NO: 507771 - DNA, 624 bp, Homo sapiens
ctgcacagagctaaggcatagggaagagacgtgaagttcagcatctatcgaacggaaggggccctggtaaaacacctcaagagttcaactgggattttgaagagctttgccctaaaagaaaagggaaactggaaattgacccgcccttagagaaggactgaagcccaggctacagtcagctcaaatcatgattatattaaaattacctgaccctggcctgactacctaaaacaaacaaaactaaatcctctctaggatgacaaagtgttcaaaamttacacattaatgtgcagaatttgggcaagtaactagaaacaattgaaaaataatcaaatagaaattctgagattaaaactttttttaattttaatagagattatgtctcgttatgatgcccaggctggtcttgaacatctggcatcaagcgatcctcccaccttggcctcctaaagtgctgggattacaggtgtaagccactgcacccaggttcaaatataagtttttgaactgaaaaatacaatgtatttaagttgatgtcaataataaaagaaaatctccaattgtttgaaaattaagcaatgcactcatatgagaaatcataaaggaagttagaaaatactttga

SEQ ID NO: 507772 - DNA, 531 bp, Homo sapiens
aaaaaattgaaagaaagaaaacaagaccagtaataagggaataggaattataaatattttctactgtcattgctgcccagtctgtcttacccaaaatattttcctcctagtccaaagtaataggaactttactttgtctttcaaagtagaggtaaaacatgctcattgtttagagtaactagtaattagttacacagtctatacccatcctgctccactgcctgtgtgtttctctgccacatagtgacttaacattagggttgcctctattcataacatttttttttctagagcagtgtagtaaaagaatcattacatctatggtgaatcaagaaactataactatctataactctatctatctatctatattatttctacaagctactattctaagaaaagagaatctgtcatgaaatactaagccccatktggcgacacagtgttacctgtggacaatgatgaattagtgctaatgggaatgtgggcatgagtttaattctcttgaggattccttttattccgtagttg

SEQ ID NO: 507773 - DNA, 555 bp, Homo sapiens
ctgagagtgagaaaggaacttgctttaggttgagaagatgcaaagtttgtttttgttttgttttgttttgtttggtttgagatggagtctcactctgtcacccaggctgcagtgcagtggcacaatcttggctcactgcagtctccacytcccaggttcaagcaattctctgcctcagcctcccgagtagctgggattacaggcgcccaccaccacgcccagctaatttttgtatctttagtagagacggggtttcaccatgttggtcaggctggtctcgaactcctgacctcgtgcgcctcagcctcccaaagtgctgggattacaggcatgagccactgtaccagccagatagccagatgcaaagaactgaaatggctgcagtagttgtttgtaatagaaaaacctgggaacaaccaccatgtccattaataaggaactggacagccggggtataccatttcatgctgtgacaagggatgaagtccacagaggtatgctgatctccaagctattgttaaataagaaaataaaatctcctagatctagacatcc

SEQ ID NO: 507774 - DNA, 480 bp, Homo sapiens
gatgttggggagagaaagtggccgcggttgggatgctggggtccttcctaggccctagcccagagatkctgtgggaccttgaacaagtccctgatgctcctgggcctcagtttcctcatctgtgtgagggtctctaagggtgttatgcctttggagccagacaagctcaggacctcaggcaggtgaactaatggctcagagcctcagtttcctcatcagtgaagtgggtgtgtaacgtggtgagggttggtggggttgttcagcaaagcacttagtgtgtgtgctcgatataaatgtcccttcccttccctctccctgaactctccgcccccagcagtgagggcagtgtgaagtctgccgtccccacttcccagggaggaatttgtggtccccagaggtaaagccacttgcccaagatgacacagctcagcaggcccctgaacctgaatcagagggaggcagtatgcaggagtgggcagg

SEQ ID NO: 507775 - DNA, 480 bp, Homo sapiens
gatgttggggagagaaagtggccgcggttgggatgctggggtccttcctaggccctagcccagagattctgtgggaccttgracaagtccctgatgctcctgggcctcagtttcctcatctgtgtgagggtctctaagggtgttatgcctttggagccagacaagctcaggacctcaggcaggtgaactaatggctcagagcctcagtttcctcatcagtgaagtgggtgtgtaacgtggtgagggttggtggggttgttcagcaaagcacttagtgtgtgtgctcgatataaatgtcccttcccttccctctccctgaactctccgcccccagcagtgagggcagtgtgaagtctgccgtccccacttcccagggaggaatttgtggtccccagaggtaaagccacttgcccaagatgacacagctcagcaggcccctgaacctgaatcagagggaggcagtatgcaggagtgggcagg

SEQ ID NO: 507776 - DNA, 480 bp, Homo sapiens
gatgttggggagagaaagtggccgcggttgggatgctggggtccttcctaggccctagcccagagattctgtgggaccttgaacaagtccctgatgctcctgggcctcagtttcctcatctgtgtgagggtctctaagggtgttatgcctttggagccagacaagctcaggacctcaggcaggtgaactaatggctcagagcctcagtttcctcatcagtgaagtgggtgtgtaacgtggtgagrgttggtggggttgttcagcaaagcacttagtgtgtgtgctcgatataaatgtcccttcccttccctctccctgaactctccgcccccagcagtgagggcagtgtgaagtctgccgtccccacttcccagggaggaatttgtggtccccagaggtaaagccacttgcccaagatgacacagctcagcaggcccctgaacctgaatcagagggaggcagtatgcaggagtgggcagg

SEQ ID NO: 507777 - DNA, 529 bp, Homo sapiens
gactgcctcaggcccagtcccaggtctgccactcatcactgcgggactttaggcaaggtgcatcacctcttggcgcctcagttctctaatcagtaaaatggggataatactagcctcttagggtggttatggagatcaaacaggttcatgcctggcacatagccaatgctatgttagtgttagcttttaaaaaaaagaggcactatagggaagtgatgaagagcatggactctggagccaaaccattggggttcaaatcatgctaacactgaccccgagcaagttatggaacctctttgtgcttctgcttyttccatctgcaaaatggggatagtggcagcacttacctcaatgggttggtgtgagattaaatgaatttttatatgcaaagggcttgaaataacgcctggcaacaccaaaggccacctacgaggggtttaccaatcatcattctcatcgtcattctatttagctctctggctaatcccaaatcccaggctagttccaccacacccctcagcctctcact

SEQ ID NO: 507778 - DNA, 453 bp, Homo sapiens
agccccacattaggtgagattcaggcccaggcagcagccgcaggcacaggaaaggagtgtggtggaaaaacactgagtacacgtggctcgtgtaacaccccgttttctggaagttggggaaaggcttttgtcgggtttgggggcagatgcctgggtgtagctctctgaggactagggccttccctcagccctggggcctcaccctagcaccaccctgacaggacagccccycccctggcctggcctgcagagtctaagccctgtgtcgcaccaggcagctcttggagcaggcagcccaactaggagacacagagctctgcccccctctggctttgtgacccaggcccagggcaaattctctttcagagcctctgtttttctcatctgtaaaatgggtaagaaagatctcttttgaaagcatctctgagacaatgggtataaagccccaaacct

SEQ ID NO: 507779 - DNA, 533 bp, Homo sapiens
cccgaggaacgctgagtgggagcaccgtgaaatactgataccataaacctggaataactaaacttgccatcctgtgcttcagccagccccacattaggtgagattcaggcccaggcagcagccgcaggcacaggaaaggagtgtggtggaaaaacactgagtacacgtggctcgtgtaacaccccgttttctggaagttggggaaaggcttttgtcgggtttgggggcagatgcctgggtgtagctctctgaggactagggccttccctcagccctggggcctcaccctagcaccaccctgacaggacagcccctyccctggcctggcctgcagagtctaagccctgtgtcgcaccaggcagctcttggagcaggcagcccaactaggagacacagagctctgcccccctctggctttgtgacccaggcccagggcaaattctctttcagagcctctgtttttctcatctgtaaaatgggtaagaaagatctcttttgaaagcatctctgagacaatgggtataaagccccaa

SEQ ID NO: 507780 - DNA, 563 bp, Homo sapiens
cgtgggaccctgcacgaatgactgcactgccttatctcccaacaggaacacgccccaaccccaattgtgcttctccagatatctgcggctgaaggcgcctgaagagcagcaccacacatgagccctcaccggcaccagggatcccgtctagcctcatgcagaacaaccacccacctccacaagaggttgttttttggggggttggggtgggggaggtgtccctctgggagtctgggttttagaaaacaatacccaatataggagaaatggatgcccagaggacagaggatgaagatgagcccagatgaaagaggactatcgcaaggggtaagtctctccacctccctcccagtcacacagggcccttggctttgagcacatgcccatccccctaaaagctggttcccactctttaactccagaacctggggaacactgcagctttaactaagccctacccaggggctcacacttaaattgtcagggggtgrggaggggggcagagacaagaacaccacagggtgcctgtccctgccttcgctaagccccttccaggaggggca

SEQ ID NO: 507781 - DNA, 294 bp, Homo sapiens
gagcagagagcccacagcccaccccgaaaagggygtgagggggagcaggaggctccctccttacctccctcttctcagctggttcccacctcccacccgctctgccttagaatgaaaagtggggcaagaggaggtgagaagcccgggctgaacgcagacaaaggggaggcccctaaagcgttcctgggcgctcccggtccccaactcccttccttccactctccctactccccatctccttttcactgggcaggagctggaaaggggcgatgcttgtgtgtggtggggagctgc

SEQ ID NO: 507782 - DNA, 490 bp, Homo sapiens
acttaggataataaatccccaggcttggccataaacagcagagcattgtatagtattctacaatcatttcatgtttatttgtcctgactttgtatctagttaggtastgccaatgaacccagaccacagtgacgttcatggataaactttgctagaggacttagttttcatgtgtataccagcaactagaactgtttacagatagttctattatagtacttctcaaactttttggtctcaggaccctaaaaaattgataatcccaaaaagctttcaattactagcttaatctgatatatactgttagaaattgaaactgagaaattaaaaaatacttattaatccattaaaatataatagtaataaattcattagatcttggcaaaaacatttataaaaacaatgttttccaaaacagaagaaattttagtgaaaattgttttacagttttgtaaatctctttaatttcaattctctttgcacacctttt

SEQ ID NO: 507783 - DNA, 546 bp, Homo sapiens
ctggtgggcgtccagaaggatccttgtttgggcaaggctctttgagaaaggagaatctgggttgccagggattcccacatgtggtcaccagctccccacgcagaccagctcacgatttcccagttacaccgggcaggtgggaaaccgttctgctttctgtggaaaagattctaacttggttccctgccatccctgaatacaaacgggttggtttttcttttttsagcttccaacccttgcagctttccaaaaataaatcaaaccagccatcagggcaccgaaataatactactgctaataagcagcttcgcctagacttagataaacaacacttctgaggtaaactttgccccggaggtctggagacacttttttaatgtaacctgcttactaataattactagacttcagtgcattaaccctggaaatagattttaatagccaccccttaaaacaaaagacatgaaaagataataagaaaaaagtgccgcaactattatagaaaaacacttggcagcctgcttcagcccaagctgaggccacctc

SEQ ID NO: 507784 - DNA, 566 bp, Homo sapiens
gctgctagcaatatccctttgccctctgtaactagggaaataaaactcactaagaccaacrtaaaatgatctctcttcagtaaaaactggtaggtaactttagtcactctgtcctctctgcctcctcaacattttgtgtataatcttattacggcgctaatatcatttatctttaattattcaaattttgcaagctgaatctctaaccatccctttttcctgacaactccaactcctttaaatcacctgctttctgattatagacctggtatagagcaaagcgtcagtaaaatgtgtttaataaagtacaagttaaaagaaacaagagcacacaataagaaatgatgcaattattcataccagtttattgtaggtattgtgtttcaaaaaatttatagcataaataacttttcatgtcataaaataacttagtagaatttataataaaactttgagaatttaatatctcatcaaaatacaataaaatatggttttcaaatatgattaaccctttcggcttttcttttacttgagggcatataaaccaaaaatacccaaactatggc

SEQ ID NO: 507785 - DNA, 608 bp, Homo sapiens
gctgctagcaatatccctttgccctctgtaactagggaaataaaactcactaagaccaacgtaaaatgatctctcttcagtaaaaactggtaggtaactttagtcactctgtcctctctgcctcctcaacattttgtgtataatcttattacggcgctaatatcatttatctttaattattcaaattttgcaagctgaatctctaaccatccctttttcctgacaactccaactcctttaaatcacctgctttctgattatagacctggtatasagcaaagcgtcagtaaaatgtgtttaataaagtacaagttaaaagaaacaagagcacacaataagaaatgatgcaattattcataccagtttattgtaggtattgtgtttcaaaaaatttatagcataaataacttttcatgtcataaaataacttagtagaatttataataaaactttgagaatttaatatctcatcaaaatacaataaaatatggttttcaaatatgattaaccctttcggcttttcttttacttgagggcatataaaccaaaaatacccaaactatggctgcacacttaaactttaacatatttggtttattttaatgtaa

SEQ ID NO: 507786 - DNA, 580 bp, Homo sapiens
taagggtaatgagaatgcccacagctatatgccaggaagacaatcagggctaaaaatttaaaaaataataaataaagtgatgattgaatgaaggaatagagatggagaacttattagggtatttaaagccagcagctgcaacagaaaaccttaaactctcaggtggtttaacttaataaaagtttgtttttcactcacagcaagaccagttctggtcatgagacctttctctacctcgaggtttgtctttataaagcaagagtttgcattgatgccaaagaaggggaggagaggacaggggatggaggttttgacaagggtctgacttggcagtggcctgcatcccttctcctcacacgtcattggccaaaatctaggcacrtggcctcaacttaagagggagggtggagaaaaaatctgtgcctgagtgcccaggaaagaggaaaataacacaagagtgggcaaacccatagcattatctctgccacatggaacatgccaccacagtgttttgcaattaggaatgcattataaacccacataaaggttaatatatacatggggatggggtggagcattt

SEQ ID NO: 507787 - DNA, 499 bp, Homo sapiens
tcacatggctgcgttcatcatygagcttggctaggtttccagttaccaagaaggcctcactcacgtatctgacacttcatgtcttgggtagctgaaattgccgggggctggctgggtcttcccctcttccttcttagtctctcataaaaattggacccttttctccatgtggcctttgtccatgtggcctttctctcttaacaggtttttcagacttcctgacatggcaactggcttcaaagagagcggaaatggaagttgccagcgttcttaagacgtaagccagaacgagcatgtcatcacttccaattcattcttttgttgaaagccaccacaggccagccaaggctcaacaggaggggaaatagactccaacactcagtgggaagaaagggcatttgcatattgggatggaggaattcatggccatatttgcagacaactcatctctaaccctcagtttccccatctgtaaaatgggagataataataatagcta

SEQ ID NO: 507788 - DNA, 657 bp, Homo sapiens
  misc_feature (1)...(657): n = A,T,C or G
cgctgaggagggtgagtcttccctaacccatcaggaggccccagctcagactccagagttccctaatgtagttgtagctcaacctccagagcattcacacntgactcaagccacagttcaacctttggatctggggtttaccatcactccagaatccawgacagaggttgaactttctccaaccatgaaggagaccccaactcagcctcctaagaaagttgtaccccaacttcgagtatatcaaggggtaacaaatccaacaccaggtcaggatcaagctcagcatccagtgtcacccagcgttacagttcaacttttggacctgggacttaccatcactccagaacctactacggaggttggacattctacacccccgaagaggactatagtttctccaaagcatcctgaggtgacacttccacatccagaccaggttcagactcagcattcacacctgactcgagccacagttcaacctttggacctggggtttaccatcactccaaaatccatgacagaggttgaaccttctacagccctgatgactacagctcctcctccaggacaccctgaggtgacacttccaccttcagacaagggtcaggctcagcattcacacctgactcaagccaccgttcaacctctggacctgga

SEQ ID NO: 507789 - DNA, 657 bp, Homo sapiens
  misc_feature (1)...(657): n = A,T,C or G
cgctgaggagggtgagtcttccctaacccatcaggaggccccagctcagactccagagttccctaatgtagttgtagctcaacctccagagcattcacacntgactcaagccacagttcaacctttggatctggggtttaccatcactccagaatccaagacagaggttgaactttctccaaccatgaaggagaccccaactcagcctcctaagaaagttgtaccccaacttcgagtatatcaaggggtaacaaatccaacaccaggtcaggatcaagctcagcatccagtgtcacccagcgttacagttcaacttttggacctgggacttaccatcactccagaaccyactacggaggttggacattctacacccccgaagaggactatagtttctccaaagcatcctgaggtgacacttccacatccagaccaggttcagactcagcattcacacctgactcgagccacagttcaacctttggacctggggtttaccatcactccaaaatccatgacagaggttgaaccttctacagccctgatgactacagctcctcctccaggacaccctgaggtgacacttccaccttcagacaagggtcaggctcagcattcacacctgactcaagccaccgttcaacctctggacctgga

SEQ ID NO: 507790 - DNA, 509 bp, Homo sapiens
ttcctttcatttaaaaattccatgtcctttctccattttgctccgttctctagctttatccatcattttrgaaaacaggtttctctgacagaaaacaaacagatggcaactccatcatcctaaaactggctgtgacggggctctaaaattaagtgttcatggggctcccagaaagcctaggcttgcatggtatgtgtggctgacctgtgagttacgattggaggggcaagagaaggctttctatacacagatggctccccatacagtgtcacagtctctgaagtgttgccttttgaggtttgttttcttaggtcaggcactgctgtcctgtcagtattttcctaaattgccaatactcctgggaagagtaatacgttaggttactaatactgaaagaacttgggaaagagaggagggggtgcagcgggaagggaataaaaggggctctgaagaccacctttgtgtgcttcacagtgacatcttctgcaagaggggaagtgcaggtcttc

SEQ ID NO: 507791 - DNA, 572 bp, Homo sapiens
catcctgagtagctggtactacaggcgtgcaycaccgtgcccagctaatttttgtgtttttagtagagacggggtttcaccatgttggccaggctggtcttgaacccatgacctcaggtgatccacccaccttggcctcccaaagtgctgggattacaggcgtgagctaccgcacctggccttgtacttctgtactaaatgactaaaggctgccactgtcatagcagtgctgaggctatgttgcatatccctcttggatgctgcagtggaaaatagaattttctggtaaggcatggaaaggtttagttgagtttccctttgaagacaagactcactactcattggccaaagtgtacctaaaattgttgaatttttcctgggagccatttctaattgacacttgtattttctgcgtgttgcttctatatctctgcagagaacaattatttggcttgcttttcttgtcatgttacagaattcgattaaattacaatgggaaacatttttgaaaagctctttaaaagtctacttgggaaaaaaaagatgcggattcttatattgagtttggatac

SEQ ID NO: 507792 - DNA, 384 bp, Homo sapiens
ctggaattacaggcaagcactgccgtgccctgctaatgagaaattgtaattctcatagaggtcctcccagaggagtagaagaaggttgaaaggcacttctgtatttagtcttctcacaattaaggctgggcccagtggctcacaccagcactttgggaggccaaggcaggcggatcacttgagatcaggagttcaagaccagcctggcaaacatggtgaaactcccatctctactaaaaacacaaaaaatagccaggcgtggtggtgcgtgcctatagtcccagctatttgggagactgaggaaggaggattacctgagcttgggaagaggacgttgcagtgagccaagatcacrccactgcactccagcctggtcaatggagc

SEQ ID NO: 507793 - DNA, 257 bp, Homo sapiens
agatttctgatctaatccacctagggtggggcctggatgctggtgttgttaaaaagttccccaggtgattctaaagtgtagcygatttgagaactactgatgcagttcaaacttttggcacctaacttttgctgatacttttaaggtttggatgcaggaagatgaagtgacacttgatgcatgtttcttggctattctgggcacaattaaggttgaagcacaaactcagaagtgttcatcacaaattaccacccgag

SEQ ID NO: 507794 - DNA, 593 bp, Homo sapiens
tcatgagcccttataaacctgctacagcaggtgaatctatattatcacctgtctcaggaatccataattcaggaattttcatctttatttgtgtttaacttggtattttttccatgttgttactgkggttagattcgtgaaaatgctgaagctttaagaaagttctcattcttctaatttgtatgcaacagaaactgccaatagcaacttcccacaaataccttagagtggctcctttgcattgaaagcaataaatcctatttacagggagagcatgaagttccttatctattcccctctcccccaaaagaaacaaatgaacatgtatatatgtgagagagaaaagggaagaggaattttaatataaagataaaatttagtctagtgctgatcatttctctttatagccttatatgaacttctgaagtataggcactttgtattctggtaaagagtagcttctcaaaaagtttgctggaggaatgtcaaagctgcttgcctaacctgaagacagagagtcacttaaactcttctagaagttgcaagagctctctgaggatgttttacctagaggtcttaagatagtgatgcag

SEQ ID NO: 507795 - DNA, 666 bp, Homo sapiens
cagacactacaaattgaaaggaagtaatttttgccagtctatttgtgttattaccttctaaaaggaaagaattggccaagtatttcctcaatttttcatcatattaaaaaacttacacttttatatttgctatccagttcaaaggcactgtgtataataacctataagcatttttatttttggtaaagtggggaaaagacaagaacattcattaatagrcttagattatttttaaatgagttgagatttctgcattgaaggccagaaaaaaacagtgctttgaaaatagcactttactgccttataagagacaatggataatgtttatatatttctattgcactaatgaatttttaattagctattatttcagtactttgtccaagaaaagcatttttcctgagatttattttctgagatgagctagtcacaactgtacaagtagtttatggtaataacttggccatttgttttctgtatatcagaatcaaactctgaaaataaaaaatacatgtaaaataattgtattttattcatttcttaatgaaattgcatgttgtaaacaatatggcatatccttttatattctccattaacgaaaaggaacccctaagtagcaaataattaatatattagattcaatttgtaggcaactctacatactgt

SEQ ID NO: 507796 - DNA, 666 bp, Homo sapiens
cagacactacaaattgaaaggaagtaatttttgccagtctatttgtgttattaccttctaaaaggaaagaattggccaagtatttcctcaatttttcatcatattaaaaaacttacacttttatatttgctatccagttcaaaggcactgtgtataataacctataagcatttttatttttggtaaagtggggaaaagacaagaacattcattaataggcttagattatttttaaatgagttgagatttctgcattgaaggccagaaaaaaacagtgctttgaaaatagcactttactgccttataagagacaatggataatgtttatatatttctattgcactaatgaatttttaattagctattatttcagtactttgtccaagaaaagcatttttcctgagatttattttctgagatgagctagtcacaactgtacaagtagtttatggtaataacttggccatttgttttctgtatatcagaatcaaactctgaaaataaaaaatacatgtaaaataattgtattttattcatttcttaatgaaattgcatgttrtaaacaatatggcatatccttttatattctccattaacgaaaaggaacccctaagtagcaaataattaatatattagattcaatttgtaggcaactctacatactgt

SEQ ID NO: 507797 - DNA, 524 bp, Homo sapiens
ctccagagtccctcccaaggggcaggtgctcatcagcacttgatattaccagactttaaaaatttttgctgagctcggcagtggtttctcatgactttatttgcatttctctggttgctaataagattgagtacttttcacgtgtttattactcatatgaatttcttcttttgaaatgcccttccaagtctttgcctatttcttctgatttttcttattgatttgtaagaattctttctatatcctggatgcaagttccttgcagttatatgtatcatatagtttatgtattttcatctattttatatcatgtattttcctgctgtgatttgctatggatatgctcatgtaacttagggttagagttagggctggggttaaggttagggtttataaacgttaaaaaatttataataaaacctttttgatttaaatgtaatattaaaaggcttttgttggtggaatgtactttacaataactcttaagwtctacagaaaaggccatattgcttgtaattatgcat

SEQ ID NO: 507798 - DNA, 521 bp, Homo sapiens
ttattgagttgcttgcagaaatttccttagcttctatattagttggcaagggctgccataacaatacaacacactgggtaatttaaacaacagacgtttatttttccggggttctggagtttcaaagtccaaggtcaaggtgctagccaggttgrtttctcctgaggcctctctcctggacttgtagatggctgcctcctccctgtgtcttcacatggtctttcccctatactagtctgtgttctaatctcctcttataaggatactagtcatattggattaagacctacccaaatggcctcattttaacttagttacctctataaaggccttatctctaaatatggtgctgtcaattctgaggtgtacgcggggttaggacttcaacctaggaattttgggaggatgctgttcaacccctaacagcctcagtaaagcttgtttcaatcatggttacaggatgtgaggagcaaaaagaccactgcagtgcttgaccctctgccaggtttctaaacggcatg

SEQ ID NO: 507799 - DNA, 423 bp, Homo sapiens
aaaaaaaaaaaaaaaggtaggaaacaaatgaaagtggaataaatgaaggtgtaaatcaataagatgaatgggggaggggatgtcactctacgtatatggtataagttctgctcttttagctccaygtaagctaaaattgtggaataatgtacaagacaaaagttatgaagttagcatcgaatttaagccagaattaaaaattgtcaggcactctcagcttgttttctagattcggtattgatctctgcgaaattcagttttctctttgccaaaggatattgtgaggtttactggatatttttgacctagatgtataggcctacatacttggacacaggttgtctgttaacctaagactttgagtcaaattttaataataagaatagttataaatgtatagccctatgagttagcattttttta

SEQ ID NO: 507800 - DNA, 654 bp, Homo sapiens
cctctaaaaagtcatcagtgacttcctgctggccaagaccagtgacctctttttaagaattggactccttggcaatcctattcctatgacatttcaagaaagactggaatgaacataaggacccagccctgcagatatctaggggaagagcattccaggtagaaagaggagcaaatacaaaggccctgaggcagcaagaggcctggtatatttaaggtaaagcaaggagaccagtgtgattagagaaaaatgggcctgaggcagggtaataaaatataaagtcagagatggagcttgcaggaaccttgcagggttggttgttgaaggagatggagagccactgctgggctgggaaaagaggaatgacaacatctcaattaacattttaaaagggttatcactgtggttagacaagactgtaggggtccaataraggaagcaggggagccagctagtaggcttttacagaagcccatgtaagaaatgatggcggcttggactaggatgacagagctgatggtggcgagaggcggtcaaattccagatatattatgcaggtgaagtagacagaatttgctagtggattagacatggcctgggggagaaaaagatatgcaaaagataccttgaagattttcccctgagcaactggta

SEQ ID NO: 507801 - DNA, 463 bp, Homo sapiens
gtggggggtcataatcctttataggacatttttgggacaacaggtgaactgtgaatgtgggtttktatttagctaatattgctgtagaaacgttaaattttctgatcatggtaactgtatttaacttgtaagggaatgttcttttacttgggaaatgcacactgaagtgtctaggaataaaggggcacaccaacttgctcttaaaatattaaaacatatttataaaacgtgtgagtgtgtgtgagtgtgtgtgtgtgtgcgtgcgcctgtccatgtgtggagagaaagattgatagatacaatttactgatagaatgctaaggcaaataagaaaaatggaattactggtaaaccttagtgtcctggtttagctgctgtcacaaagtcccatagactggtggcgtaataaacatcagaaattacaactctggaagctgtgaagttcaagatcaaggtgatggca

SEQ ID NO: 507802 - DNA, 542 bp, Homo sapiens
tgcctaaatagcatatgtgatctgggatttgaacttagacgggtggggggtcataatcctttataggacatttttgggacaacaggtgaactgtgaatgtgggtttttatttagctaatattgctgtagaaacgttaamttttctgatcatggtaactgtatttaacttgtaagggaatgttcttttacttgggaaatgcacactgaagtgtctaggaataaaggggcacaccaacttgctcttaaaatattaaaacatatttataaaacgtgtgagtgtgtgtgagtgtgtgtgtgtgtgcgtgcgcctgtccatgtgtggagagaaagattgatagatacaatttactgatagaatgctaaggcaaataagaaaaatggaattactggtaaaccttagtgtcctggtttagctgctgtcacaaagtcccatagactggtggcgtaataaacatcagaaattacaactctggaagctgtgaagttcaagatcaaggtgatggcacattcggggtctgctgaggaccctcttcctgataaaa

SEQ ID NO: 507803 - DNA, 542 bp, Homo sapiens
tgcctaaatagcatatgtgatctgggatttgaacttagacgggtggggggtcataatcctttataggacatttttgggacaacaggtgaactgtgaatgtgggtttttatttagctaatattgctgtagaaacgttaaattttctgatcatggtaactgtatttaacttgtaagggaatgttcttttacttgggaaatgcacactgaagtgtctaggaataaaggggcacaccaacttgctcttaaaatattaaaacatatttataaaacgtgtgwgtgtgtgtgagtgtgtgtgtgtgtgcgtgcgcctgtccatgtgtggagagaaagattgatagatacaatttactgatagaatgctaaggcaaataagaaaaatggaattactggtaaaccttagtgtcctggtttagctgctgtcacaaagtcccatagactggtggcgtaataaacatcagaaattacaactctggaagctgtgaagttcaagatcaaggtgatggcacattcggggtctgctgaggaccctcttcctgataaaa

SEQ ID NO: 507804 - DNA, 463 bp, Homo sapiens
gtggggggtcataatcctttataggacatttttgggacaacaggtgaactgtgaatgtgggtttttatttagctaatattgctgtagaaacgttaaattttctgatcatggtaactgtatttaacttgtaagggaatgttcttttacttgggaaatgcacactgaagtgtctaggaataaaggggcacaccaacttgctcttaaaatattaaaacatatttataaaacgtgtgagtgtgtgtgagtgtgtgtgtgtgtgcgtgcgcctgtccatgtgtggagagaaagattgatagatacaatttactgatagaatgmtaaggcaaataagaaaaatggaattactggtaaaccttagtgtcctggtttagctgctgtcacaaagtcccatagactggtggcgtaataaacatcagaaattacaactctggaagctgtgaagttcaagatcaaggtgatggca

SEQ ID NO: 507805 - DNA, 542 bp, Homo sapiens
tgcctaaatagcatatgtgatctgggatttgaacttagacgggtggggggtcataatcctttataggacatttttgggacaacaggtgaactgtgaatgtgggtttttatttagctaatattgctgtagaaacgttaaattttctgatcatggtaactgtatttaacttgtaagggaatgttcttttacttgggaaatgcacactgaagtgtctaggaataaaggggcacaccaacttgctcttaaaatattaaaacatatttataaaacgtgtgagtgtgtgtgagtgtgtgtgtgtgtgcgtgcgcctgtccatgtgtggagagaaagattgatagatacaatttactgatagaatgctaaggcaaataagaaaaatggaattactggtaaaccttagtgtcctggtttagctgctgtcacaaagtcccatagactggtggcgtaataaacatcagaaattacaactctggaagctgtgaagttcaagatcaagktgatggcacattcggggtctgctgaggaccctcttcctgataaaa

SEQ ID NO: 507806 - DNA, 590 bp, Homo sapiens
tttggtcttttagtatagcctgccatagaagatttctgaattgagatgagatatgataacaggaatattaaggtaaaatcgacatgtgagatgagttggaacaccttttccttgaatttttatttaacattttgacctgacatatgcaggtcaaattgttgcattagagcttacatatgcagagttactcagagatatacgcactgcctccagtggtctcaaatcacctcttgkgttccctctttacccatcatcacttaaccaccaacccatgactgataatttaaaacttggtcagtattaggcctgctgtttgcaatctacggatgtggctcagtaggcaattgcaattggctaacacaagcagattgatccatgtcactgagtgggactgcacgtgtttcacggcaaagattagagagtgattcagcattcatgagaaaatgtagcaacaaaaggttagtggaacagtcctaggagtggagccatattgggagcaattgcagaaggaaatggtctggatttattatctacattaaagatattgtgggtcccatggataccaggagtgtcatggagacccagctaat

SEQ ID NO: 507807 - DNA, 627 bp, Homo sapiens
atgttattagtgttattagagtattctgggtttgtctgtgtatttaattttatcagtgaattttatatcttcaaatgttttcttgttgcatrtcagtgttttgttttctttcattttcagattgaagaattccctttagcatttcttgtaagatcattctgatggcagtgaattctctcagcttttgtttatctgggaaagactatctctcttatctaaaggatagcattactggatacagtgttgttgcatggcaatttttttttctttcaagactgtgaaattattgtcccgcttcctcttgacttgtatgatttctattgagaaatctgttaccagaataattggaataaaataattattagatgcattggggtggtcttatttgggttgaatttgtttggtgttctctgactcctgtacctaggtttttatctctttctcaagttttggaaagttttctgtcctggtccctttatatgccatggattaactcaccagtaaaaatacacatcaagtctctgttaatggagaatagtgactagcactgaaactcccaccctcactcccaggggaaaatttgcattcacaaaatggccaacatttttacaaatgagtctgttaaaa

SEQ ID NO: 507808 - DNA, 646 bp, Homo sapiens
ggttgggaaatctgtcccagaaagctccttgactcttgtaggccctaaatataaacatgcacatatccctgcctgagtcactcagcaatccactcggcttcaaagaaaagagcattttgttcaggagctcagtgccctgagcaagagctaaaagcgtcctcttttctaattgtcaattatctctacactccaagataaacatttctcttttaacatcagactgggctggaaggttcatttaggacatggctatttgaaggactggagaaggggggatgtgggggaatacagagaaagcaaagagacaaagtttaaaatcaagacacacagtctgcttcttccgatatatctcaaatatattcctaattagagaatgccaatgcaatagcctgagattctagagaaggaagaggtaggtaggtgacacaattaagtaagtctccatttggaataactgccgttgggatgggtggagggtgttccctaaaggatatttttttctctaaaaaattttcttttatttgaagaaggcctggaagcatttcatacatatacatgcagaygctcttcgacttacaatgggattatgtcctgataaactcatcataaagccaaaaaattttaagtctaaccattgcaatttggg

SEQ ID NO: 507809 - DNA, 646 bp, Homo sapiens
ggttgggaaatctgtcccagaaagctccttgactcttgtaggccctaaatataaacatgcacatatccctgcctgagtcactcagcaatccactcggcttcaaagaaaagagcattttgttcaggagctcagtgccctgagcaagagctaaaagcgtcctcttttctaattgtcaattatctctacactccaagataaacatttctcttttaacatcagactgggctggaaggttcatttaggacatggctatttgaaggactggagaaggggggatgtgggggaatacagagaaagcaaagagacaaagtttaaaatcaagacacacagtctgcttcttccgatatatctcaaatatattcctaattagagaatgccaatgcaatagcctgagattctagagaaggaagaggtaggtaggtgacacaattaagtaagtctccatttggaataactgccgttgggatgggtggagggtgttccctaaaggatatttttttctctaaaaaattttcttttatttgaagaaggcctggaagcatttcatacatatacatgcagacgctcttcgacttacaatgggattatgtcctgataaactcatcataaagccaaaaaattytaagtctaaccattgcaatttggg

SEQ ID NO: 507810 - DNA, 554 bp, Homo sapiens
ggggaatttggggggatgttaaaagacttctggatttcttataatagaaatgaatgtttccctgtgcattctaacttttctcctggtgaattttatatctccttaatctcctgataagcttgtgccacatgcattacatgctttatttggaatagagtgccccctaggctggatgatttccctgaaggcacacaacgattgcacgggttcgaaggagttagacactggtgctcttgacccttagtgcagtttccttcccatgcatctcttccatgagtttgctgagatcyttcccttccctaagagcaggcactcaccagagcatacaccatgttaacaggcagtgcaatcagtgaggaggctcttaacatccacctgctcacttgtccagagaatatactgaacagctcaggcagcactgattacaaaggtcagtagtcgacatgtggctagagagcttagtggagcaataatcaggtgcaggctctttccttcctcttagagtttttcaatttgatagggtaacatgctcaaggatgtgaggtgacctctgg

SEQ ID NO: 507811 - DNA, 602 bp, Homo sapiens
tggggggatgttaaaagacttctggatttcttataatagaaatgaatgtttccctgtgcattctaacttttctcctggtgaattttatatctccttaatctcctgataagcttgtgccacatgcattacatgctttatttggaatagagtgccccctaggctggatgatttccctgaaggcacacaacgattgcacgggttcgaaggagttagacactggtgctcttgacccttagtgcagtttccttcccatgcatctcttccatgagtttgctgagatccttcccttccctaaragcaggcactcaccagagcatacaccatgttaacaggcagtgcaatcagtgaggaggctcttaacatccacctgctcacttgtccagagaatatactgaacagctcaggcagcactgattacaaaggtcagtagtcgacatgtggctagagagcttagtggagcaataatcaggtgcaggctctttccttcctcttagagtttttcaatttgatagggtaacatgctcaaggatgtgaggtgacctctgggagcactgcagctttgtgttcatgatactcatctttaaaagtgtctgtgacccaga

SEQ ID NO: 507812 - DNA, 657 bp, Homo sapiens
ctgttcttaaccacaatgttgtggcaggtagaggaactatgaggtgtgtcataagtcaactgtcactgaaaagagttaaatgcttaggtatatggatgatatttcttttacacaatacagcatttcagggttgcttctgtaaaaacaactatcgtacttttgtacaatttgttgtgtgctttcttgactagcagaaaaagggataaatggcagcccaactttctgtaatatatgtgggttacacttcaacttttctgttttagrcataatgatgactgctgctgatgaactattcaatactgtggtgccaaatctactgtgaaatgtttccaagccacattgcacctgctttctcctcatttctagctctccttgcatgtataacacatttaatttactgtatatttccaggtggtaactgttacttattttcctatgttctttaatatgagtaagcatttaatgtttctgtatcaggtccattggactgaaagccttttagtggtaaggtctataaattacagtatttccagccctataggtatataattggttcttgataaaattaggcattggccaagtcctttggaaatctagtgtaaatatattttttcctcttcaattatcttaatgagtcaggctcgcatcaatgtcttg

SEQ ID NO: 507813 - DNA, 657 bp, Homo sapiens
ctgttcttaaccacaatgttgtggcaggtagaggaactatgaggtgtgtcataagtcaactgtcactgaaaagagttaaatgcttaggtatatggatgatatttcttttacacaatacagcatttcagggttgcttctgtaaaaacaactatcgtacttttgtacaatttgttgtgtgctttcttgactagcagaaaaagggataaatggcagcccaactttctgtaatatatgtgggttacacttcaacttttctgttttaggcataatgatgactgctgctgatgaactattcaatactgtggtgccaaatctactgtgaaatgtttccaagccacattgcacctgctttctcctcatttctagctctccttgcatgtataacacatttaatttactgtatatttccaggtggtaactgttacttattttcctatrttctttaatatgagtaagcatttaatgtttctgtatcaggtccattggactgaaagccttttagtggtaaggtctataaattacagtatttccagccctataggtatataattggttcttgataaaattaggcattggccaagtcctttggaaatctagtgtaaatatattttttcctcttcaattatcttaatgagtcaggctcgcatcaatgtcttg

SEQ ID NO: 507814 - DNA, 526 bp, Homo sapiens
tgggacaaggcccccaagggctcctgtggctccagagccacctgagggctttggagccttaggacaagctaactgctgggaagacagaaggtgcactctggaaatgtcaccgctgacctcttaatcaccatcctgtgattgaattaattaggctgagagctctgctattgagctgttctcacatctggagtagttttacaatgcaggaaactgatcacagaaggccaactgtcaagaaggagagtcagatataaacataatacatcaccgagagactctgcttatggctgggtcatgattcgtaacctgggagtgattgattgtcttctccttgttctaattttggaccagacattttgggatgatggtkgggtttgacattttagtcatcttttcttattctacaagaaagtctaagtaatcgtgactagggtaagaaggggaggaaagaggggatctgttgatgccaggatttttgcatgtatttttcttgaagcaacaacaataaagtacatacgtagggaaa

SEQ ID NO: 507815 - DNA, 576 bp, Homo sapiens
gggtggatctcgtgcaaaccacaggcagaaatgacatgggtgttgctaggcagccccatcttgccacctttcaaagytggtccaacgttggtgtctttgacctccatctgactcagccacagagcaccagcctgcagcggcaagagtcagcagcaccctttactccatgagggctccccaaatcacttttcagaggccctcattttccctacagctagcctcctcagcagaaatggcaaccctcccctaaagccaacggcctttcctcacagccccaacgtgtccttcagaagctctcgtggcccctgtgagaacagtcaaggccaaggggcacaaatacctctttttgttttttaagagcgtatagggttacataggctaaccaccccattttacatatgaacaaaatataaatgacttgcaagatggcaagcagcaaggatcagaacccaggaactggcaaccactactgtaagttctgaaagtgtgttggtgaatccattgtttggatctcagaatgatttctctttaaagcttttgacaagtgttggccagactcccagcccacaggtatct

SEQ ID NO: 507816 - DNA, 576 bp, Homo sapiens
gggtggatctcgtgcaaaccacaggcagaaatgacatgggtgttgctaggcagccccatcttgccacctttcaaagttggtccaacgttggtgtctttgacctccatctgactcagccacagagcaccagcctgcagcggcaagagtcagcagcaccctttactccatgagggctccccaaatcacttttcagaggccctcattttccctacagctagcctcctcagcagaaatggcaaccctcccctaaagccaacggcctttcctcacagccccaacgtgtccttcagaagctctcgtggcccctgtgagaacagtcaaggccaaggggcacaaatacctctttttgttttttaagagcgtakagggttacataggctaaccaccccattttacatatgaacaaaatataaatgacttgcaagatggcaagcagcaaggatcagaacccaggaactggcaaccactactgtaagttctgaaagtgtgttggtgaatccattgtttggatctcagaatgatttctctttaaagcttttgacaagtgttggccagactcccagcccacaggtatct

SEQ ID NO: 507817 - DNA, 576 bp, Homo sapiens
gggtggatctcgtgcaaaccacaggcagaaatgacatgggtgttgctaggcagccccatcttgccacctttcaaagttggtccaacgttggtgtctttgacctccatctgactcagccacagagcaccagcctgcagcggcaagagtcagcagcaccctttactccatgagggctccccaaatcacttttcagaggccctcattttccctacagctagcctcctcagcagaaatggcaaccctcccctaaagccaacggcctttcctcacagccccaacgtgtccttcagaagctctcgtggcccctgtgagaacagtcaaggccaaggggcacaaatacctctttttgttttttaagagcgtatagggttacataggctaaccaccccattttacatatgaacaaaatataaatgacttgcaagatggcaagcagcaaggatcagaacccaggaactggcaaccactaytgtaagttctgaaagtgtgttggtgaatccattgtttggatctcagaatgatttctctttaaagcttttgacaagtgttggccagactcccagcccacaggtatct

SEQ ID NO: 507818 - DNA, 591 bp, Homo sapiens
gaaatagtttctgagtgcctagctctgaatgagtgcttagcagatatttgttgatgggatgaaacctaagaggtaggcactattcatatcatcatgcctatcttacacataaagaaacagaaacagggaggttaaataacttgcccaaggtcacacagtaaagatcaaagccaggatttgactccagaaaccaagcactacattctttcacctttccatctaagactaacgctactaatttttttctccttctcctcctcttctggggtcactgcctttgttttttagccgtctttgccatggagaccaaagactccccccaaagttcttgttcatgctgggctagagaatcgtttgctgacacatgttcttaatgagaaaagkgctgcctggtgaattattctctcaacgtgttcatgctcagatgcttcatttagcagcgggcacatcaaggcccatgagagccatattacagttcgcagggcagtggagatcatcttgagcaatgggggagtgggctgaggtggcagaaacagcgagagtcccagagtcacacacatctcggtctgcatgctagtgagacctcattat

SEQ ID NO: 507819 - DNA, 520 bp, Homo sapiens
ggtagcagtggttattttgttatgttttctatatttacatgacatttgagaacatgattaagaactagaattgaaaggtgctgccacaggaatcacgcaaaataagaaatttaattttgcataggattacttaatttttcacactgaatgggactttatggtgttttgagataaaacaagaaaggccagattcactttacaatgtgtgagttcaccacacagttataataagaatattatttccacactctctaccagcatctgccaatctaatgggggaaaagcatctgattgattatttaatacttcaaaggatcttttaacttgaaatggattggctttattttctcccaatataaggtcaggcattgaaataaacaaacttaggcaaaggttaacctttttgccacrgctacgttctctattgtttctacaccagtacatggaagaggaaagtgcatcagaaaagttaacacgtggtaggacagtggtgtacgctatgctgtgctggcagtgatgt

SEQ ID NO: 507820 - DNA, 620 bp, Homo sapiens
tgaagtcatactgaagatcagtgccagccagccctttttggccagtgtaccttgggaaaggaatatttatctaggctgctgggatcatcttccacatttaaggcatacagttgcacaaatttgtctgtggctgtcacagggagcagtggtccaaggaggaccagaggctcctagacatatctgttgggcctgaggctaagaatcccacaatgaactrcaaacagaagccacagttgttcaaggttgctcagtgccagaaaactaaggtgaatcaggtgcatcaggcatctaaattccagcactcaaaagactgtctgtagcagttggggccaagtaggtttctcctccttcattgaaatggtacgctttggtgctcctggtgtcagccactgctgagtttttcacttctgcttcttccatttcaaggttcttgaaccaaatagttatcactggatcatcaaggtggagggttgatgctgcatagcaatctgtgtacacggtcttttggaacacacatttcaacactctaagctgttccagggtaaaacctggatggcttcaatgtgcacagcttggttttgctgacatgagattgtttgggaatgctacagttcaatcag

SEQ ID NO: 507821 - DNA, 635 bp, Homo sapiens
ctgaaaatggagcaggaaggtttaatattcccatttaaacatctcctttctattgaagaacataaaagtcttctgatacttgagctgaccatgacaaagagggggaaaaaagaaaaatttgggttctgtgaaaatacatggagttgcatggaatagagatttgtctgaagaaactgagatgactgagtgtctgagcatgaggtggaagggcacaggtgaggggggaagagtgggcaggaccagatgatgaggacccccgattatcatccggagcggggaaacatggggtgtggaacaggcgtgaacggttcaatgtgcagggagaagtagaaagtgttcttcccagatttccttcatggaattcgttcaaaaggaatctctttatgactatttggggtagaaagcatgattacaagggacacaaatgtaagctgacctcttctgagtgaggcagtaggaagagtttttctgttgttctgaggagatgcttgagcaagtggaggagatgcttcggagaagatagaaggttctctggcttcaggatgggtcttctgctactcaacttggtcattgctgaagtgastggatttagggacaaaaatctaggaagtaactgatctttgaactcaggttta

SEQ ID NO: 507822 - DNA, 583 bp, Homo sapiens
acccagaggggcaggatttccattcctccaacttggaaggggtgggggcttctgcctgttcctggctcctgctagctctgtggagcatgcagtcctggctgcgcctcgccggctggctgcarctgtcatcttcacaacagcctctccagatgggctgccactgccatcattaggggattggcgctaagctctggagagattctgagcagatcactgcagtatccatgatagagctgatcatttatttgtactgctctataagaatttaattctataaataaaccacagtttactaatatattctatagatgataagagatttaggttatttccagtttgaggaggtatggctatggtaaaccatgtttctctaaacagtcctgtatatgtcttctggtgaataaatgcaagaatttctgtaagatatatacctgtaagtagaattacagaaagttaggatatgtgtgtaattgactgcactaggtaaagcttggatgttttccacatagttacagagtttacatattgcagcctctcattcagtgcctcaactgtatcaaatgaaaggtttattcaaaatttc

SEQ ID NO: 507823 - DNA, 407 bp, Homo sapiens
gcccccgtagcttgtctgagaccacctgggcagtctcctcctagccagggacagctcctcacacttggttggcacattcctctcctgcacagagagggcattctcgctgtccgcactccgcaggcgcccacgggggtccaggtattgcacagccagacccatgttctcgccatttgtgctcagggagcggctggagggcaccagggtgaacaagttgccttgatgacgccgtattcggggaaatgttcttctgcctgaaagggtgcaagggccagagkagagcaagtcacaccccaggctacgaggcggaacgtacaaaccaggtctgagacaccccgggctacaaggcggaatatacaaaccaggtctcagccagaagtgatagataataccagctccagcccatc

SEQ ID NO: 507824 - DNA, 484 bp, Homo sapiens
aaaaatcctatgtaattggcatcgtattctagaaaaatagctaactgagcctatagggaacgtttttggtctycagattggaaagcatttggatctgatagagaggtgctcctgattagcagatgacataagcacagccaaagctttactcagaaattcccagtcaacatcactgtccttcactcaaccttagggctgctgcagaagctgcaaatgtctgcaatctgaacagagtcagaagtctaggtaggaaaggttcttatcctctctccttataagacactgattcatatattccaaaatagcttggtacactgtgcacatctggtgctatttatttaagtaaaataaactagaagagaaggaaacagggtaagaatcttgcagctttcaccaatgaaaaaagtaaatgttctgttttatactttttaattttgcttttgttttttaaggtaagagatttgaggtcctgtcttattatcta

SEQ ID NO: 507825 - DNA, 588 bp, Homo sapiens
tgctggaagtggggtttgcagtagaactccccgtgcagcgcggcgtagctgcccaggctgcagaagccaaacaacggcgtcaggtcaggtcaggtcggggctgggttggcaggcgaggcgggggcgggcagggcaggggcgcacctgagcttggtgtgacagtgcttgcagcagaagcaagagttgtggaaaatgagcttgtcggccaccagccgctccatggggtacacggtcttctggcaggcggcgcaggtctccttcacctgggcccgcaggctgaaggactgtgcgggaagctcagccaggtgctgccccagtgctcatcccgctccctcacacccctcctcccgcacacccggccccaggcccctaccttggagcgctgcaccgtgctgctgccgccgcctttggcgtcctgagggagaggggcggtcagggcaggggcagctccgggaggccctggaycagggctgcagccatcagcccaaggcccaggggcgcgccgcagggcacaaagggggccggcaaactctgatgcctctccccttcaccccaggccaggctcctgtccggggggccctcccaccc

SEQ ID NO: 507826 - DNA, 225 bp, Homo sapiens
aggggcatatttctataagtccctacttggatgtagctaaactyctcccccagtcttggaagttaggacggtctaaatctgtgtcaaagctcaaagctggcaagagcgagtgttcattacctgatggtatatatccgcgttttggataccccctcctgcgcacgcgggggataagtcactgaaaaacctagtctcacaggagtgaggcttagttcatcgcttcct

SEQ ID NO: 507827 - DNA, 459 bp, Homo sapiens
gaggtgcccctgcctggagcacagggtcccacgcagtgacaggtgcaggatgaggtgggtgggtatggagccagcttaaagagacctgcactgccaggcttagacgctttatctttattttgaaggcaatctgtgggtaaagaacaaaataaaagccttgtccctttgttcccttagccatctttcttatgctttctttgttaccagatagggcctttctcatactaccctggaatactgaaatttcagactaaaycagtcaggtggctgggagtgcaagaaatccttggcaagacccttctccccggaaagcctcctgacagcagagtacacagtgtcacaccttagaatgtccaccatgaaatgtaatggtgctcagtgtagcagatgattgcaaggccagtgtgaaggcaatctacccacaacatttataactctgcgggttgtcagcttcatgag

SEQ ID NO: 507828 - DNA, 450 bp, Homo sapiens
gggggcttagaatttggagagagacacaattacccataacataaaacataattagcttcatggtagagtttcaaaatgttgtagagttttaattacagtagaatataacttattgtggtaaaaactttattaatgattacttatggttaacctaatttttgtgtttattgcttttaagaatttcattttgcaaatcaaaacagcaaatgcttgccatatggccagctagtacttaagcaaaatgaatgcacatcaccaccctgcattataaacccttttggttttagtatctctagcattttgtcatttatgtaaatgcagacatcggtaaaatgaggccagartgaaacgggtgaatctgaagcttttttggtgaatccatagtaaatgaaagacccactaagacataatctagggtagtgagtctcaagcttgaaggagctcaggatt

SEQ ID NO: 507829 - DNA, 591 bp, Homo sapiens
ggctggaaacagatttccgcacgtcctcgttccacacgctcacgccgatggagccagtggccccccgtccggacacgccgaggctcacggcatctccctggcttctcgtctgaacccgccccaggtcggtgctttcacacccttctccctcttgccttcactctgtgtgtctgtcacctcagtttgtcgttctgttaaactgcagtactgagatatttggggctgctttccacgctgcccgcagaggggtccatgcaggctttccatrgtaacttaaagggaaaccttcacagtgtcacaatgcctggagacctggacgtcctgcctatgaaggacgaggatgtgctcaagttccttgcggtaggagcccacgcaggcggcaccacccttggcttccagatggagcagtatatccacaaaaggacggaccagcgatggcatctctgtcataaatctgaagggacctgggagaagctgctgctggcagctcgtgccattgttgctgttgaaccctgctgaggtccctgtcttgctccaggaacactggccggcaggctgtgctgaagctcactgctgccaccagagccactc

SEQ ID NO: 507830 - DNA, 642 bp, Homo sapiens
ggtctggttttcaactttctattcagttcggttgctctgtagttccccccttgatggtttacattgtctgtgaatattgacagttatagttcttactttaccattcttttaaggaatcatttgaaaaattcacatattggtgaagccatacaggcttagagttttctttgtggcaagtttcctaatgacagatttaatttctttaatagatacaatatattccaaatagatttttttcaatgagttttggtaagctatatttttctaggaatttgacaatttcttctaaattttgaaatatattggtatataggtmaaaaaattgtatgtctttatctttttaatatatgtaatgtctgttgggatgtacctttttaaaaatttcttatattattcatttctcttttctggcctgatcctagcaattgttatagggagtttataaaaattattcgtctttttagggaaataaatttttgctttttaatttttctactatatgtttgttacttcatcaaatttaaattaaatttttttggattaacctacatttccttcttcccatttttattaggattagtttgttcttatttttccaactactttagaacattctttagcttttcctctttgctaatatgt

SEQ ID NO: 507831 - DNA, 311 bp, Homo sapiens
ctgcttattagtgagaagttaaataattatatttaaaagagtaggagaagaacgcaggtgccccagtagaaatcacaaccagcagccaacaccaacaacctctcatgtgaattaagccattaaaatgttgttttaaattattttattatttttcttattcttaagaaaatgttgtgggtacatagtagctgtatatatgtatggggtacatgagctgttttgatacaggcatgcaatgtgaaataagcatattgagaattaggtatccatcscctcaagcatttatcctttgggttacgaacaatccagtt

SEQ ID NO: 507832 - DNA, 651 bp, Homo sapiens
ctgctcttgactgcactcaagtgagcttagcagaagaaactcacgctaacatacagaattatcagaaacaataaattaatattttaagccactaacaatgaggtcgacttattacacaacaaaagaggattaatggtacttgttaacaatgctctagaacattatgttagaatttccttaatgaatgagcatgtaaggaaactaggtaactttcatatatttgagatttaacaaatgatattaatcaacataatttaaaacacaaattctgagtctggcaaaactttgaagtattgtatataatagygcccagaaagatacttcccctcaacttcttcaccctccccactgtcctcccattttcaccccatgcttcacctctgggcagtagacagtaaaacctcaattcacatctgaacaattcttgtcaactcatagttatacagtaagcacatttggtttcagcccttacagaaaaacttttgatggctagtattttaaatttattgattaagatactttaatgaacagactcaacattgtactatccttagcatttttggtactaattgcttttatgattgatttgcttgtgctagtctatttccttcatacttgaaagaaggatttgggaaatgtgcgttaaaaatg

SEQ ID NO: 507833 - DNA, 651 bp, Homo sapiens
ctgctcttgactgcactcaagtgagcttagcagaagaaactcacgctaacatacagaattatcagaaacaataaattaatattttaagccactaacaatgaggtcgacttattacacaacaaaagaggattaatggtacttgttaacaatgctctagaacattatgttagaatttccttaatgaatgagcatgtaaggaaactaggtaactttcatatatttgagatttaacaaatgatattaatcaacataatttaaaacacaaattctgagtctggcaaaactttgaagtattgtatataatagcgcccagaaagatacttcccctcaacttcttcaccctccccactgtcctcccattttcaccccatgcttcacctctgggcaktagacagtaaaacctcaattcacatctgaacaattcttgtcaactcatagttatacagtaagcacatttggtttcagcccttacagaaaaacttttgatggctagtattttaaatttattgattaagatactttaatgaacagactcaacattgtactatccttagcatttttggtactaattgcttttatgattgatttgcttgtgctagtctatttccttcatacttgaaagaaggatttgggaaatgtgcgttaaaaatg

SEQ ID NO: 507834 - DNA, 438 bp, Homo sapiens
  misc_feature (1)...(438): n = A,T,C or G
cagctggccactgtcaggcctaggacgacggccagagcgtgggagagacgacaaagtgcctcctcagcctgggagcgtcggggcctttggacgcccgcgtcctgcgcttccaacttgcaggccacactctgcagccccgtaagccgggggggcggggtagtgccgcaggagggcgggctcgggggtggggcaggagcgctcgcgcgcgctctccacgaatcangagggcctgggagggcctacagggcgcgacgtcggtgggcagggttcagtgggcggyctgaggcgaagagctgcttgcctccgcctgctaggttgcgcgcgcacttcaggccttgcgggcatgtccagctcttctgtggcttccagcaggcgaggccaaacaggatctttctcacttccccacatctcctggatcctggagctgatgcagtcagg

SEQ ID NO: 507835 - DNA, 480 bp, Homo sapiens
agatgaaattcaagtaagtaaaaaataaaaaatcatctacaaaggaacaagaaccagacagacatcttctcagtagcgatactgaatgcaaaagcacagtatcttcaaaagattgagagaaattactttcaactttaccgagccaattatcaatgaagtacgagtgtaaaatagagtcattctcagacatgcaaagatgcataaaatatatctctttcttaagaatttaacaaagatgtgttttgactaaatgaagaagcagatcgagaaagaagacaggagaggctggaggcagagcaagatggcggaatagaagcctacaccattcattccctaacccctgccaycctcgatgggaacaccaaattttaaaaactatctgcacacagaagagcaccatcataagaacacgaaagtcaagtgaaaaatagtgaggcaggaaaatagggtctggaggcagggaacataaggctgattcac

SEQ ID NO: 507836 - DNA, 436 bp, Homo sapiens
taatttcactatagaatggatgaaatggcactgatttgtagaccatttccaaaatttcaggtaaacatttttaaaaaggtaaatgcagttaggtggaaggaataagttctagtgttcagtagcagagtagcgtgactgtagttaacaacaatgtattayatatttcaaaatagctagaagagaggacttgaaatgttcccaacacatagaactgataaatactcaaagtatttatcatcgatgaacaccacaaataccctgacttagtcattacacaatctacgcatgtaacaaaatatcacatgcaccccataaatatgtacaaacgttataaagtaacagtttttaaaaggggtatataaatgtgtgttctctaccttagcagtcattataacattgtctttcatctaagaaaaacacatgtaggtatcagatg

SEQ ID NO: 507837 - DNA, 647 bp, Homo sapiens
tgtgtaagcaaatggtggaaatgagattcaaatccagacagccaggcaccagcgactgagctcttggtttttgtaactcttgaaagatgaaaaagtgtgcagctgccgtgcaaaagtcaagtaaatggaatagcacagaggatagctagtttgtctctgcacctggcctaggatagtgcgctcccacattcacagcccttggttaggggggaaaaaagtgagcctggagaagttacaggaagggatcatgacaaagcattcaagttatcagaagggctttccatttaaaaacaractaacatgattcagacctgtcgatttggaaaaacaaaagtcactgagtgaatgtaattaaattcattaagacccttgagtgaaaggtacaaaaccagctcacccttggacttgtaacactacaggtgtgtcccatgttactaatgagaagaaatgggtgtgggaaccatcacatctctttttccattttgcaccctgggtggcatcatggaagcatgacttgtcaggcgcacatggctccaggcttactagggcaccatgcttggtttaatgctccatggccttcataattatacctttcaccttgtattttctaagtgaactctgctgggcccatggaacatgtgtgtgaa

SEQ ID NO: 507838 - DNA, 468 bp, Homo sapiens
cactgcgacctcgacctccagggcccaagtgatcccccttcctcagccttgccttgggcagggattacaggtgcccagctagttttaccactgtgtcttttctatgcatttccttggactcaccggtaagggtgagtccgctagtggattctcttgccttgctaagacaaaaccaactttgcacctctgacctatgccatttggcaaatatctggcttgggggaaagcaaggaagccttttaggcttttataaacaagctttctcagaataccaaatgcagtatcacttagggccctttgagaataggtgygaatgctagccagaggtcaaaagcggtggagaaagtcgtgacctgcattccggggcaagatagactatagaaaatacttctaccgagtctttttgtaatacccgcctttgtaagggaaagccagaggtagtgggagacttttgctatattctgagct

SEQ ID NO: 507839 - DNA, 719 bp, Homo sapiens
tgcatctcctttttctcagaaagactccaggcctcaactgttactcatgtggtcattaagatcgtagccttttgtatgcaaagacaaataaaaccctgtagcactgtctagcattaccagctcattcttacctttctggytgaagtttcttcatcacttttggccactgtagacctgttaccttactacattttgttttatagcaggaacgttttccggttttccctgtaaagggttaggtaactccctcattggcagaaggggaagtccatttacttgattctgcaagcttggctatcagataaaagtcttggcttagaaagaaaatgacttaaacagtaatagaactaaacaattacagagtagaatataaatgtttactttataaacatataatatgttcactttaaaatcagtattgtgcttttgactgcattaaactgtaatttcaggaaaacaacttactctttactgaaaatgtttttaccctttcaacaggtacttactgaatgtctactgtttgcacaacagcatgtgatacgcttcagatttcagcatgttaactactgacctatttctctctctcagccaaaggataaacaaactgatgtttgaatcacaaaaatgataatcaatgctgtgtgtgtcttccctgttaaaaatatgttcttaaaacaaaacaagaaagagtgtaaatggtgctggaattttggtaatct

SEQ ID NO: 507840 - DNA, 719 bp, Homo sapiens
tgcatctcctttttctcagaaagactccaggcctcaactgttactcatgtggtcattaagatcgtagccttttgtatgcaaagacaaataaaaccctgtagcactgtctagcattaccagctcattcttacctttctggctgaagtttcttcatcacttttggccactgtagacctgttaccttactacattttgttttatagcaggaacgttttccggttttccctgtaaagggttaggtaactccctcattggcagaaggggaagtccatttacttgattctgcaagcttggctatcagataaaagtcttgscttagaaagaaaatgacttaaacagtaatagaactaaacaattacagagtagaatataaatgtttactttataaacatataatatgttcactttaaaatcagtattgtgcttttgactgcattaaactgtaatttcaggaaaacaacttactctttactgaaaatgtttttaccctttcaacaggtacttactgaatgtctactgtttgcacaacagcatgtgatacgcttcagatttcagcatgttaactactgacctatttctctctctcagccaaaggataaacaaactgatgtttgaatcacaaaaatgataatcaatgctgtgtgtgtcttccctgttaaaaatatgttcttaaaacaaaacaagaaagagtgtaaatggtgctggaattttggtaatct

SEQ ID NO: 507841 - DNA, 719 bp, Homo sapiens
tgcatctcctttttctcagaaagactccaggcctcaactgttactcatgtggtcattaagatcgtagccttttgtatgcaaagacaaataaaaccctgtagcactgtctagcattaccagctcattcttacctttctggctgaagtttcttcatcacttttggccactgtagacctgttaccttactacattttgttttatagcaggaacgttttccggttttccctgtaaagggttaggtaactccctcattggcagaaggggaagtccatttacttgattctgcaagcttggctatcagataaaagtcttggcttagaaagaaaatgacttaaacagtaatagaactaaacaattacagagtagaatataaatgtttactttataaacatataatatgttcactttaaaatcagtattgtgcttttgactgcattaaactgtaatttcaggaaaacracttactctttactgaaaatgtttttaccctttcaacaggtacttactgaatgtctactgtttgcacaacagcatgtgatacgcttcagatttcagcatgttaactactgacctatttctctctctcagccaaaggataaacaaactgatgtttgaatcacaaaaatgataatcaatgctgtgtgtgtcttccctgttaaaaatatgttcttaaaacaaaacaagaaagagtgtaaatggtgctggaattttggtaatct

SEQ ID NO: 507842 - DNA, 719 bp, Homo sapiens
tgcatctcctttttctcagaaagactccaggcctcaactgttactcatgtggtcattaagatcgtagccttttgtatgcaaagacaaataaaaccctgtagcactgtctagcattaccagctcattcttacctttctggctgaagtttcttcatcacttttggccactgtagacctgttaccttactacattttgttttatagcaggaacgttttccggttttccctgtaaagggttaggtaactccctcattggcagaaggggaagtccatttacttgattctgcaagcttggctatcagataaaagtcttggcttagaaagaaaatgacttaaacagtaatagaactaaacaattacagagtagaatataaatgtttactttataaacatataatatgttcactttaaaatcagtattgtgcttttgactgcattaaactgtaatttcaggaaaacaacttactctttactgaaaatgtttttaccctttcaacaggtacttactgaatgtctactgtttgcacaacagcatrtgatacgcttcagatttcagcatgttaactactgacctatttctctctctcagccaaaggataaacaaactgatgtttgaatcacaaaaatgataatcaatgctgtgtgtgtcttccctgttaaaaatatgttcttaaaacaaaacaagaaagagtgtaaatggtgctggaattttggtaatct

SEQ ID NO: 507843 - DNA, 441 bp, Homo sapiens
gttggagcaggaggctgctcaatcccacgctgcgggctcctgcacaaggtcagatgtgcaggccatcatgaagtgagtgtcgagggtggtgtcatcctgaaggttaacgctgtagcggggagagcgtggggttgcgtgtccctctccctccttgtgcaataactatcgtgggtaattcttttatcgtcttttagataatttttacatccacaaatcagaaaaggaatgagaatcaaacaaagtaatacatgtggaagaactcagagaacagtgtcattctatagcaacaatcaacacagagcctstgctaagtgtcaggccacattctgagcacagcggagacaggactgagcaaagccaccacagagttcacattataaaaatgaaacaaatgaatgacaagtgtcacacggggtaacaggcatgataggggagacagaa

SEQ ID NO: 507844 - DNA, 576 bp, Homo sapiens
cagtgaaccgcttggccgggtgccctcttagatcctccctgccctgttccctggctctctgtcccctgcggtcctcttctctaggactgttgaaacttctccgcatctggtcagcttcacacaaaagggctcctattttacaggctgagagccccttcctgtgtgttggcaaaactgacacatcgcattgcttgggtttaatcttcaggtactttttctgtttttttacctataaaattagtataagcatatgctcccgtaatcaacacaatttagataaagcaagagttcctctgggccctcccacttccatttgcattttcttttctgtggactaactggtcatcttctttatccacttgtctatgwggttgttgatcttggtcttttttcttattaacagataggagttcttcatagagcctagataacaatccagaattcatgtgtatacgcacgcatttatctatatgtatatgtataagcacattacacacatacatttgcacacatacaaatgttagaaatatcttctccaactctgttgcttgtcttttatctcagcttatagaggtt

SEQ ID NO: 507845 - DNA, 614 bp, Homo sapiens
ttcagaatggctaccccagggccaaatgaaagcataattgcatgttttgtctcaatattaatgcagccaatcaagatgagctcaagtctgcaaacaccacatggagagaaaacatgtttttgggtctaagagcaaaggcatttttgaaaggagaagaaagagggaggactgccctttcattaagctgtcactaacattcacacccagtacattcatctgtttactaatgaaaccattaaaagccatgtgacagccaaaaatgaaggagaacaaaaatgtgagttgtcaaaagatcccattatgcattakgaagattatattctccatgtgccaccaggaaagcattacactcagaggtgaacagttcagtaacgtgtacaggaaatgagataaaattcttggatttccaccgctattcacgtgtgacttacgttaacttactgtaaaaatgggcacaccgtactcacaattaaacacacatattacgttttcaccagaacaaaataggtaaaaacctacgataataggattttgccatacgaaggaacataacttcctgtctttatttttgtaaaaggccagtaaaactgatactgattcagagctctataaaa

SEQ ID NO: 507846 - DNA, 615 bp, Homo sapiens
cttcagaatggctaccccagggccaaatgaaagcataattgcatgttttgtctcaatattaatgcagccaatcaagatgagctcaagtctgcaaacaccacatggagagaaaacatgtttttgggtctaagagcaaaggcatttttgaaaggagaagaaagagggaggactgccctttcattaagctgtcactaacattcacacccagtacattcatctgtttactaatgaaaccattaaaagccatgtgacagccaaaaatgaaggagaacaaaaatgtgagttgtcaaaagatcccattatgcattaggaagattatattctccatgtgccaccaggaaagcattacactcagaggtgaacagttcagtaacgtgtacaggaaatgagataaaattcttggatttccaccgctattcacgtgtgacttacgttaacttactgtaaaaatgggcacaccgtactcacaattaaacacacatattacgttttcaccagaacaaaataggtaaaaacctacgataataggattttgccatacgaaggaacataacttcctgtytttatttttgtaaaaggccagtaaaactgatactgattcagagctctataaaa

SEQ ID NO: 507847 - DNA, 536 bp, Homo sapiens
atccttgtaagaccagtcctctgtccaaccagagttaggaggcatctgacaatttgcctgattagctgtactgttgrgagtttaacaagggtgtggtttttcttgtaaccataggaatttagggagttgccacgccagccaagccctaaaccctgggcttataggtaactttttccctaaccttaagatctgtcttagttggtaaaggggtgtctattttggtctctcagatcacactagaaacctctcaagtcctgtattcttattataaagctgattataaagctttacaatttactttgtgattactgtagcttatcgtaaagcaactgtaatcagtaggattggtgtcaagatgggtacacagatgggtagaaaagaattgagaatccagaaatggactcatatttacatggtcaatttatttttgacaaaggcaccaaagaaatttagcatagaaagtataatcttcatcaaatgatgctggaaaaattgagtaactatatgcaaaaaagaaagaaaagaaagaaaaaagt

SEQ ID NO: 507848 - DNA, 527 bp, Homo sapiens
agctggtctgttatgtggccacagcaggaatccagcaatctaagcacattaaaatgggttcagtaatgttttgtaacttcytttactattccccaaaccatgctgttattttttttttcatgtcaactattggacttttttgcttcattaaactttcattagaagatagtcaaaattaatgattggtaaactggcttgatagctcatctgtgttactacatgtccacaactcatattttaaaataagttcataagctcagcagtttcagcaacactcagtgggttactccatgcccctggggaggtgtgacggggagacaggacataggtcaatagcatgggaccaatggagcgccctcacacatgcagaaacatcagcatcagctcactttagctgtgtgtccatatatgtaactggcccatagtcacatagactgtaagttaccgaacagactacttgtacagatggcatccatattagcctacctcccaaatggtttctgatatcttaattgccctcctttttc

SEQ ID NO: 507849 - DNA, 617 bp, Homo sapiens
gtaaacatgttaaactttgtatttctcaaattctaatttagtcacactaaaattataaattataatttataatttcctgaaattataaattatagtatactttttaataagttctttactttggtaaatattcggggatgttgcagaaaatgtaaataatgagtatttcaattatgttcactaagggtatctatttaaatctttccattgtcctaagtctccttttctggtttttaaatatgcctcctttatctcaattaacttggttttctagaaattaaacaaaataagatcatccccaatctcagtgtttcccctatgtctgtacgtggatttactttggctgtastctaaaaatttgggtctagtatatgcaaactgtgagtcactcctctgggagaaggcatgaaagaaacatgggggtaaaccagaagacacaagcatagtagagattgggatagcgatgtcatagaaagcattaaaaaacttaaggaacaagaaataaaggcaagtgaataggttaaacatacattttctaaccacctcctcccaccccccaccacaataagcaattttaaatagagtggctaaagttaatagtgccacatggggaaaaa

SEQ ID NO: 507850 - DNA, 649 bp, Homo sapiens
agctttagcaaaattattgtcctcactcccctcttcaccttattaattctttaataggatgtgcaaatgggccagatcaatgtgaaagaaaaatgagtgcttcaagaatttaaataattaggtggtataagtataaaatatttctaaacctaaacactgagttatagattggatagcaattatatgagcagtttgaaaatataaagcccatattgtacatttttctattgccagaaatatattgagtagaattgtacagtgtttttttcccctctttagaggttatttaactctatcaatcttattttcagtttaattgtgaaaccaacatgccaaacataccatacatccaaaaacaaatttagccttctgaatattaattaacattgtttcaaagagacagcmgctgtttatcattgatttaaattaaatattgagaaggaaattaaagagatttttatttcatttattcagcagcaacattacagtttatacaaatgaaggcataattaaacagcctgccattaaattacaatctgcatctcatgtaagcaaacatattaaaattgaaaatgcttgtcatgaatataaaaccagcttgcttgaataagaattactctgaatgtatgatgcacatttaagcaattgt

SEQ ID NO: 507851 - DNA, 649 bp, Homo sapiens
agctttagcaaaattattgtcctcactcccctcttcaccttattaattctttaataggatgtgcaaatgggccagatcaatgtgaaagaaaaatgagtgcttcaagaatttaaataattaggtggtataagtataaaatatttctaaacctaaacactgagttatagattggatagcaattatatgagcagtttgaaaatataaagcccatattgtacatttttctattgccagaaatatattgagtagaattgtacagtgtttttttcccctctttagaggttatttaactctatcaatcttattttcagtttaattgtgaaaccaacatgccaaacataccatacatccaaaaacaaatttagccttctgaatattaattaacattgtttcaaagagacagccgytgtttatcattgatttaaattaaatattgagaaggaaattaaagagatttttatttcatttattcagcagcaacattacagtttatacaaatgaaggcataattaaacagcctgccattaaattacaatctgcatctcatgtaagcaaacatattaaaattgaaaatgcttgtcatgaatataaaaccagcttgcttgaataagaattactctgaatgtatgatgcacatttaagcaattgt

SEQ ID NO: 507852 - DNA, 602 bp, Homo sapiens
atggttttcccccacccaaatctcatcttgaattcccacatgttgtatgagggacctggtgggaggtaactgaatcatgggggcaggtctttcctgtgctgttctcattatactgatagtaaataagtctcatgagagctgatggttttaaagaggagagtttccctgcacaagcactctctcttttctgtcaccatgtgagatgtgccttccaccttccaccatgattgtgaggcctccccagccacatggaactgtaagtgcattcaatttttttctttcgtaaattgcccagtctctggtatgtctttatcagcagtgtggaaacagactaatacaacagtatttttaactataagcatcgtgctggacttaagatctctaggacttaycttacataactgaaactttgtaccctttgactaatacctacttttctggattgccaagcccctcttccagtgttattgactctttgcagtgaacaccaattgttctatagggctgccccacaacccatagccccttagtgctcactctctgagcactaagtccatgtggttacagtggaaaaagccatggaaaaacatgccatgaccttg

SEQ ID NO: 507853 - DNA, 591 bp, Homo sapiens
ctttgtctagagtactcccaaggaatttggggatactcttaaggcagtcttccatgttgctatgtatgccaatatttcccaatataggacaaatgtgaggttacccaaatagtaccttgtagcaaaacagcaaataaaaccaaaccaagtatcaatagctaaactgtaataattgctgttttgctttattatctctaaatccaactcyacgtcaaccttcttttatctctgtgttctcatctctacccttatgcacatagtgtaaataagcttgagtaaccaaggttttagtgtgctcctgccaattttaatataaactcaagttctcaataacttgaaaaaatagacaaatatttttattcatcttattgaattgattgaatcttagaaactgtggttgctttattttctgtcagctagtgaggacagttttctttgcaacctcaagccttttgtccatgcaagtaataataataataaccggtccacattctaccagcttggtactggtagagatgagatgaggatgaaagaaagatttccttatggattctttcttgtggcctttatggttagaaatcccagtttgca

SEQ ID NO: 507854 - DNA, 583 bp, Homo sapiens
tttgggaggccaaggcgatcggatcactttaggtcaggagttttagaccagcctggccaacatggtgaaaccctgttttttcttaaaatacaaaaacattagacaggcatggtgctgtgcccctgtaatcccagctattcaggaggsttaggcatgaaaaatgctttaaccataaaggtggaggttgtagtgagttgagatcatgcccctgccctccagcctgggtaacagagcaaaattccctttttaaaaaaaaaaaaaaaaaaaaaaaaaaaaaaacagaataaaaacaaaaaaaaaattctaaaaaaaaagaagttatttattttcaaccatttaggatcaattaagtttagtagccttagctttttatttttcctagagttgtttttccataaattctttttttgtttgcttgtttttccataaattcttatacttcatatctgttttaagtttctagcatattattattttttcttttattattatcctttaaacattggtttagaaaagagaatggcaacaattaattaatttgatagggtattaacagggcattaattaaaatgaagaatccaca

SEQ ID NO: 507855 - DNA, 583 bp, Homo sapiens
tttgggaggccaaggcgatcggatcactttaggtcaggagttttagaccagcctggccaacatggtgaaaccctgttttttcttaaaatacaaaaacattagacaggcatggtgctgtgcccctgtaatcccagctattcaggagggtkaggcatgaaaaatgctttaaccataaaggtggaggttgtagtgagttgagatcatgcccctgccctccagcctgggtaacagagcaaaattccctttttaaaaaaaaaaaaaaaaaaaaaaaaaaaaaaacagaataaaaacaaaaaaaaaattctaaaaaaaaagaagttatttattttcaaccatttaggatcaattaagtttagtagccttagctttttatttttcctagagttgtttttccataaattctttttttgtttgcttgtttttccataaattcttatacttcatatctgttttaagtttctagcatattattattttttcttttattattatcctttaaacattggtttagaaaagagaatggcaacaattaattaatttgatagggtattaacagggcattaattaaaatgaagaatccaca

SEQ ID NO: 507856 - DNA, 584 bp, Homo sapiens
gactttgggaggccaaggcgatcggatcactttaggtcaggagttttagaccagcctggccaacatggtgaaaccctgttttttcttaaaatacaaaaacattagacaggcatggtgctgtgcccctgtaatcccagctattcaggagggttaggcatgaaaaatgctttaaccataaaggtggaggttgtagtgagttgagatcatgccmctgccctccagcctgggtaacagagcaaaattccctttttaaaaaaaaaaaaaaaaaaaaaaaaaaaaaaacagaataaaaacaaaaaaaaaattctaaaaaaaaagaagttatttattttcaaccatttaggatcaattaagtttagtagccttagctttttatttttcctagagttgtttttccataaattctttttttgtttgcttgtttttccataaattcttatacttcatatctgttttaagtttctagcatattattattttttcttttattattatcctttaaacattggtttagaaaagagaatggcaacaattaattaatttgatagggtattaacagggcattaattaaaatgaagaatcca

SEQ ID NO: 507857 - DNA, 499 bp, Homo sapiens
tcccatatttattttgatctcttacatatttttatatttaaatatttaatgtctttatgtatttgtttaataagctgatgttctttaatgtacacacaaaaggtaaagtcataagtgttttagaagataactcagaagactaacatggaaaagactgatgtaggaaatattccataaagaggtcacaaatgcttgaaaagtaaaaatgaacaacattaaatgtaagaaatctttgaaagatattattaagaaagtgaaaaaatcttagacaagccrcagcatggaagatgctcacaaaacaatctctgatagctttgtatttggcatacatggagaacttcattacatcaataacaacaaatgtaaggggaaaatccatgaatgtggagaagttctgtttaaagaaaaataattaatgacttgagattacatgaatgtacgtaggagtatcagtaacttagggtgttatcaatgaaataattttaaaacctgtgaagta

SEQ ID NO: 507858 - DNA, 600 bp, Homo sapiens
taactactgcttagcagtgctccaagtctcagtgggctgtttggaggaggaaatgagatgtcccagacacacggaaagcactgtttttgttatttatcaagttcttctgcatatatgaatctattgcagttcttcttttctccactcagtctcattggtgtcttyatttttttttcttgtgtcagtatccatgatagttctccctttctaatatgtctaatatgccttcctcattcctttccctcccttcttcactgccccaacccaggatcacatgctccgttttgcagattgacaaagttgactttgtccatgtttgttgagttgaacgtaatttggaggaatggtataaggataagaaaaaaaaacttggaggagactaatgcgtaaagcaaatgggcgtgcaacttattaatttacagtgagacagataactgccaaacagactcaggtacttggtttttgtatctgcacattcatctctgcaggacagtatatttggaaagccatttattttagggtcaggagctcatggaatcggagaagatggtagatggaaaatctaatgtcattatgccatacctctggaatcaccccata

SEQ ID NO: 507859 - DNA, 600 bp, Homo sapiens
taactactgcttagcagtgctccaagtctcagtgggctgtttggaggaggaaatgagatgtcccagacacacggaaagcactgtttttgttatttatcaagttcttctgcatatatgaatctattgcagttcttcttttctccactcagtctcattggtgtctttatttttttttcttgtgtcagtatccatgatagttctccctttctaatatgtctaatatgccttcctcattcctttccctcccttcttcactgccccaacccaggatcacatgctccgttttgcagattgacaaagttgactttgtccrtgtttgttgagttgaacgtaatttggaggaatggtataaggataagaaaaaaaaacttggaggagactaatgcgtaaagcaaatgggcgtgcaacttattaatttacagtgagacagataactgccaaacagactcaggtacttggtttttgtatctgcacattcatctctgcaggacagtatatttggaaagccatttattttagggtcaggagctcatggaatcggagaagatggtagatggaaaatctaatgtcattatgccatacctctggaatcaccccata

SEQ ID NO: 507860 - DNA, 673 bp, Homo sapiens
ttgaaaaactgggatctaatccagcccatgatctgatcagggttcactagtaataataaattgggactattaaaactgggaatcattccaacattttacccaaaccacaggacctagaaaattctactgcaaaagatagggatattcagtgatgagtaaaaccatgctgaattaatcatgtgtatgtaatcatgccaaaacatgggtgttttcaacagtttaaatagtgccaaagttattaagttcagtaaataattaattattgagaattgcttggcaaattaaagaaatcaaccttctggtttctttaatacatccttttttgagtgtacaataatgacraaatactatcaattcacttgttgctgtatatatttaggagcgttatatgtgtgtagattacaaccaaaatattaattccagaatgtaatactttccttttccttcttcgactctaataagcatcttcatttttcaatatgaacaaatgttggataaactctagccttactctggttttcatttcaatttccagtaacataaaaatcctccataattaaataaaatgctgagaggttgggaatagattttcacccacttgaattctcaaactataaatggtttctgaatgtttttatatctctaagatgcatttcgtttatgtggggaactt

SEQ ID NO: 507861 - DNA, 668 bp, Homo sapiens
tgactgccacaaatccttgtcagtggagaaatagaytgtttctctaaaatcagccgcatggtgacgtcagtactttctaccctcattctaaaagatggtgtcaccgaattaatccaagtagctcttatctaatgtgcctaccctgggagagtttctaccagggaagaatccagtggtgccagaggctggtttttatcctgctgctatgcaaatcaggcccccactgcccttgtcagcacaggtgtggatatacaatgccccccacccccgcctggggaggccccaaagatgttgttcctccttctctctctggagcaactaggggtcctttgtgatgtattactgtccagtagcccctaaccgccccctcccccttcaagctattgcctcctgtctctctcttttccttctcctttcactaaactttaaaaaacaatcctctgccgtctccttttgccatctgccaccctttcttttgggcagatgacaatccggtttgtaccttcaccactgctaaaactgcccagcaaaactctccctaacctctgctggactagatatggcagagcaacccttgtggcaagtctctcttctttgttgccttcctactgctccaatctaattgtctgtttctttcactgtctctttagctattctctaaaaggatt

SEQ ID NO: 507862 - DNA, 668 bp, Homo sapiens
tgactgccacaaatccttgtcagtggagaaatagattgtttctctaaaatcagccgcatggtgacgtcagtactttctaccctcattctaaaagatggtgtcaccgaattaatccaagtagctcttatctaatgtgcctaccctgggagagtttctaccagggaagaatccagtggtgccagaggctsgtttttatcctgctgctatgcaaatcaggcccccactgcccttgtcagcacaggtgtggatatacaatgccccccacccccgcctggggaggccccaaagatgttgttcctccttctctctctggagcaactaggggtcctttgtgatgtattactgtccagtagcccctaaccgccccctcccccttcaagctattgcctcctgtctctctcttttccttctcctttcactaaactttaaaaaacaatcctctgccgtctccttttgccatctgccaccctttcttttgggcagatgacaatccggtttgtaccttcaccactgctaaaactgcccagcaaaactctccctaacctctgctggactagatatggcagagcaacccttgtggcaagtctctcttctttgttgccttcctactgctccaatctaattgtctgtttctttcactgtctctttagctattctctaaaaggatt

SEQ ID NO: 507863 - DNA, 531 bp, Homo sapiens
tgctgactgccacaaatccttgtcagtggagaaatagattgtttctctaaaatcagccgcatggtgacgtcagtactttctaccctcattctaaaagatggtgtcaccgaattaatccaagtagctcttatctaatgtgcctaccctgggagagtttctaccagggaagaatccagtggtgccagaggctggtttttatcctgctgctatgcaaatcaggcccccactgcccttgtcagcacaggtgtggatatacaatgccccccacccccgcctggggaggccccaaagatgttgttcctccttctctctctggagcaactaggggtcctttgtgatgtattactgtccagtagcccctaaccgccccctcccccttcaagctattgcctcctgtctctctcttttccttctcctttcactaaactttaaaaaacaatcctctgccgtctccttttgccatctgccaccctttcttttgggcrgatgacaatccggtttgtaccttcaccactgctaaaactgcccagc

SEQ ID NO: 507864 - DNA, 636 bp, Homo sapiens
tgagagttgagtcaacacttgattattagtctattgaggttattcaggaaaaatttaaaattctaactccttcaaacaaagcgctatgggctgtctccactttccatcagtgtatgggtgcttatggaatgtaaagctaattttaatgtttcctaagttgaattaggaaagaaaaaaattggtttaaagtaacccacagagctctagccaacataaatatggataatggatggatggatgaatggayggataaacggatggatggatgagtggggggatagatgggtgggtgggtagatagataggataaatggataatcttttgctttggctgattttgtcactgattatcttcaacagggtataagagctgactgctttatgtggtcatgtaacctatacccttctccaaaataattggaaagatcctatttccaacactactgaattggcaccctgtgattcacatgtgtggcgatattggcaggtgtcatttttcttcaacagagtttattaatttattcatctgaagcctatcttaaattcatcagtgtgaataataaaaggaaagtaagaaatgacttgagtcccaacacgctatgcttggaatgcctttccttccataaagataaatgc

SEQ ID NO: 507865 - DNA, 636 bp, Homo sapiens
tgagagttgagtcaacacttgattattagtctattgaggttattcaggaaaaatttaaaattctaactccttcaaacaaagcgctatgggctgtctccactttccatcagtgtatgggtgcttatggaatgtaaagctaattttaatgtttcctaagttgaattaggaaagaaaaaaattggtttaaagtaacccacagagctctagccaacataaatatggataatggatggatggatgaatggacggataaacggatggatggatgagtggggggatagatgggtgggtgggtagatagataggataaatggataatcttttgctttggctgattttgtcactgattatcttcaacagggtataagagctgactgctttatgtggtcatgtaacctatacccttctccaaaataattggaaagatcctatttccaacactactgaattggcaccctgtgattcacatgtgtggcgatatwggcaggtgtcatttttcttcaacagagtttattaatttattcatctgaagcctatcttaaattcatcagtgtgaataataaaaggaaagtaagaaatgacttgagtcccaacacgctatgcttggaatgcctttccttccataaagataaatgc

SEQ ID NO: 507866 - DNA, 634 bp, Homo sapiens
ttaaaaaataccagtgaagttacagattgctcagccttcagcctgacattgagaatcttaacacatctgtataggaaagttgtataaataaccacacacaatgaaacttgttctgtatggggcctactttctctggtggtggaattattaaatgtggcaggtagacacattcttctaagttttgaactatggtctgtagaacaaagcagcttgtgactgtgatattgtcctgaatrtttgtgtttattgactggccactgtgctgacatggaactaggaagtgggcatcagaggctgtagagttttctgatttgtgtacctatctatatattccaggattatcctccagagaaaataacctatagttagagcatcagtatttggagtttcttcctttgaagatcctggagatgatatcatcatctcaaaagcttaaacttcactgtaacccagtcatttgatttggggaagagagggtttttattacgatataattcacatgccataaaattcaaccgtttgaagtgtagaatccagtggtttttaatatattcacagagttgtacaatcattataatcaacttcaggatattttatcaccctaaacaaccactaatctactttctgtcgctct

SEQ ID NO: 507867 - DNA, 299 bp, Homo sapiens
aatccatcaaaatagaaacaactggaaccagctagtattttcatattaaagagtggtttactttggcttgactttgtagtgtataggagtagtgacgcagamagtaatcagggcttatctacaggttattgattatattctatagaaaaaaagaatctttgaaacttttgaacaaaggagtggcatgattcctgctattacttagagaaattcaacactaagagaaagacaatcgtatttttgataaaatgccacagcagtgacataattactttctgttcattgagcatgaagagagt

SEQ ID NO: 507868 - DNA, 299 bp, Homo sapiens
aatccatcaaaatagaaacaactggaaccagctagtattttcatattaaagagtggtttactttggcttgactttgtagtgtataggagtagtgacgcagacagtaatcagggcttatctacaggttattgattatattctatagaaaaaaagaatctttgaaacttttgaacaaaggagtgkcatgattcctgctattacttagagaaattcaacactaagagaaagacaatcgtatttttgataaaatgccacagcagtgacataattactttctgttcattgagcatgaagagagt

SEQ ID NO: 507869 - DNA, 616 bp, Homo sapiens
tgtgagaggtgaaaacattcttatgccataaagtgagatggtgccaaaatgtttccaatatgtccattttagttatataataaaataattgcatttctacataaagtatacggtttgaatgcagacagagtagtgcaagaagtaatggacatgctttaacattaacctgtctgctataaggtcattgctattactggcttatggagaagagtcccaggtatggaaatataaatacagtaactgaattagataatttggacttaagatataaaaaatataaagctataaatccacattaaatatcacatatctttattcctacagatatatttgataaatatgcamattctgaatcatgaatttaatcttttctgtttgagctaattaaatgtgctatttaatttaagcatacctaagttttcctggcaatagaatgacaataaattttgaaaattatatcattatttgaatagattaaaacttcgttatttgaaatagaaaatagaaataaataacattttttctcccaaaagtcataatatattttacaatcaggttttccattattatagacagtttatttttctcgatcatacccacagacatatatgagaaa

SEQ ID NO: 507870 - DNA, 187 bp, Homo sapiens
cacttatactcttttatcactgggactagaagactgaaaactaattttatgctctctggcttcctgttaggttaaacttaaaggtggcactgatggtatattggaaggaaagaagaaccatttccttccaacttccactatgctrtcctgtgggactgtgggcctgggcagataacagagagcaact

SEQ ID NO: 507871 - DNA, 519 bp, Homo sapiens
gcaaaatggatccagttcccttcagccccttttcattctccctttcaggaaactatttccctgtgaggcatttcccatcctctgctccctggcagtgtctgttctggggactttcctttgctcttcttgtgtaattctctccaaacagagagagttctggtatctgaaaaggatcaaactaatacattacctttacatagctggtaatggctggtaatgacaggataygttaccctttcaagaggctttgggttttaaaaataattgtgattataacagtgatgcttcaaaaagtcttccatttttttcatggcttctactagtccttgcccataagcatatctattttcacttgatttacatgaaaatccagatagtattttgaatgttttttgttgttcctgtaaaattaagaattagttttgtcttgataatggcctaacctagtggaagagtggaattttgcatttcaggagacaggcctgcaaaggagatacacacagacaagaccatgacgga

SEQ ID NO: 507872 - DNA, 668 bp, Homo sapiens
tgggatgatcaactgtagcatctgcatgtgcacttcccagtatggtagtstcagggctgtaggatttttttataggctggctcaggactcccagaaataagagtctaaaaagggtgggtggaagctgcaaaacattttatgacttaccttaagaaatcctagaatgttacttgggttacattcatttgttcaagcaagtaactagagccagcccagcttcagcaggagaggaatcatagttctcaaggagaggcatagctatttgttttttccaacagtgtttcagccagaaagagatggatgatctgattggaccagcctggtcatgtggccacctctgtttccaggaagtatggttagctccacctaaagcatctgactaacaccgtagggagagtagctccccaaaggaaaattaaagtattgttcccagaagagaagggagcagatgctaggtatgtagaaataagagctatgtgacaaattgatgttgacatcaccaagcctcatataataattctaacaagcattatgaaatcaaaaaagatatcaaaatgtggggtccataaaagcctgaaccttaaaccttgccattcactagcttgggctaattaaaatctgaaccttaccttccttatgtgtaaaatgtggataataatgatcttctt

SEQ ID NO: 507873 - DNA, 668 bp, Homo sapiens
tgggatgatcaactgtagcatctgcatgtgcacttcccagtatggtagtgtcagggctgtaggatttttttataggctggctcaggactcccagaaataagagtctaaaaagsgtgggtggaagctgcaaaacattttatgacttaccttaagaaatcctagaatgttacttgggttacattcatttgttcaagcaagtaactagagccagcccagcttcagcaggagaggaatcatagttctcaaggagaggcatagctatttgttttttccaacagtgtttcagccagaaagagatggatgatctgattggaccagcctggtcatgtggccacctctgtttccaggaagtatggttagctccacctaaagcatctgactaacaccgtagggagagtagctccccaaaggaaaattaaagtattgttcccagaagagaagggagcagatgctaggtatgtagaaataagagctatgtgacaaattgatgttgacatcaccaagcctcatataataattctaacaagcattatgaaatcaaaaaagatatcaaaatgtggggtccataaaagcctgaaccttaaaccttgccattcactagcttgggctaattaaaatctgaaccttaccttccttatgtgtaaaatgtggataataatgatcttctt

SEQ ID NO: 507874 - DNA, 548 bp, Homo sapiens
tgcagacattccaccttgccattccttcccctcacggcctctgagcacccttctgagtccctctgtctctcagcagtgcccacagtgtttgatggtcatggggcaggaagaggaggctgacctctggatccagagactcccagcttgaaggggtcactccttcctcaggctggagtgccactctcctgggacctgcactgctgtgacytgctattagctcagaggtgcctgtccaaaaaacagcaggactattcatttcattacaggcccagcagtggagcaggggccctttcctctctagaatattctacccagtaataatcttcaggctaagcctgcatcgacagtactcaggaaaccccacctcctcaaaccaaattacatgtccccagtttgagaacaatgtgagctaagtctaataaagttataaaaatgtcaatgggttgtttgtgtgggaagagaatggctggaggtggaaatgtggtgtcatgaaaaaggctgcagacttggactcaggaatcatggatccaggactcatggctcattat

SEQ ID NO: 507875 - DNA, 541 bp, Homo sapiens
ctgcagacttccctcatctccaccctgctcctgggtggtcaaccctggctactactctgggccttctgggaatggttggcctctctctttgccaccactgctttcctttcaatgaaacaaggagcaaagagatccattagtactagcttccaccagacttgtgcccaagtagtccagctcagagctaactcttgagtcttttacagctctggcttgcctcagtttccccatgaggctaacrtgggtggaaggaaagaccacactaaagacagagtttagattactgtaggcaggattgctgttgcctgcacaaagacacttttccaccagccatgacctacagcagtgacgtaccccacctgctgcagcacctgctggctccttgcctcccttctccccagtgcccgcttggctgcctatacaggtcctcccatcccagaaccagttgtagtcctacatccctgctcaacttgctgattacctgctaggaaagctgccacatggctggttctttcatgccccgggggaagcaagggctgct

SEQ ID NO: 507876 - DNA, 541 bp, Homo sapiens
ctgcagacttccctcatctccaccctgctcctgggtggtcaaccctggctactactctgggccttctgggaatggttggcctctctctttgccaccactgctttcctttcaatgaaacaaggagcaaagagatccattagtactagcttccaccagacttgtgcccaagtagtccagctcagagctaactcttgagtcttttacagctctggcttgcctcagtttccccatgaggctaacgtgggtggaaggaaagaccacactaaagacagagtttagattactgtaggcaggattgctgttgcctgcacaaagacacktttccaccagccatgacctacagcagtgacgtaccccacctgctgcagcacctgctggctccttgcctcccttctccccagtgcccgcttggctgcctatacaggtcctcccatcccagaaccagttgtagtcctacatccctgctcaacttgctgattacctgctaggaaagctgccacatggctggttctttcatgccccgggggaagcaagggctgct

SEQ ID NO: 507877 - DNA, 547 bp, Homo sapiens
gggggccaagggtgaaaggtcacagagcctagggggctgtgacatgggccaggaggcaggctggcagacgtccaaccaactttgagaaatgctgcctttccccgagacatctgctcccaaagtgtttctagccagcctgccccctgcaaccacccgaggagttccctggcagaaagcaggtctcagcagcagtgagggggccatgcacagccctgccactctcctctgcctgtttgtccctgcacagcccacackcgcccatgctgggactgctccaaagattgctgcaggcagcagccgacagctccagaatgcaagccaccctctgcccacctgcctggttactcctggtttgcagcttttctggattcaagaccctcccacactcactttgcctgtgtaattcagattctctccccccagcccctgaattgacagccagggtttgaagcagctccccaactttgcctcagaagctcagctcatcatgatttctgttctctgtgatttagcttctgacattgaaactgtggacaagagatcctgg

SEQ ID NO: 507878 - DNA, 590 bp, Homo sapiens
cttactctattcctgctgctttaacaaaataccttagacaggtaatccataaacaacaggaatttagtgctcacagttctggaggctgggaagttcaagatcaacataccagcatttttggcatctggtgagggcccattctgcatagatggcaccccatatgtgtcctcacatggtggaaggagcagagrggctccttcaggcctcttttgtgaagacactcatcccactcaagaaggcagagagcttataacctaatcacctcccaaagaccccacctcttcatagcatcaccttggaggttaggttttaacatttgaatttgagggggacacaaacattcagaccatcgcactagtctacactgtttgcttcagggatgtgtccacaattaaagccagaacaatctgaaaaaaaaagtcagaaaaaactgactttccttacctgtgaatttggagctatgatggtacaaagtctgaaactgtggcagcggtgctgttgtaagaagaaaatctgctgagaatgaacctgacatttgagggtataaatccaagctgatgaggagcctgggttctttgacgtcatttgag

SEQ ID NO: 507879 - DNA, 590 bp, Homo sapiens
cttactctattcctgctgctttaacaaaataccttagacaggtaatccataaacaacaggaatttagtgctcacagttctggaggctgggaagttcaagatcaacataccagcatttttggcatctggtgagggcccattctgcatagatggcaccccatatgtgtcctcacatggtggaaggagcagagaggctccttcaggcctcttttgtgaagacactcatcccactcaagaaggcagagagcttataacctaatcacctcccaaagaccccacctcttcatagcatcaccttggaggttaggttttaacatttgaatttgagggggacacaaacattcagaccatcgcactagtctacactgtttgcttcagggatgtgtccacaattaaagccagaacaatctgaaaaaaaaagtcagaaaaaactgactttccttacctgtgaayttggagctatgatggtacaaagtctgaaactgtggcagcggtgctgttgtaagaagaaaatctgctgagaatgaacctgacatttgagggtataaatccaagctgatgaggagcctgggttctttgacgtcatttgag

SEQ ID NO: 507880 - DNA, 580 bp, Homo sapiens
ctgtaaatccgtctggtcctcggcattttttgattggtaggcgatttattactgcctcaatttcagaactcgttattgatctactcagggattcaatttctttctggttcagtcttgggaaagcttatgtgtccaggaatttatccatttcttctagaatttgtagtttatttccatagaggtgtttatagtattctctgatggtatttctgtggagtaagtagtgacatcctctttatcattttttattgtatctacttgattcttctttcttttcttctttattcatctagccagttgtctgttttattaatttttttttaaaaaaaaacagctcctggattcattgatgttttgaagagtttttagtgtctctatctcctttagttccyctctgatcttggttatttcttgtcttctgatagctctgggaatcccactttctactttttttttttttcctgtaagaccaagacaatcccaaatatcagttagctctggtaagcaaaattctgcctttggaaaatggactcgttctccctttgatattcttccttcattcacaaaactcaaagggcat

SEQ ID NO: 507881 - DNA, 579 bp, Homo sapiens
aacccacatgctgttgggcaggttggttaagccttagtttcctcaactacaaaagatttttaaagtaaaagagataatatatgtaaactgcttacagagcgctgggaacagagaaaatacttaatacaatggtcattatttttaaagttaggcttgctggattttggtgggaaatcaagatggcttccttctgaaaactgagtctgtctcatgtctgatttcacagaaacaactttgagatggggattcttgagcacacgagttactgaatgagaactctcggggaaaagggagtgagagctgcaggatggggcagagaaaggagtaagttagaatgtgctttcaggtgaagtctcctttcattcccatcccaggggaagctctggggcataaattgcctgtcctctgtctgtcctggcttgagaaaaggcttctgtggaccccaccccaacccacccaagtcagttatgtctactggacacccagggccgtggcttgagagatctaactcccagcacttcctygcaaagcagctctcttcgcccaaagccacttttatggggaaggctgcagacatga

SEQ ID NO: 507882 - DNA, 606 bp, Homo sapiens
gctgcttcctcagggtgaagggtacctaaccagtaaaagagactccaggggatttgagtgtcacattctcaccagcatctgccatggagaaaagccagtcattccatcaaaacccagaacccaccaacaagggtgatctctggggcaaaacataaaactgtatgccacctccattattttatccttttyttccccctccttcaaaattttccttttattaaaatatattgtgattaagcacaattacaagagaccacaatatcttcacttccgagttatagtctgtcttactgctgtcaaaacatggttacgaacgatttttttctgcaaagagctcgaacataaagtacagaactcaatacagagggggaagttaatcgctacaacatggtacctaggtaacaaagccttcagcagggcccagcacataagagaatcaagagcccacatgttctaccagaggtgcggtcacattttagacactgctaaagtgtattttgggacaattccatcataaagttatagaaagagggatcccaacaactgtcctctcctgaggttatctttgttgagacgattgtcatactatttccttggaaagcatac

SEQ ID NO: 507883 - DNA, 606 bp, Homo sapiens
gctgcttcctcagggtgaagggtacctaaccagtaaaagagactccaggggatttgagtgtcacattctcaccagcatctgccatggagaaaagccagtcattccatcaaaacccagaacccaccaacaagggtgatctctggggcaaaacataaaactgtatgccacctccattattttatcctttttttccccctccttcaaaattttccttttattaaaatatattgtgattaagcacaattacaagagaccacaatatcttcacttccgagttatagtctgtcttactgctgtcaaaacatggttacgaacgatttttttctgcaaagagctcgaacataaagtacagaactcaatacagagggggaagttaatcgctacaacatggtacctaggtaacaaagccttcagcagggcccagcacataagagamtcaagagcccacatgttctaccagaggtgcggtcacattttagacactgctaaagtgtattttgggacaattccatcataaagttatagaaagagggatcccaacaactgtcctctcctgaggttatctttgttgagacgattgtcatactatttccttggaaagcatac

SEQ ID NO: 507884 - DNA, 502 bp, Homo sapiens
gggaatgtctatggggaggcatgcatgtaacaaaaacatcacacttgggaaaaaggcgccttttcaggaaccttactttttgctgaatagcaaaatgtcattgtttggtgatagtggtgttctcaaatgtacagtgatcgcatatacatttgtgttgcaaaccaggttatttctgaragtgaaagagggctgtgtttgacatttatttattaaaagttgttttattgtaaccgtatgattccacttatttgagatacctaaagtagtcatattcatacaaagtatgatggcggttaccaaggactggggagaggggagaatggggagttcttttttttttttttttttttagaagcacacatggaacttgctttattggatttccgttggagatttttagtttaaccaacaagaaacataaagttaggttttatcatcaaaccttatagttgactcataaccctatgactcaggtctctgactcaccttcacaagatttcat

SEQ ID NO: 507885 - DNA, 631 bp, Homo sapiens
gctggtgaaaattcaatcagatacctgcaaatagcaagcatcctatgtgaaaaatgaagaagtttggtgaacatcttggactggaattacacagaatggaaaataaaggagaagtttcctctcctccttaratgaaatcatgccatatttagttgctgtcaccattttatgtcaattcaaaccactctaattttctttccattcccagtctaccaaaaatacaatccccaattttccctgatcctgttgttttcattaattcctctcccagggacttacctaatgcacaagattaatgtgtttctgactagagaatagcagtctccaacatggagtatatacagccaagacacatgataatccattgagcagtgtgagaaaactatgaaaatttcattgaccatttccaccttctttttagtttccatatttgaaaatgttttttaatgtttatgacattttaatactactgtatacagtatcatcataatcaacaaatatatagattttgtattatattgtatgtaatataaaaagtagatacataatttaaacagaatatattaggttataatgtataatattataaacattatgaatacatgtagcttactattttttcataccagag

SEQ ID NO: 507886 - DNA, 611 bp, Homo sapiens
tctaagagagattaactaattaactaagagagattaactaagagtctgaacccttttaagatagaaaaaatatatttatcgtctattttgtctgaagcctgtgacctggacgcttcatctacacaacaaaaccattgttggcggggcgtggtggttcacacctgtaatcctagtactttgggaggctgaggtgggcagatcatgaggtcaggagatcaaaactatcctggctaacagggtgaaacccyatctctactaaaaatacaaaaaattagccaggcatggtggtgggcgcctgtggtcccagctactcaggaggctgaggcaggagaatggcttgaacccaggaggcggaggttgcagtgagcagagattgcaccactgcactccagcttgggtgacagagtgagactgtcaaaaaaaaaagaaagaaagaaagaaagaaagaaagaaagaaagaaagaaagaaagaaagaaagaacgttggcttccacaatccccctttgatggttaatattgagtgtcaacttgactggattgaaggatgcaaagtattgtttctgggtgtgtctttgagggtggactgggagatccagacccaccctcaagct

SEQ ID NO: 507887 - DNA, 627 bp, Homo sapiens
aacttacccagtagagatgtttataacaatacacaaagcattttatctactcacctatttactagttcatttatttattttcccttactatgtaaagggcttgtttactattatatacacaatataacattcaagatgccattatatgcaccatataccattcaatggcatattgaatataatgcatataatggtaaacaaaacagatgaagcccctgctcttatgaagcttgcagtctaggaacccttaaatttgacctcatctttttatgaagayggcataaagttgactgagagtgactgcacctttccagtgtaatgagaatggtgtttttcttcctgattgggtaagtgtgaggtcaagatcttcctggactgggaattagaacaggctctaaataatttaccgttttaacttagtgaacttcacatttctctacctgtgtttttttatgctaaatgagtgttaggtactcaagaaatataccgtccaaaatgaaaaccactagcctcatgtggctattgaaactcaatgtaattaactaatatcaaataagattaaaagctcactttcccagtctcactggccacatttccggtacacatagccacctgtgactaatggtt

SEQ ID NO: 507888 - DNA, 593 bp, Homo sapiens
tcctaatgattggggtacaggtgcacccggctgtgcacctcacagactggaagcttggggaagaccagagagaaasaaatgatgaactgaggctgtagagcttcttccctgggtgagtttatgtaactctctctgtagggccctgcttgggaacaatctgagcatgaggtagaagtctaagtaaaattgccacaagtaaaatgggcaccacatctagcatgtggttcacaattagttaggctgaacgctttcctcctcccttttgaggactaagctctgatttttttttttttttaatcttgcccaaattcctatgtaaggggtctttggagtcacgccctacaaaccataaattctcatcagatgggttttgtttaaccctatatatcatcacttactttccagtctgactctggcataacattatgtgacaaagaagaaagtcaaattattttaccccaaaagcatgtttctttgccatattttgaaatggtcctgcaaagctgtcctttgtggggaggggcatgtacatctgtaaagaatctcttaacatagctagttttttcttccaggccctcccaatcctgaagaga

SEQ ID NO: 507889 - DNA, 599 bp, Homo sapiens
aagtgctggttattttacaacgataaaatagcactttagggggttttgacactggggcagtggtaagaataagaaaaactgatgacagaaggttgggctgcttcataagacctattgaagtaataaactttttaatgcaataaaatttcttaaagaaatgtccttttttttgggggaggttgaagctgacggatcmcctgaggtcaggggtttgagaccagcttggccaacatggtgaaacccggtctctactaaaaatacaaaaattagtcaggtgtggtggcgcatgcctgtaatcccagctactcaggaagctggggcaggagaatcacttgaacccaggaggtggaggttgcaatgagacgagatcattttacttcactccagcctgggcaacagagtgagactccattttaaaaaaaaaaaaaaaaaaaaaaaaagtcagtttttagccatagtggttggtgggtgggttctccccctggggcaggaaaaatctaagtgtaagagcacatatttaagaaacattatttaccagatttaaaaattatatttaattcactctcctccaaatatttaataatcttaatgttctattc

SEQ ID NO: 507890 - DNA, 599 bp, Homo sapiens
aagtgctggttattttacaacgataaaatagcactttagggggttttgacactggggcagtggtaagaataagaaaaactgatgacagaaggttgggctgcttcataagacctattgaagtaataaactttttaatgcaataaaatttcttaaagaaatgtccttttttttgggggaggttgaagctgacggatcacctgaggtcaggggtttgagaccagcttggccaacatggtgaaacccggtctctactaaaaatacaaaaattagtcaggtgtggtggcgcatgcctgtaatcccagctactcaggaagctggggcaggagaatcacttgaacccaggaggtggaggttgcaatgagacgagatcattytacttcactccagcctgggcaacagagtgagactccattttaaaaaaaaaaaaaaaaaaaaaaaaagtcagtttttagccatagtggttggtgggtgggttctccccctggggcaggaaaaatctaagtgtaagagcacatatttaagaaacattatttaccagatttaaaaattatatttaattcactctcctccaaatatttaataatcttaatgttctattc

SEQ ID NO: 507891 - DNA, 599 bp, Homo sapiens
aagtgctggttattttacaacgataaaatagcactttagggggttttgacactggggcagtggtaagaataagaaaaactgatgacagaaggttgggctgcttcataagacctattgaagtaataaactttttaatgcaataaaatttcttaaagaaatgtccttttttttgggggaggttgaagctgacggatcacctgaggtcaggggtttgagaccagcttggccaacatggtgaaacccggtctctactaaaaatacaaaaattagtcaggtgtggtggcgcatgcctgtaatcccagctactcaggaagctggggcaggagaatcacttgaacccaggaggtggaggttgcaatgagacgagatcattttacttcactccagcctgggcaacagagtgagactccatyttaaaaaaaaaaaaaaaaaaaaaaaaagtcagtttttagccatagtggttggtgggtgggttctccccctggggcaggaaaaatctaagtgtaagagcacatatttaagaaacattatttaccagatttaaaaattatatttaattcactctcctccaaatatttaataatcttaatgttctattc

SEQ ID NO: 507892 - DNA, 599 bp, Homo sapiens
aagtgctggttattttacaacgataaaatagcactttagggggttttgacactggggcagtggtaagaataagaaaaactgatgacagaaggttgggctgcttcataagacctattgaagtaataaactttttaatgcaataaaatttcttaaagaaatgtccttttttttgggggaggttgaagctgacggatcacctgaggtcaggggtttgagaccagcttggccaacatggtgaaacccggtctctactaaaaatacaaaaattagtcaggtgtggtggcgcatgcctgtaatcccagctactcaggaagctggggcaggagaatcacttgaacccaggaggtggaggttgcaatgagacgagatcattttacttcactccagcctgggcaacagagtgagactccattttaaaaaaaaaaaaaaaaaaaaaaaaagtcagtttttagccatagtggttggtgggtgggttctccccctggggcaggaaaaatctaagtgtaagagyacatatttaagaaacattatttaccagatttaaaaattatatttaattcactctcctccaaatatttaataatcttaatgttctattc

SEQ ID NO: 507893 - DNA, 634 bp, Homo sapiens
gttactgcggaaaatcagcaacttcagagacttcccaagagctaagataacatctttcccttttagaaccaataaaatgtycacacaaggaatcaagaatatgacaatgttttatcttctatttaaatttgttcatgaagctacacttttattgaaagccataaattgttcattgacatcatttctggaaacttattcttagaaacaatttttaaagtagtaaaagtataaatgtaaaaaatgttccccacaatctttgtttcaaaattacaaaaaagggaaaaaaaatgtaggagaatggttaaatatattgtggtttatcttcttaaaaattaaatacaaagagcataaagtataataagaaagaacatttttgatatcttaacttttaaaagcaggtatcaaaactgtagggacattatgattgtccttatattatatatacatgggtagatgaaagctatcaatagatagggaggcaaacagagattatagaaataaaaatggctgctcaggtattaggaaagtatgtgtacgtccccccctcccccttttttcaattttcgttttatgttgttttaatattatttcagtgataaatacatatatcttcttgtctttgtaactctgagcc

SEQ ID NO: 507894 - DNA, 499 bp, Homo sapiens
atctttttttcttcttcttcttccatgaaaataacatgatgattctctcaaaaggatttggctaaaatcctacagtaaagtggttagaaaactacaaatagctgaggggaagaaataaaagtaggaatcaaagctagaaacggcggcatcttggctcacacatccctgaatccaggtgcaagttgtgtgtgataaacttggaatgaggtacttccctacctactcctgtgaagacgattagaaacacaaacacacaacttccaawtttcttaggcaaaataacaatccattttagaaacagaaatccaacccagtgagggaaattatacattgttctttcccatacaaaatctctacctgctttgctgttttccagtatggtctccgtccctaagggagagggttcttacattctctcctaatcacttaagtgacaccgcaaagataaaactctaaaacctttgccagcaagtaatcagattccaaacctaagagggag

SEQ ID NO: 507895 - DNA, 613 bp, Homo sapiens
ggttaatgtctggaggatggttttggacagcatagttcggagcaggttaatgtttaatgtaaaagtacttagatgagtacttggtacatagtaagagtgtttaagagttaattacattattattattattgcaaactaaaaattgctcccaggttgcatgttgtgagatagtaaggcgaaggtgaggcacctagtgtcagtattggctttaggtggaagaaaataaactggaattgctattgttgcattactggtgtaagaaaagtggtgatggacatggaaatagatcccagagcagaggtttgggcstgaaaatttggaactaggaagtttgaaagtgactcatctaagggaaggcaggggtgtgttagatggtccccaaaagcctttttgccttgagaatgtgattttatgtaagttcccctccacctggagtagtttgggggtagaaggtaggcatgaatggctatgggggttctgtagaggagagggagaagaagtgactctttttgtctggtttggattctcttatcaatgtttttgccggcattcccaggataaggaggtatttccatatgcttctgcaactggtttttgttaaacacagaccata

SEQ ID NO: 507896 - DNA, 605 bp, Homo sapiens
ctttatgtaaacaacatgcaaytccagaataaaatcctaaaatattataggaaagttatggtggcttctttaaatggctaagcattagggccataggtacaaggataataagaagacgcacaactcggaacagagcaacctgactcaaacacagactggatcatctcgaaaacgttgtcaggcaccgagggctgactgggccactacagaaacagctcagggcctacccagtcttgtgtccctgcagtgactgcacaagaacaatggtttatatttgtacagtgcttaacagtttacaagctgctgccacaggcagtaactcaggatcttgaaaacattccaaatcacttcggactctcctggtttgcagagcataggaacagatctgctctgccaaccatgtgatgtggggctaaaacacgacccatagcggccttccggtccctgggctctgttgggctggctgcactttgagaagcagccaacgtggccgacctgctgaagttaattgctgcagagaaccaaggttaacaaaagctgctggggaaaagatggtggcaaaaagaaaggtaatcagaagttcagtgtcggggggaattagcagt

SEQ ID NO: 507897 - DNA, 657 bp, Homo sapiens
ctgttttgtattgatctgagattagaatggtcttttcttggctggatttaaggagtggggggacacaatggggacctggtcttcatcacactcagaggagagaggataccactcaaaaagatgggagctgaaggccctcagaactgtgaatgcctcatatgaaaatatggatttctgtcaaaagccaaaagagttgaggcatctggtttcagtaatgtattagatcacccatcctttgggtggaggaagatggctccaagttggaagctggtcccattttaggccatatgagaatatcaaccaccaggggaaccaagccaatccaagccaacatttattgttgcacaagcctgttgcagtcctgaggggatcttctggcagaggtgtgggtaggaagctgagtggccactggggtgaagggcagacagaggaggctgtgaccagcaggctcctatccagatgatacatgagatggaggcctcctcagccacactccagggagggtggggtggcaagggggattcagggataatggcattaataatacaagtggtaaacaaataaccaagaggatctggctggttacgatacacaaaagttagcagtaagagtcygtgctttcacattcctatcagacagatctgagttcaaatcctg

SEQ ID NO: 507898 - DNA, 408 bp, Homo sapiens
tgtggtggctcacgcctgtagtcccagcactttgggaggctgaggcaggtggatcacaaggttaggagattgagaccatcctggctaacagggtgagaccctgtctttactaaaaatacaaaaaattagccgggcgtggtggcgggcgcctgtggtcccagctattgggaggctgaggcaggagaattgtgtaaacccaggaggcggagcttgcagtgagccaagatcgygcccctgcactccagcctgggcaacagagtgagactccgtctcaaaaaaaaaaaaaaaaaaaagaagatgccttgtatagatcaggctagccttgaagactccagggacagagagtttgctacttagtaagcagccagttttatactgcaaagctctaattattagaaatcttatcat

SEQ ID NO: 507899 - DNA, 607 bp, Homo sapiens
caaggcaactttgttaaaaaaggcagagttgggattctgactccagttaaagggctcatgctcttgaactactcttcctgtattttccaagtatatttcaccaacaatttgcatcaacatgacctgggataattgtaagatataactctccatggctaccaccagagattccgatttagtaagaattycggggagagccacaaatccggattactaacaagtgatccaggtggactttgtgcagtctaaagtctgtagacctctatattgtactatattgcctgtttacagcaacaatacttatttattttattaaagggtacgtgattttaaaattttgatacctattacacttttgggaattttatcaagaagaaagataatccccttttttgatagtccctaattgttatttttttcccaaggagtaaatatgttaaaatgctaagagattaatcaaaagtttttcaacgagtaccttttactgttttttttaactctatattggcttgctagggtttccataagaaagtactacaaactgcataccttaacagaaatttattgtctcacagttctaaaggctagaagttcaaaattaaggtgt

SEQ ID NO: 507900 - DNA, 355 bp, Homo sapiens
  misc_feature (1)...(355): n = A,T,C or G
nnnnnnnnnnnnnnnnnnnaacaattagttcatcacacatcctctgtgggtgagaagttacaccagaagccgagtcatacaccaaaggagctacgcgagagtggaatgcagttagggaacgagaaggagctcaggggccggtggtgtcaagctctgatgaactgaggcacccagggccttgcccagtcctgctcgcaggacagtcactagatagggtctgcctcctccaaggcagggctggggatcccgtgaccacagctcgctccgtcacacccttccccgttgcaggatccgatcatacctcaygtgttcttccaatcactgtgttcttctttggcttattgtgccctagtca

SEQ ID NO: 507901 - DNA, 302 bp, Homo sapiens
agctggacagagctctcagtagatacaagagractagcggacaaaaaatggaatttagaaccagtgacaagatgggggctgcttgatgctcaacctatgggaagagggaaagtctaattttatatgtaatagactttcatatgtaaaatactcatgttataaataatagaatagccatgaaaataatagttaaatgatgtgaatcttccaagccaattgaaggagaaaaatgtaacaatttctttaaaatagttaattcaaaataagtcataaaagagagatgaagaaactaaccagaataa

SEQ ID NO: 507902 - DNA, 432 bp, Homo sapiens
tcagaaagctcattggacctggttttgaaaataaaacaaagttaaaacactgggaggagttattgtgcagtgtggagtactcaggctttcttataaagaaaaaaaaagttatctggtaccaaagtgtgtaacctacagaccctcaggtactgccctgtgacttctctgtatgayatcacaaggctgccaagtgcctgtttttctagaactaggagttggtgacgtttggctactgctgaaaccatgcataggattggtttactaaattaaaaccttattacctacatcctccaaaagacagttggaagtggagagattttgatttggtactgttagaggtggcaatgaagagcataagcaccagggagatggtttaatggtaactgccttttttgatgttaggctgcagctccaactgggaacttgcgttac

SEQ ID NO: 507903 - DNA, 519 bp, Homo sapiens
attacagcgttaactatgaattaattctccatctgtataggaaacaatgatatgcagtaatgtgaactatgtccatgtttaactcatttagaaatactggcaagaggctgggagcagtagctcacgcctgtaatcccagcactttgggaggccgaggtgggcggatcgcctgaggtcaggagtttgagaccagcttggccaacatggtgaaaccctgatctctagtaaaaatacaaagattagccgggcgtggtggcgggtgcctgtaatcacagctactcaggaggctaaagcgggagaatcacttgaaccagagaggcagaggttgcagcaagccgagatcgcgccattgcactccagcctgggcgacaagagtgagactccgtcttcaaaaaaaaaaaaaargaaagaaagaaagaaaagaaaaagaaatactggcaagagtggactgagggatgttcatttgcagacaagcatgccatgcaggtgtgggggtgttgtaaacaatgacaagcgtta

SEQ ID NO: 507904 - DNA, 519 bp, Homo sapiens
attacagcgttaactatgaattaattctccatctgtataggaaacaatgatatgcagtaatgtgaactatgtccatgtttaactcatttagaaatactggcaagaggctgggagcagtagctcacgcctgtaatcccagcactttgggaggccgaggtgggcggatcgcctgaggtcaggagtttgagaccagcttggccaacatggtgaaaccctgatctctagtaaaaatacaaagattagccgggcgtggtggcgggtgcctgtaatcacagctactcaggaggctaaagcgggagaatcacttgaaccagagaggcagaggttgcagcaagccgagatcgcgccattgcactccagcctgggcgacaagagtgagactccgtcttcaaaaaaaaaaaaaaagaaagaaagaaagaaaagaaaaagaaatactggcaagagtggactgagggatgytcatttgcagacaagcatgccatgcaggtgtgggggtgttgtaaacaatgacaagcgtta

SEQ ID NO: 507905 - DNA, 586 bp, Homo sapiens
aaaaacccaccttgctctctgttgagccaactcttgaagctttaaggactgaaatatttttctggtgtgcatagataaagacttaaagtttcaggtttgcttgtctcttattaaaaggaagaaaaatatgtctctccctcccacctttaaccacttcatttcagaccgcagagcttattaatattcagtaatatgtctaggcttraacagataaaaatagccaagcctttcatttagaaacagacttctctaagcacaagcttattttctctatcgctgcaagtataactgcctgtctctgcagatagatcatccgtctccttccagtgaccagcatgtgaaatgatggtcactgtcacttattttgtttcatgaaaggctgcctgttagcacatttgtctgtttctctttcaaccatacttgaacctgcaccccccccccaaaatattaaaatacgttaaatatctgttaaatatcccttctatctgttaaggggaagattatccttcagtaagaggtgatccttggtcacccccaatgttagcattatctgcacattatagagctgtgctgtttaatacagcag

SEQ ID NO: 507906 - DNA, 411 bp, Homo sapiens
ttattgtatgggatgatgactatgagagagctatttttggatacttttatctgaaaatctttatgcacttttttttttttttttttttttggagaaggagtcttgctgtgtcgcccaggctggagtgcagtggcacaatctcagctcactgcaggcttcgcctcctgggttcacgccattctcctgcctcagcctcccaagtagctgggattacaggcacccactaccatgcctggctaatttttttgtatttttagtagagatgaggtttcaccgtgttagccaggatggtctccatctcctgaccttgtgatcygcccaccttggcctcccaaagtgctgggattacaggtgtgagccaccgtgcccggcctatgcactcttaaatacagtttttaaatgtgtgtgtgc

SEQ ID NO: 507907 - DNA, 572 bp, Homo sapiens
ccctgttgcttctcccaccactctgaccaatctcctacagatgtccctggagcatccctcaaccaatgatgaaaggcagttggtggataaataccccagttccttacaccttggttgggaaaactctgagatgtgttatgtgtagtgtcctagaggtcccctgtgggataagtcccagttgccacagaagtaaatggctcattatcacaccccgttatcttttttcttttctctatttcacttcacctctccctgacccttgattccttggctatgacatcaaataaattgctagtacttaaatctttgtcttgacaactgcttctgggagaaccaagtgaaacttatctgacctgggtgtcattacagcagaggcattccacctaartaacaattacatgcattcaaataaactgttcacagtagatttatgtgctacttaaatcatgtgcttccacataaagatgtaaggttatagcaacctgaaacataataaattaaaaaaatgtgatgtggaaaaagaaaacaatgggtgggtggatgggcgactagatggctgaggagatatgttg

SEQ ID NO: 507908 - DNA, 596 bp, Homo sapiens
ctgaagccagtctagtcttcaayagcactcatttggttcagggtataatcacctttccctgagacagaaaccccaaagagtgggcaaatgcatactaatttgggcatgccagttaagagaagcaaacacattcacagcttgtaaagtttttatttactgggaagctaaagtgacagaaaaacaatttgtctaaaataagggtctgggtcagtttcataactcttgttacatcttttggaagtttccttccgtgtcatgagctgcaaccttgtatcttaatgtgaaggtctgtgggaagctgaaacatgacttaggggaaatgaccttctcttagttgtgtctgggacagggagtctgacatcccatccctctccaatcaggactgcattcagtgtgcacataggtaaacaaaccaaaatagacctcacccaaaatagctccttccaagacaccctacagctctgtgtgaggccaggaaggctagtctggtttggatgctggctagggggccagcgctggtctggcatgcctcctaaggaagcaggagaagtacctgagactgttgtgtttgtgatccgacagcagttactgttccc

SEQ ID NO: 507909 - DNA, 496 bp, Homo sapiens
  misc_feature (1)...(496): n = A,T,C or G
agactaccatactgtaaatatgagctttatggtgtcattctcagaaacttacacatttctgctctcctttctcctaagtttcatgcagatgaatataagggaatatactattatataattcattngngatatccacaataatatgactggcaagaattggtggtaattttgtaattaaaataattattaaacctatgtcttgtgttgccactctgtcatttagggtgggatgtagagtacttttaatcttaaaaaatagagtgagacaaaaacctacacaacttttaaaactttctctttaagtagatctttacttttaacaataacaaaggcattttcatcagttatgtgaaatacgaagattatatctattatrgcgatttattttaaaggtaagggaaatgaggtacagcaggacctttctaggaaatgtggcatacaaaacatttttatctcataaaacataaaaattacaaaaatattcttacaaaggtat

SEQ ID NO: 507910 - DNA, 496 bp, Homo sapiens
  misc_feature (1)...(496): n = A,T,C or G
agactaccatactgtaaatatgagctttatggtgtcattctcagaaacttacacatttctgctctcctttctcctaagtttcatgcagatgaatataagggaatatactattatataattcattngngatatccacaataatatgactggcaagaattggtggtaattttgtaattaaaataattattaaacctatgtcttgtgttgccactctgtcatttagggtgggatgtagagtacttttaatcttaaaaaatagagtgagacaaaaacctacacaacttttaaaactttctctttaagtagatctttacttttaacaataacaaaggcattttcatcagttatgtgaaatacgaagattatatctattatggcgatttattttaaaggtaagggaaatgaggtacagcaggacctttytaggaaatgtggcatacaaaacatttttatctcataaaacataaaaattacaaaaatattcttacaaaggtat

SEQ ID NO: 507911 - DNA, 596 bp, Homo sapiens
ctgaagccagtctagtcttcaacagcactcatttggttcagggtataatcacctttccctgagacagaaaccccaaagagtgggcaaatgcatactaatttgggcatgccagttaagagaagcaaacacattcacagcttgtaaagtttttatttactgggaagctaaagtgacagaaaaacaatttgtctaaaataagggtctgggtcagtttcataactcttgttacatcttttggaagtttccttccgtgtcatgagctgcraccttgtatcttaatgtgaaggtctgtgggaagctgaaacatgacttaggggaaatgaccttctcttagttgtgtctgggacagggagtctgacatcccatccctctccaatcaggactgcattcagtgtgcacataggtaaacaaaccaaaatagacctcacccaaaatagctccttccaagacaccctacagctctgtgtgaggccaggaaggctagtctggtttggatgctggctagggggccagcgctggtctggcatgcctcctaaggaagcaggagaagtacctgagactgttgtgtttgtgatccgacagcagttactgttccc

SEQ ID NO: 507912 - DNA, 407 bp, Homo sapiens
aggttacttttcaacagttaaaagaaccttcctgaagagtaatagagaatagtagtaaattatcactgaagtttttaggaagagattgtgtcatcaggatgttttagaagagattccttcatgagtgtagaagttggactgmtttctaaagtccctttctatttttagattctcttctgcacagttatgacctacacataatgcactgaatctgttcccttgatagtttctgcataggctttggttgtgccacaagtgtggcctgcagtgaatgacctggtctaactctgtcattggtcctaggactgaactgtccaggaatatgcctaatcctgagggaaagcatcaatatggctgttggttatagagagaaagatggcttagactcaagatctcaaatccttgtc

SEQ ID NO: 507913 - DNA, 560 bp, Homo sapiens
gctcctggcagtgttggttctttggcctagtgagagaaccaggtttgttattagaaacaaaatactaacagaaggcttttcagacttttgatcctatgtgcgcccaactgatgatcatatcagaaatgtgtcttctgcagagctaatgatatctaaagtaagaatgkattagaaaagaccaaatgaaatagacatgataccaaagcaaaagatggagagaaaagaatttttcgccagagaggagaccaatgggtgaaaaacattgttggtgctgtttagccttttccactcacttttcccatcaaacttggctaatgttactcaggaagctcagtgattcaattactattcattaaggcttagtgctctcaagctgtttaagtatggctgagaacaactacctccaactggccttaacttaacccagtatactcagactgaaagcaggtttacattccaagaaattgtgcaggactttcagctcatcttctcagcttttcagtaacctggtacttaactgccatttattgtaaacccttagtgctttgtctttatttata

SEQ ID NO: 507914 - DNA, 560 bp, Homo sapiens
gctcctggcagtgttggttctttggcctagtgagagaaccaggtttgttattagaaacaaaatactaacagaaggcttttcagacttttgatcctatgtgcgcccaactgatgatcatatcagaaatgtgtcttctgcagagctaatgatatctaaagtaagaatgtattagaaaagaccaaatgaaatagacatgataccaaagcaaaagatggagagaaaagaatttttcgccagagaggagaccaatgggtgaaaaacattgttggtgctgtttagccttttccactcacttttcccatcaaacttggctaatgttactcaggaagctcagtgattcaattactattcattaaggcttagtgctctcaagctgtttaagtatggctgagaacaactacctccaactggccttaacttaacccagtatactcaractgaaagcaggtttacattccaagaaattgtgcaggactttcagctcatcttctcagcttttcagtaacctggtacttaactgccatttattgtaaacccttagtgctttgtctttatttata

SEQ ID NO: 507915 - DNA, 596 bp, Homo sapiens
tgttagtcttaggtctagagtttccctcactctagtcaacctttttgatgtgctgtgttctaacctcttcttaccaggaatgttcatcaaggggaacatttctagccttcggttttaaagcccctagctcaccagctcaccaccktattgaggaagagaaagtatcatatggaattatgttttcagtcttgcagacagtggttggagattgcaaggccaacctgaagtaggtgtggttttttgttttgttttcagctaaaattgcttgttggtattggcaggaggcttagtagaaaaggaggggagaatttgtccctggcagtttttaaatccacaaaaagccagcatttgctttgcaagcacatatctcctaagttttgtgggctcctgcccacagtaggcaagcagtttactctttgtctgcagcaactcaccatacttcaagactccttcgatgttgattccccatttggttcaagctctctgacctacagcaattttactactacatcagcgctgagagtagacagcaacaaagacatcaaaagacccttggcttatttttacaccctattgctcagcctttgttgttactg

SEQ ID NO: 507916 - DNA, 596 bp, Homo sapiens
tgttagtcttaggtctagagtttccctcactctagtcaacctttttgatgtgctgtgttctaacctcttcttaccaggaatgttcatcaaggggaacatttctagccttcggttttaaagcccctagctcaccagctcaccaccttattgaggaagagaaagtatcatatggaattatgttttcagtcttgcagacagtggttggagattgcaaggccaacctgaartaggtgtggttttttgttttgttttcagctaaaattgcttgttggtattggcaggaggcttagtagaaaaggaggggagaatttgtccctggcagtttttaaatccacaaaaagccagcatttgctttgcaagcacatatctcctaagttttgtgggctcctgcccacagtaggcaagcagtttactctttgtctgcagcaactcaccatacttcaagactccttcgatgttgattccccatttggttcaagctctctgacctacagcaattttactactacatcagcgctgagagtagacagcaacaaagacatcaaaagacccttggcttatttttacaccctattgctcagcctttgttgttactg

SEQ ID NO: 507917 - DNA, 335 bp, Homo sapiens
gattgccttgggcaagttccttracctctctcagcctcactttgttcctggtttaaatggggattatgataactaccttacaaagttgttatgccacgagttaatacttctccagcctccagttctatatctggtatataggaagtatttaataaataggaacaattacaaatgctattattatttttcagttactatttcaggatctctggtccagaaccaccaggacagcactaaaaacacctaatgtgctccaagggagaagtgggctatgtgatgtaaggctcaagcacagaatctgctggctctcttgagtatgcaggggagattcaatc

SEQ ID NO: 507918 - DNA, 520 bp, Homo sapiens
tgcatgcaatgttgaattcagtcatatgtacaaacgattttcagtttctctttagccaccaaasccttactttgaaactcaaaatgcaaacatgaaacccggagaaccaccctggttcaatttgcagaagcgtgagagttctggggaagggagaagattcccctaaccccgcccctgctcccaggcagccttggagggaactccctggaaaacagtgtggaaaccaccaaacagaaagtatatctacccaagtgacttacggaatctttgtgtctttcaattcagatgttagatcttatggaatgtgtttatgtagagagctagcagcacacaatttccaacacaattatgatttaatacattagatttaaaacaacgaaaattgtctgaaaaaacaaagatgaagagaggacatccaacattagtctcctcaaaattcatctcctgctctacacatacacacagagtctacttttttgcttataacgtgtaacaattaaaattctccctgactgagatt

SEQ ID NO: 507919 - DNA, 520 bp, Homo sapiens
tgcatgcaatgttgaattcagtcatatgtacaaacgattttcagtttctctttagccaccaaacccttactttgaaactcaaaatgcaaacatgaaacccggagaaccaccctggttcaatttgcagaagcgtgagagttctggggaagggagaagattcccctaaccccgcccctgctcccaggcagccttggagggaactccctggaaaacagtgtggaaaccaccaaacagaaagtatatctacccaagtgacttacggaatctttgtgtctttcarttcagatgttagatcttatggaatgtgtttatgtagagagctagcagcacacaatttccaacacaattatgatttaatacattagatttaaaacaacgaaaattgtctgaaaaaacaaagatgaagagaggacatccaacattagtctcctcaaaattcatctcctgctctacacatacacacagagtctacttttttgcttataacgtgtaacaattaaaattctccctgactgagatt

SEQ ID NO: 507920 - DNA, 532 bp, Homo sapiens
catgcaatgttgaattcagtcatatgtacaaacgattttcagtttctctttagccaccaaacccttactttgaaactcaaaatgcaaacatgaaacccggagaaccaccctggttcaatttgcagaagcgtgagagttctggggaagggagaagattcccctaaccccgcccctgctcccaggcagccttggagggaactccctggaaaacagtgtggaaaccaccaaacagaaagtatatctacccaagtgacttacggaatctttgtgtctttcaattcagatgttagatcttatggaatgtgtttatgtagagagctagcagcacacaatttccaacacaattatgatttaatacattagatttaaaacaacgaaaattgtctgaaaaaacaaagaygaagagaggacatccaacattagtctcctcaaaattcatctcctgctctacacatacacacagagtctacttttttgcttataacgtgtaacaattaaaattctccctgactgagatttcctattagtacta

SEQ ID NO: 507921 - DNA, 538 bp, Homo sapiens
actcttcaattaacttgtaaagttttgacagtgtaatatctgggccctgtgtaaaggagagatagggaggtatggattttaaagagctggagactgataaagaattgcaaacataaattcatttatcaacccctctgctttaataatcactccaaamatgcaaataaggatttttctatctacctaaaacactaaagtaatacttcacatttgcataccatttttgtctagtcagtggaatggtctaaaatagaaaaaaagcataggatttatagtctgaggatccactgttccttccttcttagctttgtaatcattgcaaaattgtgacctctgagttctagtttccttcatcagtaaaatggagataataatatctcccttgtttttggcaaagattaaataagataatacaaagtgctttgtaaactggaaaacactatacaaatactatttttcacaaacacaatctcatttgatcttctcccaaaccttgtaaggtaggcagacatactatgtgctgaagtctataaagagt

SEQ ID NO: 507922 - DNA, 582 bp, Homo sapiens
atgacctccattcactgcctcaaggagcggatgatcttgtgatcctccagtccaaaggcctctggggcctggcccaggaattggtttctcaaaggttgaacctgtgccagaatctccagagtgcaggggacacaggtctgaggcccctgaaaggccttgctgggttccctgctgcaaatgctggcatctcggtgtcctggggcagatgtaagcgagtcccacaaacagtggcttgcaactacaggacttgattctctcacagttctcacagttctagaggccacaacctaaaatccaggcatcagcagggctgtgctcgctctgaaggctctggagagagtccttacttgtctctcctggcttctggtagcccacggtgttccttggcttgtggatgcatcactccagtctctgcctctcctgtcatgaggccttctgccttgtaygtgtctctgtgtcttttcttcttgtaaggatatcagtcactgaatttagggcccaccctactctagtatgacctcatcttaacaaattacgtctgccaatatcccatttccaaataaggtcacactcccaagcttc

SEQ ID NO: 507923 - DNA, 476 bp, Homo sapiens
gaaatccatatggtgtctggaatgtgcttcaaaataatggaggtgggcgtgaggtcttagaaaaaaacaaaattggccctgagttgatcattgttaaactggatagtggtcattcattatgatgaaggggctcattatactattctccacttctgtgtactgaagattttctgaactaaaaaggtagaaagtacatgcattaaacttcaggataagttcaatcacaccaccctatacaaatctaatttcagatctttaccgaaaataagggaaaccrtgttctacagaatcgagtccacatcaagatgaaatgcttttcacaccatttagagattagtcttatagctacaattactcaagttgaagttttgaaattacctacgcagtcttcagagtcaacgcctactgtcgctcaacctaccccctctgatccccctttcctcccctgccccaccagtcccagggtgtgggcagag

SEQ ID NO: 507924 - DNA, 476 bp, Homo sapiens
gaaatccatatggtgtctggaatgtgcttcaaaataatggaggtgggcgtgaggtcttagaaaaaaacaaaattggccctgagttgatcattgttaaactggatagtggtcattcattatgatgaaggggctcattatactattctccacttctgtgtactgaagattttctgaactaaaaaggtagaaagtacatgcattaaacttcaggataagttcaatcacaccaccctatacaaatctaatttcagatctttaccgaaaataagggaaaccatgttctacagaatcgagtccacatcaagatgaaatgcttttcacaccatttagagattagtcttatagctacaattactcaagttgaagttttgaaattacctacgcagtcttcagagtcaacgcctactgtcgctcaacctrccccctctgatccccctttcctcccctgccccaccagtcccagggtgtgggcagag

SEQ ID NO: 507925 - DNA, 737 bp, Homo sapiens
aagagaaggaagccagtcacaagaggccacataytatatgattctactccaaatccacagaacagaaagtagacagtggttgccagggctgggcagaggagggattggggaatgactgctaatgggtacagggtttcttttttggggcaataagatgttttgaaattagatagtggtgatgtttgaacaactctgagaatataccagaaaccactgaagtataacactttatttatttattttgagacgaagtctcgctctgttgcccaggatggagtacagtggtgcaatctcggctcactaccacctccacctcctgggttcaagtgactctcctgcctcagcctcctgagtagctaggactacaggcgtacaccaccacgcctggctaatttttttttttttttgtatttttagaagagatggggtttcaccatgttggccaggctggtcttgaactcctgacctcaagcaatccgcccacctcggcctcccaaaatgctaggattacaggcatgagccaccgcatctgccatataacactttaaaaggatggattttatggtatatgaattgtatctcaataaggcaggatgaaaagggagggaagcagagagggcccagttcatgttgcacctcactgaccactgattaccacctggtcagttctgggccagacggcagttaagaggttcattcattatccatcagatatgtatggagtacccaccatgtgc

SEQ ID NO: 507926 - DNA, 597 bp, Homo sapiens
gagggtgtttcgcagcctcttcagactcaccctggggactgatccttgctccacaacyctgacttgagcctgctgttgttaagcatgcctcagattcactctccttcacagtgcagctctgtctttccagcagacagtttccatccaaaggcaaagtgaatcttagaaaccgggaaaaaaagactctaaaagatgacatttaaaatataatagtaagatctaaccaaacatcagactcttcttgtgttgccttaaaggacacacacacacacacacacacacacacacacgctttctctctctttcatgtagtgaggggggaagagctggctgcctgctgtaaggccgcttgaaggttcagaaagcagcctccatttactgagcactgtggttagacttggggcctgattcctttggaaatacagatggctggcagaaaaaaaggaagcacgaggtggttgccaatcctgcattgctttttgcaggaaggtctcaggagagtgggtgtggggagaggggagtcaagggagagcctctgtggattccagaattgcttaactggggtcatgccaagctcttaaaagccacaagtagcat

SEQ ID NO: 507927 - DNA, 527 bp, Homo sapiens
ctgcctgattaatacaatagaatttcatgtaatgataagaaccaaatctaaaattcttagcagacactaagcattttacacaggttatttaatcctcataattatttaaactatgggactactattatcttcgttttatagataaggaacatgaagctagaggagataagttctcattggctgagctggaatttgcatgcatttgcctctaactgcacagactgtcttctgaaccccgtcagactttcacccttccttttttgaagctttacagaccccacgggttaatatcaatcaatactcttattttgtagattagcaaacttaatcatttgaaagttaaatatcttggtaacagtcaaagtctaacacaaatctggcagaattaaaattccrttcattttgagtccacaggagaaggctcctttaaaattctaattttcctgggcaatgctgatgttgaactcttagaagctaaatccttcgttgctaattctcactgcaacagcaaccagggcactgtccac

SEQ ID NO: 507928 - DNA, 528 bp, Homo sapiens
gccttcagagccccccaccacacccrcacaccagcgcaggctcccaccccatatatacagggggatgctgcttcatggcacttagccaaatggtgattaagggtgctctttgctgtgtaaagcctctctgccctgtagagctcagggacgggtgctttgttgcttttttctccattgtcttccaacagccttgctgagttactggcacatagcagatgcacagaaaacacatgctcaatattattgtatgaattattacttgggctaactcaggaagtaatccattcccaatgtagagccagtatattcttgagcatattagcaaaagttacctctgtcctaaaatactttatttccatctaatagaaaattatcaaaaatgactgattgggttgaacgagacactttactgccatgtgctgtaacagtgtcctactgaatatctaaatctatggtctctgctatgggatagggagtatcacgcattgcccaacctattcaactgttctcagcagccctgggtgtgtt

SEQ ID NO: 507929 - DNA, 505 bp, Homo sapiens
cttcatggcacttagccaaatggtgattaagggtgctctttgctgtgtaaagcctctctgccctgtagagctcagggacgggtgctttgttgcttttttctccattgtcttccaacagccttgctgagttactggcacatagcagatgcacagaaaacacatgctcaatattattgtatgaattattacttgggctaactcaggaagtaatccattcccaatgtagagccagtatattcttgagcatattagcaaaagttacctctgtcctaaaatactttatttccatctaatagaaaattatcaaaaatgactgattgggttgaacgagacactttactgccatgtgctgtaacagtgtcctactgaatatctaaatctatggtctctgctatgggatagggagtatcacgcattgcccaacctattcaactgttctcagcagccctgggtgtgttcagacacctgcagaccgggcayccacctggtgggagtggtggctggt

SEQ ID NO: 507930 - DNA, 572 bp, Homo sapiens
gctgcctgtctcatccgtttcccttggaagtaaataccccttagcattctcactgggaggttatacatttggctacaaatgccattattgaacactgcaatcattgctttttcttttctagctgggaagtaaatgatatggactattggatcaaacagtgttttaaaagagcttgggtattcatacccactgttaagtgacgagacctgtggagtagctctggagagaagatgtgaagctacttcctcacatggaaagacacaaaacggaggccgggggcaggggctcatgcctgtaattgcagcactttgagaggcgaggcagcaggattcctcgagtccaggagttcsagaccagtttggcaacataggaaaaccctgtctctacaaaaaattaaaaaattatctgggcgtggtggtgtacatctgtagtcccagctacgtgggaggctgaggtaggaggatcacttgagcccaggggtttaaggctgcaatgaactatgattgtgccactgcactccagcctgggtgacagagtgagacactgcctctaagtgataggaattacaataa

SEQ ID NO: 507931 - DNA, 613 bp, Homo sapiens
tgtgttactcaaccatttggcttccgtttctttacttctacagtgacgtcataacagaaaatacctcacatgtttttcattcagaacaagaagaaaaggcacataaagcacttagaataaatttctatatcaacccactcygttggcattgttagtgtcttataaccctgatcatttcaatatctgcacttaggacccactgtgtaaatatctgttggatgaatggatgcatgctacctcctatgatgacagtctattatgacagggccttgtctttggtcataaggtaaaaatgtggtgggtcagtagacgcctggttactctgcaagtttcccagctccaagagtattatcactagcatgtcagtatcactcttcttcatatcctaacagaaagcatcctagcatgttgtctggtggggaaggtgatggttatacatcttgttgcacagtagacaaaagagaagactactcaaggaagaacactatctttggagaagagtgggatgaaacttgggaggcatctgagttacactgatttttttttctttttaccatataaacatgaagctttggagacagaaagggtgaagtttgattcttaaatgcaagag

SEQ ID NO: 507932 - DNA, 461 bp, Homo sapiens
cctcacttggtgccctgcaattattaaactctttctctgctgcaaaccctgctgtctcagtgtattgataagttactatgcagcaggtatacacatctgttggtcctttaacatgtattccattatttgttcattcactcrtgtttttgttctttcatccaacattccttgagagtttaccagacggtactatttttctcaatttactggtgagaaaattgaggctcagagaggtcaaataattgtcttagggttacacagcccatgagcagcagagcagaaattcaaactctcaactgtttgcctggatagtcacagcctctctgttttactgccttgcctcacctgcaggtgcagtgggcatggcagcctgctgtgttcctctccaggtcccagggaacagctcttcaatggggttatgctgggtacctgtttattcaaagacaaaatgtttcatgagg

SEQ ID NO: 507933 - DNA, 565 bp, Homo sapiens
tgctaacatttataaggtctcttttctctggctcctggaatataactttaaaaatacataaaagtaattccagcttaattggattgtccttctwcgctgtgctttggcagagttcctacagttggtttagcttaaaagtcagagaggaggaggaagagcccgcagtgtggctttagcaggattcaaaggccagtgtcaaaaaaagttatgttctacttcttcccttgctggatttttcaaaatctactgatgaatggcttttttttggggggggatacctgtctctcttcattgtcatcacccatcaatgtcaaagtcagtcatcagtctacaagtcgtgtctgtgataagaagtttcccataatgaaatgtatactttcatatactttttcccataatggaaagtgttgcttataggtgttcactgtgtatgctctccattcaccccttccataagcactgtactcccttctcaaatctggaaaagattaaaggttgagacaagttgactaatggttttgcacattatagacaagctcgtttcaggctaatgaaattaaaacaa

SEQ ID NO: 507934 - DNA, 565 bp, Homo sapiens
tgctaacatttataaggtctcttttctctggctcctggaatataactttaaaaatacataaaagtaattccagcttaattggattgtccttcttcgctgtgctttggcagagttcctacagttggtttagcttaaaagtcagagaggaggaggaagagcccgcagtgtggctttagcaggattcaawggccagtgtcaaaaaaagttatgttctacttcttcccttgctggatttttcaaaatctactgatgaatggcttttttttggggggggatacctgtctctcttcattgtcatcacccatcaatgtcaaagtcagtcatcagtctacaagtcgtgtctgtgataagaagtttcccataatgaaatgtatactttcatatactttttcccataatggaaagtgttgcttataggtgttcactgtgtatgctctccattcaccccttccataagcactgtactcccttctcaaatctggaaaagattaaaggttgagacaagttgactaatggttttgcacattatagacaagctcgtttcaggctaatgaaattaaaacaa

SEQ ID NO: 507935 - DNA, 565 bp, Homo sapiens
tgctaacatttataaggtctcttttctctggctcctggaatataactttaaaaatacataaaagtaattccagcttaattggattgtccttcttcgctgtgctttggcagagttcctacagttggtttagcttaaaagtcagagaggaggaggaagagcccgcagtgtggctttagcaggattcaaaggccagtgtcaaaaaaagttatgttctacttcttcccttgctggatttttcaaaatctactgatgaatggctttttttkggggggggatacctgtctctcttcattgtcatcacccatcaatgtcaaagtcagtcatcagtctacaagtcgtgtctgtgataagaagtttcccataatgaaatgtatactttcatatactttttcccataatggaaagtgttgcttataggtgttcactgtgtatgctctccattcaccccttccataagcactgtactcccttctcaaatctggaaaagattaaaggttgagacaagttgactaatggttttgcacattatagacaagctcgtttcaggctaatgaaattaaaacaa

SEQ ID NO: 507936 - DNA, 565 bp, Homo sapiens
tgctaacatttataaggtctcttttctctggctcctggaatataactttaaaaatacataaaagtaattccagcttaattggattgtccttcttcgctgtgctttggcagagttcctacagttggtttagcttaaaagtcagagaggaggaggaagagcccgcagtgtggctttagcaggattcaaaggccagtgtcaaaaaaagttatgttctacttcttcccttgctggatttttcaaaatctactgatgaatggcttttttttggggggggatacctgtctctcttcattgtcatcacccatcaatgtcaaagtcagtcatcagtctacaagtcgtgtctgtgataagaagtttcccataatgaaatgtatactttcatatactttttcccataatggaaagtgttgcttataggygttcactgtgtatgctctccattcaccccttccataagcactgtactcccttctcaaatctggaaaagattaaaggttgagacaagttgactaatggttttgcacattatagacaagctcgtttcaggctaatgaaattaaaacaa

SEQ ID NO: 507937 - DNA, 620 bp, Homo sapiens
taatgggatcattaagagtatgtgttactcattcataggatgttaatggtaacttcccccaattcaaatcaatctggaaatacaaatatgactttctttggaaatagcttctttgctaatgtaattagttcagggtcttgagatgaaattatcctggctttagggtgattcctaaattcaatgactggcaccctaataagaagaggagagaacatatagagacatacagaaaaggccaggtgtggtggctcatgcttgtaatcccagcactttgggaggctgaggcgggcggatcacctgaggtcaggagttctagaccagcctgaccaaaatggagaaacgatgtctctactaaaaatacaaaattagctgggcgtgatagcacatgcctgtaatcccagctacttgggaggctgaggtaggagaatctcttgaacccgggaggcggaggttgtggtgagccragactgcaccattgcactacagcctgggcaacaagagcgaaactctgtcaaaaaaaaaaaaaaaaagacacacagaaaaaagaagtccaagtgacaatggaggcagagatgggagtgacgattctaggagccgggaaacacctggagccccagcag

SEQ ID NO: 507938 - DNA, 585 bp, Homo sapiens
tgataaacgatgtttgtcaactctgaactgtctttcctaggccaggtattcctctctcactccactttctactacttcctcctatcctcactgagtgtctacraattataagtcacgttctctaccaaaatgctataatggataaaacagtggactagtagtcacaagacttagattcatgtcccatgtggccatggtaaagtcacttaaccccactgggcttcggtttcaccatctgtcacatgagaataataataatactaacttcacagggcagtcacagaaatcaagtgagatgacggaggtgaaagatctttgtaaggtgaaaagttgaagcaactcctatgatttttcattacctctgctagtgagtgttgtcagtgaggtttcacagaacaggtgatattggaaccaagttgtgaagtggggatgtgtgttctgagataatcacagatcacttactgaacaactctggtgttccaggctctgtgctaagaactatatacacattgtctcatttagtgccatcaacagctctatcagctctttcaggtaggccctgctcacactgctcacataaaggcc

SEQ ID NO: 507939 - DNA, 406 bp, Homo sapiens
tttgtctacagacacagttcctgtaaacacagaatcaaatacggtgcgcgtagaaaataaaaagatcctcccacactatggcacttccttcaatggaggctactcgggaggctgaggcagcgaattgcttgaacccgggaggcggggttgcattgagctgagattgcgccactgcactccagcctgggcgacagagcgagactccgtatcaaaaaacaaacaaaacaacaacaacaacaacaaacaagatgttgtattcttgacatttaggcawtttctaaaatattacattttttataaaatttctctgccatggaaaaaaaatccacctttgccagagcaaaggaagccagtgaaagaagtaattcattgggagtataattataagcatttagcattgttttga

SEQ ID NO: 507940 - DNA, 549 bp, Homo sapiens
ccctagcccagcagtcattgtgatttgtcatacctgtctcacttagtgctaatttatgtagttgctttatgcttaagctattttttttttaatttagcatgagtgtgtgtgcatggcatgatagccagcacacaacagagtggtctaactgttgtaacaaacaacctcccaaatcagtaacctaacacaacacaagtttgtttgtttatttattcatttatttttctgagacggaatcgcccagactggagtgcagtggtacaatctcggctcactgcaacctccgcctcccagcttcaagcgattctccagcctcagcctcctgagtagctgggattagaggcrtgtgttaccacactcggctaatttttgtatttttggtagagacagggtttcatcacattggccaggctagtctggaactcctgatgtcaagtgatccgcctgcctcattctcccaaagtgctgggattacaggcatgagccactgcgcctggccacaacacaagtttatttctccttcgcatcacagttcagtgtagttggcag

SEQ ID NO: 507941 - DNA, 549 bp, Homo sapiens
ccctagcccagcagtcattgtgatttgtcatacctgtctcacttagtgctaatttatgtagttgctttatgcttaagctattttttttttaatttagcatgagtgtgtgtgcatggcatgatagccagcacacaacagagtggtctaactgttgtaacaaacaacctcccaaatcagtaacctaacacaacacaagtttgtttgtttatttattcatttatttttctgagacggaatcgcccagactggagtgcagtggtacaatctcggctcactgcaacctccgcctcccagcttcaagcgattctccagcctcagcctcctgagtagctgggattagaggcatgtgttaccacactcggctaatttttgtatttttggtagagacagggtttcatcacattggccaggctagtctggaactcctgatgtcaagtgatccgcctgcctcrttctcccaaagtgctgggattacaggcatgagccactgcgcctggccacaacacaagtttatttctccttcgcatcacagttcagtgtagttggcag

SEQ ID NO: 507942 - DNA, 553 bp, Homo sapiens
tggaaatgcagaaatcaccatcttctgtgtttatcacgctggatgctgcagactgtagctgttcctattcagccatctcggaacagagaggcaaatgtctgcaaattcttaaacacccctccagtgaggatgtggaatctgtttctcttctacctgactatgaacttgacttagtgactcacttcatktttttagagatggggtctctctctcgagtgcagtggtgccatcatagctcactgcagccttgaactcctggcctcaagtgatcctcctgcctcagcctgttaagtagctaggactacaggtgcacaccaccatgctcagttaatttttaaaaaatgttttttgttaggcagggtctagctatgttgttcaggctatgactcacttctaatcaatagaatgcttgagaagtgaaactataacttctaagggccaagtcataaaaagtaatagagctttcgactctctcttgctctctctcaacatgccttaggagctgagtcaccaagttgaaagttcacctactctgaagccaccatgctggaga

SEQ ID NO: 507943 - DNA, 553 bp, Homo sapiens
tggaaatgcagaaatcaccatcttctgtgtttatcacgctggatgctgcagactgtagctgttcctattcagccatctcggaacagagaggcaaatgtctgcaaattcttaaacacccctccagtgaggatgtggaatctgtttctcttctacctgactatgaacttgacttagtgactcacttcatgtttttagagatggggtctctctctcgagtgcagtggtgccatcatagctcactgcagccttgaactcctggcctcaagtgatcctcctgcctcagcctgttaagtagctaggactacaggtgcacaccaccatgctcagttaatttttaaaaaatgttttttgttaggcagggtctagctatgttgttcaggctatgactcacttctaatcaatagaatgcttgagaagtgaractataacttctaagggccaagtcataaaaagtaatagagctttcgactctctcttgctctctctcaacatgccttaggagctgagtcaccaagttgaaagttcacctactctgaagccaccatgctggaga

SEQ ID NO: 507944 - DNA, 493 bp, Homo sapiens
gtcataggaagtggtcctttagaactctctgattattaatataatcacagtctttatttttttcttgatttatccgatggttttcattatagaataatgcttaataatgttaaaaaaaatcacggcttaggactttagaagacaatgtggatcacatagttttttccccttgtattccaaacacaacaattactttgaaaatgtgtgtcagtggttggtcacacagagggcaaagtatacaaatacaaaaacaagataatcagaaatagacaacaatattctagctatggcagaataatctaacagaactctatcctcctattgttggaatgctacgyctctgttaatactaaattaacatatcttactgtttgtggcagccacatcacacaggtggttcatacaaagtctatggcaaaggtggccacattgcttcaaatttttcccaaatccaacatcaccttgaaaccacttcacacagagaatagacata

SEQ ID NO: 507945 - DNA, 228 bp, Homo sapiens
atcaccagcatcaatcatgctgggagctgcagactggagctgttcctattcagccatcttggaacagagctcaagagtgtaaagggttttaaaaacattttttgaaagatagaaatggtccagaagggttttttaaagcaaaatrtgtatttaaattatggtagatatgaaaccatatataatgaaagattaacatctggattttaaatttttattgttctttaaaaa

SEQ ID NO: 507946 - DNA, 616 bp, Homo sapiens
tttaaagagaaatttaatggatggttttgaggaagactagaaagagcatttttttttttcatttttgctttgagtgatgaaaatggctgaatacgtgcacataattaatgtctgtcatagaagggggaatttttgcaaggtcagcaccactgtaaatgcacatggctcacatgtggcagttccagtgggtggcaaaaatcctgttctctctgcatgtagcctataagctccatactgggagcttacccctgttttctcaatgcctaatttagtacctggctcagggttacagcttggaacacactggctgcttgggagggaaagaagaatctgttgacttatgayggttaaaatagttcaggccaatgacatttttgagtacctaccatatacgtggtatgatgctgggtgctggggatacaaaaattaatataacacaggccaacccttcaagtctaataatgagtgataatcccataaacagagcctttcaatatgatgtaacaagcgctctgacacaagtatgcagggaatgctttaagatcacagcaggagggccctgcacccagccagggagcttaggggaggcttccaattaacctggtccttgttgaac

SEQ ID NO: 507947 - DNA, 510 bp, Homo sapiens
tgtgttgagggaaagcaggaagctttgctgaagacccagtccccagtggtctcttaattgtaccaggaggggctggaagttggaactgctgttcctgggggaaggggcagtgctggggaaagaccctcagctctacacaggcaagaggaagtccaggctggcagatgcatgtcctggccatggggctgggatactcaggaataagactcaggcactggggactaaggcagatgctgtcaccagcggggtgggacagagrtgggacctgagaggatgggaggtggggtctgccctgggctgtgaggcagcagcaggactagcaatgtggatggagttgctttgcctttcctcaagccatcctcttccctgtcctctcattaaaactttcctgtgtgtgtcccatttgcttgggacctcaaggccaatgatgagctaatcatctagggagccagtgatcaatgtggctttaggtgctacccaattttagtgacatttgcattgggacagatg

SEQ ID NO: 507948 - DNA, 643 bp, Homo sapiens
ttcaaaaggggaaaaatgttatggtttgccagttccagactagataatatgatatcactcccggcaaggatcttaaacagatttgttaaggacacttatgagcacctaggacaggaagtaatgtccatttggcaccagcatggggtcaccaagaacaagtcatgttaaatgcatttcattttcttctctctgacaaggctcctaggctagtgtattggagaaacacagcagacttaatatacatggtgcactgagggggtgagcagcaccaaaggctaattcaatccttgggctatgttaatagtagtattgcagacagcagaaaggaggtgatagttgttttctgtctttggccacatctagagaaycacatttagaactcagtgccactcttgaaataggatactgataatataatcttttggaggtccttttggcaaaatctctttaaaaacataaagctctcatccagatttctggcatctgttgaaaaattgaaaaatcgtctgggcctacattcctaaacagcaataattggttgaacctaagtagtgactgcccatttagacagaacatgtactctgaagtccgtcacaatcaccaccaccacccttctactgcctgcactgaggtggtaggccag

SEQ ID NO: 507949 - DNA, 550 bp, Homo sapiens
tcctaggattcaatccaggataccacactgcatttaattatcatgtctcttcactcttctttggtctgggcagttttttagactttccttgttttccattaccttgatcgttttggggagtatcagtcaggtattttgaagagtgtccctcaatttgggtttctctgatatttctcaaatgtcagactagggttgtgatatttgggaatgaattctgaattccacagaggtgaagygtgcttaccacattatgtcatgaatacgggatatcaacatgacttatcactggtgatgttgaccttgatcacttggtgtgctgcgtttgtctgatgtaaagttcctattttttccatttccatactctgttctttggaagtggctcactaagtccagtccacacttgaagtgatgatggtggtgatgacaggactgaattaaacttaatctctgaggggtaggggtaatatattcatattgtttagaatccttccctaagaaaatttgtctcttctccttctggaggaggtttaaaagtaagatttcacagagt

SEQ ID NO: 507950 - DNA, 578 bp, Homo sapiens
ggatggaaaattaatcttggagcatacatcagagtgaagggatcttgcagagcagagtgtggcgctgactactttgggaaaactctgtactttctacttatcagagatgacaaatgagcctggcatgaaatatgtctgtcagacttttagcaacttgacactgagcacccaactctgaaatgtgataattatcgatcaatgttgaacacaatctggagtcccagaaacagattgtcatttgcagattgcagtcgacrtaagaaattcatggatatgagtttttggtgcatacacaaaacttgcatatgtcctttgcttaaaagatgcatccaggggcttcaaattcagaggtacaactaagagggctttcaggcattcagaaggaaggactctgtgccttttttccccttgagggaaaaaaaaaaaaaacttccactactctttaaaggatgtttatttgtttatttacatgaactacagtgggaaaattaattaaattaaaacaacaataatagcagccattcattgagcattcactgtatgtcaaatgccctattaatctacttatcacatttaat

SEQ ID NO: 507951 - DNA, 578 bp, Homo sapiens
ggatggaaaattaatcttggagcatacatcagagtgaagggatcttgcagagcagagtgtggcgctgactactttgggaaaactctgtactttctacttatcagagatgacaaatgagcctggcatgaaatatgtctgtcagacttttagcaacttgacactgagcacccaactctgaaatgtgataattatcgatcaatgttgaacacaatctggagtcccagaaacagattgtcatttgcagattgcagtcgacataagaaattcatggatatgagtttttggtgcatacacaaaactygcatatgtcctttgcttaaaagatgcatccaggggcttcaaattcagaggtacaactaagagggctttcaggcattcagaaggaaggactctgtgccttttttccccttgagggaaaaaaaaaaaaaacttccactactctttaaaggatgtttatttgtttatttacatgaactacagtgggaaaattaattaaattaaaacaacaataatagcagccattcattgagcattcactgtatgtcaaatgccctattaatctacttatcacatttaat

SEQ ID NO: 507952 - DNA, 616 bp, Homo sapiens
ttggcccatgagttctccttatgaaggaaaagaggatcaagatgaacaaccagtttccccagcttttargctgaaggaattactttggttttaacccagccagattgctagggaaatcagcatagctgatatatttggagatggctaggaacaagggggtaggagccattagtatcaagtacatggcagcaggtgctacctcagttctcagtggcccgccttgcagaggactccaataatgtcaccattaaggacctcaacaacctttatggccactgcagactcttgaaaccttcaccacaaaggggtccatattttcccttttctgacctcagttgcctaagctgcagcatctgctgcaaccactgaaggcaccctagccagtgatgccatggagactccggacccagtatggccactttgtataaatgtatacaactaggctctgctcccatcaccaacctcagctcccattgtagtgggcacacctgcagttggcccctgtagctaactacaagcatgttgcccacttcaacatccacctacccagtcatgctcaccacttgaccaagagatgccagtgtgattcccagcaaccctagtggccatcgtgggc

SEQ ID NO: 507953 - DNA, 681 bp, Homo sapiens
gagattaacttctcttttctcccaaaagtatatgattataatgacccaaaatgacctttgctttttagaatagacttttttttttttctctgaaaacagatatactttaaaaagattaatgctggcttctgcactctcttctgtggagaataaaaaaatctgtccattctctaaatattttcagggtagattctaaattccctttaaaggagaaattcaaattcccttattaccataagagagattttattttacgtagctattgggatatttacctctaacaacaaaaataatccaatttctctgaayttagggattaagatttcctgtcacatttccaacaatgaacaaatcctaggaaatatgattccaaaataagctacaatttaaaacgtaataattattttaagtagtatctcacccatcatttctctcttctaaaaggaaaactgattttaaaaagatgcaacattgccacctagtgctctgcatacaaagtatgaaatcattattagaaagatgccagtagaagaaatttcacctttaatcctacactaaccagagtacagtgaatacatcagtgcataaataggaaaaatttcaccacatagcaactttgtcccatagtgcctatagcataaaggtgtaggtaggatttaataaactgataaatttaagtcg

SEQ ID NO: 507954 - DNA, 529 bp, Homo sapiens
ctctaagccttcgtttccttaccaataaaatgggatcatggtgtagtcagtttctactggataacaaaccaccccaaaacttagtggctgygttagtccattttcacactgctgataaagacatacccaagactgggcaatttacaaaagaaagaggtttaattggacttacacttccacatggctggggaagcctcacaatcatggtggaaggcaaggaagagcaagtcacgtcttacgtggatggcagcaggcaaagagagcttgtacaggaaacctcccccttacaataaccgtcagctctcatgagacttatttgctatcatgagaacagcacaggaaagatctgcccccgtgattcaattacctcccaccaggtgcctcccacaacacatgggaattcaagatgagatgtgggtggggacatagccaaaccatatcagtggctaaaagcacaaacatttattctttcacacaattctgtgggacggctggacagttctggtctggatggactcacctggagcta

SEQ ID NO: 507955 - DNA, 549 bp, Homo sapiens
taagaagctgttggggtacaccatgagggtgctgggcatttctgtgcccactatatagagatagggaagggagcatgttcccttcacctggaacctagtgaggaaagtgtttggagagctgcttgcagagatgtgtaagagtctcctagagcttggggctggggggacagggaccagtttgagactctcaaygagaagagtttgaaggaggggggctgggccaatcacctttctctgacagtagagtggagacaagtggtggttgtctgagcaagctgcatgttgacgatagtgaaccccttggatgtgacttctggaaggaagccagcctagagtcatcctcaaagggagctggctcaacaatcttctcatgggggaagagggattctaccttggtaagagttcttagttgcagatgacagaaccactgccagtcagcctaactagaaaggaatttatcagagggcattagtgacttaacaaaatattgggaataagttcctagtctgctcccctaggaccaagtgtcagaacctcaccagagagact

SEQ ID NO: 507956 - DNA, 549 bp, Homo sapiens
taagaagctgttggggtacaccatgagggtgctgggcatttctgtgcccactatatagagatagggaagggagcatgttcccttcacctggaacctagtgaggaaagtgtttggagagctgcttgcagagatgtgtaagagtctcctagagcttggggctggggggacagggaccagtttgagactctcaatgagaagagtttgaaggaggggggctgggccaatcacctttctctgacagtagagtggagacaagtggtggttgtctgagcaagctgcatgttgacgatagtgaaccccttggatgtgacttctggaaggaagccagcctagagtcatcctcaaagggagctggctcaacaatcttctcatgggggaagagggattctaccttggtaagagttcttagttgcagatgacagaaccactgccagtcagcctaactagaaaggaatttatcagagggyattagtgacttaacaaaatattgggaataagttcctagtctgctcccctaggaccaagtgtcagaacctcaccagagagact

SEQ ID NO: 507957 - DNA, 549 bp, Homo sapiens
taagaagctgttggggtacaccatgagggtgctgggcatttctgtgcccactatatagagatagggaagggagcatgttcccttcacctggaacctagtgaggaaagtgtttggagagctgcttgcagagatgtgtaagagtctcctagagcttggggctggggggacagggaccagtttgagactctcaatgagaagagtttgaaggaggggggctgggccaatcacctttctctgacagtagagtggagacaagtggtggttgtctgagcaagctgcatgttgacgatagtgaaccccttggatgtgacttctggaaggaagccagcctagagtcatcctcaaagggagctggctcaacaatcttctcatgggggaagagggattctaccttggtaagagttcttagttgcagatgacagaaccactgccagtcagcctaactagaaaggaatttatcagagggcattagtgacttaacaaaatatygggaataagttcctagtctgctcccctaggaccaagtgtcagaacctcaccagagagact

SEQ ID NO: 507958 - DNA, 476 bp, Homo sapiens
taaggatgataaagaatattccatcaagccaatggaatattcctcaaatatttctgagagtcttagggtgcctttcattaacccctatacaaatccacttagctatcacgtcaaacatcatgtggaatgcacttttctctttaatttttgatgggtacctttatttctgatggctgctagtgaayagtgctgtctcgtgatatgcagcacctctccaatggtatatttgtcctggtgtggccatcaatatactgcatgccttgatgtgtcaaaactataaggtggtttgtagctaagtgcagataagactacctcattctgtgtattacttaggatgtttgtggttgagaattaatagaaaactcaaccaaatatggctcaaacaagtggaaattgtctgttgaacaataaagtaggtgtccaaaggtaagaaagtatatgtatctgtgaggattaggttaggtagcaagaaacag

SEQ ID NO: 507959 - DNA, 669 bp, Homo sapiens
aaatgaatatgtcagtgactgattacagattaatgacatagctattcttcaaaggtatagcaattcatattcaaatttggtctctttgtagtttagaatgcttagttaaaccaaaaactctttagcttatgcaattaaatacttttatttatataaaattgaatgcctttgaagatatatacagtttagaagaaaaaaaggattgaaaaatttcaatttaggtttattgaaaagtacatctgctttcaatgtgatttatcaagatcagaatgaagtaactgctaatcaaatttgccttaaagcatcagacaatattatgttatctgacacgtttatttagagccaatttttaaacatttattcaacttctacagatgtaaaagttcagtttaaaaatcagaaattgctctgaaatccttattgtcaagcacattgaaaaatatgtcattactcatttaaaatgctgtagaattcttttcaaaaaagttttccagattttaattgactaattgtaattatatatatttactggrtacagtgtgattttattttacatatctatattgcataatgctccattcagggttgtttgtgtatccatcacctcaattatttattattttttgtggtgagaatatctaaaagtctcccttttagctattttgtact

SEQ ID NO: 507960 - DNA, 563 bp, Homo sapiens
ctccggaggctgaggcaggagaatggcgtgagcccagggggcggagcttgctgtgarccgagatcacgccactgcactccagcctgggcgacagagccagactccatctcaaaaaaaaaaaaaaagaaaaaagaaaaaaagaaatgcaaattctatgaagtaggtaattaatattgacatccttaaagtatttgttcatcaacaaatgtgataaacaacactggctctaagaaatagtgatttctcatgcaagagcattgtaaaatcaggtggaaaagatgatgactgtaacagagaggtaatagtttgcagaatttgttctttttgccatgatcagattctatcttagtgaacagagatcatagacattgattccatcttagtaaacagaggtcatagtcattgattccgtctttgtaaatagatattgtacacgttgatcatagccattgatttcattgcaataaatagagatcatagatcattttgggtacctaaataggaggtttttgattgagataaatacatacatgtagtgaaacaacctcccacatgaaaccaaa

SEQ ID NO: 507961 - DNA, 563 bp, Homo sapiens
ctccggaggctgaggcaggagaatggcgtgagcccagggggcggagcttgctgtgaaccgagatcacgccactgcactccagcctgggcgacagagccagactccatctcaaaaaaaaaaaaaaagaaaaaagaaaaaaagaaatgcaaattctatgaagtaggtaattaatattgacatccttaaagtatttgttcatcaacaaatgtgataaacaacaytggctctaagaaatagtgatttctcatgcaagagcattgtaaaatcaggtggaaaagatgatgactgtaacagagaggtaatagtttgcagaatttgttctttttgccatgatcagattctatcttagtgaacagagatcatagacattgattccatcttagtaaacagaggtcatagtcattgattccgtctttgtaaatagatattgtacacgttgatcatagccattgatttcattgcaataaatagagatcatagatcattttgggtacctaaataggaggtttttgattgagataaatacatacatgtagtgaaacaacctcccacatgaaaccaaa

SEQ ID NO: 507962 - DNA, 591 bp, Homo sapiens
ggggcatatttgatatttattaataaaggttctctgtgaagtaacgtgatattagattatttttatagcaaactctgtttttagcttctcaacaaattgcatatgctagccctgaggaaaaattttaaaaattctgtccatttggatttttcacccttatttatctcctaaatacatatttttccttgagtatcaagagtcttaaaacttttactactaaaatattgtttgctaaagtaattataaatacaaatttgtttaagagctataaatattttataagttaagaattattatatatcattagttccttccattatattaaatatatttgcataagtatataaaagaaataatgaggaaaaaataggtagaaagtattaagtgcagccgtgtatttaattcmaggatattgctatggctcttacaaatccaaatgggaaatattaaataaagaaacaccacctgtgcatagaaaacaattttaataattaaagtgggttacttttccctatgattacaagtgttttgttgttgttgttgttgttggttttacaaaatatgttaagataaccaaagaaacttttttaa

SEQ ID NO: 507963 - DNA, 611 bp, Homo sapiens
tgtttacatgtggtgggcatgatggcttctattttttaatggaggatggtattgatgttttcctgcagatatatattaaacaactatagtatactgtggatgtttcataattgaaataaaagaagttaatcgttcatttcactctttatagacagactgataaacacacagatacatacagataaatgtaacaaaaatacaaacaaacgtatagcagtgaaaccggaaaggttcccttgtsccttctcagggcatgtgatgggggtgtggctcgcttcttcagtgccccactactcaaacctctagagaagcatacagactggcaggctgtggggctccaaccccacggcagtgtccgtgggtgaatgtttacagctcctgaagccccagtatgcatgtgttacaaggtgctcttttagtttatcatccataggcagcttgtgttagtcagctcaattacaccgggtcacaaggactaaggggtttctgtatcccatgttcttgccttgttgtaccggaagaatcgggtcacacgtgggcttggagaatgagtgcaaagttttattgagtggaagtagctctcagccaactggggagccagaagggagatg

SEQ ID NO: 507964 - DNA, 611 bp, Homo sapiens
tgtttacatgtggtgggcatgatggcttctattttttaatggaggatggtattgatgttttcctgcagatatatattaaacaactatagtatactgtggatgtttcataattgaaataaaagaagttaatcgttcatttcactctttatagacagactgataaacacacagatacatacagataaatgtaacaaaaatacaaacaaacgtatagcagtgaaaccggaaaggttcccttgtcccttctcagggcatgtgatgggggtgtggctcgcttcttcagtgccccactactcaaacctctagagaagcatacagactggcaggctgtggggctccaaccccacggcagtgtccgtgggtgaatgtttayagctcctgaagccccagtatgcatgtgttacaaggtgctcttttagtttatcatccataggcagcttgtgttagtcagctcaattacaccgggtcacaaggactaaggggtttctgtatcccatgttcttgccttgttgtaccggaagaatcgggtcacacgtgggcttggagaatgagtgcaaagttttattgagtggaagtagctctcagccaactggggagccagaagggagatg

SEQ ID NO: 507965 - DNA, 669 bp, Homo sapiens
agtaatagaaaatattaaaatttttataactttcctggaaatattaattatktggattgtttcttatcaataaatatgagctttctataaatatttattttttgtaaagagtatatgttttgagggaaagcatatcaaatgaaaatttgtatactgaatttgaaaaaaaactgtttgcaaaaaacattttattgaagtctccttaatccagttgaaattcatgtcatgacataatgttctatgttattccagttatttacttataatttacatcttacaaagcatcagcttttgccttctaacagcagaaatagattatcataaacaacaaaatctgattcagcagggtaggtgaaagtctttgagagatttataacaaagaaatcttctcagaagataaaaagtaataaagatcatgaaagtgttttactttacaataatttggaaacacacactaatattcagaattttatcaggagcaaacaaacaaaagtatttttatgttattgctctaaaagaaatatactgagatctataaagttattgttatattattgtttttattgatccaaaggtcaatgatatcaataatttttctataatctttgctaacatttggaatagatataactatttgaatactaattgattgatatttaaaaataatca

SEQ ID NO: 507966 - DNA, 669 bp, Homo sapiens
agtaatagaaaatattaaaatttttataactttcctggaaatattaattatttggattgtttcttatcaataaatatgagctttctataaatatttattttttgtaaagagtatatgttttgagggaaagcatatcaaatgaaaatttgtatactgaatttgaaaaaaaactgtttgcaaaaaacattttattgaagtctccttaatccagttgaaattcatgtcatgacataatgttctatgttattccagttatttacttataatttacatcttacaaagcatcagcttttgccttctaacagcagaaatagattatcataaacaayaaaatctgattcagcagggtaggtgaaagtctttgagagatttataacaaagaaatcttctcagaagataaaaagtaataaagatcatgaaagtgttttactttacaataatttggaaacacacactaatattcagaattttatcaggagcaaacaaacaaaagtatttttatgttattgctctaaaagaaatatactgagatctataaagttattgttatattattgtttttattgatccaaaggtcaatgatatcaataatttttctataatctttgctaacatttggaatagatataactatttgaatactaattgattgatatttaaaaataatca

SEQ ID NO: 507967 - DNA, 564 bp, Homo sapiens
aaaaagctgaattggaataactttcagtgaacatgggcagtgggtaaacatcgaggatctacatactttcaaatgagtcctcttatgagcacacatcctctgagttagtagcaagaccattaacttcttgaagactaggaaggcacagtcttattgtctctctgtatcctgagcacccagcacagggcttcatggagaaggaatgactgaaacttcaggtgtctgtgggctgccaggaggacacctgacccagcastgtgtcccaccttgctttctaagacctcttccccttttttacacccgttcctgcctttcaaataccaggaagcccatgtcgccttctgacctttagaggccctcacaccggctattcccggggctccagtaccatctttccctctaagtgcggcagcacagactttgaatttaggcaaacctgggttcatgtttcagcttcaatagtatcttgctacatgcatgaccttagacaattttacttacctttgttaagtctcagtttcttcatctttaaaatttgggtaacagtaactatctcatggaatt

SEQ ID NO: 507968 - DNA, 564 bp, Homo sapiens
aaaaagctgaattggaataactttcagtgaacatgggcagtgggtaaacatcgaggatctacatactttcaaatgagtcctcttatgagcacacatcctctgagttagtagcaagaccattaacttcttgaagactaggaaggcacagtcttattgtctctctgtatcctgagcacccagcacagggcttcatggagaaggaatgactgaaacttcaggtgtctgtgggctgccaggaggacacctgacccagcactgtgtcccaccttgctttctaagacctcttccccttttttacacccgttcctgcctttcaaataccaggaagcccatgtcgccttctgacctttagaggccctcacaccggctattcccggggctccagtaccatctttccctcyaagtgcggcagcacagactttgaatttaggcaaacctgggttcatgtttcagcttcaatagtatcttgctacatgcatgaccttagacaattttacttacctttgttaagtctcagtttcttcatctttaaaatttgggtaacagtaactatctcatggaatt

SEQ ID NO: 507969 - DNA, 671 bp, Homo sapiens
aaatacacaaacttattactggcattattcatctagtgggcagagagcaatgactctgtaattgttcattaaatcaccatcacccataaccatccacaaaataataactgttaggattttacttacattaccaagactaagagaaagatttacaaaacaacttgtgtatatgacaagaactgggactactaaaatcatctgtgcgatggaacaaccgtagaactgtcaaaacaggatcaaacagaggttttgcttgggggaagaatgaaagatcatttttagtatcttggtaaatttagttaaaatgatgcaaacttggcagactccaaaataatctctgaaaactctttaaagatttctcccccaaacagctcattcacagtacttacagcactgaagttggcaaaattgcttggatcagcctctttattggtagtggtagtagcagaagtgaatggatcacaaaayatttcaggatctttttctttggggctatcgttgcctgggaaaggctgaaatggatcattcagtttaaagggatcaggagaatccaatttgttgatggatcttttccctggatcaaaatcattacaattaattcaaccagtaaatacagcaaatacaagcacacaagaacatgtacacagatagcattaaagtactgtgggtag

SEQ ID NO: 507970 - DNA, 640 bp, Homo sapiens
agaaagaacctgcaaaggagactggagaacaagtgcccatgaaacaggaggacaagcggcggcggcgtcctggaagtgtgccttgtgtgtwttcacatcactcacaagcagaagcaatgtgtgagtggtgcctgtgctccagaagggctgaggttagggtgggttctgtctgagcaggaagcaacttgtactcctgggtgaaagggtggagagacagcccaggtgatttttaagttggtctgagaacaggcctgggaagatgatcgttttagctaatgagcccttgctcttccgtagaaaagtgtgctgaaatgtgcttccttcagctccatctctcaaagcctctgctctggcttctcctgggaatgatgccagcccaagatggctggctgacttttcctgccaggatgtgtcatggagcagagagctggcactgacagttccccagagggagaggggaggactgaaattgtcagggcaagatatgggcctggtggagcccagaggaatggccccgtctgtagtccacctgctgacatttcttctctgggtctcttcttgacttgagagctctttctaggtaggcaatgctctttcagtgctgactttaatgtgtgtcctggggtttttctagaaaatg

SEQ ID NO: 507971 - DNA, 538 bp, Homo sapiens
atggtacagaagtgagatagagggaagcatcaggaagaccgtggctttggcttgggtaaatgcacagaaagagtcacaccattgactgatagcaaacacaaaaagcaggtttcaagaggcaaaggagagacagcaggctcagtyttgcctacaccgagtttgagacgtgggtgaaacgtaggtggaaaagtccagcaagaaggtggctatagaaccacctggaggaagggaagagggctagaggaatggcttcggaggtcatcaagatacaggtggtagttgaagtaataagaggatgagctggcacaagaagagtgcaaagagggcccagcaggccaggaattaagccccggggaacacaaacactgaaagccatttaagatcatctaattacacattcactaaacaatgttctgattataccttggctgcccatgctggttttccctccaggataaagtacattgatcaatataaatcagtatttgggtcccttgaagttaaaattatacgaattagcattctggcctatagccag

SEQ ID NO: 507972 - DNA, 538 bp, Homo sapiens
atggtacagaagtgagatagagggaagcatcaggaagaccgtggctttggcttgggtaaatgcacagaaagagtcacaccattgactgatagcaaacacaaaaagcaggtttcaagaggcaaaggagagacagcaggctcagttttgcctacaccgagtttgagacgtgggtgaaacrtaggtggaaaagtccagcaagaaggtggctatagaaccacctggaggaagggaagagggctagaggaatggcttcggaggtcatcaagatacaggtggtagttgaagtaataagaggatgagctggcacaagaagagtgcaaagagggcccagcaggccaggaattaagccccggggaacacaaacactgaaagccatttaagatcatctaattacacattcactaaacaatgttctgattataccttggctgcccatgctggttttccctccaggataaagtacattgatcaatataaatcagtatttgggtcccttgaagttaaaattatacgaattagcattctggcctatagccag

SEQ ID NO: 507973 - DNA, 451 bp, Homo sapiens
ggggacccctgctggaccctaggaagctgccagccccaacgctgccttcatccaggagatgcaattcaaatgtaatcaatttaaacagcatcagccctgacaggggactctggaggtgggggtgggggcacagggagggctataattagcattctcagcatccatgatccccaagtaaggctgccaaggatgagagatggggaagccagtgctccgcagtgcaagcagcccaggctcacgcggcwgacaggcagctgccagccctgaccagagcccagccttcctcctcccacctcatctatgtgatgcatgaaaacagactcaccggcttctgaggtgtgatccccgcgctggaaagctctaactctgcgagccccaaggcacccctccccccagctcaggccagctggggtcctcctcccccgcccctggggcccccttctgcagagcg

SEQ ID NO: 507974 - DNA, 402 bp, Homo sapiens
taagactgtaagccatccagggctgcacttggcatcragtgggcattcattccctattgcctgtcatgccatggcttcttgttctcaaggctttgacaagcactttacccacctggcatgctttatggctggcaacgcagttgacgggtttgccctcctcatctttgggtgtgtgcgttgttcaccagcatacatatgactattgtggtacgtgcctcccaattgctcctccccttccactggagcacaagtgagtcattttccctggattccccccccaagtgagagaccgccatcttctttctaacacagtgcagacagccaggtctccagtcaccccggaggcttctcctagagcagctgaggtgagggattccacccttccacattaattgcttttgt

SEQ ID NO: 507975 - DNA, 402 bp, Homo sapiens
taagactgtaagccatccagggctgcacttggcatcaagtgggcattcattccctattgcctgtcatgccatggcttcttgttctcaaggctttgacaagcactttacccacctggcatgctttatggctggcaacgcagttgacgggtttgccctcctcatctttgggtgtgtgcgttgttcaccagcatacatatgactaytgtggtacgtgcctcccaattgctcctccccttccactggagcacaagtgagtcattttccctggattccccccccaagtgagagaccgccatcttctttctaacacagtgcagacagccaggtctccagtcaccccggaggcttctcctagagcagctgaggtgagggattccacccttccacattaattgcttttgt

SEQ ID NO: 507976 - DNA, 452 bp, Homo sapiens
atgttcttcatggaacatgtgtgaatggaacaaaaagaaaaggaaaggaaaatatttgttttgctttatcttgctaaaacaaaaaacaaaaaaaaccctttaattctaattaaaacctaaatgtakctacttaaaaggaagcaggccgggcgcggtggctcacgcctataatcccagtactttggaaggccaaggtgggcggatcatgaggtcaagaaatcgagaccgtcctggccaacatgatgaaactccgtcttttccaaaaatacaaaaattagctgggagtggtagcgcgcgcctgtagtctcagctactcgggaggctgaggcaggagaatcacttgaacccgggaggcggtggttgcagtgagccgagatcgcgctactgcactccagcctggcgacagagtaagacaccatctcaaaactgaaaaaaaaaaaaagaaaaaaagg

SEQ ID NO: 507977 - DNA, 532 bp, Homo sapiens
tccaaggctggggtctgcaggtgcaagctccaattagcagccagccttccaataccttttcatcccaaacaacggccaggcctcagccccggccagggattgaggaaggccccggaaggactgccgacgagactgagaaaaacaaagactgtccaaataaaagtagctcatgtgagtcgaacctgaaacccagcttcattttcaaaacctcttgtgagaawtagtcaatgcacaattttgtgaaaaatcagttactggtcacaggaaagaaactgccttcaaaggccctccagacctaagtcatcagaggcagttttcttttgcaaaccagctaggcacagtatttctataacaacacagtcttaattgttcctactgttgacaacaattcccctaaactaatatattttgggggttatggatgtattgtggttctcctgcaactggtggctctttattgctaatatcacatcaaggcttaaacaaaagcacttttgattctttatttttagcaatgaaatgtatgtgtttt

SEQ ID NO: 507978 - DNA, 602 bp, Homo sapiens
ctttgcttcttgaaagcaaatgttttacctgttttgtatccaactgtatccctagtgcctaggatagtgcctagcatatagtagttgctcaataagaatatacttattttttgaataaataagtgactgaataagacattcaggtaaaacaacaacaaccataaaaatactaaccaggtatggttttttgagaacacagagggtgaatcctctttgctttcagaaattgggaagaggtgattttgtgcttaaagaataagtagtacttggtcaggctttaaaaagagagaaaagcactcaagtagagggaacagtgtaagcaaaagaatgttttcatgtgggaacttcaagtagcctgggttcaatggatgcaaattgtctgggtacataggacatatgtggaaaaaggagtgacatgaaaccaggttggaaatacrgacagactccagatcacatcatagtatggagtttgggcttccttcttcaggtgatggagagctactgaagcctcttaagcagaagagagatccaattggacttatgttttaagacctctctggaaatggtatagagaaaaaaattgtgggaaggatgggaattgg

SEQ ID NO: 507979 - DNA, 395 bp, Homo sapiens
  misc_feature (1)...(395): n = A,T,C or G
tactgttgccatctttatgtccattgaatactcaatgtttagctctcacttacaagtgagaacatgtgtatttggttttctgttcctgctttaattcacttgggataatggcctccagctgtatccatgttgctgcaaagaacatggctttgttcttttttatggccagcattgtaaatattttttacrtttacaagttttaccaaaactnatataagcatgtacacacatctatagggttcctccaggcctttgaaaaggatataataaaataataaaaattaagcctcattcgctttgtgataaatctgcctcaatattcaataaacaatttgttgaataagtgagtgaataaatgaacaaaataattttccttgcagaaggcggccaaactt

SEQ ID NO: 507980 - DNA, 496 bp, Homo sapiens
gtgcttagaatatatgtggaataacagtaagagcycagccagtggtagctattattataattattgttaatattaacaacattaatatgtcttggcaatctctattccttgttttatgcattgcaatttattgttctaaataatatatgtacattcactcatataatactcaacaaacctatgagataagtatagttatcatccttatttatagatataaaaattgaaataccaagtagtagaagagtttccagaataatacattgctggaattacaaatgctcgaaacagaatgtataatgtctgaggtcatacagctacatatccattcacttaatcacaaggtattgcctcattatgtatctatattcagattacctctgtgcatgtgtattatataaagaatcaaatattcgtatacacctacatttttacagagacataccaacacctacacacacatacatattcaagacttttctagttccccattatt

SEQ ID NO: 507981 - DNA, 496 bp, Homo sapiens
gtgcttagaatatatgtggaataacagtaagagctcagccagtggtagctattattataattattgttaatattaacaacattaatatgtcttggcaatctctattccttgttttatgcattgcaatttattgttctaaataatatatgtacattcactcatataatactcaacaaacctatgagataagtatagttatcatccttatttatagatataaaaattgaaataccaagtagtagaagagtttccagaataatacattgctggaattacaaatgctcgaaacagaatgtataatgtctgaggtmatacagctacatatccattcacttaatcacaaggtattgcctcattatgtatctatattcagattacctctgtgcatgtgtattatataaagaatcaaatattcgtatacacctacatttttacagagacataccaacacctacacacacatacatattcaagacttttctagttccccattatt

SEQ ID NO: 507982 - DNA, 496 bp, Homo sapiens
gtgcttagaatatatgtggaataacagtaagagctcagccagtggtagctattattataattattgttaatattaacaacattaatatgtcttggcaatctctattccttgttttatgcattgcaatttattgttctaaataatatatgtacattcactcatataatactcaacaaacctatgagataagtatagttatcatccttatttatagatataaaaattgaaataccaagtagtagaagagtttccagaataatacattgctggaattacaaatgctcgaaacagaatgtataatgtctgaggtcatacagctacatatccattcwcttaatcacaaggtattgcctcattatgtatctatattcagattacctctgtgcatgtgtattatataaagaatcaaatattcgtatacacctacatttttacagagacataccaacacctacacacacatacatattcaagacttttctagttccccattatt

SEQ ID NO: 507983 - DNA, 449 bp, Homo sapiens
ctgaagtcacataataagattctgcctccaaaagaaaatgatatgtcacagaaataaataattacgggaaacaaaattttagaagacaatattatacgtctatgaaaatatggccatcatgtctaataattaccaaagcaaatgatcactgaaggaaagaatagtctatggrgtgggagttgaacaatgagaacacacggacacagggaggggaacatcatacactagggcctgtttggggtggggggctaggggagggatagcattgggagaaatgtctaatgtagatgacgggttgatgggtgcagcacgccaccatggcacgtgtatacctatgtaacaaacctgcacgttctgcacatgcatcccagaacttaaagtataattttaaaaagtttttaaaaaaagaatattctatggtgaagtcagtcagggaaaggatgttgctg

SEQ ID NO: 507984 - DNA, 449 bp, Homo sapiens
ctgaagtcacataataagattctgcctccaaaagaaaatgatatgtcacagaaataaataattacgggaaacaaaattttagaagacaatattatacgtctatgaaaatatggccatcatgtctaataattaccaaagcaaatgatcactgaaggaaagaatagtctatggagtgggagttgaacaatgagaacacacggacacagggaggggaacatcatacactagggcctgtttggggtggggggctaggggagggatagcattgggagaaatrtctaatgtagatgacgggttgatgggtgcagcacgccaccatggcacgtgtatacctatgtaacaaacctgcacgttctgcacatgcatcccagaacttaaagtataattttaaaaagtttttaaaaaaagaatattctatggtgaagtcagtcagggaaaggatgttgctg

SEQ ID NO: 507985 - DNA, 449 bp, Homo sapiens
ctgaagtcacataataagattctgcctccaaaagaaaatgatatgtcacagaaataaataattacgggaaacaaaattttagaagacaatattatacgtctatgaaaatatggccatcatgtctaataattaccaaagcaaatgatcactgaaggaaagaatagtctatggagtgggagttgaacaatgagaacacacggacacagggaggggaacatcatacactagggcctgtttggggtggggggctaggggagggatagcattgggagaaatgtctaatgtagatgacgggttgatgggtgcagcacgccaccatggcacgtgtatacctatgtaacaaacctgcacgttctgcacatgcatcccagaacttaaagtataattttaaaaagtttttwaaaaaagaatattctatggtgaagtcagtcagggaaaggatgttgctg

SEQ ID NO: 507986 - DNA, 640 bp, Homo sapiens
ccttttcactccccgcatcccaacctctagttctcagaaaaagctctcttcagaaggacttgaacatagttcgtgttcaatcagggtttgtataaaataaagaaattgcacattggaagctgatgtttttggattgggaattaaaaagagaggcacaccatactcagcaggtaaggatttttaattaatctggaaagaggaagaaaacacaaaacactatttaaaacccccatgcttacaattcagaggaattagaaaaaccaggaaagaaaaaggttattctagcaaggtagggtagccaaaggaaggatacttaatttgcaatatcatagacaagaacatagtatacagaggctgtaacagtttactgaagtgtgaatatatttctggaaataaatgctgacacataatataactgaatggtgctaaaatgacaacacaagcctcatagtttgtttcrtaaggtgctcttaggtgtcaactccttttgaagaattaaatgattccattgaggacctactatgctatagccattttaggatggtttggagggaggttggcacacaattcattttggttcttttgaacttacttgtgtgtgagccaagctgtctgttatgggtagactggtaagcaagca

SEQ ID NO: 507987 - DNA, 640 bp, Homo sapiens
ccttttcactccccgcatcccaacctctagttctcagaaaaagctctcttcagaaggacttgaacatagttcgtgttcaatcagggtttgtataaaataaagaaattgcacattggaagctgatgtttttggattgggaattaaaaagagaggcacaccatactcagcaggtaaggatttttaattaatctggaaagaggaagaaaacacaaaacactatttaaaacccccatgcttacaattcagaggaattagaaaaaccaggaaagaaaaaggttattctagcaaggtagggtagccaaaggaaggatacttaatttgcaatatcatagacaagaacatagtatacagaggctgtaacagtttactgaagtgtgaatatatttctggaaataaatgctgacacataatataactgaatggtgctaaaatgacaacacaagcctcatagtttgtttcataaggtgctcttaggtgtcaactccttttgmagaattaaatgattccattgaggacctactatgctatagccattttaggatggtttggagggaggttggcacacaattcattttggttcttttgaacttacttgtgtgtgagccaagctgtctgttatgggtagactggtaagcaagca

SEQ ID NO: 507988 - DNA, 640 bp, Homo sapiens
ccttttcactccccgcatcccaacctctagttctcagaaaaagctctcttcagaaggacttgaacatagttcgtgttcaatcagggtttgtataaaataaagaaattgcacattggaagctgatgtttttggattgggaattaaaaagagaggcacaccatactcagcaggtaaggatttttaattaatctggaaagaggaagaaaacacaaaacactatttaaaacccccatgcttacaattcagaggaattagaaaaaccaggaaagaaaaaggttattctagcaaggtagggtagccaaaggaaggatacttaatttgcaatatcatagacaagaacatagtatacagaggctgtaacagtttactgaagtgtgaatatatttctggaaataaatgctgacacataatataactgaatggtgctaaaatgacaacacaagcctcatagtttgtttcataaggtgctcttaggtgtcaactccttttgaagaattaaatgattccattgaggacctactatgctatagccattttaggatggtttggagggaggytggcacacaattcattttggttcttttgaacttacttgtgtgtgagccaagctgtctgttatgggtagactggtaagcaagca

SEQ ID NO: 507989 - DNA, 606 bp, Homo sapiens
ccttgttaaacgttgaatgttttttgataatgcccattggaaaccataagctgatagcttagagcttactcttcaggacaagttaaattattttctggaaaacagccaaatggcttcagcaattttttggggggtgttgagagtggggggtgtctgtttaacaatgtaagtgctaccaatcggtgtcacagtagaacttgagtttgttctgctgacttaatgtgctgttttactatagatggagtagatttgtaatgaatcgtgttaataggctaattcaacatatgctttatgaccaattgactacttccattggtaaagactaggggggagaggactgattttaaaaatataaaaactgacacaataggtgacttaatgaatcctcttctgctacatatacatgtgtacacacagtttctttatacataatttrgcaaatgtgtaaatgaactttattaattttaattatttgtagaaaattttgagagtgattgaagaatcattctcaaatcagaaacaagagatagagctcatgttgataccttctctgggctacagatggagctgaaatttcagtatcctatgtaccaaaggaaaaatgtt

SEQ ID NO: 507990 - DNA, 405 bp, Homo sapiens
agcttgcccaaggaaaccttactataagatttgggtgcaggcagtctgttccagagctcaagcttttaacatcacagtaagttccctctcagatgaagaagacacaatactgacattttcataaatcaataagtaatgaataggcaatatgcaatgcatagactcactgatgctaccatttattaattaataaattaagaactttataactgtcactgtattttcatgtatattatctcacygaatgaaacacacttatgagatagattggcaatattatgaccatgtaaaagaaaggaagaaaagaacatgttcattgccttctccagcttatttaattgataacaaagttggaactataataaaaaaatgatctgagtttaaagctctcctccagggctccca

SEQ ID NO: 507991 - DNA, 615 bp, Homo sapiens
tctctttggcttcctggactttgtatatgatctttttctctaattgaaacagccattattccatttatccccatggctaattcttactgaattttgagttttgggcttgaagtgtaactcctctaggaacctagattgcttctcttaatgcccctcatggaatccaggaagtgctgtagaatcttattattatctctgttagccactatcacaccatttggaaattgcctttttattcatttttcttcctactgtaaacttgtggagggccagcactctttcttcttcgtggtggtaattccaacaccaaaatattctgtaacatactatgggtataataaatgtttgttacataatataggtactgtgattcattattacaaaactaaacccagcaattcatgttaacacagatgaaacttatatgaactgttaaaacaaaaacttcagccaaattaaatttaaaagagtttagttgagcaatgaacgatttgcaaatcagacagcctcctgagccagaktaggttcagggagactccagcacagccatgtggtggaagaagatttatgggcagaaaaaggaaagtggcatacagaaaacagaagtgaggtaca

SEQ ID NO: 507992 - DNA, 594 bp, Homo sapiens
ggcctaggtaaggctgtgccagggagtatagatatgagagcaaagtatgagatagacttcagtccctattccttacctctccccatgggtagagtgtggggaatagctcagggcacaaatggtacaacaaaccacatgttttagaccttctaattttgtctagaactagttgaactcatgaagatatcagtgcacagctggcataaaatgcacatttaatgagatgatagagcaactaaggttagctaaaggatcagcctaattttgaaactggcggtgagtaggttcgttatayattttacttatttttgaagtgatctgagttacttttattgtcatttcaggttacctttggtgtttcttctatcagattctactaataagaaataatctgaactttaactcaactaagatctatataaccaataatctcatttattttaaaatgttactgccccatcaatattcctgttgatggaatgtatcttctaccttcctagtattattgagtgttagaaaccctgtgaatgaggaggtattaaaacaaaataggccaggtgtggtggctcacgcctgtaatcccagcactttcgg

SEQ ID NO: 507993 - DNA, 602 bp, Homo sapiens
ctggcataaaatgcacatttaatgagatgatagagcaactaaggttagctaaaggatcagcctaattttgaaactggcggtgagtaggttcgttatacattttactyatttttgaagtgatctgagttacttttattgtcatttcaggttacctttggtgtttcttctatcagattctactaataagaaataatctgaactttaactcaactaagatctatataaccaataatctcatttattttaaaatgttactgccccatcaatattcctgttgatggaatgtatcttctaccttcctagtattattgagtgttagaaaccctgtgaatgaggaggtattaaaacaaaataggccaggtgtggtggctcacgcctgtaatcccagcactttcggaggccaaggtgggccgatcacgaggtcaggtgttcgagaccagcctggccaatatggtgaaacccagtctttactaaaaatacaaaattagccaggcatggtggtgcatgcctgtaatctcagctactcgggaggctgaggcaggagaattgcttgaatccaggagggggaggttgcagtgagccaagaaacaataaccaaaaca

SEQ ID NO: 507994 - DNA, 602 bp, Homo sapiens
ctggcataaaatgcacatttaatgagatgatagagcaactaaggttagctaaaggatcagcctaattttgaaactggcggtgagtaggttcgttatacattttacttatttttgaagtgatctgagttacttttattgtcatttcaggttacctttggtgtttcttctatcagattctactaataagaaataatctgaactttaactcaactaagatctatataaccaataatctcatttattttaaaatgttactgccccatcaatattcctgttgatggaatgtatcttctaccttcctagtattattgagtgttagaaaccctgtgaatgaggaggtattaaaacaaaataggccaggtgtggtggctcacgcctgtaatcccagcactttcggaggccraggtgggccgatcacgaggtcaggtgttcgagaccagcctggccaatatggtgaaacccagtctttactaaaaatacaaaattagccaggcatggtggtgcatgcctgtaatctcagctactcgggaggctgaggcaggagaattgcttgaatccaggagggggaggttgcagtgagccaagaaacaataaccaaaaca

SEQ ID NO: 507995 - DNA, 544 bp, Homo sapiens
atgggaactacaattcaagatgagatttgggtggggacacagtcaaaccatatcaagggttatgaaatcttgtgagttttttgtttaaataactgccattttaatgctgtgccaytgatgctacatatagaaaagaaaggtctggattttataacaatacaaattttgtacctaaattattaaatattctattttaaaatattatttccaatatgcaagcacaaaaactgagaatttaaatgcaattagtagaaaaaaacattaaggcagtgcaactaaacagtatgaactttttggtatcatctcaatgtgttagggtgtgacaatggcaaatatgtagaatctttatatttacaaattctgtatttgcaaactcagaaatagttcttgagtaacgcattcattaattttatgtgtcaacttgaagggtgggtaaagcaaattgcctccataatatttgtgggtgttatgcaatccattgaaggcctaaatggtacaaaaaggcactgcttccccaggcaaaagggaattccccagcagactt

SEQ ID NO: 507996 - DNA, 654 bp, Homo sapiens
taaaccattaaaatagtcatggtgtatataatagcgaaagatgcaaataactttattgaacttaaaacacaggcgcactcagaaatagctcaatgcatgacttgtcaaaccatttctgactctccttgatgtttttccaaagtgttgaggttcagttggggatttcttttacatcagtgctgaatttctgctccagatatatcatgtgtgactcatcactgctaatatatgagtaatctcaggcttttgctctccctaytcatgaaagaggaattgttttttcctgctgagtttgtttccattcccctaatttttgagaaaatacactgccagactaattattttttagttttgttggttttttttttttttttttgctttgtgggatttaaaacttggataaaacagaaatgaagacaggaaggaattggatgggttcggagttaaggagaaaaaatctgaaagcagctgagagaaacggaagagccatatgtacacttcacagtgtttgagaaatgcacacaataaatttgggagtatctttgaattttattatgcacggtgtttcttttgttatgacactgctctgagtttagaacatgttcaggaaaccacatagccattgctatgtttattttttcctttccatacgta

SEQ ID NO: 507997 - DNA, 547 bp, Homo sapiens
ccgacatgtgaaatacttccaaattactcgacattatttccagtagttttttttttggcctttaccatgaataaacagcaaatttcagcagtgttagagataaaaattgttgatttgtaatcttctacaggagaactgatttgtgagtagatcacacaaataarcaactttacatagcaaagtcatggattgatagagctcacctacttgcctcttactgttgttgttgttgttgttgttgttgttgttgttgttgttgtttgagacgaagaaatcttgctcttttgcccaggctggagtgcaatggcatgatcttggctcactgcaacctccgcctcccgggttcaagtgattcgcctgtctcagcctcccaagtagctgggattacagccaggaatcaccacacccggcccctcttactgttgattggtacgcacccagatgtgtcctttagtgtgtgtcctaggtccatccaggtcaatggctgttgatttaaacgagacatgaacacattaacctagcatctgtgttttaaatatgacattca

SEQ ID NO: 507998 - DNA, 254 bp, Homo sapiens
aacttttatacaaagttaagggacttttacacaaagttaaggggctttttatacaaggaaaacaaagaaaaattccygttatttatgttgccagattctgtaaaattagagaactgagactaaaatgatatctattaataaaacgcaattgaagacatactcaaaatgtataaatgcatgtctcttttaactatattgatggaatatagaatgggtgtagagcagggtaggtttatagtttttcatattagtaa

SEQ ID NO: 507999 - DNA, 525 bp, Homo sapiens
ttatgtgagctccttgaagtgggcaacagaggaaggaaaatgtaccaagcactcactttatgccaggctagttcaagacaccatctttattatttcatttaatcttcaaatcaattctgagacttactcttatgatcattttgcagctgagggaatggaggctcagggatggcagatagcttgcacaaagtctaacagattcaaatccaggcatttctgacttcaaagttcaagcccttcctgccacactcccctgtgccaattcttcaaataaccaggtcctgcctactacctggcatatgacagtaggtgctcaataaatgcgttctgaaaacagaactaaacttacccagaagtgtggatagaaagaagagacaatagaaaagaagtgtctaaaaagtagagacaatttaggaaaascaaccctaggagtcaactctcagctaggggctggcctgcctaaactggcacttatcccaacacacacaaattctatcagaattctttaatcaaaagatgttaagc

SEQ ID NO: 508000 - DNA, 687 bp, Homo sapiens
tggggcaaagattccatgatgtaaagccagagagtaacaagtcagcattgtggaagggagctgcttctttatggctttcccacacaacgctagagtcagggggacctttcataggtagagaagacctggggaaaattcaccttttctccctttttaaatccttctttcttgagcttcctgggacttcccttctactatagggtcttggagagaaaaaataataattaagctcacttataacacatctatatgctaactgtattagtctgtactcatgctactaataaagacatacctaaggctgggtagtttataaaggaaaaaggtttaattgactcacagttccacatggctggggaggtctcacaatggtggcggaaggtgaatgaggatcatagtcacgtctttcatggtggcaggcaagagagcttgtgtaggggaactcccctttataaaaccatcagatctcgtgagacgtgttcactatcatgagaacagcacaggaaagacccaccccttgattcaattacctctcatcgggtctttcccacgacaagtgggaattaggggagctacagttcaagatgagatttgggtggcaacacagtcaaaccatatcagtacccctctgagtaagttaggatayagacaagaaaacagcccaagtcaggtagttcaataaagaaa

SEQ ID NO: 508001 - DNA, 608 bp, Homo sapiens
taatgtgactctggttaaaactaaggttttcaggtatgaaggaggtggacgttctgtacagtggagccacagccctccccaccccctgggtttctctgaccctgagacctgatgcacagagaggttaagactcacacagcccatgagcggcggaagtcccggcactctgtccttcaatctgctcatcgcagtcacttcctcctgaccgtggactcttcttcccagccttttccttcaagctggaggcccggaagtgtgcagaggacagtgaggggcctcaagtrtggacatcacatgagtactgaagaaggacccctagggcttccgtgaaaagaggcctccaattgcaaagctgctttctatcagacgaggtcacggacagtagtgaggagtggcaggcgggtgagtgggagggaagcggcctgggctgctggagacttggctactgggtgtccacaatgccaggctctaccactaaagcattcatgttccccacaggaggggtgcctggctgccggcccaccccacccaggacgaggcagccctcagcggaatggaagactctgtggccagtgctctttggggccttggcaccaggtcctcagcag

SEQ ID NO: 508002 - DNA, 592 bp, Homo sapiens
tggacaatatataaatgaatggctgtggctgtgtgccaataaagctttatttataaacacaaatggtgggcctgtttgccagtgggctgtattttgctgccctccctgccccagatttctatttttttttttttttttttcarattttttatgatcatctttattttttttaaaaactgggtcttgctctgtcacccaggctggagtgcacaggtgtgaccacagctcactgcagcctgaactccttagctcaagtgatcctcccatctcagcctcctgagtagctgggattacagttttttcaaagttttgtgtctgcttctaggctgagtccccaggtcccaggtggagctgtacctcttgactaaagtacccatgcttagcttgtgtcccgttttgcacgttagcagcaggagggtgcttcccgtgctgctccatgggtcagcttcctgggaaatcccaccggtcatgtctctcccagtatggctgggacatagagaacaagggggtgcacatgccgcctgagtgtgtcatcaaaggggattctgtctcctctgatgccacaaatggctgctgttcccacacaggctgt

SEQ ID NO: 508003 - DNA, 592 bp, Homo sapiens
tggacaatatataaatgaatggctgtggctgtgtgccaataaagctttatttataaacacaaatggtgggcctgtttgccagtgggctgtattttgctgccctccctgccccagatttctatttttttttttttttttttcaaattttttatgatcatctttattttttttaraaactgggtcttgctctgtcacccaggctggagtgcacaggtgtgaccacagctcactgcagcctgaactccttagctcaagtgatcctcccatctcagcctcctgagtagctgggattacagttttttcaaagttttgtgtctgcttctaggctgagtccccaggtcccaggtggagctgtacctcttgactaaagtacccatgcttagcttgtgtcccgttttgcacgttagcagcaggagggtgcttcccgtgctgctccatgggtcagcttcctgggaaatcccaccggtcatgtctctcccagtatggctgggacatagagaacaagggggtgcacatgccgcctgagtgtgtcatcaaaggggattctgtctcctctgatgccacaaatggctgctgttcccacacaggctgt

SEQ ID NO: 508004 - DNA, 592 bp, Homo sapiens
tggacaatatataaatgaatggctgtggctgtgtgccaataaagctttatttataaacacaaatggtgggcctgtttgccagtgggctgtattttgctgccctccctgccccagatttctatttttttttttttttttttcaaattttttatgatcatctttattttttttaaaractgggtcttgctctgtcacccaggctggagtgcacaggtgtgaccacagctcactgcagcctgaactccttagctcaagtgatcctcccatctcagcctcctgagtagctgggattacagttttttcaaagttttgtgtctgcttctaggctgagtccccaggtcccaggtggagctgtacctcttgactaaagtacccatgcttagcttgtgtcccgttttgcacgttagcagcaggagggtgcttcccgtgctgctccatgggtcagcttcctgggaaatcccaccggtcatgtctctcccagtatggctgggacatagagaacaagggggtgcacatgccgcctgagtgtgtcatcaaaggggattctgtctcctctgatgccacaaatggctgctgttcccacacaggctgt

SEQ ID NO: 508005 - DNA, 592 bp, Homo sapiens
tggacaatatataaatgaatggctgtggctgtgtgccaataaagctttatttataaacacaaatggtgggcctgtttgccagtgggctgtattttgctgccctccctgccccagatttctatttttttttttttttttttcaaattttttatgatcatctttattttttttaaaaactgggtcttgctctgtcacccaggctggagtgcacaggtgtgaccacagctcactgcagcctgaactccttagctcaagtgatcctcccatctcagcctcctgagtagctgggattacagttttttcaragttttgtgtctgcttctaggctgagtccccaggtcccaggtggagctgtacctcttgactaaagtacccatgcttagcttgtgtcccgttttgcacgttagcagcaggagggtgcttcccgtgctgctccatgggtcagcttcctgggaaatcccaccggtcatgtctctcccagtatggctgggacatagagaacaagggggtgcacatgccgcctgagtgtgtcatcaaaggggattctgtctcctctgatgccacaaatggctgctgttcccacacaggctgt

SEQ ID NO: 508006 - DNA, 502 bp, Homo sapiens
tccatcataccttttacagagtcatgtgactttgcatattaaggcctgcaaagttctgcaacttaaaaacctgtwtgactttgattaattccattgtccctcaactctttgaccctgtggtttttatttctgcttaacagctagttacaccccagagaacataggctattatggaaatatgtgctgagtatggtagaaggaagacagagggaagaatttattcgcctgacatgttggcatcagagaaaaatacattggagcaggtcttggatggtgagtaggaacccaggtgaggtgaaacagagagtgcagcacacacagggacaaaggccaagagactggagggaggcaggcccaaaggccacaggtcttgggtgctaaagggtttgtgctttattctgacttcaaagacgaccttctagggattttaagaaaaggaatggcatggtcaggtttgtgtttttaaaagttaatgctggcagcttctgaaagcttggaggcc

SEQ ID NO: 508007 - DNA, 551 bp, Homo sapiens
aggcccctcactctgggcctgagcactccacgctgttacagcactccacacattctctagctcctgggagcactctagctcccaggagctagagaaggtgatgatcaagtgcacactcccatatatgatcccccagggccccatctggattcctgctggccctggctcttcaggaacccatcatctatgctctgagctgagagcattcactggcctcctctggccagccctcttttgggcttgtgggcactaaggcagatatgagggccrgacatctgaccgtccaggacagtgcccagcctggggctccctgcatggggtgaatggctgccccagctttcgttttataggtcagggtgggttttctttccgcttaaatgcccctctggtccccgagaaggccctgagaagactacctcccctgtgtgcagggtccttccagctttctgagacactggggactcaatggatctggcgtgggctctggtgggtgcctggagacaagggggcgtcctgtgatgggagcccgagaggggccagcacaggctcca

SEQ ID NO: 508008 - DNA, 473 bp, Homo sapiens
gctggcccaccagccttgggctccccaaccacagagcacggcctggtaccaggaactttgctgcaggttctggaggagccggggaagtcaaggcattcactgccacacccatgacaagcctcttgacaccctgtcccctcagagatcaccttctcccaggtctccctcacccacacmatcctccagggctgccgtccttctctgtctttgccccaccccatgtccagccctcctgagtccagcttctcctctgcagggcccccagcatcgggccatagccacaccctcatcaggcagcttggtacatgtccctccctgatcagaagccagctttcatcaagtgaatccaactcaactctcattagtccagcacctgctaggtgccagaccctgcatcagtgctagggatacacagggcaacagagtcctcagcctcaaggaccctgtagtctgagggtcagggttggaatgaa

SEQ ID NO: 508009 - DNA, 473 bp, Homo sapiens
gctggcccaccagccttgggctccccaaccacagagcacggcctggtaccaggaactttgctgcaggttctggaggagccggggaagtcaaggcattcactgccacacccatgacaagcctcttgacaccctgtcccctcagagatcaccttctcccaggtctccctcacccacaccatcctccagggctgccgtccttctctgtctttgccccaccccatgtccagccctcctgagtccagcttctcctctgcagggyccccagcatcgggccatagccacaccctcatcaggcagcttggtacatgtccctccctgatcagaagccagctttcatcaagtgaatccaactcaactctcattagtccagcacctgctaggtgccagaccctgcatcagtgctagggatacacagggcaacagagtcctcagcctcaaggaccctgtagtctgagggtcagggttggaatgaa

SEQ ID NO: 508010 - DNA, 473 bp, Homo sapiens
gctggcccaccagccttgggctccccaaccacagagcacggcctggtaccaggaactttgctgcaggttctggaggagccggggaagtcaaggcattcactgccacacccatgacaagcctcttgacaccctgtcccctcagagatcaccttctcccaggtctccctcacccacaccatcctccagggctgccgtccttctctgtctttgccccaccccatgtccagccctcctgagtccagcttctcctctgcagggcccccagcatcgggccatagccacaccctcatcaggcagcttggtacatgtccctccctgatcagaagccagctttcatcaagtgaatccaactcaactctcattagtccagcacctgctaggtgccagaccctgcatcagtgctagggatacacagggmaacagagtcctcagcctcaaggaccctgtagtctgagggtcagggttggaatgaa

SEQ ID NO: 508011 - DNA, 669 bp, Homo sapiens
gtaagtatatgctaattatatctatcctaactatatatttgggcactggggaaataaccacagggtgggtttgcagatgcactggatcttctgtgagaatgacttttgtcagcacttagggttctagaattccattcataatgggctctgggtctgtgaactgactttgaggcataggccacaattttcctttgcagtggttaatgtcagtcttcatttgccagattgagatattttcttgtttgtataaacccaatagcaccctaattggttgtctacgcaactcactccttggactctgtaatctattaattactgtcatagccctgtgaaccaaagcactctgactgaacctaccactctggcttgctgcctatcaagtaattatgtttgcagtgtgtgcctttgaaagccaccactgagcttctccaagatgctggtatcttgctcaccaatgcgctttctamtgtctgagtgaaaagtatgccctctgggtagtaggttcttggtctaaacataagaagtccctgtataatattcccagttccctgagccttctattctcttcctcaacactatgccaaagtatttctgtggtctccactttttttctgtagttccttgtggagtcaaggcctcagatatccatcctggcaaactatccatgtg

SEQ ID NO: 508012 - DNA, 598 bp, Homo sapiens
cctcatagtgtctctcatatattccaatatagagtcaccaatgtagtccatgtagtcgtgggaccagtgaggaaacacaggtccaaaaagccagagtgaggctgggcgtggtggctcacgcctgtgatcccagcactttgggaggctgaggcgggtggatcacctgaggtcaggagttcaagaccagcctggccaacatggtgaaaccctgtctctactaaaaatacaaaaattgctcrtggacccattccaagatggccaaataggaacagctctggtctgcagctcccagcatgattgatgcagaagacaggtgacttctgcatttccaactgaggcacctggttcatctcactgggactggttggacagtggacgcagcccacagaaggcaagctgaagctgggtggggcattgcgtcacccgagaagcacaaggggtcaggggatttccctttcctagctaagggaagccatgacagatggtacctggaaaaatgggacactcccacccaaatactgcacttttccaatagtcttagcaaatggcacaccagattatatcctgcagctggctcagcgggtcccatgcccataga

SEQ ID NO: 508013 - DNA, 607 bp, Homo sapiens
ggtggggccgcgatgcctgcagctagtggaatagttgatatccaatcccgtgcccccggccctggtgaatccacatcctgccaggcaggggacttgtcctcctctgaggttcaggtcagaactctaatccttgaggtgggagtggaaaccaagctgcagggcgggggagccaaaattccaagaaagaactcctcaggatgggaggaggagccctgcacactgggacaggcaggacagagtacccagaaagacgacggtccggtaaacaggggaatgacagtcccagtcagagagggtcccgaacggtggtccacagtcaaaaaccccactttctaagtagtagtgtggtgctcccaccaatgggtcatggggcccaaaggtgtccaggttaagttaaacttcaggatgtgtagaaagcaacacaggtgaggtgtgatggaaacaaaggtgacaaggatgttaccactgaaggcgggtggttggcacagggcccccgagagttagaatgtttccccagcctccaccttcattcttcagtactaaattctaatgmgcagtatctagacagagatatcttggaacggaggaaggggccctgaggctacac

SEQ ID NO: 508014 - DNA, 543 bp, Homo sapiens
aatagggaattacggtgtaaataggagaattttaaaagtgcatttgagcagaccgaatcctccstgcgtccttttattctctgctttcttagtgtcatactcaaatcctgtactcagggcaccatggaaccttgtttcatttggtattacggagagacttagtgtcagcaattaaacggttacgccccggctggcacagcgaatctggaaaaagaacctccattcagaggtggcttctcccggcttatttctgctgtttgtgttggctgaagcagagaaccgcatagaaagaggactctcaacgtgagcagagtggcaagtgggacccagggtgagggcagcgcctaaatgggcagacagcaaggtccgcagatgaaccaaaaggccatctcaagaagggacttcactggcaccagtaccccgcctcccttccccagctaccgcaaattcttctatctcttcagctttgcaatgacaatggccaggccagaggacaggggaacacatcacgcgacactgagtgttcctcccttgggtcagcag

SEQ ID NO: 508015 - DNA, 593 bp, Homo sapiens
aattcactaatatattgggagataagctatttcctggcctccaaatgtgaatctctgggctttatttcaccctctttttcacccctagaaacacttaagttttagcaatgcacatacagctcacgaaaagcacttatccctacattctacacgtatttagaggagggtgtatcctgcagtatttaagagtatggagtcctaatgcttggattttgagtcctaactacctgagttactttgggcaagtaatttaatcttttcaagtcttgggtttctcatctgtaaaatgaagataatattggtgcctagctccttgcrttgcagtgaagattaaaataggtaccgcaggccaggtggggtggctgacacccgtaatcccagaactgtgggaggctgaggcaggagaatcactcgagctcaggagttcaagaccagcctgggcaatatagaaagactctgtctctacaaaaaattaaaaaattagctgggcatggtggcaacgaccagtggtcccagctacttggaaagctgaggtgggaagatcacttgagcccaggagattgaggctgctgttagccattatcgtatcaacg

SEQ ID NO: 508016 - DNA, 532 bp, Homo sapiens
gctcaccagggactcagagaaggtagatcctaatgtcttgagatgaggggcgtagttaactcactggctctgaggcccacagctctgggtagaccaccacctacccactggctgygtgccccttggtaagctacttcaccccttccggtctcagtttgttcccctgtaaaagttgctttgccaactaagtgagacaaagcacacaaaaaaagtttcgcttgttgctctgtaaatagtaatagctcaattaatatagtagctattgttctttgaaaggggacttagagatcctggaaggctcaagggcaattattttgcagatatttcagaacaagacttgagcagacaggatttataaactgactgaagagggagacacctgggatagaaaacggaagggcatcttcagcagggggacagtcccagctagagggatcatattggcctaactcctctctctgcacttcctgtctttcaggctgttctagatgtggctcttcaaactacaaagatcggaagtcactcaacctag

SEQ ID NO: 508017 - DNA, 531 bp, Homo sapiens
tctgtgtcaagtatctgtcctggataatggatgctcagaggcagcaattttgtaacacattctagggcacagtgtcatcagtgattaacagcttgctagaataataatatgtttgtatgaccttacagggcaggttttcttcccccagaacctcccccctcccccgccagatatcatagcatttattaagagggtcctgtgaggtaggagagtattagccccattttacggatgaacacactgaggctcaaaaatgtggcttgcataaggcctctgggtgrgggaagggccacattcccccttttctcagcttatggcatttaattaatagtggccactttttttctgagtatggattcttgacacctcaggaaatactgaagctaaaaaatagagtatattatgctgacacatattctttctcaaaacactcttgatttgttaaccattcctaatgagagcagccactaaagaacggaagtctgcattgctgttattaccacgcatttaataatttgctgttggtgaatg

SEQ ID NO: 508018 - DNA, 517 bp, Homo sapiens
cacttccttggttcaagtgattctcctgcctcagcctcccaagtagctgggattacaggttcccaccaccatgcctggctaatttttgtatttctactaragacaaggcttcaccatgttggccaggctggtaatgaaatcttgacctcaggtaatccacccagctttgcctctcaaagtgccaagattacatgtgtgagccaccacccccagccatagtctctattttttagtggcaaccttctcctgatctgttggccgcaccatacctgagttacaataaaacatgcatttcaaaacaattgcagtagagaaatataatctagaacttttttcaagcaagcaaaagacctctgcttgacagagaggtaataagctatctaaagaaatagctggctatttggcatgtatacaatcttgctgtaattttttttctcactctttaaacccagagttcttgtcttaatctatttgggctgctataacaatactacaaactgaacagcttataaacaat

SEQ ID NO: 508019 - DNA, 287 bp, Homo sapiens
catcaaggctctatctattctctctatcatttggctttacctccttctctgttgcagtttgcttaattcagctatgaggaaaactccataattaacccccaatgccctgagccccacatccttccatytaagaaaccccagtggaaagagaacttttttattcaaagcacactcaataaatcaggaaagaacttgcatggtttttgcttaagttagatggttattgtatttaatgaactggactaataagtactgatcaatcctgggtcatgtgccccaattgctga

SEQ ID NO: 508020 - DNA, 287 bp, Homo sapiens
catcaaggctctatctattctctctatcatttggctttacctccttctctgttgcagtttgcttaattcagctatgaggaaaactccataattaacccccaatgccctgagccccacatccttccatttaagaaaccccagtggaaagagaacttytttattcaaagcacactcaataaatcaggaaagaacttgcatggtttttgcttaagttagatggttattgtatttaatgaactggactaataagtactgatcaatcctgggtcatgtgccccaattgctga

SEQ ID NO: 508021 - DNA, 604 bp, Homo sapiens
gtttggttttttcccaggcttctactttccagagagactttaacatttttttctgagttctccacggttctgggaccagactgcccttcagtcagtggcctctgaagtgagatttgctcatcttctgtggaatagatcttgggaaactgaacttgacagcttgaatcttcctcatatcgtctcaacctggggtactttgagtgccacaggataaatgtgggacatctttctgaagcatcatttycccttgattctcttgagaaaatgcattaatgtacttagggatgacagacacataggtttccaagcgtataccagacttcgctctgaaatgaggcttgggttgtcctctttctgataaattcccagatttaatagaaaagctgccttctgccatgaggacacattgatatgaaagtgtgagaggtactggtacgcttcttcacgctagcagacctgtgaggatgtatgactctaaaccacacggcctacagttcctgcctgcttaatgtttacttttctacctctgcccctggttttggtccctggaagctgctgattcatggcaaaaccccagagcttggagtcagaggactgagtttaa

SEQ ID NO: 508022 - DNA, 604 bp, Homo sapiens
gtttggttttttcccaggcttctactttccagagagactttaacatttttttctgagttctccacggttctgggaccagactgcccttcagtcagtggcctctgaagtgagatttgctcatcttctgtggaatagatcttgggaaactgaacttgacagcttgaatcttcctcatatcgtctcaacctggggtactttgagtgccacaggataaatgtgggacatctttctgaagcatcattttcccttgattctcttgagaaaatgcattaatgtacttagggatgacagacacataggtttccaagcgtataccagacttcgctctgaaatgaggcttgggttgtcctctttctgataaattcccagatttaatagaaaagctgccttctgccatgaggacacattgatatgaaagtgtgagaggtactggtacgcttcttcacgctagcagacctgtgaggatgtatgactctaaaccacacrgcctacagttcctgcctgcttaatgtttacttttctacctctgcccctggttttggtccctggaagctgctgattcatggcaaaaccccagagcttggagtcagaggactgagtttaa

SEQ ID NO: 508023 - DNA, 513 bp, Homo sapiens
tttatcagctctctgtgtcgggcactttatataaattatttcagtcattatagcactgcagtattaggactacgatctccacttgaagtttacataaaataaggaagaaagagctcccggtgaaagtccagaccttcagatgtgggatggagcctttgagtcagtctctctctgacacctcagaagctggtccatcggatgtctgctcctcacagtggcctttgtgtgctggcycctggccttctgcgggagcccagaccagagttgtggggctctctgtaccacatccatgcttccccttggatgtcaggaggaggtctcttaccaggggctgaacactgcaaacatagaagtgagttctcaggtccccgacttcccctcatccacttctctccatgatcctgtgtcctttctcattgcttgacctagtccacaccagctccaccaaattcacatcccaaatttctgttgctcagtggatccaagatcaggccaaagtgaaattcgttgggt

SEQ ID NO: 508024 - DNA, 548 bp, Homo sapiens
ggctgcgggaggagaggggaaggggccccaggctggagcagaagttgctggtgcgccgagctgccttgcggtttaggcccagaggttcacgcgagcgagcgcgctgtggtgagcgcgataaccggcgagccgcgaggcgattcggagaatttctgaaggctctgtaataaaaggtgacagcacaaagcccatgataacaaggccgaggcaccgtgccaagaagtcggcagcagtgacaaggagggcttggcggaggtggggagccagccgcttcccctctggcaagggagcacacacagaggatgcctccccagcytttgagcagagacaatgaacccacttggaagaactcacttgtgcgtggctggggtgagagtgtgacaggaatagagatgagcccctgccacgccttccctggggttccacatgtgcctgccacctgcagtgacagtcagctccagaccgtcccagcagttgtcccctcacctcctcctcactatctcaggatggacatgaccccagcctccagggtagcaggccagggtgga

SEQ ID NO: 508025 - DNA, 490 bp, Homo sapiens
ttatcagtgacaaattcagtgggtttcattggactccactcgaggacaaaagcagttctcgtgtagggaacactcagtctattttataggataaagtgttgcccaataaaataaaagttaaacaaaaattaaattgaaaagcagttttcatggaggaaagtctagggacagagtatgggggaggcagcagagacaggggccaacagcaggcatgtcggggggtctaagcctggccttgcctttctcctattctgggaccttgagaagtcccctcatgctctgtgtgctctccggggaattaagttacaataactgtgcctgctgttgttggagcattaaaataggtaatgcttctaggggctgagcccagagcctggcccataggaagcactcacgaaatggtggctkctttaatttgggaaccaagagattttactggatgttcctagaggcacaagaaacccacttggctgactccataggtggccag

SEQ ID NO: 508026 - DNA, 465 bp, Homo sapiens
ctgccacttaactttcctgggtctcagcctcacttctgttaccatggggaggcttattacacaggcacacatgagtctctagggttccagagcaaacctatcacccatgacaatgaagcttgtagaagttgttcttatctgaggctcactgatcacaacaaaagcagaagatcacttcctcaaagatgtgacaaatggactcgcaacttgatatatgcccggaacattagagtttacaaagytctttaagaaaagtatttttctttatgctcccaacacccctgtgaagattacataagacatttttattccacctctgaagatgagaaaatcgaggccccagagagaaaaagtgtgtttttctgaaggtcacacatacaatagatgtacagaggcgagactccaacccagcacaggctcagaacattccaaagggcttcagaattcagggtatgtcctcacaaa

SEQ ID NO: 508027 - DNA, 589 bp, Homo sapiens
ctggagcctgggtccgctgtayggagactctggtgtgggtcttgaggaggtggtcagtgaattcctgatagggagacttggtaaatacaggtctccttccagaggtcgggggccaggtagctgtaggtcttagaaatggcatcaaaggtggccttggcgaagttgcccagggtggcagtgcagcctcgggctgaggtatagcagtcattgataccagccatcataagcagcttcttggacacaggtgtggagacgatgccagtgcccctgggtgcagggatgaggtgcagcagcacagagctgcagcggcctgtaaccttgcaagggacggtgtggggcttgctgatcttgttcccccagtaggctctgcgcacggggacaatggagagcttggccaggatggtggccccacggatggcggtggccacctccttggagcacttaacatccagacagaagtggccattgtagtccccgacagcaacaaacgccttgaacctggtgccctggccggaaggggactgcttctgcaccggcataatcttcaaaacctcatccttgagagaggcccccaggaaaaaagtcaata

SEQ ID NO: 508028 - DNA, 579 bp, Homo sapiens
agcactggcttgactgttactctgaacctcacccaagatcacatggatagtcaatgaaggataatcaggcctcctggctggattcaccaagcacctacacaggtgctcagaggccctttctctgtactctagaaaagcaagtcccttccttttgtgggcttaatttcctcctgtataaaatgaggagctgaggccaggtgtggtggctcatgcctgtaatcccagcactttgggaggccatggcgggaggattgcttgagcccaggaatttgagaccagcctgggaaacatagtgagaccctgtctctataaaaataaaaaaaaatagctgggtgtggtggcatgcaactgtagtcccagctacttggaaggctraggtgggaggatcacttgggcccaggaggtcaaggcttcagtgagctgtgatcaccccatcactgcactccagcctggacaggagagtgagacctgtctcaaaaaaaataaaaataaaaaggaactggactagggatctcccaagtcccttctggctctgaacttctaggacttttaggagagggtcatgacttatggggaggt

SEQ ID NO: 508029 - DNA, 512 bp, Homo sapiens
ggtacactgacactgaatccatttgttaaaatgatttctattttattttttatgatatatgtctattgagcagcttgaggcaagcctgtgttatcttatggcttgttcatcccaccttgtattcacgcaagctcttccttgccccatcccagcccttgccagttcagtgcaaacttagcagcaagtgtactttytttcatatattcatctggtgagtaaagtttggatctttgatttgtacccttcccttgctctgtcagggcaagatgggggcaggctgggtgtgaagggagtaacactgctttttaatcacttagaaacgtacccttctctctggctttgcttttgttcaggggtttttaaccttgttaagaagtcacacctggcctccaaataattgcatactccacattaaagtttactgcccctttcaatagaaataaaatgaaaactagagaatttagagacagaccacaggctttgaccatgcagtgaaattcacccaagtataa

SEQ ID NO: 508030 - DNA, 603 bp, Homo sapiens
aagaaaagcaaaatacattttattctagtattaatactgaggtatgcagctaggtagaacaataagagaaaaaaatgttgaggcaggctccaggctcctatgtatcagaaagaaaaaaataaagttattttttttttctgatcaccaaaagtttgagaacaagaagttattttccaagaagagtaaaaaagaaaggcatttttataaaatggaactgactttatgctgcctttcctttttgtgttttgcctgctctgtatcttcttctgatctgatatttgggtcatatcgggtagatgaactctgtgtwccgttctgaaatgcaggcacacttcctgtcttggtcagggatgtcttggggcttagagaaggactgatgactgacatgatggaaatgaagccattaatgggttcagtatgcgatgggggttgggagctgggtgaagtcagaggtagaaaaaataaaatatataaaaattaattcattcacatagattcatcttcagattattcaagaccaaaaccagcatgtataaagatataaacaaaacaaaaagcagtaatatattatatgattatgcagagttatacaaatatatattg

SEQ ID NO: 508031 - DNA, 608 bp, Homo sapiens
ggggactccagtggtagcaagcttggtgggctagttcttaggtccctgaggtcgtgtataagcttgtgccagctctgccactaaaggagatgggggttctcttttggattatctcagcaccwaagatattagcaaaaaaatcagcctgaagggagagaacaattgagagataacagacattcttgccactaaagttaatggattcttctgtaatcaattagaaaaagaacagatttggtaggttagtacttttacgttttacattacttgacacataaaattggagcaatactctttgccagatgacaggaaaacaatagcattgattttagtttatatttctgagcatttcacaacacttacataggcattattagcctaattttaaagatatagaaactgaggctcacagagttttaagtgaaccacagcagtgtaaattatggagtcagaactggaacttaaatacgtctagctgcaaagtccctgcttgttcacagtattgtactactagatcaagcagtcatatcgcatcctcaaaatttaccttttcactgtatcaccgctgctattggagtatcaatagttcttttcacagtaggttacta

SEQ ID NO: 508032 - DNA, 608 bp, Homo sapiens
ggggactccagtggtagcaagcttggtgggctagttcttaggtccctgaggtcgtgtataagcttgtgccagctctgccactaaaggagatgggggttctcttttggattatctcagcaccaaagatattagcaaaaaaatcagcctgaagggagagaacaattgagagataacagacattcttgccactaaagttaatggattcttctgtaatcaattagaaaaagaacagatttggtaggttagtacttttacgttttacattacttgacacataaaattggagcaatactctttgccagatgacaggaaaacaatagcattgattttagtttatatttctgagcatttcacaacacttacataggcattattagcctaattttaaagatatagaaactgaggctcacagagttttaagtgaaccacagcagtgtaaattatggagtcagaactggaacttaaatacgtctagctgcaaagtccmtgcttgttcacagtattgtactactagatcaagcagtcatatcgcatcctcaaaatttaccttttcactgtatcaccgctgctattggagtatcaatagttcttttcacagtaggttacta

SEQ ID NO: 508033 - DNA, 513 bp, Homo sapiens
cccagctaatttttatattttcacgcccagcggggtttcaccatgttcaccaggttggtctcgaacttctgaccttaagtgatcctcccgcctcggtcccccaaagtgtgggattacaagcgtaagccaccatgcctggcctgccaaccacatatttaaggcacaggaagagcagaatgtgtagatagtttggggatatttcagttaaaaatcttgaagcagcaacctccatttttgaagaaaatctattggccatattgtacatctggccacaacagcactccacatttagccccacttcccgatttttgtagtgtgagatcacacaaccaaaatgtctgcttcagcttcacaaggaagacactcacatatttctctgtcrggtaagagactcatcaataaacctctccactccgggctggtgttctttctctgctatgtccaccacagcatcagtgatcacagaaaagaagtatgatccctcacttcctggggctttcttcccaaaagcag

SEQ ID NO: 508034 - DNA, 513 bp, Homo sapiens
tccatctgcaacataagcagactggatctacagactctgtggaagtcttaagaagaaacattaaagcaaacaaacaaaccccaaaaaggcaagtatgaggtcttccaggtgctgtgtccctttcagcgcctaatgacatacacttaatgaacactggctaagagatggtcttacattgactggcagcccctaccaatcctcctaacctcagggcaggaatattttgttcaactttagatgccctgactgtatccctcactttactcttcctatctctgtctgtttactcctttccaaatctgtgcctggaggacccaagtcctgtggatatcatctatgaagtacatctattttttaaagttcttaatattttggggcctgtgaaaccctacgagaatctaagagctatamctttccccagaaaaataggaaatatctgcacacaatttctggcggttcatgaagcccaggaacctctccatgagctaagaagagccctggttgtaatccagg

SEQ ID NO: 508035 - DNA, 507 bp, Homo sapiens
acattcagaggaataaccccaccccaaagtccagtaggagtagggaagagagcctggttcaattttctctttggtgtagccatttaaaatgctaaagcatatggtttatttcccaccccagcagaacaataaaaatggtatcaacctacgtcttgttcgtggtgggggggatgggggagaacccttccacccccagcagaactacactacaggaagagagaaaaagaaaaaaaaaaatgctatagagctcaaccaatcaactttattatcattacacgtgttctgtactgaatgcaccaattgtcacctcccctcccccaggcatggaaattmtccagctagcaaacctgtatgtgtgtgtgtttaaatttcaaaccaagttactatctgtgttaaaaattacttcaaaactctaagagaaaaacacatggcttgatgttaattttgatatggtgcttttgattttgcttcctccatctctgaatgcctgaagctattgggttaaat

SEQ ID NO: 508036 - DNA, 565 bp, Homo sapiens
tgaaaatgttttgtacctaytcaataatagaaataagtacattcaccaaatcaaaatttgaaataatggcttcaataaatattagataatattttcttttcaatgttttttcctctaattgaaattactttagatttatttgtgatcagtttcaaaaagcttgccatttttctacctttttacatgatctatatgatctatgaaataaacatctttgtcctgcatataatctttaagttgaattttacttttaaattccagatgtgataataagaaacttggcttctacacaaccagagtactgtcatcaggacatcaccagcctaacctgggatccagtgtgctcatttataaaattagccagttgcatgctctatccactttataggaatatcgtgttgataaaagtcaagataatgaatatcccggacaattatttatttagtggttgtatggacaaggcattattagtagggacaaaaataatttctctacaaattgaaagttctatataaatacaacatattatcacgatgatcacatgtacaattatttttgacaagaa

SEQ ID NO: 508037 - DNA, 517 bp, Homo sapiens
tagttaggtgtgatttctcttaggctgttaatgcagatgtcattaaagtaacttatcctattagtatccctaataattaggttttctttcatatcttacatgacaatatagaaaatactattgttcacatttatgcaccttctcttttcttctccctcttcccagagtgtcaaagtacaggctgaagtgattcctatttatatayccacactggacagaatctgccaagggctacagtttatataaaattatgatatgagggggacattatagatggaaaaaatttactaatagagtctaagattggactgttatttaaaatgtgagtagctccttttggtaccagaatcagtcctgacgttaatgggttcaacatattcaattgtacatacttatagaccactttggaggaaaggtctcatattaatataagaacaacttctttttttgtctttttttgcaatgtaaggcaggcttgaaaggttttgacttcttcttttttttttttttttttgtc

SEQ ID NO: 508038 - DNA, 437 bp, Homo sapiens
aaatatgtttgtcttgttcactgttgtattccttccacttactttaatgcagaatatagcagaccctcaaaaatatatgtttaatgaataaaaacacagataagttttataatgcttaacagataagcaagatctcacaagaagaaatcactactatacacacaaaaactgataacccartttggtctactttgaaataagaattacaaactattacaagactcaaagtttagaaccattttaccattttatattactatagataagaaaaaagctcatatacaaaatgtgatggttaatattgtgtgtcaacttgattggattgaaggatgcaaaatattgttcctgggtgtgtctgtgagggtgttaccaaaggagattaacatttgagccagtggactgggagaggcagacccaccctcaatctggctggacaa

SEQ ID NO: 508039 - DNA, 581 bp, Homo sapiens
gcttttttattgtaatttttcctgctatagtgattatttgtcttcatgactcagatgaccatactggctagtttttttgtttgtttgtttgtttgttttttcactcacgagtgcatcgtttgggcactatgcaggcacagcttgaggcagtttggatgcagtgactgataactgcaccagaagcaaatctgcagattctgtttggggctcatctcagtttcaaatacgggtgactaaatgacatctgcctgcctctccctcctccttcctcaacaaggaagaggcctcgtcgccaacacgcgcacatagttgtgggcttcagccaactccgtatagtgcagcattcaaatgaaactcatcagaacacttggaaatgacagagtgaacaccaggagcttatttctaatgatattttcratcaccgaggatttcactctaagccatgtttgtcttttttttcaaattgctagaaagggcattaataacattatctttcccccaaaatgaggtaagaaactcatcaaaaaggggctgatatactgggataaagactctgggctcctccctcattttcctccagt

SEQ ID NO: 508040 - DNA, 583 bp, Homo sapiens
ttaaggtacttctagtatttgcaactgaacatttcaaccaatattcatttctctcttgggggactgatttcttaaccaaagatatatttaaatattataaaagtagtcaaaaaagacatatcttctttctcagttcattagctcagattgatcactgtggcttaatagttaatgacaatgttgtatagtttgtgacatctggagtaacacattccttctcggatataaataaaatgtctctttttktcctggtaatgtcatttcctatgaactattgcagtgatgtgctgctttggtatataaaaatcagtgccatgtatctgatatcacaatagatattttaaaatattttaaaatcaggttcctattctctttatctgtatcctgctcaacatgatgtaatgttttgatttgcagtcaatttataaacatctaaaatctgacacttgaaatgttcaaagcaaccacattaatggagatttttgtatgaacacaaacacattaatacagcagggaaaaagagtttgagccagtttgttgcacaaaagacatcattttcctgaaaacaaatggggtgttaagt

SEQ ID NO: 508041 - DNA, 379 bp, Homo sapiens
tcctttccactggttgcttagttatctgctgaatatttcacatgaatcccaaacaattatgccacttgggccctaaacaaagtaaaagaattttataaaatacattatgggatgtgtggggsggttacattttgaagcttatatttgctaagcatcactgtcatatttctttggctccatatttttagttctttcagttttgtaaccagagatccaaactttcatctctaatctctcaatcaccctcatttacttgaaaaattcaatggaagcctcaccacatttaacaaagccaaacttaactgagctttaaaacttgaaagcaggggcaggccatatcttcaacagcatgaataatatcataatttaaaaaaagcaa

SEQ ID NO: 508042 - DNA, 568 bp, Homo sapiens
ttttcgacagcacttttcacccatcttgctgtactgatggatgagagagataacactgagcctaatttgaaggaggttacatattggaaattgccagcatattgaatgttgggtgatcatgcaataggatagattgcaatcttttaagaataaaaccttacagcaactaaactgcatgatcacactaataaacactgacatctggtcttttccttaagtcaggaagtgggcagctcagcattgtgaagcccagagcaaattgcaaattcctcaatgagacatcaatttctggacttcagaggagacaaaaacgcagacctagatctgaaaaatttatgaaggaagcacaccattaaaaaaaattttggagatgggacggatagataacagaactaaggctgagaggagaaacagtcttcaagaataatatgcatcaaactgcctggattttttttttttttttttttgcagtcattacagacctggatagtaatgaatccttcaacttcaccttaggtaaagcatgaggtgcagaacattrgatatatgagagaaacttttaggaggt

SEQ ID NO: 508043 - DNA, 657 bp, Homo sapiens
ttcattagggtgagggcaggcttttccattaaaggaagccattgaaggtgaggcagtagagastacaatcaagaaagcggactccgggatcaaatgggtgctgagtgcaaatcccaattcctactgcttactggcttgagagagtaacttcgccttatgggcctcagttttctcatctgtaaaatgaagttaaaaagcacattcttcctcatagggcagtggtgaggactaaaggaggcgatgagaagagagtccccacaaggagtctggcacagaggaagtttcgacgtatgctgtccattgcaacttcgacttatgctgcgtttctgtgtcggaacagtggaagacattcaacaagcactttgtctcagaggcttagttacaattaattgagcctgaaagaccatagacttgaaaaagccctcaaagtgataaaggtaaaaagaaaaataaaatgacatctagcaggcactgagggctctacaacgtgtggctagcctgtattcagcaccctacagtgtgcagccaggctgtgctcagcatcctacagtgtgcagccaggctgtgctcagtactctacagtgagtagccagcctgtgctcagcactccgcagtgagtggccagcctgtgctcagcactctacagtatgtggccaa

SEQ ID NO: 508044 - DNA, 510 bp, Homo sapiens
tgtctcttctatcaagcagcagcaggaaggctgagctcacatactgttataaagataaaattaaatacaacccactaagcacctgcctagccctgtatcaggcatgtagaagtcctcaattaacaagagctactctcataataactaaaaatatagcaaccctagaattgaggctgggtgaacaggtctaacagccctgccctcagaatgtttgctgcccatcacggaaggaagacaatgaaaccacaaggcttagcctctgctcactgctagcacarcagaagtacggagccagtggggaaaagaggggtcaaagaagtctaaccaaatgagaagagatctaggctgagtctggaatgatgaaaaggagctagccaggaggataagagggaaaagtgttgcggaaagaaggaacggcaagagtaaagtcttgttaagtgagagagagggtgtggttcattccagaaaatgcatgtggctcagtatgattgcagagagcccagttttggg

SEQ ID NO: 508045 - DNA, 505 bp, Homo sapiens
gttacaatgtctccacgtctcttggtatttgtaaaagagttcagggtgactgcgctaccctgctaagtaggatgctctactgccctgtccttatgtgcttatatatctatgagacatatttattgcactccgccgcatcttcccttactgtaggcttgtcatgtgagtgcagttgcatcattacaggtaagatttttttttaaaaaatttttatttttctgagccaggatctccctctgtcacccagkctagagtgcagtggcaggatcatagttcactgcagcctcaacttcctgggctcaaatgatcctcccacctcagcctcatgagtagctaggactacaggcatgtgccaccatacccagctaatcttttattttttgtagagacaatatctccctatgtttccaaggctggtctcaaactcttgggtttaagtgatcatcccacctccgcctcccaaagtgttgggattacaggtgtgagccaccatgcctgactacag

SEQ ID NO: 508046 - DNA, 606 bp, Homo sapiens
ctgcacgtgtacatacatacacatcaccatcgagacgccctgctttcccccatttagcagttgacatcagctttcaacacggcaggattacactacaagtcactggtgtcacctatgcacagaccgcgtgtgaactctacagaagaacaagacccagaatcaacattttcctgaactcgcccttttgaggtcaaagaaagaaagcagagactgcaaaaaggactgaatgctgctctctgtctgtcttctcagagaaacttgaggaacctaactggagaccaaacatgactccccagtacacatgtctatttcttctttatttttctccatktgataaatatttactatgcaaacgccctttgtcaggctctcggaaagatgcagtttctgccttcaagatgttcactatgtcgtgggagaagaatatgtgcaaataaacacagcgggatgcactactgaggattatttttttctcccttctctgtccagtgagagaggaatttgtagccactgccatctttggaaaaatgcatcctctctggctacagaggatctgggctctaaaccagtagcgttccaatctgattgagtctgagttggggtaaa

SEQ ID NO: 508047 - DNA, 586 bp, Homo sapiens
taagatgctaatggaatcctgccaagagggaggggtggtccaagaaagtgtttgcttttttggcaagaagagcagatgagctgggtggtggctctacccagtcctcttgtcttgcacacggttgccacgctcacggagaaaggatgatggtatgaccgtggtgcaagcacaagggatgaggccaaaagagccatggagaccccaagatgrgtgagcagaaccaccagagcagatgcctcttattcagtgagaaaagccagtttctgtggtctgagaccagtgagggctgggctctctgttacttgcagccaaacgtattttttttttttttttcacagagtcttgctctgctgcccaggccggagtgtagtggcactatctcagctcactgcagcctccgcctcccgggttcaagcaattctcctgcctcagcctcccaggtagctgggactacaggtgcacaccgccatgcctggctaatttttgtatttttagtagagatggggtttcaccatgttggccaggatggtctcgaaattctgacctcatgatccacctgcctaggcctcccaaagtgctgggatta

SEQ ID NO: 508048 - DNA, 586 bp, Homo sapiens
taagatgctaatggaatcctgccaagagggaggggtggtccaagaaagtgtttgcttttttggcaagaagagcagatgagctgggtggtggctctacccagtcctcttgtcttgcacacggttgccacgctcacggagaaaggatgatggtatgaccgtggtgcaagcacaagggatgaggccaaaagagccatggagaccccaagatgagtgagcagaaccaccagagcagatgcctcttattcagtgagaaaagccagtttctgtggtctgagaccagtgagggctgggctctctgttacttgcagccaaacgtattttttttttttytttcacagagtcttgctctgctgcccaggccggagtgtagtggcactatctcagctcactgcagcctccgcctcccgggttcaagcaattctcctgcctcagcctcccaggtagctgggactacaggtgcacaccgccatgcctggctaatttttgtatttttagtagagatggggtttcaccatgttggccaggatggtctcgaaattctgacctcatgatccacctgcctaggcctcccaaagtgctgggatta

SEQ ID NO: 508049 - DNA, 586 bp, Homo sapiens
taagatgctaatggaatcctgccaagagggaggggtggtccaagaaagtgtttgcttttttggcaagaagagcagatgagctgggtggtggctctacccagtcctcttgtcttgcacacggttgccacgctcacggagaaaggatgatggtatgaccgtggtgcaagcacaagggatgaggccaaaagagccatggagaccccaagatgagtgagcagaaccaccagagcagatgcctcttattcagtgagaaaagccagtttctgtggtctgagaccagtgagggctgggctctctgttacttgcagccaaacgtattttttttttttttttcacagagtcttgctctgctgcccaggcyggagtgtagtggcactatctcagctcactgcagcctccgcctcccgggttcaagcaattctcctgcctcagcctcccaggtagctgggactacaggtgcacaccgccatgcctggctaatttttgtatttttagtagagatggggtttcaccatgttggccaggatggtctcgaaattctgacctcatgatccacctgcctaggcctcccaaagtgctgggatta

SEQ ID NO: 508050 - DNA, 342 bp, Homo sapiens
tctgcactccttgtctgcacttttggctgtgtgaccttgggccagtctctctccatctctgggcctaggtccacacatctgtgcatagacagagcaggcccaggtgccctcagagggacctcaacttcatgaggatcagaagcaccttcctgtgtggttcctcccctttgaggcctccctcgcttctctgctgctcctcccccaatcttgaagcaatttgtagtgtctgttgggttttcactgatcccaactctgcctagagcctgggaccaatccctctgtcagttcttctcyccttcaacctcctgcttgtaaattggggctaataatacctgataactc

SEQ ID NO: 508051 - DNA, 470 bp, Homo sapiens
gctagaaaggccctccgagtttgtctggtccaggcccttattatacagaaaaggaaactgaggtcacaagatgggcagacacttgtacagtattatacagcattagtggcagggccaagatcacatcccgacctctgcattcctgtgccagtactcttttcctcaccattcctcctctgaagagcgcttccttaaaaatagttctaacaaaaatgaagctgcttcttcatgtcattttactgatctcatgtaggcagtattgtgtcaggaatcttatatttgaattgtagcaacgtttggtttcctggatatctgcttcagaggtcatgtggtgaaccctccragacaccagtcaaagtttgctgaacccaaacctccaagtcgttcacctgaaagatctaaaccaacagaaatgaaacaaattggcattgctttgtctcactatctcgtgagatgcgtgagaattctta

SEQ ID NO: 508052 - DNA, 429 bp, Homo sapiens
tgtgggacatccaggtggagacccccagaaggaaatgcaatattggtggtcaggagaaaggctggaactggaacaaaggacctggcatataggccaagggatgtggtggccaaagccatgggyagaggagagtccctagggagaaaaacaatctcgtggaaggcttacatttaatagtgaagagagaaatgggaaccaggagaggctggagtggtcagagagttatgaagtaaccaagaggtgaggcttttacagaggaggggtagtaatcagttctacaagcttaggagtgaaatataagcaaccaaagctattaaaaaaaaaaaaacaaaaacctacattgtctctccctgctcttgtcttctttgttcccggtttgtttttccctgcacttactctcttgcctttttggattcccttttaaatgtc

SEQ ID NO: 508053 - DNA, 582 bp, Homo sapiens
tgagcccaatctaaaaaaaggcaagttacagcacacctgggtgtgcaagccccatctcccggtatccttttcactaaatcaggggaggatgttatgtttctctggtggcaggtcctgagggacttgaactgccctkcagggctcccactctttttcttccagctctgccatctcactttaaagagatgatgaaatccaaaactctactttacatagctagtagcaggtatcaggtgtgctaaccaagttttctatgattctcttaaaagttaagctcccctggtgaattttcaaatatttagattttacaagaattcaatttccattcagcttttagatactgtatatattgacttaagggagggacacatgaaattgaaaatttaacagatgactacatttttaaaaatgtctaaaattatgtaaagaacaattattgtgttggtgttcagttctgagttttgagaaatgcatagtcatgtaatcaccacaataatcaggttcacaatagttgcattaccacttccccaaatttcctcatgctgttttttgtttttgtttttcttttggatggggtcttgc

SEQ ID NO: 508054 - DNA, 468 bp, Homo sapiens
ctgcctgagtaccaggagctgatgaacgtcaggctggtcctggacatggaaatcccacctacaggaagctgctggagggcgaggagagccggctggcgtctgggatgcagaacatgagtatccaaacgaagactaccagtggctatgctgatgtgctgagctcgggctacgggggcgtcacaagccccagcctcagcttacggcctgkgctccagctttggctctggctggaggctccagctccttcagccgcaccagctccatggttgtgaagaagatggagacccgcgatgggaagctggtgtcctagtcctcagacgtcctgcccaggtaaacggccatggcagccccgcccagcctatccctcctgcggctgccccagagcctgtgggggaggttgaagcccacccgcagggggagtttactgcctggggtgtcccacttggccatgcctccagctacaagcca

SEQ ID NO: 508055 - DNA, 468 bp, Homo sapiens
ctgcctgagtaccaggagctgatgaacgtcaggctggtcctggacatggaaatcccacctacaggaagctgctggagggcgaggagagccggctggcgtctgggatgcagaacatgagtatccaaacgaagactaccagtggctatgctgatgtgctgagctcgggctacgggggcgtcacaagccccagcctcagcttacggcctgtgctccagctttggctctggctggaggctccagctccttcagccgcaccagctccatggttgtgaagaagatggagacccgcgatgggaagctggtgtcctagtcctcagacgtcctgcccaggtraacggccatggcagccccgcccagcctatccctcctgcggctgccccagagcctgtgggggaggttgaagcccacccgcagggggagtttactgcctggggtgtcccacttggccatgcctccagctacaagcca

SEQ ID NO: 508056 - DNA, 553 bp, Homo sapiens
caatttgtaagaatatcactttctgagaatgatacctcctaaaaaagttatttagtaatgtcttttccaagaggcaaatgcaggagaattgtctggaaattgcactaagaaaatagctaggagacagaaaacacattctatcaaagaaaaaaatgtgaactacatgataaatattttaaaaagggaagagagggaatttygtgtttttatagaaatatgaaattcttctacagattttaaatagaaatagaatgctatattacctaaagattaatcctatctctgagatgtttacctctttaatttgatattttgcccaggaaaaaaagtctattatttggtctttttctatacccttccctttctttgatggcaagtcatcttgattaaaaaaaaaaaggggggggcaatgaactaaggagagaagcagggatggagcaaaacaatccaggcatcccttgttttattctgcttcactttactgcacttcatagataatgtgtttttcacaaattgaaggtttttggcaacccagcatcacacaagccttatt

SEQ ID NO: 508057 - DNA, 390 bp, Homo sapiens
aatatcccaaatgcctttccaatatgttttttggtggcttttgcccaaggttttttttttttttctcttggttaaaaaaacttagggctgactattcaataccattgaaaatattagatcaaagcaaaaagaacaaagccagaggcatcacattacctggcttcaaactatactacaaagctacagtaatcaaaacagcatggtactggtgcaaaaacagacatacagaaaatagaacagaatagataacccaraaataaagccacacacttacagccattttatctttgactaagttgacaaaaataagcaatggaaaaagtactccctattcaataaatggtgttgggataactggctaaccatatgcagaataaagagactgaacac

SEQ ID NO: 508058 - DNA, 390 bp, Homo sapiens
aatatcccaaatgcctttccaatatgttttttggtggcttttgcccaaggttttttttttttttctcttggttaaaaaaacttagggctgactattcaataccattgaaaatattagatcaaagcaaaaagaacaaagccagaggcatcacattacctggcttcaaactatactacaaagctacagtaatcaaaacagcatggtactggtgcaaaaacagacatacagaaaatagaacagaatagataacccaaaaataaagccacacacttacagccattttatctttgactaagttgacaaaaataagcaatggaraaagtactccctattcaataaatggtgttgggataactggctaaccatatgcagaataaagagactgaacac

SEQ ID NO: 508059 - DNA, 460 bp, Homo sapiens
gtgatgcttattttaccttagaggtatctatacatacaggattcttgttttccacctttacttctgttctgttgtccgtagcatcttttgcaataatcttctaaatgatctctatcctggtaatttctgcccactccagctcatcctttattctatcaccagaattacaatgccaaaacccaagacagaggtgtttgcttccgtgatttatacctctgttgatctccattatataaggtatgaacagaactgattctggaacactaagccttttaagaatatgttttcaagctattattttagtcctatctcttgttattccggactgactttccactagaaccctatactgcacttgcgttaatgtctattatgtcccagacttaggctttttcrtgagtctgaaattgttcacgcttccttctccccaaagtaagcatgttcttttcctcatttattc

SEQ ID NO: 508060 - DNA, 644 bp, Homo sapiens
tgattttaaaacttttaattcactctgcagtttcatcccttgccatacccaccccttaaattctctgcttgagtgactgagtttcttttccttccttaaacatgccactatccttggcacatactgctcctmttccccctctgcatttttcactttgcttaggtaattatttaagttttggacttgatatcaattcttctaagaagcctttctctaacattgcctcttcccttcccccagccaaatctacactagagtataaggtagtttttgtatgaaagcatttgtttattcacgtaacaagtgtttcttaagtactaggttactgttctggattttggatagagtgagcaagagagacaagggctgtgctatcattctcagttgggaagcaagaaaccaagtaagtcagctaaggagtaagcaagagaaatttaagtagaacaggttcacaatcctttctccaaaaccactgggacaagaagtgtttcaaaattcagaattttttaattttataaaagtaatgcagtttacactatttgttacatcaacagagtctgatggagcatctcataatcaaacacattaatatgtcttcagtaaaatatcaatatacaacattcatgataaattgaataaataaa

SEQ ID NO: 508061 - DNA, 644 bp, Homo sapiens
tgattttaaaacttttaattcactctgcagtttcatcccttgccatacccaccccttaaattctctgcttgagtgactgagtttcttttccttccttaaacatgccactatccttggcacatactgctcctattccccctctgcatttttcactttgcttaggtaattatttaagttttggacttgatatcaattcttctaagaagcctttctctaacattgcctcttcccttcccccagccaaatctacactagagtataaggtagtttttgtatgaaagcatttgtttattcacgtaacaagtgtttcttaagtactaggttactgttctggattttggatagagtgagcaagagagacaagggctgtgctatcattctcagttgggaagcaagaaaccaagtaagtcagctaaggagtaagcaagagaaatttaagtagaacaggttcacaatcctttctccaaaaccactgggacaagaagtgtttcaaaattcagaattttttaattytataaaagtaatgcagtttacactatttgttacatcaacagagtctgatggagcatctcataatcaaacacattaatatgtcttcagtaaaatatcaatatacaacattcatgataaattgaataaataaa

SEQ ID NO: 508062 - DNA, 627 bp, Homo sapiens
ttaatgaaatgtctccgcattgaccagactacattcttcatttatcaaactgtgaaataatcctcttcctatacttttttgttataatattttcacttacttatattagtgcctttaaaaaactgaatttagagaattctcaacttctttgtccacaattgctcagcattcattacctttatttctaaaggtttactttcttagataatacaattgttgttgtgggaagtcagggactctgaatggagggaccggctgaagccatggcagaagaacataaattgtgaagatttcatggacatttattagttctccaaattaatatttttataatttcttatgcctgtctttactgcaatctctgaacataaattgtgaagatttcatggacacttatcacttccccagtcaatacccttgtgatttcctatgcctgtctttaccttaatctcttaatcccgtcattttcataagatgaggaggatgtatgtcacctcaggaccctgtgataattgcgttaactgcacaaattgtttgtagagcatgtgtgktggaaaatatgaaatctgggcaccttgaaaaaagaacaggacaacagcaatgttcagggaacaagagagataacct

SEQ ID NO: 508063 - DNA, 329 bp, Homo sapiens
tgttctagctctgagattgtatctccatgctgcttactttargttgcaatatgttcccaacacccacctttcaagtttttaaaatggcatttcaattttttcttcagtttgtatgctcagccacctgtgcgcttcctctacttttctaaagtgaagaaaaggaaaaaaaaatggtttctttctaatataatattaataggtctgggtttttggattaatatactgtaataagcagctctctaattgattacaaatcccactggaacactcccctgggggaatgaaggtcctgttctttttactcttccttttatcctctattccatttc

SEQ ID NO: 508064 - DNA, 402 bp, Homo sapiens
catttctaaaatgaggaatggagtcagggtgactatggttagcaatattgtattgtatatttcaaaatagctagaagagaggatttttgaattctctcaccgtaaagatatcaaaratgtatgaagtgaagaatatgttgaatatcctgattcaatatttaaactatacatacacgtgttgaaacatcacactgtatgccataaatatgtacaataattatgtgtcataaaacaagatttaaattgttttaaagggccagcaatggcagtttgtgagttcccatctcatcactctaacttcttctgcctccttcttccacttgtaaatgtccttctgattattttggtcacatcaggataatccagaataactttcctatcttaatatcaactgatgaacaa

SEQ ID NO: 508065 - DNA, 402 bp, Homo sapiens
catttctaaaatgaggaatggagtcagggtgactatggttagcaatattgtattgtatatttcaaaatagctagaagagaggatttttgaattctctcaccgtaaagatatcaaaaatgtatgaagtgaagaatatgttgaatatcctgattcaatatttaaactatacatacacgtgttgaaacatcacactgtatsccataaatatgtacaataattatgtgtcataaaacaagatttaaattgttttaaagggccagcaatggcagtttgtgagttcccatctcatcactctaacttcttctgcctccttcttccacttgtaaatgtccttctgattattttggtcacatcaggataatccagaataactttcctatcttaatatcaactgatgaacaa

SEQ ID NO: 508066 - DNA, 538 bp, Homo sapiens
caagctatttctatatttggattaacttctgatagtgtgaccttcagaaatttacttcccctttaagaatcttaatttttgtgtgcaaaataaaaataataatgataccaacctcatcaggttgctgaaataattgaatgagataaattaacttaaagcctggcacgtgataaatgctcagtgaaagttagatatcattactgaaaacaattgtcactattcagacgctcttattattgaactgaaacctgcatagctaaattttccccaatgcytcttagctatatccctgagagccacccagaatgaataaattgaactccctcagacttcagagaaaatagaatccttcagtcaagacccacttagctttcaggccaccaaactgaaaaactgacttgaaacttcatccttcctttgtctgctgtccattttgttttgcttactattttagggttctccatagaaacaaaaccaatataacatatatctatctatgggaatagatatatttatcatgggggaatattggctcaca

SEQ ID NO: 508067 - DNA, 595 bp, Homo sapiens
aattatttttttcagttatcatggatcaaaatgctcaacctaatgcaaaataaatgacagaaatggaggatgcagtgtatggtcacaggacacagttcgtgatctaattgagagagtggatgaaatgtgtgtgtgtgctgcaggggcacgtatttcagcaacaatgtgtatttttaaagactcagtgcagcatgrtggccatgaatgaagcccttcacatccaggagggatgactgctatgctgagggagcacgggagcagaggcagcgtgggagcggaggcagcacgggagcggagggagcatgggagcggagggagcacgttgaaggagctctatgtccagcctttcctctgccagcttccttgaagcagcaaatactctgccgggaggtaaacaaaacaggactagagtgctcatggcagacaccacctcctaatatagtgcctggctacctgggaaagggttgtagtcatggaaggatccaggaccaatcccttggggagtaaagtgagcaggggaggcaaggcagaagctgcactgcagttctgtccctgccaatcaatcagccattcgtcagatcaatcaatcagccag

SEQ ID NO: 508068 - DNA, 595 bp, Homo sapiens
aattatttttttcagttatcatggatcaaaatgctcaacctaatgcaaaataaatgacagaaatggaggatgcagtgtatggtcacaggacacagttcgtgatctaattgagagagtggatgaaatgtgtgtgtgtgctgcaggggcacgtatttcagcaacaatgtgtatttttaaagactcagtgcagcatggtggccatgaatgaagcccttcacatccaggagggatgactgctatgctgagggagcacgggagcagaggcagcgtgggagcggaggcagcacgggagcggagggagcatgggagcggagggagcacgttgaaggagctctatgtccagcctttcctctgccagcttccttgaagcagcaaatactctgccgggaggtaaacaaaacaggactagagtgctcatggcagacaccacctcctaatatagtgcctggctacctgggaaaggrttgtagtcatggaaggatccaggaccaatcccttggggagtaaagtgagcaggggaggcaaggcagaagctgcactgcagttctgtccctgccaatcaatcagccattcgtcagatcaatcaatcagccag

SEQ ID NO: 508069 - DNA, 623 bp, Homo sapiens
gttctataattgtttgaacatatttataatagcttcttttaagttgatgactgctaattcaaaatcaagacccactcaaagttatttttttgattgtggtcatactatcccatttatatttgtggctaataatttttgactgaaaacaagacattgtagatcgtagcagccctggattctgtttgctccttagatttttgtttattcattttgttttgttaggcaattaatgtgcttgcacacaaactgtgaaatatttcttcctcccagtttaattttcttttaaacctgcctatgtaggtgcctcccttggttctgtttattttaattctcagccagggatttagtcagaggttatgctcagttttctcaaaccaatttggcttcaggcatctggttaagctgtctctagttcaaggatgcattttaaaattcagcaagtttgaaagcacccttgctgttttggggctttctgtaattttccacacaaatgcagagcctaaccatcagtcagggacttgtgcagactttattatcccagactttytccagctatcacccctattattataatgtttccctttaaatttttggctgttctgccacccaaaccaaacatgcca

SEQ ID NO: 508070 - DNA, 547 bp, Homo sapiens
tttgactattctaggcattttgcattcctgtacattgcagaatgaacttataaatttttacggaagtactttcatagattttagtgggtattacattaaatttccagatcaattcagggaatattttcatcttagctatattgagtcttacaatcaggatacaaagtttttcctccatgtattttagtgttctttaattcctctgtttacaggaaccagtgcatattcatatttaaatttatttttaagtattttactttttatgcactgtgaatggaacttttcggaatgttcactattagtataaaaaacaggttttgtatttacgtaatctgaaaatttgcaaaattatttgttrtaggttattttggagtttccttaagattttctaggttcatagtcatatcatctgtgaatgaatacaattctttttttttccaagaatctgctctttttttcttgtcatatttgtgctatgacttcaacacaaagttgaataaaattggtgaaagcagacattttgcctttttcctgaatataaacagaa

SEQ ID NO: 508071 - DNA, 612 bp, Homo sapiens
tggaagtggagaaccggggctgtagtgctggggagggcgggtmcccgggcctggggtctgaagcccctctctccatctggctgtttttacccgggagcccggaaccccagggcccctcacctcgcccttctggccagcccggttggcagcccccacgctggccacaccagccacgctgtccatcctcggtgctcccaccacgcctcctccaagagggccactggcctcttcaggccttgccgtttgctcaccccctctccacccttctggccagccccctccagcctctggcaaggccctctctacagggacccccgtccaaggcccagtcctcactcctttccttgggtagtgctggccaggagggctgctgggacccttcgggagtagagggcagcagcctccctcccctgtccccaggcctctccctcctcccctggtttcctctgcctggtggctggattcaggccacttctccatctatctctttaactgcccgtgccccccacccccaagcctggcttgttcccgcacccaacagcaccctaagtgttcttcagagcaagaggcaggggtgtcatgcttcagagcaagaagcggggccatgggtcc

SEQ ID NO: 508072 - DNA, 646 bp, Homo sapiens
tcctcagtccctccccaccagctccagaactggagcacgtcagggccacagagaacctggggctcaggaaggaacagcatttgttcccacaggtgctgggcagggcaggaggggcacaagcagggggtcacttgggatgtctgtttttttttttctagcaccagaaatgtcagcagcccaggacacccagccccttggtcttggaggggaccatcgaacagagctcgcctcccctgagccctaccaccaaagtaagttaagctgcaaagcctgccatcttctcccctcycccgtactcatacccaaaaggccaatcccacatgccagccacaggaagaccaggcccaggcctggcttttgtctgctatccccccattgcccggtgctcagcgaacccccatgatataagggttgggggttggattagtggttggagtagctggggagatggagggtgggctttacctcggctgctgcaggcctgtgtctctctccaccctctgcagctcatcgacaggaccgagtccctaaaccgctccatagagaagaggtctgtctgtctgtctgtctgctttctgggctcagatcttaggtttaaccaagtgggggttgaagggagtcacaaggtagagatctggagaccgag

SEQ ID NO: 508073 - DNA, 602 bp, Homo sapiens
gctgcagctcctcaggctatgcctgggacattttgggaacactttctcctcttacttctcaccctggggaattccaagacattgtccttgaaggaggtgagagtagggggaggaggtgagagtagggggtgggcgggagggggctgtcatcaggagccctgaacccctcaccacctacctgatgggcacaggcatcacggtggcaagggcctggccaacacctctgtcttcctctccccacaggctccaagctcaggacctcaggatgggagagtaagtggtacccctgtacccccatacagtgaccctgcccacctcctgccctgtccaccccatcacacactccgaccccgccagccatggccctaacctctgtcttctctccccgtcctgcctgcgtcctccctccctggacagtgaggaggtaagtagttgctgggggctcaaaacatgacgaggagggggctcccccaactcagcataggtcataggtcacagcctcaaggccctaaggcccagagaagatggcctggccctccccgctggcaaaagtgccccacccamccaccaagacgctgctgaaagagaggaagtggctgccc

SEQ ID NO: 508074 - DNA, 658 bp, Homo sapiens
gtataattatttcattacatattatattgcaataacattagagacaaagtgcacaagaattgtaatgtgcttaaactatcctgaaaccatccacctcgacccctggtctgtggaaaaattgttttccacaaaaccagtatctggtgccaaaaaggttggggacttctgctgtatacctagatcttatgttaagtgttcttgtcacacacaaaggtaataataataataataataataataataaagaaggaaactttggaaggtgatggatatgtttatgaccttgatggtggtgatagttttgtaggagtatactgattccctaactcattgagttgtatatattaaatagtatagacttttatgtcaaccatacctcaataaagggttttaaaaamtaatagtgtttacctcaaaggacggtttgaggataatattgactttcacttaaaattttgcctgacatgtaatatgtgttaactatttatttgttaaataaatacaataaaaaatgctttgaaatttccttaagattatataaggtattaaaattctacagcatttgtgttctaccattttatgtttaaatgcattcaaggtattttctcatacatctcttcagtctttcatttaacatgatgagttagtaaacagtggc

SEQ ID NO: 508075 - DNA, 507 bp, Homo sapiens
taatcaggcttattctctgtcaaaaaaaaattctgatatcatttttaawttcaaatgtagatattgaaatgtgacaccttggcacttatctcacttataaattccaattcttagataaattcacaatcagctaaggcatggtctttgccatgagcttgtttcatagataaattaatgtaccatgctattcaacatttctttccaatgctcctgctcttccctttaaataagcctttccctcaggcttacagtgaaccgatacagtgccctctgtattggctcactgcaacctctgcctcctgggttcaagtgattaaattatttgactgtagtcagaagatagaagagaacatatcattaaatgaaaattgtcatcacttgcattgcccactctgtaatatacctgatttaataacatcctaacatagttttaaataccacattttctaacacagctctttgcccttaacagaaatatgttatataaaaagaagtgttgattaaaag

SEQ ID NO: 508076 - DNA, 604 bp, Homo sapiens
gctgcttctcacccataccattccaagtcaagttaactatgctttcaatgaatgaaacagtrcttaagttatctaataataaagttttgaatacaagtgattaaaatgaggcaatggacagagaagtctccaagaaactacaccatcgtccaagaattaacaaatccagattttctcaaatcttcagttcacagtatattcccctttagataagcaataacagtagtttatgggcttcaaacttatggagacttaattcagggaactgttaacactacatcctagtttaactgcagaagcttaaatcaaagtttaaaatacagaaataaaattaaaatacaacctggtgtcttgtgacctatgtacaacggccagggacctttcactataactcaaagaagcagaatccctaaaagaatgtatttttcttacctatccgcaagttaacatgaacatcttagactgagaggtgaaaaaaggtcactccaagcagtgagtatttgtatactggccattcagatttctttcttacctaaaataattgaggtaataatgctataattcatgtgcccacacagtacaagagtatcacacatcatttggc

SEQ ID NO: 508077 - DNA, 479 bp, Homo sapiens
ttgaaggtcttgtctggcagataatttgttatggtaagaatgagatcactaagcattttagatgacctacatgatgcatagagtttcttcctattatataatggtgatgtgataagtctgtttacttgggaatttattcattcatttggatggtattttatttctcagagcccctctttggcagtatcattgttgctgtactacaggaagatctccttagccatgatgctgatttctgagctcatgtcatatgcatttttaagtgactgctgactcctgatggtccacaaacaccagaggagcaattatccatttggacaaaatggacatgggaagatctaggacatactttctactcttaggaaaatggtrttctggaagatcattcttacatgagtagagttgtacaggttttgtgctgatggcctagttatgtagcctttgttactattcagtcttcctttgcagctactacagga

SEQ ID NO: 508078 - DNA, 670 bp, Homo sapiens
cgtttgctgaccacactcccacagccgagcagcatgcccttgcttggaggaggatttggatgacacagctctatgtctgccgtattttgggggtcacattcctcacacccagctctgcctcaaatggcaacattgacaaaaattcattccagttgcaaaccaattgtagaatactataaaaccagagtacaagtctaatagcataaatctcatcctaagtggaaaagaaagggtcatttattcacacatttttggggaaaaaaaaaacaacctttgctatgtctttattacaacacggatactcacaaaaaatagtcatatatattttcctcttttaaatcttacaggaaaaaaggctgggcgtggtggatcacttctgtaatcctagcactttgggaggctgaggcaagtagatttcttgagttcaggagtttgagaccagactgggcaacaggacaaaaccctgtctctactaaaaataaaaaaaaaawttaaaaaagccaagcgttgtggcgggcacctgcaatcccagctactcaggaggctgaggcaggagaattacttgaacccggttggcagaggttgcagtgagccgagatcgcaccactgcactccagcctgggcaacagagaaagactctgtctccaaaaataaaaaagttaaatttaaa

SEQ ID NO: 508079 - DNA, 426 bp, Homo sapiens
ttataaaaccatcagatctcgtgagaactcactcactatcaggagaaccacatgggagaaaccgtctccatgattcaattacctccacctggtctcccccttaacacgtggggattctggggattctggagattacaattcaagatgagatttgtatggggacacaaagcctaaccattaccacacctctttctcttgctttcttaacctstccctctcctatttacctcagtcttaccagcatatggattataatctggtctctcctcccttgaaaaacaaaaaacacaaaatccaaagcctccctcgtgctaagctccttaggatttgtctgtctacaaaaggaattcccttgcttagctctcacacaccctccaaaccactccagtttggctttgcccatgctccgccctcccatgccaacgc

SEQ ID NO: 508080 - DNA, 642 bp, Homo sapiens
acaggcataggaaatcacaagagtattgactggggaagtgataaatgtccatgaaatcttcacaatttatattctgccatggcttcagccggtccctccgtttggggtgcctgacttcctgcaacagacaggagttccagaccagcctggccaagatggtgaaaccccatctctactaaaaaatacaaaaaaaattagggtgtagtggtgcctgcctgtaatcccagctacttgggaggctgaggcaggagaatctcttgaaccygggaggtggaggttgcagtgagccaaggtcacgccattgtactccagcctgggcgacaagagcgaaaatccgtctctaaataaataaataaatatgtcaggtggtctccatctcataaaaccagctccagcaaacaggggttgaagctcaggatccaggctgctctgtggcccacaacccagtcgagccaacaggccaagaccttcctgactggtggccagcgccatgcctgcaggccgctcacaccagagatgccacttagaactctccactggggagttcgatcggtagcgggagcggagagcggaccccagagagccctgagcagccccgccgctgccggcctagttaccgtcataccacgggaggagccgcag

SEQ ID NO: 508081 - DNA, 642 bp, Homo sapiens
ctaaaccttcatgccctaccctgaacattactttgatatcaaaagtaaaccttatttacaccttgcaggggcaaagagaattatgcaattgagtcattgttgtcaggacgcaaactgggacatctctgatctgcaggaattttcaagtttattatttcaaaaatgaaagtattaaagtgcttcttcccaagtaatttgttaattaagggattactgtacctctgacactcccataattgatctgagaggcatgtagaaaactaatattcatttcctcattttctttcccaattaagaaagagcaagtcagttcagatggcttgtctagggtcacagaacaagtcagtggtgagcccctgtgtccattaattccagtcagacagggtgcattgagcattgctaggaggctttgctcattcagtgatcactgaatggatggaagtcagatatttgctactgagatattttcagggtgaggcccactgacctgcagaggattgattgagtcttcgacattgctgtagcccaatgaggacagctcactagtaaattaaaccttgacttawggttttgccctcagttctaagcaacaccttgggatgaatcaggaatacatcacatttccaaatacagtaaaattaa

SEQ ID NO: 508082 - DNA, 473 bp, Homo sapiens
cttacaatcttctctccacccacaacccaaaaaagattattttctggactggagaaaagagaaggaaaaaaaatagaaataaatttctaacacttatggtttctggacagtggtacagtcatttgtggtttctggaaagaggagttccgggtctcaccctggaaggtgcaaaccgccatakaaaaaaatatatgtgtagtttgtgtagtaggtctgtctcagcagaggagggctgagacagcctcgtggagagctctctgtcccagtgcaggaaaactgcatcaaaatggttcctgtgcagccagtagtttgtgtagtaagtctgtctcagcagaggagggctgagacagcctcgtggagagctctctgtcccagtgcaggaaaactgcatcaaaatggttcctgtgcagccacattcagcctggaattgaaagagagaacatgggactcaaaggggcaaagcagaaagaaaa

SEQ ID NO: 508083 - DNA, 602 bp, Homo sapiens
agcagcgtagctggttaagaattaacatttaaaccagactttactaatgatttaggccaacaaagacatattcagaaaggcaaatatactgaactgatcaaaaaagtagatgtgtcttctcccaggagcccactttgtccactttcactgggttgagctctcagcaaccctcacttgacagagaccatctttcaccacctgagctcacccttgaacaaaacataaatcttgggaattcagacacaagaaaggactactctctgaaaggagagtgcaattgaccttggacaacgtgggggttaagggtaccaacccccttgcatagtcaaaagtctgagtataacttttgactctccaaaaaccctattgttgaccagaaaccttactgatagcacaaacagtctattaacacatatttttatgtgtgtgtattatatattgtattattatagtaaagtaagctacagaaaagaaaatgttattaagaaaatcataaggagtagaaaatacattcatagtactattmtgtatttgtcgatagggtaagcctatgtggtctgtttacaagattaattatctgtctgaaatggtgggcaaccaca

SEQ ID NO: 508084 - DNA, 621 bp, Homo sapiens
ccttcctgttattccttactgcatttgaggaggacagaaagcagcattaaagcttcccttcaaagtctatgtgaaagactctcttgttttgaacaaaggaaaaaacaaaacaascaaacaacatctgcttctggcttcataccccaaactggataattagttctaaataaataaatacatggttctcatatcttctgtattacttctaactttaattataaagtcctgatagaaaggtgcatgatcaggtcatgaaagcccacaatcaaatggttaaatcacagaatctgcataaatcatatttatctggatcctaaataatgtgtgtttcaagctttcctccattctttatatcaaaataaatttcaaactttttcaatttcttcatgccttagaaacttggagtctttaatattcagaacataaaattgctctgaggaataaatgaaatcctggagataaagtgcacggtgtccacagcacacattgttggtagccttaatggcttccgcttcctggtcccattcctaatagggcctccgtggatttcctagccactctgttttgatagatttgacatcgatttccaggggcagaggttggccctagttagcgtaagca

SEQ ID NO: 508085 - DNA, 638 bp, Homo sapiens
gatgcccatctaatttttgcatttttagtagagatggggtttcaccatttggccaagctggtctggaactcctcacctcaagtgatctgcccacctcagcctcccaaagtgctgggattacaggcgtgagccaccatgcccagccatgattaaatttttcttgtctgctttacagggttgttctatgactcaaataatattaaggttttggaaatgatttgtaaatcacacagatctctattgcagaattaaaggattcacaccattatccttaaaggttacttgcccctatcatatccatagctactaaaactatcaccttaaaaacacgatttcccaagctcactccctgcttcagaagtgamcatggatctcaatggcacaagatttaaatcagagcatccccggtctgacttctaggagctttctcaatgccgaacttgatcttgtctttgttgctgcaaaccatgcttctcattgacctttgatgcaaactctaccccaacaaagtaaatcttcacatcattggcacatatactgtaggttttatattctggaactttctatatgctttccctcatatacgacattccagcccacctaaaaatgcagatcacttctaatgcttcatttaatat

SEQ ID NO: 508086 - DNA, 384 bp, Homo sapiens
tgtgaaaggtctatcatatttctaacaaaatttctcccttccaaaccccatattaattagaagggcattatctatctctcctaacctctgctccaaccttctgttccaaagctttcacaagcaacatcrgtggttctcaattgggtgattttgcccccctcaggggacagttctcaatgttgagagaccactgggttgtcacaactggactgtaagctgcttcctgagtagaattccttgataagaaaaatcatctcaataggtcaaaaatgttaaatagctgatttctccatacattaagtattactctgtgtgtgtgtgtgtgtgtgtgtgtgtgtgtgtgtgtgtgtgtacagagagaaagaacagaatgaaaactgaacc

SEQ ID NO: 508087 - DNA, 308 bp, Homo sapiens
tttccacatagcagacagacagacagacagacacacacacacacacacacacacacacacacacacacagtttagtgaagaaataagtgaagctaaagcaaactgaagaaaaaagaatatactaaattttaggttaaagaattggttctaaaatggyatctccatccaatcacaggacctttctctttaattcttcacttcatgatagaggctggcttggagtttctgaattaacaagaaacacatctacgtaggcaggaggggatggggctccaaccaagtcaaggttacttgaaatgggtcaggta

SEQ ID NO: 508088 - DNA, 504 bp, Homo sapiens
ggttgaggaccaaacaccaccttcacgttatgtttttcaaggtaacaacacaacacaacagagagaagaggacacgggatgggaaaccaagagggctggcctctaccattcttgctttccaacagattttctgtggcaaggctctttcccttatcttgcagatgaaggagtaaatcatcttcagtgaaattcagctctctcccattaactcattgatttattcacttaactatcaaatgtttattgaacacctacttgcactaaactctacattaaattctagaygtgtggaggaaaacagttaaagtccctccagtcttggggtggggggacaagtaatcactgagcaatccagatgggacgtgttatgaattagataaacttggtgattagcagaaggaagtagaggagagaggtccatttagagtggtcaggaaaggcatcacagaagagggggcaggggagaaagatgagttaggttagacggagaaagaattacaagaa

SEQ ID NO: 508089 - DNA, 475 bp, Homo sapiens
ggatcttgcatcatttctcaaggccctactccctgaagtgtcagcaccaataagtgtgtggttaccatacactggctatgctgagactggtccaattgttgactcgagctaaggggcttacatgcagaagttcagataaagaaacattccagaacttggttgacatgtgcggttaaaacacttctgttctgcatttgctgtgtagagttgaaagtcaattacttgagccagccagggccaagtctgagtcaaggtgacccatcagaaaccaggtcacccattggcctgggactctgaggtatgcaggcaactggaagagtgcatgggtatcaaggactaaggaggtttgagctggagagagggracctctccctgaaggaattcccgtgtccatgcacagacagactgtgtatctgcagtatttggcacaatgtattagcagcagagagaggagctgaataagggaaggaaaaat

SEQ ID NO: 508090 - DNA, 519 bp, Homo sapiens
taacatgggcagctgagtccaaggggatttgaaccaaagatggatgtctactgaagtgtcagggacttgatcatgtatgggaattgagaaggggcatccgctgatgtcttgcctggtacctgggctggcaggagtatctaccttgttcgtgccacagtctgggttcaacttcacagatgcctcacttttgtctctatctggaccccagtcctctggccacctgcttttctcattacatctgctttctccttagcaggatagtgtagagacttgaggaatcctacctgcttcatcccrttgccaggacttgttctagcaccatactgaactcagaagccctaaaagaggctggccttcttcccaagctataaactcagaagtaaagccctgactttattgtgctcctattttcccctaaccatctggggtttctgtcattaacgcctccattaacccaccccgccctatcactctgttccacttccttccaagacattcattcatagctttatggtagac

SEQ ID NO: 508091 - DNA, 506 bp, Homo sapiens
tttccctagagcacagcaggcccccagtaaatacccattgaatgaaagaataatggagccaggaaaggaacccagcagatgggcgtggtcactggatcacaccttcaggggcagcagctcctggtcacgtggcatgggtcagattgggtaactaatttcctactctctgaccccagcagagaacaggggcttcaggacaagaacagcaaacgtagtgacaattctagtctcctgtacatgcacctaaactgtcagcactgagaagccattcagaaaagggaaatcaggaaagatcccttttggaaacaccatgctgcaacattctacgcataaacattgcacacrtggaacttttgcccatgtgcatgtgtaatgttttgaaattatttcatgcacctatctggccatgctgggagtagatatgaagacaggtgagcatggtacaatatgctagatgctgtcagttctgtccctctacttgggagcattcatagaacctcagtgct

SEQ ID NO: 508092 - DNA, 593 bp, Homo sapiens
acctggagcgcctaggcagggctggttccagcattggccctgtcactggcctggagccacagagaatcctgttgcaaccctgcctacagcccaaaggagcggctagccctataccacccaccccttccaaggggagcctcagagggtttctagcccacccacagaagcagcctgccctgctcttgcaaaggaagacaaaaagcataattagtctctctctcggtcccctgctaccaatcactcagggagaacaattcccatcccacctgtggttttgccgggacaggaagactgggctcttactgaaacactggtcccaggtggctataggaccaggtggctgawgcaggaggtgggaggggtggggagtgctgcctggaacaaaagcctggctgaggtgggaggggtctgtttttcaaccctaggcttcgggagtcactgaacaccacccaagtgcacaacctggccctgggggagaagctgcagaacctggtaagaccctgagccaggaccccatttctttgtcttgcctcctccctgcctcccagcccagctctcctagaggggcttcgggttgtcctgcatggctggct

SEQ ID NO: 508093 - DNA, 482 bp, Homo sapiens
ttttcatgcagtgagacaagtatcctaacagcatttctgctagctggggctgctgacggcttcaggcaggagatagcatttagactgcttttaaaagatggttaattggctgggtgcggtggctcacgcctgtaatcccagcactttgggaggccgaggtgggtggatcatgaggtcaggagattgagaccatcctggctaacatggtgaaaccccgtctttaccaaaaatacaaaaaattagccgggcatggtggcgggcacctgtagtcccagctactcgggaggctgaggcaggagaatggcrtcaacccgggaggcggagcttgcagtgagccgagatcatgccattgcactccagcctgggcgacagagcaagactctgtctcaaaaaaaaaaaaaaaaaaaaaaagatggttaatcaagtttgcaaggtgggcaggaaggaatacctaacaggttcacaggcatgaagatgtgaaa

SEQ ID NO: 508094 - DNA, 645 bp, Homo sapiens
tggcacataataggggctcatttgattttttatgttaaacaaattaataatctctcgcccctggagttgtgcccatgggatgaatgagaatgctgggcgtatgggaaggcattcctgccacagaagaggggctgctgggagggctgaacagcagttttgcttttattcctcagtactatgcccttttctctctgcaaactgagcagaacaactcttaatactattgatccgcacgcccagctcttcccaggcatttccatcaatgattttcaaatttctgtcattccccttaagctaagaacagttagcctggctagaggagagagcacagasgggggaagatgaactggggccctgaggcccgcatcctggcctgcctgcaccactcatcagaaggtcccttgagcacatgacatctccttacccctccatgcccaatttcactatatgacaaatggtcataatgacatctagcccgcctgctgtgtaggactgtcaggaggatcaaaggagaattagatgtgaaagtcccttttaaaaataagtacaaagcatgaaatactatttttggtaacttgaaaaaaatcccttacctgaaatagataaacaggttacgcttaaaagaatatttttggctttattctc

SEQ ID NO: 508095 - DNA, 508 bp, Homo sapiens
tgcaatgcaaagtcatgctttctagtctcagttcaaatggacatttcccttattttagccgtgcatatcacagtctccattttcaagccaattctggtttaaaggtgaccctgctcttaaaaatcattaaataataagtggtctcactctaatttttcagcttctctctgactttacaactcactaaaaggaaggttctgcctgccgcccgtgagcttctaaagaataaagtggaataaaatttgccttctcyttggggaggtcgtctttggtgttctaacatgcacacatgaagcttcaaccgttagaaaggttttcaatgctttccgcagaggcgcaaggtagaaaccttgtggcctaccattaaataataacaaaagccgccacaaaacatcagggattgccatgggcttagtcacttacgtttcaaaatgttcctctgttccagttcctctgcagttggcctctgctcagccgcctacggaaaaaatccaggaaaagtttttgg

SEQ ID NO: 508096 - DNA, 516 bp, Homo sapiens
atgtcactttattcaatgtctttgaaattatgagaacaaaatattttcattatatgcctctagtttttttaaatacatcctcatatgatgtagatcttttatttgctttttagcttagatacactttctgtattgattttcagtatttatgcttaggttctgtgttttgttttgaattattacttttttttttttttttgagacaaggtcttgctttgtcatccaggctgcagtgcagtggcaccatcatgactctctgcagcctcaaccttccaggctcaagcaagcctcccacctcagcctcctcartagctgggactacaggtgcgcatcaccacgctcagctaaatttttttttattttttcgtagagatggggttttgtcatgttgccccatggttggggcacaactcctggtctacaactcctgggctcaagtgattctcctgccttggactcccaaagtgctggcattacaggtgtgagccaccacccacagcctattactcattttta

SEQ ID NO: 508097 - DNA, 577 bp, Homo sapiens
agctgcagctcccagcccctgccatcctaaccctggagctactgcaytggacaacagtttccccagaagctggacacctcatggggaactacagaagtgggttctcttggggtcctctcagattagcaccaggtgaatggcaaatccgggaggagcaatgccaaggccccatactgttgagtctgaaggcccttgggccccaattgtgccctcagcaaagccatattgaggcagaagaacagggagggtaaaccaagagttaagatagaagcaaaagaacagcaggtgcagccagttctaggcaagattaggcagcacacaggccacacctcacccctgtgatggcaagacagaagtttttacttcagcctctgattgactgcaggctgaggctccacttcagcctctgactggtcacaggccaatccttcatagggtgtaacaaattggaggcctctaaagggcacctagcggtgtttccaaattcctttagcctaataaaaatccttaaatgagagaggtggggtggctcttgagccacttgctcaagcctgctcctactctgtggaatgtactt

SEQ ID NO: 508098 - DNA, 629 bp, Homo sapiens
agctgccaattggtgggaaatcagaaagtgaagcctgtgttgaaccgaaccgcgagggtgcgaccggccaaatccagattgtgggaaactgcaggtcaacagtttctggagaatctgttattgggctctgccctagagaaactgtagggaaggaacagatcctccagaaattaaagaggccaaacagtcatctccagttaaacaatgagcaagactacagagtttagtgatgtacacctgtgtggccagactatcaaaaactcaagtttgtgattctcataaaagtcaggacagggagccaggcgcggtggctcaggcctgtaatcccagcactttgggaggctgaggcaggcagatcacgaggtcaggagttcgagaccatcctggccaacatggtgaaaccccrtgtctactaaaaatacacaaattagctgtgcgtggtggcacgtgcctgtaatcccagctactcgggaggctgaggcaggataatcacctgaaccagggtgtcagaggttgcagtgagccaagatcgcaccactgcactcgagccttgtgaaagagcgagactccgtttccaaaaaaaaaaaaaaaaaatgtcaggacaggactggtgttggtggggaaggttt

SEQ ID NO: 508099 - DNA, 515 bp, Homo sapiens
gctgcttccttggtccttctagcctcagtttcccaaaagggcagcctcaccagcctagtcctcacctgtgtatacaccagtgggatactaatccagtcgtaggcatacaggtgtccacactgagtacgcaaggtgttcatctcctggggggcagaagagggggatggggttctgaacaccacctgcccccaccctgggctcgcccccacctcttctccaggtaccagggcctggtacctatggtccattcctggctgtgtggccatgggaagctcactaaacctctttgtgtctcagcttcctcatctatcaaaagggaaccaggacctcacagacttggagaagagggaggggcctctgagaagggaccacctcgggctgtggattgctgttggaaaagattctgcaaccccacctcaggctctcggaagaccctcagggcccaaggcttctctttgtaggaaaccttgtttcctgtggaccacarcccttcccactctgcggcagccctgtct

SEQ ID NO: 508100 - DNA, 589 bp, Homo sapiens
tttaataaccacccttgattaaaataaaaacctataagtcatgtagctatattataatatatatttgccataagcttgttatttttaggtgtaattttccagtaggtaaaaatcatggtgctcagacaaatataaaataaatgccagttagagatttgtttaatttattatttaatgaggaaaaaagtaagatattgtggccagtttggagggcattatgaactaagcatgtataaacagcgctagaaaaagattgctggattagatacaatattgatttatgtatgacagggtcataaacatttaagggttatctggtctaccagaggaacattatttgcatctttactagatcaaaaagtctactggaccaaaaagtcttcaagttaacatggaatctgggacattaataaataataaactgtgagacaagctaagtacattcccctagatcatcactgggtaactgttgctcccattttgcattaaaaggatgtactgcatgcttttatgccttaatttgraaatttcagatgagttttctgacaatatagagtatcttcatgggattcccagaaattacgttttc

SEQ ID NO: 508101 - DNA, 626 bp, Homo sapiens
caacaatttcggacattgcaatctggttaggacccattgctaaggagtatatacaatcttttggaggtgacaaaacactctagctttttaagctgccagagttcttgctataatttctacttatctaagggatctcttgcttctttttttgagttttctatcatttggatggggttttaatttttttattctttttttcccttgagggtttgactgtggtgtatgttgtgtataattgaatggctttggttttgggtgctttcagaggaccaaagctcggaaggggttccttgtttgcaaataggttctttgcggtgacattctcagatcctgcttgttgatgtaatttttttttttttggtttggtggtgcaattcatgctgaagtcctgtagatggtgcttaagagtaagagccagtgaatgagctgatgccctacatacatgctctgatggaggtagcaagaagagatgttgatgtggtgcactgaagcacagggggaagaacctggggaggtatgaacaagttcctcatcttgagctagcaagagaacaatmagcttccctattacacccctgtcatggggttcgcagtcttctgtttatgaagccttcatctttggtaccc

SEQ ID NO: 508102 - DNA, 544 bp, Homo sapiens
gctggggaaggtggaatgttgggtatttggttgggcttttcttcacatattcactcactattaatagtctaatctgaactttcttacatggcagctagactccaaagagggaaagtggatgttgccagacttctggagacttacatccagaactagcaaagcatttgtcttcactggattttattgctggaaactagtcatcagaccaactcgaattccagaggaagacaccacacctgtctaytgatgggaattgtgatatgtgcatacaaagattaaaggaattattagaagtcatctttagagacaacctgttatatgccaatataattctggacatatattgggtaatcaataagcatcagttgttgtccccatcttccagatgacatagcattactccttttgtacaaggaatgtatttattatataatcatttataaaataaaatgaattttaccctctcagtttacttattatagtgattagaatttcatttttaagtttctttttttcaaaataaaggcaccatcttcaatgacaa

SEQ ID NO: 508103 - DNA, 619 bp, Homo sapiens
gggctttactaagatggcttaaagtttccttcagtttgactaaagtttagactggtttaatccatactataggccccatcttcctgttctttgaggatttacttcagaacacttgtccaaatgctctctgcctctatgaaatgtgtatatatcttctactagctctcaccagtttaataattcagaaacgttcctctctgaagacctgagagccatccgttcaaaatgtagtcatcaggaaaaatagtattccataccccagttgctgttgagtaggagtaggaacctaactttaatggacaccaattagcatatccgaatagcctaattacagagaacaaaacatttgtaaacttaagaatgaggcattgtgcttaatttaatcccrtagaactatctccctgctaacatcctccagtgcttttccactagctcaccagcagctacaaacctccttttctttcactggagttgagttcaatctctatttcctgttacaatggttttgaataagatattccttgcctgtttaactttgtccaatgcaatttttcttcgaaacgcttacaagtgaatagagcacttatacacacaggatccgattggttattatttggca

SEQ ID NO: 508104 - DNA, 618 bp, Homo sapiens
ctgcaggttttgcagtttttggtgcatctcattgatttcctgagcatacttcccagatgtaatggtttcgctgggactcagaaagatgtagtggatctgactggcagcagaccaacaaacagtgaccataactttttttggttcaagtttggctttgggaagtgcattggagcttgttctcaatccaaccactgaggtggtcgttgctgattgttgtgtaaaatccacttttcatsgcatgtcacaattcaattgaaaaatggttcactgttgttgcatagaataagataacacttaaatgattttttaaattttttgctcagctcatgaggcacccacttatcaagttttcaacctttccaatttgcttcatatgccaaacgaccattgtgtatatccggcaatcttactgaattctataaatatacacaattttgtatgtgtatataaaatttacaatgaaaactggcgtggacttggatcatagtaacatgaatcaaatctatattactaatggagctcagaaaaagctaatgtttagtttcatctaggttacaatggttgacattgagttctttggcaacttctcacgtcgttgtgagaggatcagctttgatg

SEQ ID NO: 508105 - DNA, 560 bp, Homo sapiens
gagtttattttacacttgatcttagccagaatgctaagaagtgatggttatgagtttattttaatatgacctacagaaaatttaaaatgacctacggaaaattamaatcaagctcataatttggcagaccttattgtttaggtcaaagctaagtaaacaaatcaatgtaaacatatttaaagaacataaataaatactagtgtaggtgataggctagtgtgtcatgaattgccaagatggggcacacagactatttgggagctattgatctagtctgagccctctagttctataaggaggaaactctaaacaggaagtagtgagctgagaccttggtcaacaatgtagtcaccggctgggttgggaccagacagttgccccatgccctgtcctccctgtcctgtcattctgccccctcaacagactcatcaaggtcacatttaaataagtacacacaaaagcagcttatgcatagacagcttgtcatcagacaggatcacacgtaacacccaggtcaaatcctctgccatgtcaaacaagataatcccatggagtaaaag

SEQ ID NO: 508106 - DNA, 560 bp, Homo sapiens
gagtttattttacacttgatcttagccagaatgctaagaagtgatggttatgagtttattttaatatgacctacagaaaatttaaaatgacctacggaaaattacaatcaagctcataatttggcagaccttattgtttaggtcaaagctaagtaaacaaatcaatgtaaacatatttaaagaacataaataaatactagtgtaggtgataggctagtgtgtcatgaattgccaagatggggcacacagactatttgggagctattgatctagtctgagccctctagttctataaggaggaaactctaaacaggaagtagtgagctgagaccttggtcaacaatgtagtcaccggctgggttgggaccagacagttgycccatgccctgtcctccctgtcctgtcattctgccccctcaacagactcatcaaggtcacatttaaataagtacacacaaaagcagcttatgcatagacagcttgtcatcagacaggatcacacgtaacacccaggtcaaatcctctgccatgtcaaacaagataatcccatggagtaaaag

SEQ ID NO: 508107 - DNA, 579 bp, Homo sapiens
cacccctgaagactatatcgtaaaaccaagaaatccaggtaaagtgaagtggggggctaaaagccaacacccacctgaatgggtgtcacaggctggtctgcagcctcatcttcacctgcataaggacaaagggccacctttcataagcagacagacccaaagacagaccgagrtgtcccacggccactggtggaaagagattatctcaaggacccagtcagcctgaccctgcccccagagcatatgcacacaccccactgcccaaaacactggctcaagcgtggacaaggccagtggtgcctggcacagagggcatgctcagggaacgtctctgcctctgaattcaaacctgtctcaagagaaggctctttcttttttcttcatggacatgtggccagtgtttaagttctgggcccagtcatcaatgagaagaacaggtttcttgcctttgtaaactctagggtccacaagattttcttttatggactgcacgggcagggcctgcttggcagcctctttccttttgttcacgttctgactgagggctttgtttaaatgccaaggagctcatccctttta

SEQ ID NO: 508108 - DNA, 563 bp, Homo sapiens
accactttgcctaatgtcccaccaccttaccaggagcagtgcacattaatgactggttgatgagctttacaaaggcccagcctccccaccccagttcagaaaaaccttgaagtgtcctccccctagcttcagagcctcctggctgaggcctttgttgcaagtgtagcacagttcatctcctgctcaatcctgcttcctttgctctcaacaggtgttgatcccaagaatacttcctaataaacttcctacattctaatttccatctgttttctggggaatcaaactgaaacatacatgataattacgttcactcaacttttcactcaacttttcatctatgctactcaactttttcatctgtggtactcaacttttcatctatgctacttaacaattaaactgtagaaacattttatgagcccagattttggygtgaggaatgttctttaacaattttgacatttgtagtttagaacaccaagatctaccttttataaaacctgcactctctaaaatcgcacacccattttggcactatacattcagttcagtttttgtggaga

SEQ ID NO: 508109 - DNA, 635 bp, Homo sapiens
ctgttgcttcataaaggctggcaactcctgctggctgataaggccccaagttctcacttatttttatttggtaactstcacaaggggtgccagaggcagaagggccatttaaagggactgtcttcccggaggacaccttagcaggtctggctgccccagtctgcatctcagatctgtggaatccttgtggttagttgaagttaacaaacccggtgtggcacagcagtcccctgcacagggcatgcatattaaagccgacaatgcttacaaatgtaaataagggcagattgattaggaacaacattatcgctgggaatgtcgcactcgcatgcatcagcaatgaggcaaattgggggcagcctcagccctgaccacccaagtcgagcaggcttttacactggctcctcttccctttcttaaaacgttacagaaacaaggccaattagatcctcaaagtaattcatctctaagtatgaaaaaagcagaccacaggggaagcggcgggtggggggtggggagattaagatagcgctcgttagagccgaggctccggagtgcgtcctggaacccacgggtagaatttacaggccgggaccattgtctgagatgctgaaaagttaacccatcaaacagcg

SEQ ID NO: 508110 - DNA, 529 bp, Homo sapiens
gatcctcagaacagcctcctgtgcttctaagctactcctcacccatatttctgcaatgttgtcatgaattcagttcttttggcctctctatccagccccccaaccccacccccattgcattctgtgttcttaggggttgggcatggcccactaagacgcttctcaaacttgacttgcagaagagggagatatatgagcagagggctatgggatttctgcagcagctcacaagctcaaaattcattgcatcatccccccacctaaaagtgtatgtgaattttgcatttaatgcacaartaaatgtgctcttaaaaaaagaaagtgcttgtcttaatgtacacattaatgttttcaatgacatgccattgggtagaattgatggctcagtaagatggtctgtgctcactcttggaattgaggatttcctggtagttcctcaggtttcttactgtgacctgttggagaagcacggttcaccagatgtgatggttaatttcaggtgtcggtgtgactggattaaggatgccca

SEQ ID NO: 508111 - DNA, 577 bp, Homo sapiens
cttctctggggaggttgagtttggaaaccatagatttaaaaatagccaggaagtgacttgcaaaaatatcctgaagcaccaaaagagatcttcaagcaaaaggacctcattttctgaagaggttactgtttagcttcaacagtctgaaggcaatgaaatgccagaaatgctggccaacactgggaataataaagtagaagaatttcaacaagttaggaaactggttcttttgtcctaggagtaccaaggaaatcaagacataatgcgtaaagctgaaagtgctgacattgtactttttatttctcttcctgtttgttggaccagtttacaaagaatacagccaagagtttttctttgacaaggttcactaagggaaacacagaatccttccaagagagttttttttgggagggaggtgtgcagaatttcatttctggatccattttctcattaataggtttactatcatccagcgaatgttattggagaaatagattcaataccgtggttcaaaarcatgtttccttcaacctcacagtctgatgagttgcaaaggtatgacactggcaagacttgc

SEQ ID NO: 508112 - DNA, 577 bp, Homo sapiens
cttctctggggaggttgagtttggaaaccatagatttaaaaatagccaggaagtgacttgcaaaaatatcctgaagcaccaaaagagatcttcaagcaaaaggacctcattttctgaagaggttactgtttagcttcaacagtctgaaggcaatgaaatgccagaaatgctggccaacactgggaataataaagtagaagaatttcaacaagttaggaaactggttcttttgtcctaggagtaccaaggaaatcaagacataatgcgtaaagctgaaagtgctgacattgtactttttatttctcttcctgtttgttggaccagtttacaaagaatacagccaagagtttttctttgacaaggttcactaagggaaacacagaatccttccaagagagttttttttgggagggaggtgtgcagaatttcatttctggatccattttctcattaataggtttactatcatccagcgaatgttattggagaaatagattcaataccgtggttcaaaagyatgtttccttcaacctcacagtctgatgagttgcaaaggtatgacactggcaagacttgc

SEQ ID NO: 508113 - DNA, 663 bp, Homo sapiens
gctgtggttcagaaagagctctgaactcacagttacaagggccatgtgtgtctcttgtgtgagcttcttagctggtttgtatccacgggaaagtcaccacacccctcagagcctcagtttgatcccctgcgaaatacacataatacctagaatcaggattgctgcagtaattatacaagataatgcaacaaatatgggaatggaaataggtgcaggaaaaatataaacytaaattctaaatgtggagtttcctagtttctccttttagttttaccgtacagatggaaataggtcaatgtaattccttacagctaaagttaactgagattaactaaaactactcagaagctaaagcacttggataacctgaagattaagagacacaaaagtttgatgaactcttagaaacagaaaaggaaaagaactaaataacaacttatgccaggaaactggttttactctttcatgcaaggtttgacatcttgtctgtctgtccatcattgcagttatgccctgaggaggaaggacatggacaggtacagaatgaggctatcatagcaaggcagaacagtatctcaacttaacactatgtatttgtaagccattttatagcttgtacagcacattcttattgttttgtactcaggaatctttttataaggt

SEQ ID NO: 508114 - DNA, 663 bp, Homo sapiens
gctgtggttcagaaagagctctgaactcacagttacaagggccatgtgtgtctcttgtgtgagcttcttagctggtttgtatccacgggaaagtcaccacacccctcagagcctcagtttgatcccctgcgaaatacacataatacctagaatcaggattgctgcagtaattatacaagataatgcaacaaatatgggaatggaaataggtgcaggaaaaatataaacttaaattctaaatgtggagtttcctagtttctccttttagttttaccgtacagatggaaataggtcaatgtaattccttacagctaaagttaactgagattaactaaaactactcagaagctaaagcacttggataacctgaagattaagagmcacaaaagtttgatgaactcttagaaacagaaaaggaaaagaactaaataacaacttatgccaggaaactggttttactctttcatgcaaggtttgacatcttgtctgtctgtccatcattgcagttatgccctgaggaggaaggacatggacaggtacagaatgaggctatcatagcaaggcagaacagtatctcaacttaacactatgtatttgtaagccattttatagcttgtacagcacattcttattgttttgtactcaggaatctttttataaggt

SEQ ID NO: 508115 - DNA, 515 bp, Homo sapiens
atgaatgacccaactatttgtagaactttagattctaagggacagtagaaccaaaaatcgagatattttctcaagtttaaaaaatgtaaagccaataaattaataaaaacagtggtttagatttaagaccgaataatttaaaataataataattacagagctgccaatacagatgggagaagtaattaaaaagytgagcatagaagagatagaaaagtgaaacagaaatcaataaagatcctgtaccctgcttttcactatccaccacagggaaatcttcaaagatggtgggaagggtgcttatcatctctgataagtgtgaggatccagagtggaggacatcagtactgtcttcccatctgcttgccctggaaggcatcaaggtctagaaagttccccagaatttcatgtcacaggaaaacagaattgagatagttatgtggagagatcagtataggcaagcccactgagatacccagaactccagcaaggtatggaaggactgccaaatttcc

SEQ ID NO: 508116 - DNA, 533 bp, Homo sapiens
tattcagcctcaaaaagagctaattacttcaggcagcttattcttcttgtagctaaggcaaaaaaggaaaacagttatataaatatttttgtgtttttgacaagagatatagtacactgaatcattgttttgttttgttttgttttctggaactaatctcaatactgaattaacagcatggggtttgcttaaaagcatgttgtaagacacactggrcagtggctttaactctaataccatagtagacacggaaatgctgtttaaccaaacagttcttatatcaacacttcaaacgagtagaggacctcacatccacatgcttaactccctgagtttacataatacaaacatagtaccaggcaatttagttgatgaggtaggaaatatattccttagatggtgtctcttaaatatcagatgtctgaagattgcacaggtgcaatctttacggaattttcaagtatatcctctcataagcaactcagatattctacattgctgactaccacgaaaaccaggtgagagaggccaaa

SEQ ID NO: 508117 - DNA, 612 bp, Homo sapiens
tgctctgtgctatttgcctgggctgtacaagtttccttgtgcttttggtactgttctggttacaagctggcatagattttgarcgtgcttccagaattttctccataagctccattactttagtgggtaattttacagaacaggaggtttttcaggaattcctatgtggtgttatggcaaaaatgtctgcatagtaaatgaactggaaggaaaaaggttagagagtgagtctatgcaacagaaattttggaggtgatggagtattagggaaggacaagttctaggtcattactatgtgagtggtaatcaagatggaagggaggaaaaaaatgactgaagttaaagatatcaaggaacaagaggtcagagtattggatgggtgacctgtatcagtttttaacctgggtctattgaccctgtattgccagaattcagggaggtcttgagctggaatgggaaaaaaagactttcttttttcttttatgttttgagacagagtcttgctctgttgtccaggctggagtgcagtggcgccatctcggctcacagcaagctccgcctcccgggttcacgccattctcctgcctcagcctcctgagtagctgggactac

SEQ ID NO: 508118 - DNA, 439 bp, Homo sapiens
tcaatggaaagatctgtcccaggaccatttattccaacattttcaattatgagaaatctgggaagataaagttattttcacatttctcaagaaatacatacttattcatactcatkacaggaaagtcagaatctacagaaaaccaagaagatttttaaaaatccatgataccaccatcaaaagagccgcacttagtatgttggtccacaggtttcctagcacccttttctgttggtgtatgcacaaaatacacaatcacattctgtctacattttacaatttgccattttttgattaacactatatattgaacaatttttaagacctgcaacatatgtcgacaacattatttcaaaataatatatttataaataaacacacacacaaactgtctgtcttatatacaacacgtcttactttctaattctccactcttgaa

SEQ ID NO: 508119 - DNA, 439 bp, Homo sapiens
tcaatggaaagatctgtcccaggaccatttattccaacattttcaattatgagaaatctgggaagataaagttattttcacatttctcaagaaatacatacttattcatactcattacaggaaagtcagaatctacagaaaaccaagaagatttttaaaaatccatgataccaccatcaaaagagccrcacttagtatgttggtccacaggtttcctagcacccttttctgttggtgtatgcacaaaatacacaatcacattctgtctacattttacaatttgccattttttgattaacactatatattgaacaatttttaagacctgcaacatatgtcgacaacattatttcaaaataatatatttataaataaacacacacacaaactgtctgtcttatatacaacacgtcttactttctaattctccactcttgaa

SEQ ID NO: 508120 - DNA, 532 bp, Homo sapiens
actgtttctatttctgcagcattttgtgaacatacattttgtgaaaaacctggctaaacaactgcttcctgtttagagatagaaactgcattttatcatggattcaaaataccagggagaactgctctcagtaataatttctcaactaatttatttatttcacatatttaaattagttattatctccttgcacttaaagaagcaagcataccccttgtaagttcctttgtccaaaaaattaatgtaaccagatcataatcctacagagaataattttcttctttttatatgaaaaaataagaaatatatttatcaacctattctccaattattacatgtgcaagtataacaaggattctgtctgtctcaatttggtcccacgttagccttgtkagcactgagatccttttagaaacagaagattttttaaccatatcatttttatccatatcaggtactgagctgaggccaggaaagaaaatctaagttctccaagatcacacagttacatggtggaaaggcagtaattaca

SEQ ID NO: 508121 - DNA, 585 bp, Homo sapiens
ttttggaagtggaaaagaacagaaaggagcaggttgaatgtttcgagctaaagcaaagtctcacatcataagtaggataacaaaaaactatcaaagatggaggagcaaggatacaaccttaataatctgtacctagatttggctggcaatgactatttttttccagggttgcattattatgtatacaatacagctaacaaagtcattttaggagttaagaaatatcaccaagatccatatgtaacattttattcccttttgcatcctgaagatatggattccatatcacagatgagactttctccatcacttcattggctttgtttggagaatcctgctggttattcatttagttgttggcattgatcctgctgaattctagagttgtgatggtgagttatacaaggttttcctgtgagaattgctttggtgttagtaatgcactcaaaaatgtatctaataaattwtaaaacatatatatatgtatacatatgcaatagtactccaatttcttctttttcaccatctgtattaggagcttttattatttaacttattagttaatatctcaatttgataatttga

SEQ ID NO: 508122 - DNA, 534 bp, Homo sapiens
aggtggccagctccaaacttctctatgatcctgaaaaggaagactgtaaatagttctatcttttctttggcactcttgagaccatttctggtcttcaggccacctacattcrtagggaactatatctgcagacaccatatcctggctttgtgtggtttgacagatgtggctgtgtaccctgagctggagggtcctctcagagccctgggcaagtaccaacagtgtatccgtgccagatgggcatgtacctttgaagcttccttcagccccagcaagtgaggaagctccctcagggcatgcagacacacaggactctttctgtcattcactgtcccacaccccactcttcctctctcctgctgtcactgcaattctgccctgaggttcctaggaaagcctcagggtttgattgaattgaacctgcaacattggttcaggtccttgaggcacgctggcaaaaaatggtatccatgccaggacaagggacacccaactggaaaacagataccgagagaggaaaaaccatctctagcc

SEQ ID NO: 508123 - DNA, 534 bp, Homo sapiens
aggtggccagctccaaacttctctatgatcctgaaaaggaagactgtaaatagttctatcttttctttggcactcttgagaccatttctggtcttcaggccacctacattcatagggaactatatctgcagacaccatatcctggctttgtgtggtttgacagatgtggctgtgtaccctgagctggagggtcctctcagagccctgggcaagtaccaacagtgtatcygtgccagatgggcatgtacctttgaagcttccttcagccccagcaagtgaggaagctccctcagggcatgcagacacacaggactctttctgtcattcactgtcccacaccccactcttcctctctcctgctgtcactgcaattctgccctgaggttcctaggaaagcctcagggtttgattgaattgaacctgcaacattggttcaggtccttgaggcacgctggcaaaaaatggtatccatgccaggacaagggacacccaactggaaaacagataccgagagaggaaaaaccatctctagcc

SEQ ID NO: 508124 - DNA, 511 bp, Homo sapiens
tactacaacattttccagcaacctttttagttcatttctgaggctgcaatttcctctgttaagatgagscaggtttctttctgtctttcaggaatttctcaaggtttctgacccacatgacaccttctccttgtcttctgtcagttttgtgaaatttctcattaaacacatctatttttttttttttaatttccagggcctgggggtgggagaaggacaggtacatatgctcagatggccatcatggtcccacctagaggcagatctctagaccataaaaggctccacacatgtttcccctgggtagagttgccagataaaatacagggcgcttagttaaatttaaacttcagataaacaatgaataattacattagtctaagtctgaactgtagctttactaacaaattatatatcttctgtttatcttaaatttgtatttaatctaacaaaaatactcgatgtttctctgaaattcaaattcaggtccacatccagtatctttatttgt

SEQ ID NO: 508125 - DNA, 580 bp, Homo sapiens
ggtatttttcagtgcttcccttagtttacctcttcctgttgtctctacattctggtatgtcattcttttaagcatgattagcaaacagagactggaattgtcagayacattatgcagataggacgagaaatctttcccttactgagaagttgagagaagagtgagggagagggggtaaggggaaagaagttgagaaagagatatatagagatacttggaaagataaatgggaaagggttggagacagccccaaagagagaacattatgggagagaaaatgagagagagggagtggtagaaggagaatgaagagagatagggaatgagaaggtgaaaatctttgtcactaaatgccatgaacagcaaatctcttcaaaactaaagtgcttctgaatctcaattattggcatggcaatttaatgcaatatttaccacaataaggtcacaacaggagaaaaaactgagcagtcctttgatgtttgaatttaagttactatgtgctcatcatgaatttttaaattcctaagaatttcacagagcagaattgggagtgacaaaggaaacaatctccattcagttt

SEQ ID NO: 508126 - DNA, 580 bp, Homo sapiens
ggtatttttcagtgcttcccttagtttacctcttcctgttgtctctacattctggtatgtcattcttttaagcatgattagcaaacagagactggaattgtcagatacattatgcagataggacgagaaatctttcccttactgagaagttgagagaagagtgagggagagggggtaaggggaaagaagttgagaaagagatatatagagatacttggaaagataaatgggaaagggttggagacagccccaaagasagaacattatgggagagaaaatgagagagagggagtggtagaaggagaatgaagagagatagggaatgagaaggtgaaaatctttgtcactaaatgccatgaacagcaaatctcttcaaaactaaagtgcttctgaatctcaattattggcatggcaatttaatgcaatatttaccacaataaggtcacaacaggagaaaaaactgagcagtcctttgatgtttgaatttaagttactatgtgctcatcatgaatttttaaattcctaagaatttcacagagcagaattgggagtgacaaaggaaacaatctccattcagttt

SEQ ID NO: 508127 - DNA, 580 bp, Homo sapiens
ggtatttttcagtgcttcccttagtttacctcttcctgttgtctctacattctggtatgtcattcttttaagcatgattagcaaacagagactggaattgtcagatacattatgcagataggacgagaaatctttcccttactgagaagttgagagaagagtgagggagagggggtaaggggaaagaagttgagaaagagatatatagagatacttggaaagataaatgggaaagggttggagacagccccaaagagagaacattatgggagagaaaatgagagagagggagtggtagaaggagaatgaagagagatagggaatgagaaggtgaaaatctttgtcactaaatgccatgaacagcaaatytcttcaaaactaaagtgcttctgaatctcaattattggcatggcaatttaatgcaatatttaccacaataaggtcacaacaggagaaaaaactgagcagtcctttgatgtttgaatttaagttactatgtgctcatcatgaatttttaaattcctaagaatttcacagagcagaattgggagtgacaaaggaaacaatctccattcagttt

SEQ ID NO: 508128 - DNA, 614 bp, Homo sapiens
agggttgcagtgcgtataaccagagtgaatggcgtttcattatcccacagcccacatctgagtgctgggtcctccacatagttcctgtcaatcaaaccagttggcattggatgaaggcaattccaaaaatagtgtcctttactcattttgtattttcattcctactgagaaaattctgattttcgtcatttagkttattgccctaaattcaagaacattcattcctcagtaagtacatgctgagtttttagactgatgtttctatataagtgattctttgcaaaaatggactgtgatgttttgactttttatttagcatattttaaaatctattttagatagttaatatatttctgggaatgtggaatatattttctttgtgaataattccaatgcgataggccatttgttgctcctgggttttaaatgttgatgtttagggctgaagctgcacacttagtcatgtggggccccctgaccgtgtttgccatgtggctcatgggcaccctcaggatcaatgatttacatgaagaactctaagaatgtgtaaaacctgttgtattagtgattatggttgatctcagtcaaagggtacagtagtaccctttacactc

SEQ ID NO: 508129 - DNA, 646 bp, Homo sapiens
cattttggattgctctaattcccccacacaacactctaaaccataagcaaatcccgtcactacttcctcaaaaaatgtataccgcacccytgtccccttctctcccatctgctactgcaatcccacctcaagcaccttcctctctcacctggatttagcagaagctattctaatgtgccttggtgtttttcattcatgcccctcaaaagtccattttctgtgttgcatccagataaatctttgtaaagagctcatctgattaagtaatttttccctgttcaaaaatttccaatagatctctttgcaacctccctaaaatgcaagatcctgaccccaccaacaaaccctcctccatggccacctccctatttctacatgatctccagccttcctgttccctgtgctcccgccacacacatgcacacacacatatgcacatgcacgcgtgtgcatggaactgctttctggtcttgaaacccaccaagctcatcaccttgcagatggcgcttgctggcccttagatcctagatctttttctacattctcccaaggtcccttctcactattcaggttttactaaaatgtcacctctacaggaaagcctccctggccaggcaggctaaagtacctcccttttactccacta

SEQ ID NO: 508130 - DNA, 627 bp, Homo sapiens
acgactgagcaaggctttggaaaaccagagagattagagcggtgagttgcgctggtcacattggatacctgcgcgttaggagattctggagccagacggagagccgaatcagccttcgcccgccctgcccctctcttgcttcagaagcccccagaaactccgcggtcggcgacccagcccgagccgcctgaggtcccaaggggaagctgaacgcctggtgggctcccgggatggttcttcccgttctttgtgccgccttcacccagtgaaggagcctgtatccaccctgctcagtcgcttttgggctgctgcggasgttccgctgccatcttcggatcctgtgttccccaccggggctccaccagggcagggatggtggtgagggtcgctcctgggtcccctcgcggggagcagggtctggcactcactaaggcgcacgactaggacttgtcgaatgaatccatcgtctcctttagcttttaatcctttaaagagcactgagagtggaaatcaagagattttttccatggggaagttctttttacaaagcattgatttctcggcaccccgcgggcgtgcaactggcagggcctctggtgggctttctgccgggtggagctgcggggg

SEQ ID NO: 508131 - DNA, 627 bp, Homo sapiens
acgactgagcaaggctttggaaaaccagagagattagagcggtgagttgcgctggtcacattggatacctgcgcgttaggagattctggagccagacggagagccgaatcagccttcgcccgccctgcccctctcttgcttcagaagcccccagaaactccgcggtcggcgacccagcccgagccgcctgaggtcccaaggggaagctgaacgcctggtgggctcccgggatggttcttcccgttctttgtgccgccttcacccagtgaaggagcctgtatccaccctgctcagtcgcttttgggctgctgcggacsttccgctgccatcttcggatcctgtgttccccaccggggctccaccagggcagggatggtggtgagggtcgctcctgggtcccctcgcggggagcagggtctggcactcactaaggcgcacgactaggacttgtcgaatgaatccatcgtctcctttagcttttaatcctttaaagagcactgagagtggaaatcaagagattttttccatggggaagttctttttacaaagcattgatttctcggcaccccgcgggcgtgcaactggcagggcctctggtgggctttctgccgggtggagctgcggggg

SEQ ID NO: 508132 - DNA, 422 bp, Homo sapiens
tcataagggtaagaattttttaccagccaggctcccagcctccttctctgtgtggaatctgatcaagtgcacagtaaaaatcactgyttcttttccctctccaaaatcttgattaatgggagaaaaggatttgtgtgactagtcttgggtgtagtgactctggtgtgcttttttggtactttgtggtaccaattcatattgtttaatccctttcttcccagaaaatgtctgttcctttgtctttgtctctacgtgttattctgtcataaaagggggtactggttgaggttccttcttatcttattttatgtccttgagagcttgacttgtgacaaagtgggagcactttctcttggtttccgctatcgggtaagaggtggtaattttcaggtcatattaggtggcctgtctgaaaatggctg

SEQ ID NO: 508133 - DNA, 422 bp, Homo sapiens
tcataagggtaagaattttttaccagccaggctcccagcctccttctctgtgtggaatctgatcaagtgcacagtaaaaatcactgcttcttttccctctccaaaatcttgattaatgggagaaaaggatttgtgtgactagtcttgggtgtagtgactctggtgtgcttttttggtactttgtggtaccaattcatattgtttaatccctttcttcccagaaaatgtctgttcctttgtctttgtctctacgtgttattctgtcataaaagggggtactggttgaggttccttcttatcttattttatgtccttgagagcttgacttgtgacaaagtgggagcactttctcttggtttccgctatcgggtaagaggtggtaattttsaggtcatattaggtggcctgtctgaaaatggctg

SEQ ID NO: 508134 - DNA, 440 bp, Homo sapiens
tgaatatagccctcgggcatctggagttttgccttcacatagtgttgaaaaatttgaattgctttccaacctttgaaagtcaggatatttcatgttaaaatccagatatctcagcatttcttgacaaaccagaagatctggtaaccctagactttcttctcataaggcactttttactctggttcaaagcagttcacagttcccactaagcccctccttaggcattcaaattggcagccttygcagcaaagctgccaggctgtattttgcttctcctacctgcgttcacatcagtgacctcactcaagcataactgatatactcatggccttctattccttgtaacgctggaagcaggggagtcttaatggaagagtgtaagtactgataaattaaatgtttctatcacaggagaaccaacaaaaagtggaagtgtctgc

SEQ ID NO: 508135 - DNA, 646 bp, Homo sapiens
tttggttaacatggagaagggggtttctgatttttgtccttgtacgtgaatcaaggggaggactattctgattattgagtgaaagtgatttaattccacatgtgttattaccaaagtgagactataaatcacaaaatgtagtgatctgtctaaagttacacagcctgtaaaagaccagtcatgcctcctgacttcagttccagtgtttcatttttacatattgctttggccatgttaaaattaatcaagtggtacttatcgcttaaaatagcttctaacattataactatgaggaatttgaaagcatcaagttcaaaccgtttgtaaaccagcactattttcattgcatgtttttcacacataacatttgatatttcttttctgcctttattacaagatctgggactctagattttaactaacttgaatggcatgttgtaacatctsatctaatggagatttccaccaccttgtttttacaggcttaatgtagaaatttcttaaaagatcatatgtacccatgaatgttctttttccagcaagacggaagaagccaaagactctctggtcattgcagaaggaagaatgagagcccaagcctgaggaagataaaatgagatgatttggcttaatatgaattaaggca

SEQ ID NO: 508136 - DNA, 646 bp, Homo sapiens
tttggttaacatggagaagggggtttctgatttttgtccttgtacgtgaatcaaggggaggactattctgattattgagtgaaagtgatttaattccacatgtgttattaccaaagtgagactataaatcacaaaatgtagtgatctgtctaaagttacacagcctgtaaaagaccagtcatgcctcctgacttcagttccagtgtttcatttttacatattgctttggccatgttaaaattaatcaagtggtacttatcgcttaaaatagcttctaacattataactatgaggaatttgaaagcatcaagttcaaaccgtttgtaaaccagcactattttcattgcatgtttttcacacataacatttgatatttcttttctgcctttattacaagatctgggactctagattttaactaacttgaatggcatgttgtaacatctcatcyaatggagatttccaccaccttgtttttacaggcttaatgtagaaatttcttaaaagatcatatgtacccatgaatgttctttttccagcaagacggaagaagccaaagactctctggtcattgcagaaggaagaatgagagcccaagcctgaggaagataaaatgagatgatttggcttaatatgaattaaggca

SEQ ID NO: 508137 - DNA, 646 bp, Homo sapiens
tttggttaacatggagaagggggtttctgatttttgtccttgtacgtgaatcaaggggaggactattctgattattgagtgaaagtgatttaattccacatgtgttattaccaaagtgagactataaatcacaaaatgtagtgatctgtctaaagttacacagcctgtaaaagaccagtcatgcctcctgacttcagttccagtgtttcatttttacatattgctttggccatgttaaaattaatcaagtggtacttatcgcttaaaatagcttctaacattataactatgaggaatttgaaagcatcaagttcaaaccgtttgtaaaccagcactattttcattgcatgtttttcacacataacatttgatatttcttttctgcctttattacaagatctgggactctagattttaactaacttgaatggcatgttgtaacatctcatctaatggagatttccaccaccttgtttttacaggcttaatgtagaaatttcttaaaagatcatatgtacccatgaatgttctttttccagcaagacrgaagaagccaaagactctctggtcattgcagaaggaagaatgagagcccaagcctgaggaagataaaatgagatgatttggcttaatatgaattaaggca

SEQ ID NO: 508138 - DNA, 646 bp, Homo sapiens
tttggttaacatggagaagggggtttctgatttttgtccttgtacgtgaatcaaggggaggactattctgattattgagtgaaagtgatttaattccacatgtgttattaccaaagtgagactataaatcacaaaatgtagtgatctgtctaaagttacacagcctgtaaaagaccagtcatgcctcctgacttcagttccagtgtttcatttttacatattgctttggccatgttaaaattaatcaagtggtacttatcgcttaaaatagcttctaacattataactatgaggaatttgaaagcatcaagttcaaaccgtttgtaaaccagcactattttcattgcatgtttttcacacataacatttgatatttcttttctgcctttattacaagatctgggactctagattttaactaacttgaatggcatgttgtaacatctcatctaatggagatttccaccaccttgtttttacaggcttaatgtagaaatttcttaaaagatcatatgtacccatgaatgttctttttccagcaagacggaagaagccaaagactctctggtcattgcagaaggaagaatgagagcccaagcctgaggaagataaaatragatgatttggcttaatatgaattaaggca

SEQ ID NO: 508139 - DNA, 565 bp, Homo sapiens
tctgtcattctcgtttcctgttatatctcaacaaaataagttgagaattgttcagacctctattttctgaagctgtagaattggaattgtttctttcttaaatgtttgaaaaaagaataatcartggagccttataagctggaagaaatattttaaaataatgtggaggaggaagtggattaattatgaattcaatttctttaatttgtgtgcatcaatatacattttctagtttttcctacattagctttggtagtttatttctttcaagaaatgtgttaatctcatatagattgtcaaatgtattgccataaagttgttcataatatttcattactatctttttgaactcttaaggctctgtaatgatgttacttctttcatttgttattaataatttgtgccttaactctgcttctctcttttgttccttcctttcatccttccttctttccttttttcttttgttcctcattctctctggctaagcatttattcattatattgactgtttttcaaaaacaagttttaatctcattgatttttattatttttttgtatttca

SEQ ID NO: 508140 - DNA, 565 bp, Homo sapiens
tctgtcattctcgtttcctgttatatctcaacaaaataagttgagaattgttcagacctctattttctgaagctgtagaattggaattgtttctttcttaaatgtttgaaaaaagaataatcaatggagccttataagctggaagaaatattttaaaataatgtggaggaggaagtggattaattatgaattcaattkctttaatttgtgtgcatcaatatacattttctagtttttcctacattagctttggtagtttatttctttcaagaaatgtgttaatctcatatagattgtcaaatgtattgccataaagttgttcataatatttcattactatctttttgaactcttaaggctctgtaatgatgttacttctttcatttgttattaataatttgtgccttaactctgcttctctcttttgttccttcctttcatccttccttctttccttttttcttttgttcctcattctctctggctaagcatttattcattatattgactgtttttcaaaaacaagttttaatctcattgatttttattatttttttgtatttca

SEQ ID NO: 508141 - DNA, 565 bp, Homo sapiens
tctgtcattctcgtttcctgttatatctcaacaaaataagttgagaattgttcagacctctattttctgaagctgtagaattggaattgtttctttcttaaatgtttgaaaaaagaataatcaatggagccttataagctggaagaaatattttaaaataatgtggaggaggaagtggattaattatgaattcaatttctttaatttgtgtgcatcaatatacattttctagtttttcctacattagctttggtagtttatttctttcaagaaatgtgttaatctcatatagattgtcaaatgtattgccataaagtygttcataatatttcattactatctttttgaactcttaaggctctgtaatgatgttacttctttcatttgttattaataatttgtgccttaactctgcttctctcttttgttccttcctttcatccttccttctttccttttttcttttgttcctcattctctctggctaagcatttattcattatattgactgtttttcaaaaacaagttttaatctcattgatttttattatttttttgtatttca

SEQ ID NO: 508142 - DNA, 512 bp, Homo sapiens
aacatggtgaaaacccgtctctactaaaaatacaaaaaatcggctgggcttggtggcgcatggctgtaatcccagctacttgggaggctgaggtaggagaatcccttgaacccgggaggcagaggttgcagcagtgagccgagatcacgccactgcactccagcctgggcaaaaagagcacaaaaaaaaaaaaaaaaaaaaaaaaagagccagctctgccctcatgatctaatcacccccaaaaggcctcccttctyagtgctatcaaattgtggtttcagttccaacacatgaattttggggcacatattcagaccagagcacctacaaaatttaggttcagatttgaataagacaaatcttaaatctcgtcctatataaaagtgggcctaagacaaactaacatcaaatttgaaaataaaagtatgagcaatggtatattaaatatgaacaacattatattgtaaaactgcagattaaaaaaaggaggagtagcaattttcctatcaagg

SEQ ID NO: 508143 - DNA, 418 bp, Homo sapiens
ttagtgtttttattagactgaaatgtaaattacttgccttcatgattattctttaaaactataatcacattttgtgtcaggtgagactaaaactatgcctgtgatgacaccactgaagcatctatggcatggatacccactcttctgtcagagtccacatgtcagccagtaccaaggtgacaggagatttctattaccaagatgctcagyaccttgtgaactgttaataatatcattttctttttctctctttttttttctctctctctctctctttctctctttttttttgagatggattcttgctctgtcacccaggctggagtacagtggtgtgatcttggcccactgcaacctcggcctcctgggttcaagcaattctcctgcctcagcctcccaggtagctgggattacaggt

SEQ ID NO: 508144 - DNA, 433 bp, Homo sapiens
tttttagatcctgaacattgttgatcttgcttgtattcccattgaagcagaggatgaatgaaagacccacgtgcatatagtttatgtgtcagattatcttcagagcaagtgtaaaggggcttcattgaggtggccaccgtgggtaacacagcttaattacactcggatttctggagaggtatatagaatatccctcagaatttcccaagcaaaaaaaacagaaaactccttcccttgtcagcytaaggctcccctcagggacgtaactgtgccctcttttgaaatatatatacatatgtaggcacactgactcctatcatctccccctttcgtgtagaaagagtctgagggcagaaggcaaagacaagccatgctcacttgagaaattcaccatcagcaaaatagtgaatcacagccatgtgaatctaaccct

SEQ ID NO: 508145 - DNA, 433 bp, Homo sapiens
tttttagatcctgaacattgttgatcttgcttgtattcccattgaagcagaggatgaatgaaagacccacgtgcatatagtttatgtgtcagattatcttcagagcaagtgtaaaggggcttcattgaggtggccaccgtgggtaacacagcttaattacactcggatttctggagaggtatatagaatatccctcagaatttcccaagcaaaaaaaacagaaaactccttcccttgtcagcctaaggctcccctcagggacgtaactgtgccctcttttgaaatatatatacatatgtaggcacactgactcctrtcatctccccctttcgtgtagaaagagtctgagggcagaaggcaaagacaagccatgctcacttgagaaattcaccatcagcaaaatagtgaatcacagccatgtgaatctaaccct

SEQ ID NO: 508146 - DNA, 479 bp, Homo sapiens
gcacacagatgatggggaggtgcrattctagagtccaaaggcagacggacttctctaaagccagagagtgtctgactctgtgtgtctgccttaaggcccacatcgtcccctttcaaagtgcaccaggagccacaaaagacaatgtgactggatggtaacttagcaaagagctgtcagatcaaatacaggactgcccagttaaatctaaatttcatgtgaatgaccaataattggttaatgtaagtatgccccaaatatatcacaatgatgtcccaaatattgccaacaaataatcttttagtataaaaaagttatactaaaaaaagtatccattgcttatttataattcaaatttaactgggcatccagtatttttattgctaaacctggtaaccctggtttggtactgacagctcaggcctcaggcctgaacacctcccctttgcccagcacctttctagccgcagaccatgaaccct

SEQ ID NO: 508147 - DNA, 632 bp, Homo sapiens
gttgttattttgctatttgcctacatctccaacttyagtggcactgatttcccttttaaccccacttcttttatggatttttcagtttgttcagcattttacttgttaggatggagtggcaatttccaagctggaagcagaaaccagaagccatgagtgctttcttcagactacagagctcattatcatggttctggtgctttaaaaagttgctttcaaggagtgaactgtcagtctgtctgaaattgcttttcaaaacctaaagtattattggtgaatcattacaaagaagtaaaagcactatcaatgtaacactgcaagaggaaaagccaaaggagaaaaggtcttatttgactaaacagaaatcaaatgttttcttttaggtcttaagacacgtggacatgctttaaacttttctatttggtttggactttgatttacccagggaagaactggcaaacatatcaaaacctattatttccaattggcttctgcttatttatgcagtaattatcaagattatatgacaatctgttttgatcattaagacaatcagtggtaacccagaaagcactgactttttcaaaagtagatttgtttgatttcctctctgagtgttgatgtgaccttgc

SEQ ID NO: 508148 - DNA, 469 bp, Homo sapiens
tcacaacaggcttctagatgtactgaaatgtaacacctttcttctatttttaagtgcatagtctttactttttcaaataacttaggaatattattaataacagtaaccataataatggctatatgtatgatgcctaccatgcagcaggcacatttctgtaagctttaatcttcccagcagcccaatggcataggaattattaacataaataactcaaaagagcagagtcaggattcaaattcagacagctgggctcaagggtctayaatcttaatgattaaacaaaactatctctctgagatattaaaatttagtacaatttttattatgggattctctaattcttcattatcaccatttcctttatttgctaaaaagtaggaacagttagataatgaggttggcaagccttttgccttttctatgtgagtcaaacctttttgaaaaccacaacagtagatgatgagat

SEQ ID NO: 508149 - DNA, 678 bp, Homo sapiens
ttcctcagtctccagccagtcagcaccaaaagcccaagaagctatacrctacaaattcctgccttggggaaaactaaggatgtctccagggtcccgcatgtgcagctaggcttgggttttacctgtgagtgacattttcctcattttaatagtaaaaaacacacctctaggtggatattttacatgttaatgacacatgcaattcatgttaaagcatgtaaatactgagcacatgctccaactgcatgtccacttttgcattcttgatatcaccagtattttatgaatatgtatgaatagcttgcgtaaagggaatccctcttgaggcactagctgctgtcactaactttgagcagcccactctgcttctctcaatgtgctttggctttgcaatacacttctttgcctactcttactttggacttcctctcagattcttttgtgtggcaaagtcaagaacctgaaactgacaatgtgacaaaactgttttacaaaatagagcaagtttatattgttagttgtttaaaacaagggacctctttctaggatgggattgcaaattatagggattagtgtttctgtaggaaagtctttcccagcattttttggaaaatttgtttttccaaattccaatccacagaaaaatcgttgataaactgagaaaatgcagaaaagcat

SEQ ID NO: 508150 - DNA, 317 bp, Homo sapiens
agttggtggtgaagagcttcagggtgggtgagatgcatctgggaggtcctagtgtgtacaagctcagcrtctagatctctgatgaggcactgctgacaccaagaacaacaacctcaggggccaattggagcgatgcgactatgaccaagcacgtggtaatgcttaactagctaaactgtctcatagtcctaatcatctccatttcacagatgcaaatgttgaggcaagttaccttgctcaatatctcctaggcagccaatggcaggaaccaacatgttactacctagtcctctatacctacttttattgaaaaatta

SEQ ID NO: 508151 - DNA, 654 bp, Homo sapiens
tgtgactgacctgatttctgtcattacaaattagtttccattttcaagggttttatataaatggaatcatctagtaggtatttatttttgtctgatttcactcagattgattcatgctgttgtgtgatctgtagttcattccttttgattgctgaatagtattccatcatctctgcttttttctctgtattgttttattctttctctgctgcctatttcttgcagaaaaaacctggctcatggtagttccgaggtttacattttatgattacctccaccaagaactgcctgattctctttctggtctcaagttcagaaattcctggaaaggtttttgattggctctctgttgggtcagagcctcaaccctgggccagatatctatggctggacgggcaaggcttcatggagaacatagcaaagccacgagtatcatctggatgtttgtgcccagccttcagatcacacaggaccatccttctgacctttttcctggccccgctcctcagattcacactgaaattgtgaaargcgagtattcctgtagaaggcttcagtttagtattattttcatttcccaaatttctctgtcctttaggatatatttctgttttggctgatagctcagtgatttacacagttttaaatattctg

SEQ ID NO: 508152 - DNA, 575 bp, Homo sapiens
tggcagttgtgttagggatgtgtgaggcagaatagaatcctgggtctgcaggagggcaggcctgtttgtcaggacaacttcaaggcgccgcaggaagcaagtgatgtgatgtaagggcgagagttatttttacagaccactttctagccataatcactccttaaataagtccacttgggcattacaactttaacattctatttaggctaattcagctctcaatgatctgtacaaaaggagggaagtattgacacagatagtggaaaacagtgacacctcatttatttaggtcaccactaayatggaatttataataatttcacccagacttgattggagtttacttgtatatgttttgggaagagagcatttgttgaaaaatattcaaaatgggttagcctacttaacaaggtaaactgctttcaaatacttaagcaaaacagtaaataaacttttattgggcacttactatgtgctaggcactgtgctaaacccttcacatgtattgttagccataatccattcagtcaccttactagataggcactattatgaaccccatattgtaggtaacg

SEQ ID NO: 508153 - DNA, 453 bp, Homo sapiens
aactctggtttttcagacgattcagaatatatttgggtggctatatagcaatcttggccacagtgttaatttatgttttctctctgatgactttttttttttttttgagatggagtcttgctctgtcacccaggctggagtgcagtggcatgatcttggctcactgcaacctccacctcccgagttcaagcgattctcctgcctcagcttcccaagtagctgggactacaggcacgygccaccaggcccggctaatttttgtgtttttagtagagacaagatttcactatgttggccaggctggtctcgaactcctgacctcaggtgatccacccacttcagcctcccaaaaagctgggattacaggcgtgagccacggagcccggtcactctctgcttatttttattttctttttcttttgtttttaatactttgccataatgtgcctagtt

SEQ ID NO: 508154 - DNA, 600 bp, Homo sapiens
aactaactgtccattgtcattgttaatgttacttaacctctttaatcctctgtcgtgaatccaataacgatcaaagtagtaggcaagtttgctgagggccaactgtgtgacaagcactttgataactgattggtctttacagcaaccttatgagagaagtattattactctcatattatgagtgagaaaaataaggattaaagaggtacaggcaattactcaagaacacagggctagcaaatcaagaaacagaagttagatgtgagatattgtatcacccaggcctaaaagatgcaatgaaacaacccattttaaatgtttaatatagtaaccagagtatactctcatttgatgagagtatactcatcaaatgagagtatgcatttgatgttacttttcacagtggcctttttgcrgttaggaaacagcagcaccaataatagaactaagctgtctgactcccagcctgtacctaaatctctaacttttgattttatgaaataaatttgatttgcagatgggcattgctggtgagggaaatgtaaagaggtcaatttccccactttaaatttttttggctaaagacccatagctgacaat

SEQ ID NO: 508155 - DNA, 538 bp, Homo sapiens
cggctgtggtgaggcgcctaggcgttggagatgtctgaaattaatggaaaagcgagtgacagattctgatggcagtggccatgagcgggattgttgtgcaggtaagtttggatcaaagcaccctaacggtgttcaacaaagactggagaagaaagaaagctgcattactttttcttggcgcattcttcctttaggacctatagtgaggtaagtgacacaaatatctctcattctctgtttccaaacagtaaatagaatataaatagttcacgaacaagattaaggaagtgataatcatcgktcctctaactgaaatgcaccctctgtttagatttatttacttttcacaattttgaaaattttcccatgcaatttttatcagtcataaggtaatgatagttttttaacaatgcaaatgggattaagtcagtcgttttttctgttccttttaatattattctaattcagcctcatgggcattccaaatagttatgagggatagaaatataacattaaattaagggatgagagtagagtg

SEQ ID NO: 508156 - DNA, 585 bp, Homo sapiens
ctgggtaaactgagtcttagagaagttaaggtagtgctagatattgtaacaaacaaayacaaaaatacataatgtctcaaatatgctagaagtttcttttacaccttacataaagtccaaaacaaaggtttctagtgagcaggtgctctcttccagcagagaagctggaatgtctcatgcttggccacccctaccacgtggtctacaagattgtggaaggggaaagggcatgggggaacgtatatgatatttttatagatggtagcacatttcacttacattcatattccattagctgtatgcacagtaaaagaggaagtgcattcaaggaacggcaaacctgaatgccagggtagttaagtaacttggcagggtcctgcagcatgtaatgttagtgagtcctgggggactagggctctctctcctgttctgggaaaagaaggcctttgctggcctctcaacccttcaggttctcagcatcccaacctctcacctcgggtaaacccagcctccaaaccacttggctcttagcccagcctaacctggtgtggggacagtaccctgcatcccccacattcacaaagt

SEQ ID NO: 508157 - DNA, 585 bp, Homo sapiens
ctgggtaaactgagtcttagagaagttaaggtagtgctagatattgtaacaaacaaacacaaaaatacataatgtctcaaatatgctagaagtttcttttacaccttacataaagtccaaaacaaaggtttctagtgagcaggtgctctcttccagcagagaagctggaaygtctcatgcttggccacccctaccacgtggtctacaagattgtggaaggggaaagggcatgggggaacgtatatgatatttttatagatggtagcacatttcacttacattcatattccattagctgtatgcacagtaaaagaggaagtgcattcaaggaacggcaaacctgaatgccagggtagttaagtaacttggcagggtcctgcagcatgtaatgttagtgagtcctgggggactagggctctctctcctgttctgggaaaagaaggcctttgctggcctctcaacccttcaggttctcagcatcccaacctctcacctcgggtaaacccagcctccaaaccacttggctcttagcccagcctaacctggtgtggggacagtaccctgcatcccccacattcacaaagt

SEQ ID NO: 508158 - DNA, 585 bp, Homo sapiens
ctgggtaaactgagtcttagagaagttaaggtagtgctagatattgtaacaaacaaacacaaaaatacataatgtctcaaatatgctagaagtttcttttacaccttacataaagtccaaaacaaaggtttctagtgagcaggtgctctcttccagcagagaagctggaatgtctcatgcttggccacccctaccacgtggtctacaagattgtggaaggggaaagggcatgggggaacgtatatgatatttttatagatggtagcacatttcacttacattcatattccattagctgtmtgcacagtaaaagaggaagtgcattcaaggaacggcaaacctgaatgccagggtagttaagtaacttggcagggtcctgcagcatgtaatgttagtgagtcctgggggactagggctctctctcctgttctgggaaaagaaggcctttgctggcctctcaacccttcaggttctcagcatcccaacctctcacctcgggtaaacccagcctccaaaccacttggctcttagcccagcctaacctggtgtggggacagtaccctgcatcccccacattcacaaagt

SEQ ID NO: 508159 - DNA, 585 bp, Homo sapiens
ctgggtaaactgagtcttagagaagttaaggtagtgctagatattgtaacaaacaaacacaaaaatacataatgtctcaaatatgctagaagtttcttttacaccttacataaagtccaaaacaaaggtttctagtgagcaggtgctctcttccagcagagaagctggaatgtctcatgcttggccacccctaccacgtggtctacaagattgtggaaggggaaagggcatgggggaacgtatatgatatttttatagatggtagcacatttcacttacattcatattccattagctgtatgcacagtaaaagaggaagtgcattcaaggaayggcaaacctgaatgccagggtagttaagtaacttggcagggtcctgcagcatgtaatgttagtgagtcctgggggactagggctctctctcctgttctgggaaaagaaggcctttgctggcctctcaacccttcaggttctcagcatcccaacctctcacctcgggtaaacccagcctccaaaccacttggctcttagcccagcctaacctggtgtggggacagtaccctgcatcccccacattcacaaagt

SEQ ID NO: 508160 - DNA, 620 bp, Homo sapiens
gcttatactacttgacttgggtcacagaatataagtagaaaactcatagcctctttagacctttttttttttttaatttagaatttcctatcgatagctgtagggaaaggggctagaaagtatctgaataagyctgcatagacaagaaatgcaggactagactgaaaggcaaatctgggcatagaaaggaccacattagggtttttactgtttgtaaacaaaggaaaaaataggtcttgaaggaatactaagtaggtcacagtgggaaccctaatttaagttatttctgcactgctatttatcttcatccaagcccaagacacgtgaaatagtgtcagttgctaactccccaccaaccagcacatctgccccatctttaaagtgtatgtcttcctaagattcacaagagatcagaattccagagattgacatattagcatgattatcagttttcctaagtcattttctctatttcctatacgtagcatttgcatacatacaacttaaagtcccagatctggacactgattgctttgggacgagtgtggccccaggattttatttgggatcacatcatcattagtcgatgacaccaccaccctcatcagcagtactgcaat

SEQ ID NO: 508161 - DNA, 620 bp, Homo sapiens
gcttatactacttgacttgggtcacagaatataagtagaaaactcatagcctctttagacctttttttttttttaatttagaatttcctatcgatagctgtagggaaaggggctagaaagtatctgaataagtctgcatagacaagaaatgcaggactagactgaaaggcaaatctgggcatagaaaggaccacattagggtttttactgtttgtaaacaaaggaaaaaataggtcttgaaggaatactaagtaggtcacagtgggaaccctaatttaagttrtttctgcactgctatttatcttcatccaagcccaagacacgtgaaatagtgtcagttgctaactccccaccaaccagcacatctgccccatctttaaagtgtatgtcttcctaagattcacaagagatcagaattccagagattgacatattagcatgattatcagttttcctaagtcattttctctatttcctatacgtagcatttgcatacatacaacttaaagtcccagatctggacactgattgctttgggacgagtgtggccccaggattttatttgggatcacatcatcattagtcgatgacaccaccaccctcatcagcagtactgcaat

SEQ ID NO: 508162 - DNA, 620 bp, Homo sapiens
gcttatactacttgacttgggtcacagaatataagtagaaaactcatagcctctttagacctttttttttttttaatttagaatttcctatcgatagctgtagggaaaggggctagaaagtatctgaataagtctgcatagacaagaaatgcaggactagactgaaaggcaaatctgggcatagaaaggaccacattagggtttttactgtttgtaaacaaaggaaaaaataggtcttgaaggaatactaagtaggtcacagtgggaaccctaatttaagttatttctgcactgctatttatcttcatccaagcccaagacacgtgaaatagtgtcagttgctaactccccaccaaccagcacatctgccccatctttaaagtgtatgtcttcctaagattcacaagagatcagaattccagagattgacatattagcatgattatcagttttcctaagtcattttctctatttcctatacrtagcatttgcatacatacaacttaaagtcccagatctggacactgattgctttgggacgagtgtggccccaggattttatttgggatcacatcatcattagtcgatgacaccaccaccctcatcagcagtactgcaat

SEQ ID NO: 508163 - DNA, 542 bp, Homo sapiens
ctcagctgcttagctgtgtgtgcaggaaggccatgcactttaccctgatagcagcaaatccctgggggcgaatggtgccacagtcaggagagatggtgaattcttttggtttcattgaggatatttcttccttggtccaagacggtcttttgtagtccacatgctgctcacaatatgaaatgcttttatggccaaggccatccccagggatacgcagtttgtaagtcatggggatcaaagaggtattattgagggaacatatcaaggtatgaggaaaccctggaaaacaaaacatgatgtgagaaataaaagcccccccaacacctcccttgaccctcaatctcccctagaaactgctaagcttcttgaatgaactgtctgtgctattcattactacttaactccaacttgccctaaatattattgtttyattccatcaataaatacattttcattcattaatgtatctattttttcatttatgcattcactcaatgaatatttactatgcatttactatgtgggagattaaacaccacata

SEQ ID NO: 508164 - DNA, 542 bp, Homo sapiens
ctcagctgcttagctgtgtgtgcaggaaggccatgcactttaccctgatagcagcaaatccctgggggcgaatggtgccacagtcaggagagatggtgaattcttttggtttcattgaggatatttcttccttggtccaagacggtcttttgtagtccacatgctgctcacaatatgaaatgcttttatggccaaggccatccccagggatacgcagtttgtaagtcatggggatcaaagaggtattattgagggaacatatcaaggtatgaggaaaccctggaaaacaaaacatgatgtgagaaataaaagcccccccaacacctcccttgaccctcaatctcccctagaaactgctaagcttcttgaatgaactgtctgtgctattcattactacttaactccaacttgccctaaatattattgttttattccatcaataaatacattttcattcattaatgtatctaytttttcatttatgcattcactcaatgaatatttactatgcatttactatgtgggagattaaacaccacata

SEQ ID NO: 508165 - DNA, 562 bp, Homo sapiens
tgctgtcggggctattttgagttgatctacttctgcctcatgwctcagcttttgtctacacattaggccattggaggaaacacattcatgtatcctttgtgataacacacctgccaacctacttggaagatatctttcatggaaaaagaactgtgagattgagtgcacttaaaggattattcttggaaattccagaggaactgcttggaaggcagcttcacaatcatgctacatgtgactttcctggacttaccaaataatgactctggaaactgtagatggcttagccttatttgatctgaccatttatgagttagacgatctgtgaatgtggagcgtattatggaaagtgggtattataaagagtcacgtggtcttccaaaccattgcccagactgcttccttaaagccagaactttttcacagaataaagccaattatgacctcctagttacaacaatttcttgtactagtacctgtaatatcccatattgcttgtcaagaagcctaaaggaaggggatgctgatttgttaaagactgaaggtcattaataagaatgtt

SEQ ID NO: 508166 - DNA, 562 bp, Homo sapiens
tgctgtcggggctattttgagttgatctacttctgcctcatgtctcagcttttgtctacacattaggccattggaggaaacacattcatgtatcctttgtgataacacacctgccaacctacttggaagatatctttcatggaaaaagaactgtgagattgagtgcacttraaggattattcttggaaattccagaggaactgcttggaaggcagcttcacaatcatgctacatgtgactttcctggacttaccaaataatgactctggaaactgtagatggcttagccttatttgatctgaccatttatgagttagacgatctgtgaatgtggagcgtattatggaaagtgggtattataaagagtcacgtggtcttccaaaccattgcccagactgcttccttaaagccagaactttttcacagaataaagccaattatgacctcctagttacaacaatttcttgtactagtacctgtaatatcccatattgcttgtcaagaagcctaaaggaaggggatgctgatttgttaaagactgaaggtcattaataagaatgtt

SEQ ID NO: 508167 - DNA, 638 bp, Homo sapiens
ctatgaggaacagctgttgatttttatttctatagctcaaggaaactatggataaattacccaatgataatctttcctgcgtcctaataaaggaggcccaaatggaagatggttaagggaaaaacctatctaaccttggagcatgcgtacctggtttcgtgtgagccagagctccctaacatcaaaaatcccattctagatctgatggagaataatgttatcagtgtcattgttttgaggatgaataagagcctttaaattgacacacaggttattctttaaatggacacacaggttattttcttatttggcatacagcatataggaaaaggaggcgatgatatgagagttctggcaaacaggaagaggaagtggaaaggctactccttttgtctcagttgagtatgggaaggggaagaataacagagtggccacatgtgtacatcatggcatctgccttacaggccagaatctcagggatagggtggctaaataggttgaggggatgttggaagcaaagggacttctgcctggctttcttgttgggartctcagagcagaccacttcacagaatattctcatacctgcctggggcagctaactcaggataaaaatggtatgcttacgctgaaaggga

SEQ ID NO: 508168 - DNA, 597 bp, Homo sapiens
catgtgatttgctaatgctttaaaatcaatgttcataagagagatgggtctatatttttcttttcttgtgttgttttactgtgaatatatttgtctcctaaaacgagttaatagctttctacatttttctgtgatgtgagatacatccatttcttcaccatttggtagaactcacttgtaaagctgtttgacctagtgtcttttcttcaggggtagatatttgacttctttttcagtatattctatgattatttttctattcaggttttctactccttgyggtaattttaataacgtatgttttcccccaactcatccatttctcctattttttaaagaagttgtatatagcattctcttatctgtttttactgccttaaatatctgcaattgtatttctttcctggttcctaataagagttatgagggtttttttgttgtttatttgtttttttagagacagggtcttgctcttttgcctaggctagattgcagtggtgcaatcacagctcactgcagcctccaactcctgggctcaagagatcctcctgcttcagcctcttaggtagctggggcgacaggtacgtaccactacac

SEQ ID NO: 508169 - DNA, 567 bp, Homo sapiens
taagagggattcaagatggccacgcccagcttcctagccacagaaaccaggagagagtgatgtcatgtacctagatagggaacacaggaggaagaaaaagtttgctggagaagaaaataaattgggttgggtttgggggaggggggttgttttctttctttctttctttctttctttctttctttctttgttttcttttttttttttttttgagacaaggtatctctctgtcacccaagctggagtacagtggcaccatcatagctcactgcagcctcctgggctcaagcgatcctcccacattcgccwccagagtagctgggattacagacatgcaccaccatgcctggctaatttttagggtctcgctatgttgtccaggctggtctcaaactcctggcctcaagcaatcctcccaaagtgctgggattacaagattgagccactgtgcctagcctgaattgagttttggaatcgcatagtggggaggtctggtgtggccttcctacaaaaagttgagaattctggctccatcaggttatttgaggaccttcagggcaggcgagc

SEQ ID NO: 508170 - DNA, 602 bp, Homo sapiens
gctcagcaagcatcttttatgctgtaggcactggcaaagtgcaaataaagaaagcagaatccctgcactaagagtctgatgaaggagataaccacatttgcaaacatttgcaataaagtgaaattagttacaaaagaagtgtgaaaagggaattaggctgagccacagaaaattgccaaaattcaatccttttagaactccataacagcaatttcctatggctcaacctaaattctaaaggaagttaaggatgaaaccattaatcyaagttgtgggagggctgcagggggagtcctggaacgtcagaaagaagttgcagcatttgagcaatgcgccaaggaacttagcagtctcagccaactggccggtgctgctgaagccagagacagtgggtgcagtgagtagtgagttgtaggtggagaagtgaaatcaagtgagtgtaggcttttatgatgtttgaaagtgaagggaaaaaaatgagagagtagtagaggggcaaagccagggtcaggagagtccattctcagaaaagaagtagaagcaggtctataaagaatggaacccctggagaagtgtcatgtggcgatccactcaagagggaa

SEQ ID NO: 508171 - DNA, 515 bp, Homo sapiens
ataccaaattagccctttaaataggatctttcttaataaagcttctcattgccctcactactgaagtaaaaaacgtgttagagatttggccagaaagatggttttactgaaataagactgatgactaggagcacatctatggattaaatatagacaaaactactcccagaaaccttaaatatagacagactttattaatttatgtaggaagccaaaaataggaaataaaaagatcyggagttcagatatactgatatattcagcaactgaaacttacaattccttcaattcagtcagagcagagacatttaaagtagtctggaggggtgggtgcagtggctcaagccagtaatctcagcactttgggaggctgaggtggaagaattgcttgagcccaggaattcaagaccagcctgggcaacaaagcgagactcttgtctaaaacaaacaaaaaaaagctgagtatggtggcacgtgcctgtagtcccacttagttgggagactgaggcaggagg

SEQ ID NO: 508172 - DNA, 311 bp, Homo sapiens
ttccacccaatttctacctttccttttctcagctcccctgccacacaccattatggcatattataaaggctgataaggaaagaggctggacctttctttattcaaaagacagttctaattctagacaaaagatatgatctcctagaaacaygggtttatttaagatgacttcacttgagttgataccacatgggtcttcttcattcaatgaacccttaatcttttgttgggcatagagattggcttctattttttttttatcacaaatgaaaagatgcgatagtatatgttggaacccatgacttgcctta

SEQ ID NO: 508173 - DNA, 571 bp, Homo sapiens
tggaaacatgaagcaatagcagcctaagggacagaacacttagaagcacagaaaacatgtctcattcaatctacctttcccaactacgttaggttagccttgggatgttaaacctgccaaactattcccaaggctcagcctaatcaattttgggacattctctcccaaaaggagaaatcacatctctccagtttctcacacaaaaaaagcatttgcagcattatccaatcctagcctttcctatttctrggccctacctggactacagggagtgtgtggaagtgtcaatctaacgaaataaataaacttagagccccttttcaacctacattaccttctcagcagcccccagcagaatcacagtcatttctggctagcaagctgagaagatctgactaggtgcccatttcatccctgcctataatatataaacgtccagtggttgaggaaggggaggagaggggggctcaggttaccccgcaagcttgctggtgacgagcgaggactttctctggggcagatcctgtggggtggggatgtgatcaccagtcaccaggttcttgtctggtcc

SEQ ID NO: 508174 - DNA, 444 bp, Homo sapiens
aaaatggtgtagtatttgcaaatattctattcatatccccctgtatgcattaaattatttctagattatttacaatacctaatacaatgcctacacatcatttcattcacatgaatttagcataatatttggcacatggaaaattcaggttttcctttttcaagctttgtagaattttgtgccaaatatttytgatccatggttgtttgaatctgcagatgcagaacccatggatacagagacaactgtaattgtttatcactttagaactctcaggcaatgaaaggcttcaatttatcctaagaataaggaaacagtgtcaggcacatgtacaaaagccattcaagatatttacttgaaatctatttgaaggtgatcaagggggaactgaaatttgagccttttctacatcccacctttacagttttaccaaattgtgttagt

SEQ ID NO: 508175 - DNA, 449 bp, Homo sapiens
ttgtcgccaggctatactgattcttcctttcaataacattagtacctgtcactctccccatttccaaccacatactacctttctgactccgatccctgaccaactgggattcctttcctggattttccccaaattaatttgtcttttacattggtatgcagttatggaaaaaagaatggttctgcccacacagaaactggacccatcaactcggtctcctaaatcataaccawctgaatatattttatttacctttctctcttttttaattgactccctcaatcctctcagccatttattgatccttccttttcttcatctctcctcttcattttccatttcccccgttacttctctattatcctacatgcaataaggaaaaacatatggcacaaccaagattgaaggaggaggaaattagacttgaagaaggaatgcagacctaatct

SEQ ID NO: 508176 - DNA, 449 bp, Homo sapiens
ttgtcgccaggctatactgattcttcctttcaataacattagtacctgtcactctccccatttccaaccacatactacctttctgactccgatccctgaccaactgggattcctttcctggattttccccaaattaatttgtcttttacattggtatgcagttatggaaaaaagaatggttctgcccacacagaaactggacccatcaactcggtctcctaaatcataaccaactgaatatattttatttacctttctctcttttttaattgactccctcaatcctctyagccatttattgatccttccttttcttcatctctcctcttcattttccatttcccccgttacttctctattatcctacatgcaataaggaaaaacatatggcacaaccaagattgaaggaggaggaaattagacttgaagaaggaatgcagacctaatct

SEQ ID NO: 508177 - DNA, 580 bp, Homo sapiens
ttaaagaatggttgaaggatatgtgagccttttgcctatttttcaaccatgattttaaaaatccaaaagtaattgcccccaaaaggcttaagtctcagcaagttctttgaagtctatgagctgatagatgcaagtacacatacagagaggaagcagtggttgaggtaaaagaaaaccagtaacatttttcctaaatactatatggtgatttttaaaatgtttactctttccccaaagcaagataaaaaaaaaaaaagcttgtcatttgctttttaaaactaacagagcagaaaagacactctgccatgaaaagtagaattactcagtaggaagaattaataagaacatatagagtgaataaaatttggttaccccatatgccatatgcaccccccmcacacacacacaaacagacacagacacacatacacaagcaaacatatttataacaaaataaataagaaatactcataacattatagttcttatttctacaatgggtcaaatgtttatagcttatacttataactaggttcttccactaccaggtctatattatctttgccctcagcaagtacct

SEQ ID NO: 508178 - DNA, 627 bp, Homo sapiens
atagccacttctttctaccttggtgctccctagactttatagatactatatagtcccttttaaagtgtttattgcctatttctctcaactaaactttgagctccataggtcttatttgctttgttccctactctttttccaagaagggagaacagcatgtatatgatgttcaaaacatatttaataaataaaagaatagacataaataataatatagcraaacaaaggtaaaacatctgagtttgtgttcaattttgtcttttattagtgaagacattattgtaaagatattacagctggcctaacaggtgtcaacacaaatgtttgaagctcacagataaaaggttttggggtggtatgtgtatgtcacaggggcagggggtatatttatatttcctttccagagacccaatggctctgcagtaggccctagaggttacacagacataaatcatggacctcaccgaaggcagcgtgtgtgacctgggaagcttgaactccagctggagtttgaagaggccaactgaattaccacatgctgataagcagtaagagttcaaaactgattttgagaatctgctaattttaattatatattttaatccattccccctttcttttttgatt

SEQ ID NO: 508179 - DNA, 627 bp, Homo sapiens
atagccacttctttctaccttggtgctccctagactttatagatactatatagtcccttttaaagtgtttattgcctatttctctcaactaaactttgagctccataggtcttatttgctttgttccctactctttttccaagaagggagaacagcatgtatatgatgttcaaaacatatttaataaataaaagaatagacataaataataatatagcaaaacaaaggtaaaasatctgagtttgtgttcaattttgtcttttattagtgaagacattattgtaaagatattacagctggcctaacaggtgtcaacacaaatgtttgaagctcacagataaaaggttttggggtggtatgtgtatgtcacaggggcagggggtatatttatatttcctttccagagacccaatggctctgcagtaggccctagaggttacacagacataaatcatggacctcaccgaaggcagcgtgtgtgacctgggaagcttgaactccagctggagtttgaagaggccaactgaattaccacatgctgataagcagtaagagttcaaaactgattttgagaatctgctaattttaattatatattttaatccattccccctttcttttttgatt

SEQ ID NO: 508180 - DNA, 517 bp, Homo sapiens
ttgtccattagaattctccgtactttttttgtttgttttggtttgrtttgggggtttttgttttgttttatttgtttgggtcttcaggtccaaaggcctagtgatcccttgtacctgaaatggctttattgtccttatatgtcactgccacaatttccctcattactattatatgcattttatgatttgactttgcaattactcccataaaaaggaggagtcaatttctcctccttttaatatgtgctggccctgtaacttgctttaccaacagaataatagagtaatatgatatgcttcctaagtccaggactcaagaggctgtctagcttctctcttgtcctcttagaaatcagatgctatattaaaaaagtccatagtagcctgctggagatagaatgtggatggtattgacataccctggctgacagtgtcagccagttgccagcaatgaaagtcatccaggaccaaccagatgacctgccaaatgacccacaacagcatgaatgagtccagc

SEQ ID NO: 508181 - DNA, 633 bp, Homo sapiens
attggagctacatcagcatcatttggctctatggtcccagctccatagatatgagagcagttctatgtgtctgtggctcatgggctgggccttcaccttaaactgtgtttaatataatcagtcagaatgattttagagaaaatgctggtttgtttgagagctttttttttwaaaaaaaaaaaatcacctcataggagacgtcagcaagatggtggatagaacttccagcactcgccccctcatagaaacataaatttgaataactatctgtgcacaaaaataccttcacatgaactaagaaatccaggtgagctattacagcacctggatggagcacagaaataagacgcattaagagattaggaaagatagtatcacattatgtatgtcacctctcccctaagcccaggcagtatagcatggagacagagagagagagataccctttgtgtgggaaaagaagattaaagtgagcacctaactttgctgtggactccagcaccagacctgccccagtgaaccctggtaccaggccagcccccaaggcctcatattctagtgaatttaggatccaggcttgccccagtagatccgggctgcatactttcctctagtagtttttgaatcttacat

SEQ ID NO: 508182 - DNA, 661 bp, Homo sapiens
attggagctacatcagcatcatttggctctatggtcccagctccatagatatgagagcagttctatgtgtctgtggctcatgggctgggccttcaccttaaactgtgtttaatataatcagtcagaatgattttagagaaaatgctggtttgtttgagagcttttttttttwaaaaaaaaaaatcacctcataggagacgtcagcaagatggtggatagaacttccagcactcgccccctcatagaaacataaatttgaataactatctgtgcacaaaaataccttcacatgaactaagaaatccaggtgagctattacagcacctggatggagcacagaaataagacgcattaagagattaggaaagatagtatcacattatgtatgtcacctctcccctaagcccaggcagtatagcatggagacagagagagagagataccctttgtgtgggaaaagaagattaaagtgagcacctaactttgctgtggactccagcaccagacctgccccagtgaaccctggtaccaggccagcccccaaggcctcatattctagtgaatttaggatccaggcttgccccagtagatccgggctgcatactttcctctagtagtttttgaatcttacatttcacatcttatgtttaagtttttaatc

SEQ ID NO: 508183 - DNA, 667 bp, Homo sapiens
tttagtctttgacctaaaaatctatgatatggcttgtaaaattatatcagctaatttaactccaaagttctattgtacttcaggcaaaaatgttaatccctactctgtttcttattataaatgcttcagagattagtaaaactgtaaaatgtggggaaaggctaaagggccattttgtgacaagtagaatgtttagggatatgagcatctttgatcatattatccctgttctatgtcataatttactcttccttcaaggttaactgcgttaatatttatgtgctcagtagatttcaacttrgatggcatttcctccagaatgctttgcttaaacctccttggcgtggttggttgcttctgctatttgacccccttctgtcctcaatttgtaccgcattgtatgtacctttgtcaaagccctattcactcttctgaaagtaaattctagcttccttgtctaactccttcctgaaatatatgccctgtgagtatgtatatcatcatgtctattttgttcactattttatctcctattagcatggtaactctgcctttaataaatttttatcaaatgaaagagtgattcattttaagagaatagaagccatgaagtcttcgcagcatgaacatttagatgtagtgtttgggaattcacaggtttcagatt

SEQ ID NO: 508184 - DNA, 553 bp, Homo sapiens
aaacttgtcatggcctctgagggcccacaggactggccctgcccacctcgtcaactgcaggtcactcacctctccttcagactccccttgcttcagcctcctttctgttgggtgaggctrcccagctctctccagcctccagaccttggcctttgctgttccctgctgtcccccgagcgcaatgtctggagggcttcaggatgccccggcagatctctgaacctcacagagggctctctggaaaataagggccctggctctacctaggagcccccagatttcatgaatggcatggatggaggacaggtggctagtatgggcggatagctgaggtggcttggccagcatagggcatttggattaggaaaaactgaaagaactcaaaaaggagagaactggccctttacccggtctgagagagcctcacttgccctgggattccaggtatgaggcagtgttaattcctcctgcggtgcaccctccctccgtggactaatacccacccacaggggcaccttccactccttccagggcccctcttctctctcttttt

SEQ ID NO: 508185 - DNA, 498 bp, Homo sapiens
  misc_feature (1)...(498): n = A,T,C or G
gtgccttggccaggggcgtgcgtgtagactgtcttcatgtctgggcaaggagctggaggaaccctgcctgcctcggttcagacgtctctaccgcacccactcactgcaaatgtagagtgatcagcttccaggctctcggtgtacccacattgctaaagccaggggttcagggtgactaggaaggactgaagggcaaggatcagacttganaaacatgttaaattgctaatagtctgattctaggggtgtcaaagtccctttgtgatacagtgagttgctcccagacacagaccaaatgccactacaggacggaagctgggcaggcagcgtgacagtgaccagcttcccaggcaggaaggtcccaygggggtgctgcactgccttaagtttattaagctgtgtctgagtccaccatgcgacgtctctgccctcatgcctgggctgctaaaggaaaaataccagctaaaaggatggtgtttgatgtcaactgggagggtg

SEQ ID NO: 508186 - DNA, 594 bp, Homo sapiens
tgttactccctgtgttagtcagggttctccagggaaacaaaaccaataagatgcatgtgtataagagatttattgtaagggacttggctcatgcaattatggaggttggtgggccactagatctgtagtcagcaagcttgaggagccaatggtgcagttccagtctgaggctgggaggctcaagacccaggaggagctgatgtttcaattcaagtccaaaggcaggaaaaaactgatgtcccagctcaaaggcagtcaggcaggaggagttaccttttactcagccttttygctgtcttcaggacttcagacaactggatgaggcctacctacaagggggaggacgatctgcttcccttgatccatcagtttaaatgctaaggtcacccaaaatgccctcacagaaacacccagaatcatgcttgaccaaataactgggcaccccatggcccagtcaagctgacacataaaattcatcatcatgctatgctggagttaaaattctttataaagttgtccctcactttccccttcctgcctaacatggcctctctctgtcacctggagtctctccaagtacggctcccgggccac

SEQ ID NO: 508187 - DNA, 438 bp, Homo sapiens
ttcctatttttaattatgaatcttgaaacaggatgaattacaagaatagatctcaggcggcctaaagtctgtgtccaccaggctatgatacagctgcaratcatttttttacaagttacgtgcacctggtaaataggtagattagtttccagaaaagttgcaataggccaaaaaggtaaaaaatgaaacaaaacagaaacctagtgagagtgggaaatgcaagcttaagaatctagataggatatttatgcaaatcaggtggtacctgggtgtaggctgttgctactcataaggttcttttctgttagttgcaaaacagtaatacttctgagtatacgaaatgaataaaggtgttccctctctgcaggacaaattataaaaggatgtaacccttcctcttatcaggaagggcacacacaagacacggccaggagaaat

SEQ ID NO: 508188 - DNA, 528 bp, Homo sapiens
accagaagtctacaatcaaaaagactaagatgcattatactgcagaaaagttaatgcttatgagaaatagacaatcattatttgttgacactactatctaagtctatgtatattatctaccattgttaactattccttaatgaacatgattagaatccctttaagatatacctgacttatgcaggttctaggagtttatgatctgttattgtattatgatttgtatgcatcctccttcaaatctgaccrtggtctatttttcagctattttattaacttttaccaccactaataatatgaagagaaatggtaggaaacaaatgaaattcaagctgaaattctagtaccacttttaaaagctcaactaaaaacaaataggattaagttgaaagcaactgcttaatagcacttttagacttaacttcagttttgctgtattttaacctcatccttcaatattgtgcacagaattattatgttatgctatcaaggctagtggcttttactattttgagactgcagtcaagg

SEQ ID NO: 508189 - DNA, 639 bp, Homo sapiens
acttttgcctgtctcaaaagtgaagttgactaccaaaggacaaatagtttgtaaaattttcgatatcagtagmaaaacatacagccttctaatgggactagcttattcaaatttaactactgaaggctgcattctaatttgaatgtttgacattctaagtaaaatggtaagccacataagtccttttggagactgatatctgtctcttcgcattcattttcctctttcacagggaaagaatttccaggttaatgcaggacttgtgggcatagtttccagcctcccttgtcattcagtgtagccagcctgcggacattctggtcagtgagaagtgataggacagcatacatctaactttggggctgtgctcttattctccccttcctcctggcagaagtgcagagatgatgttagggcctgactggtgatcttaggtgcttcgtgacagctcaacaatgacacaggcagtgcctgagtccctcacactgtgtagctgccttagcaaccccaaggcagcctacacttagaccaggagatgaaagaaagaaacttcagtcttgaaagtagtgttattttggcctttgttatagcggccaaacctatagaatacaaactccatgtttcccctttcctcggctt

SEQ ID NO: 508190 - DNA, 441 bp, Homo sapiens
aagttctaccttctggctttgaggcccttccccctcatccacggccccaacctcttgctggtcataggcagggcctcccaggattcggattctcttctcacactgcttctttgccacagtcagttggttgatgtacctcttcatgttcctrgccctcattgccgcagtttctttacctttgtgcctcttcagttggggaaagctgctaattgtagtcgcttggattatttccactacaatttgataccttgcccaaaagtcagttgttgaaaacgaccagcacacatcttctaccactcttctctaccgttccttcaacagaccttagttgcttcaagaactccacatcagagttgctgttaatgagcttgatgaagtcctcataagaggggctataggtgtaggctctcttgtgatgttcattcatctgctctctgtact

SEQ ID NO: 508191 - DNA, 441 bp, Homo sapiens
aagttctaccttctggctttgaggcccttccccctcatccacggccccaacctcttgctggtcataggcagggcctcccaggattcggattctcttctcacactgcttctttgccacagtcagttggttgatgtacctcttcatgttcctagccctcattgccgcagtttctttacctttgtgcctcttcagttggggaaagctgctaattgtagtcgcttggattatttccactacaatttgataccttgcccaaaagtcagttgttgaaaacgaccagcacacatcttctaccactcttctctaccgttccttcaacagaccttagttgcttcaagaactccacatcagagttgctgttaatgagcttgatgaagtcctcataagaggggcyataggtgtaggctctcttgtgatgttcattcatctgctctctgtact

SEQ ID NO: 508192 - DNA, 477 bp, Homo sapiens
caaaaagttggccctcagtatatgcaggttttgcatcccacaaatactgtattgtcaatccacatttggttgaaataaatttacatgtaagtggactcctgaagttcaaaccatgttgttgaagkgttaactatacttaactttataaataccatcagcaacaaccatattacctttttcctaggaaaaatatctgatggtatttataaagttaagtatatttaaatcctttatctgtcaaatattaattttagaatctgataaggtttaattatttattaaccagattattcctcttctacaatttgactagttgattatgtggcaaataaggacaccaatcacaccaaggtgggttgatattataacactatagggtacctatgacttacaagagtcctctactgagtatgaaaacttgtatcctgccaagtctgcctgaagtccatcaatctttattatacttattttaaagga

SEQ ID NO: 508193 - DNA, 626 bp, Homo sapiens
gtggccactctgttgtgtaatggcatctgtgcctggggaagtctctctgacctccagacccacatggataattgcatgaggatataaaagcagcgagggcccagccacagcttttccaagtactgtgtgatctttggaaagtcaccttccctctctgtgcctccacctcttcctctataaaactgggacactaatatttcctgcctcccaggctgggtgaaataatgcatataaagccctcagttcaggcctgacacaaacgtaagaggaattcaataagtggtaaaacaaactagagaaaaggggaccaggatcaggctgaaagtggttcagacagggtgaggaggcagggtgtggaagtgaggcctattagcaaaggtagagggaacaaaaaaaagaggaggcagaactcccaagggtccatcttgaggagtggggtggaggggaagtgtctcaagggggattccrtgggcttcagaattcaaaacataaggtctcttctagttgagatcagtaaggctttgtgaaaggggaagggcaagtgcatttgcatcacccctcgagatttgcactgggatgcagggaatttcaaaaccacgtgtggaagtagcggagaaagagagtgt

SEQ ID NO: 508194 - DNA, 615 bp, Homo sapiens
agcacaaggtgactacatttagtggtgcccttactacagtccttcagaggcaccgcgaatgacaaatgcttacctgtgatgggagtgaagcacagctttccctccaaggaacacacacggacacatggacacacacacggaggatagtcactatccttggctttgggaaaattcctctttttagatagcagtgaggtaaaaggaaatgaactctggagttaggtctggactgaattattccagctcctctattagctgtgagaatttgggcaggttaacttttctgggccttgtttccctatctgtaaaactgccaaagatgtttctggtggcattgtgtgggttacgttagcagcagcctgaggctttgggtagatcatgggattgatgaaaaggtcccccttctagagtgggagggactccaggttaatctcacttccagccacatggctggtctgcccrttgcttagcctctccgggcctgtttccacatcagtgaagtggggacagcatttctcacagaattgctacgctcagctcttgaccagcagccctgcacttctcttgcctcaacccacaacccccatgctaaggtagctcccatgccttgcccaa

SEQ ID NO: 508195 - DNA, 622 bp, Homo sapiens
ttcacttctcaagatcatatttttaaattacacatgttgagtcatgttttaaaatgataacatcaacaacagtaatagtgaatgagatgtcaattaaaccaatgcactaagcgtttaatcatattttcattcactctttacatggcaagatagtttatttttatsataatatcttcagacaaatttaagattacatttaggtggtaaaatctatattatttatcctgcattccttcaatttcattattttggtacacagggtcaaaatagtctatatttgagtagcctgtggaactaggaggagaaaaaaatcagggacagagtatattattgtcattactgatctacagattatcaaattctactaactcttataagtggtagttactgtcctccaccagatttgttctgtttgtgagacaatgctgctgccacctggcactgcttcctctgttcctctgagtacacagtgcattcacacaaaacaagtccttggatatgtaatgtttgaaacaaatatggcaacatttaagtcaatggtcgaaaagagaaacctctggggacaaaaattcaggttctacgctgaacgtcacatttgttctgagttggcttagaactcaag

SEQ ID NO: 508196 - DNA, 622 bp, Homo sapiens
ttcacttctcaagatcatatttttaaattacacatgttgagtcatgttttaaaatgataacatcaacaacagtaatagtgaatgagatgtcaattaaaccaatgcactaagcgtttaatcatattttcattcactctttacatggcaagatagtttatttttatcataatatcttcagacaaatttaagattacatttaggtggtaaaatctatattatttatcctgcattccttcaattkcattattttggtacacagggtcaaaatagtctatatttgagtagcctgtggaactaggaggagaaaaaaatcagggacagagtatattattgtcattactgatctacagattatcaaattctactaactcttataagtggtagttactgtcctccaccagatttgttctgtttgtgagacaatgctgctgccacctggcactgcttcctctgttcctctgagtacacagtgcattcacacaaaacaagtccttggatatgtaatgtttgaaacaaatatggcaacatttaagtcaatggtcgaaaagagaaacctctggggacaaaaattcaggttctacgctgaacgtcacatttgttctgagttggcttagaactcaag

SEQ ID NO: 508197 - DNA, 552 bp, Homo sapiens
gcaacagcgtgagaccttatttcaaaaaaaaaaaaaagctaaatatgtagtatatagaagaaggtaacagttgctgtggagaaaaatcaagcaggaaaggagatgggaatgttgggagagtttacatctggaaggccttattgagttggggatatctttttttttttttttttttttttgagacagtcttgcactgtcacccaggctggagtgtagtggcaccatctcagctcactgtaacctccacctcctagattcaagttattctcctgcctcagcctcccaagtwtatgggattacaggggtgtaccaccacgcccggccgagttggggatatgtgagtaaagacctgaagaaatgcacgaggacaaactatgtggatatacagggaagagcattccaggcaaagtgaacagcaaatgccatacccaagaagcagcaacacacctggtttggctcaagaagcggaatcgaacaaagtgaagacaataagaaattagattagaaaggtcaggggtgggagaggagagaaagccattgtgatgcctttgg

SEQ ID NO: 508198 - DNA, 477 bp, Homo sapiens
aaaaccccatctctgcaaaaaaatacaaaaaactagccaggcatggttgcacgcacctgtagtcccagctacttgggaggctgaggtgggaagatcacctgagtccagaaggtcgaggctgcggtgagctgtgattgtgccactgcgctccagcctgagtgagagtgagactgtctcaaaaaaatacatatatatataaaatatatatacagattatctattgataaattgtgtttataattttatgaaatgtggataaaaaactgccatatactgtttccttggatatattattagggggaaatctaattagagatcattaagtaaaattgagtaggtgcattttttttcctgacatttttattgatcttaggcatttggcagaatatctgcacttttgttctcagtaggtccagcgccaggcasctcccttatctaataaatggctaatataatttgtcttcagtaggatgacta

SEQ ID NO: 508199 - DNA, 637 bp, Homo sapiens
caatgcaaatatcatgttatactgaacctaagacaccagtggtttaagatgcaccactattatgtaccagtaagagagaataaaatgctgccaattaaactctattccaaatttcttcacaagtagagtatccaactcctctgagtcactttcaactcagaattgaaatatttgttcccatttttcatacgatattggtatccatgtcatcaagaacattgagaatccagcatttatttacaaaacattctaatattrtctttgaatcttcttccaagcaactaacacttgatctagaagctttgatgttgttactttttaaaaaatctaaccagcagatgacaacagtagatttacttttttttccagtaaaccaggatttaccttttcttagtttgttgactgaaactttgaggggttgaagttgaccagttatgccattgtgactaacaacaaaatttatactgcatgggcagtgacacaacattccagtgccaccaggcaacagatgtctgggatgttaaaatgtaaagtatgattgtattagatttgacataatataataactccttttgcatatctgccttcttgtcttaggtgatacccttacctgataatctgagcactgctttcctag

SEQ ID NO: 508200 - DNA, 524 bp, Homo sapiens
gtctcactcctgtctcagtgtttttgcattgagatttttacagtgagatttacaggagaacactgggtcatggtcctactttgttctttttctcattagccaggctcaaaaacrtgaaacggactcaggagacatgatagagagatggaacaccactgttatcagtttgttagtagcttatttatctatggatccctaagtttcatatctagagcctcactggtaaaatgcattcagctttcctgtgtgaaggtagatgtgaaagggatatgcaaagatggctgataatccttcacatgcaactgtttcggctaaaaatcctccaggctggattagagagaaataagttcgaaaaacgccattgttccctcttcagattcattccctccatatttggaaataagtacctttgaagatttttgtacttttatatatttctgaactctcatagtttaggcccatgatatggctgaagcatggatgtacaatttttagttttcccaagaaaaatcatacttgttagg

SEQ ID NO: 508201 - DNA, 611 bp, Homo sapiens
ccagggaacatcagggtgctaataccagaaatgggaatggatatgggccaggcaaaaacaaatgttcaccacgcttaagatattaggacctcactgggtgcaatggctcacgcctgtaatcccagtactttgggagactgaggcaggcagatcacctgaggttagaagtttgagaccagcctggtcaacatggcaaaaccccatctctactaaaaatacaaaaattagccgggtgtggtggcatgcgcctgtaatcccagctactggggaggctgaggcaggagaattgcttgaacccgggaggcggaggttgcagtgagcygagatcatgccactacactccagcctgggtgacagagcgagactcaatctcaagggaaaaaaaaaaaggatattaggaccgtgctcacccagtaggatctgtctgcttgatttctattttagccttaacatgtcaaatatttttacagaattatgatgaattatgataaattgaaatcacgtctgggtgagattcatgatagcaaaatgcgtctagagcaggatttgaagaaacaagctttggacaaccgagaaatagataaaaaaatgaatagtatcaaacctgacct

SEQ ID NO: 508202 - DNA, 611 bp, Homo sapiens
ccagggaacatcagggtgctaataccagaaatgggaatggatatgggccaggcaaaaacaaatgttcaccacgcttaagatattaggacctcactgggtgcaatggctcacgcctgtaatcccagtactttgggagactgaggcaggcagatcacctgaggttagaagtttgagaccagcctggtcaacatggcaaaaccccatctctactaaaaatacaaaaattagccgggtgtggtggcatgcgcctgtaatcccagctactggggaggctgaggcaggagaattgcttgaacccgggaggcggaggttgcagtgagctgagatcatgccactacactccagcctgggtgacagagcgagactcaatctcaagggaaaaaaaaaaaggatattaggaccgtgctcacccagtaggatctgtctgcttgatttctattttagccttaacatgtcaaatatttttacagaattatgatgaattatgataaattgaaatcacgtctgggtgagattcatgatagcaaaatgcgtctagagcaggatttgaagaawcaagctttggacaaccgagaaatagataaaaaaatgaatagtatcaaacctgacct

SEQ ID NO: 508203 - DNA, 600 bp, Homo sapiens
caaagcaatcaaaggtacatacacatttttaaagtaaagtaagaaaaggaataaaaagactataaaacagtagctaaaaagcttatgtggcattttgagcagcatttggatgtgaatttaatttttatgtaatacaactcaatatgtctgaaagtctctttttgtatttttttttattgcctaaatgtcacaactaacaactagtttggagccacacctaccactgcagaggaaatactgtaaatgggtgtgagttggtgtgtgtgcagccataaaacttcaaggactaatttctcaagtataggtataatattgttctcaatagagttcaataaatgcaaatcaataaataaagaacagatattcctctagctaatgttgttcaatagaatatcarttaagaacaaggaagtgaaaagctaaattcagcaagattttgtcatccccttgagtaatattgaaccaagattactactctgaatttgatcatctaacaagtagttctcttaactaagagacacatggtctaaatcagaaactcttaatacacatgccttaggagacccatgagaccattgaacctgctgtgctattccacag

SEQ ID NO: 508204 - DNA, 622 bp, Homo sapiens
tgaagtgaaattattatcaggctttagtgtatatgaatacaacctggacttacttgttagaattggatattcctggaacttgtgacatgcatcccgcagagattctgacccagtatgtgtggggtggggccaagcaagttgcactttaaacaagtacatggggattgtttaaatcagatgttctatagatagtattttttggtaatactggtaggatagactgagctttgaaattaaacaggtgaaatttaaatccttgcttacccattggcttggtaacacctgccagtttcatagaatagatgcacaaattttcaatttcattaatagtcacttcacagagcttccgtgaaggtgcaatgaaaaaacccatcacatatcattacatatatgtaaaggatctggctttatctaatgttggcttccttcctgcttccataaaccagagtcataagtgactgatagaaacgggcttatacaactrtgcaaaatgattgttgctttcttttacctttttttcttgaggccaacctcacctcttctcctgatttcttcattgtgagcatcctgcctcagcccatgagaaatttgaaaaccctctcatttaggtgaactagctgca

SEQ ID NO: 508205 - DNA, 568 bp, Homo sapiens
agctttatatcccagcatctagcacaggttctaacacatagtacatgctcattaaatattggttgatgagacaaaattgaaaagaggtctgatttatccaagtgcgcctgctctttctccatttgaaaccacactggattttgctgacagattaattttctcaaagcacaattctgttcatgttactcctttaataaacacattaacagctaccatttgtttagagcctaccgtgtttcaaggttattctcaataatcccacaacaaactgtcatttccattttcactgatgaggaaattgaggtgcagtgaggtgaggacacaggttaagctcacagttctctaggtgtgggactgtgtattccgatctgtctgacaccagagcctgcggttttcactgtgctacttgcctttctctactgaaacacttctataatgcctctctaaaatgacatgttcttttagggcaggaactgattatgaragagctaagttgtgagcagctagtgaggttttgttattcagaattaggtgggtagaggagaagtaggtagacagcctctcagag

SEQ ID NO: 508206 - DNA, 607 bp, Homo sapiens
gagctgacaaaacacaattcctgagaaaaagccagtatctgaagcaaagacagaattgttcaaaaatgaagaaattcggtgtggggggagcagagaggaggactattgaggaaataaagaaataactgataggagaatatattttcaacatggacaaatgggccattcaaaacttacattctagtgtgagtttccctggcagatcaagtgctcatcttatatatatatattttttccattttctctttcagattacttcccagattttcaacaccatctatcctcctctctgtctgccaagccttttatttgatatttagcatatgacattaactccatggctaattgacttcataagacataaccaaaatgaggtgtatttttctaatgaaagacsacatttgaaaatgcaaaataagataacctataataacaatgactcatatctggggaagcagctagggctctgaaatcataataactttggctcaaattctgcctattactcacttttgagcttcagtttctcatctatatgactgaataatacctacttcacatggtgattgagtaaaagaaataaaataacatatacagagtgtctggc

SEQ ID NO: 508207 - DNA, 597 bp, Homo sapiens
tgtaattttttgctggtgagcatcctaaactggtctctgtctccagtccggttgttacctctccgaccccacactcccaccattctccatcttcaccacagtgagctatggcaggtgcctacagtttggagtccttagtacagtagataagattcttacccctaaggtgttggtattgggaattggagcccttggaagacaatacagtcttggggacagyggtctcaataatgggattagtgcccttatgaaagaggccctgaagagacaccttgcccttccgccatgtgcgagtagagtgagaagatgtgtctatgaggaagtgggccttgaccagacagcacaactgccaatgccttgatcttggacttcccaacctccagaattgggataagtaaatttctgttgtttataaaccacctgatctatggtattttgttacagcattccaaacagacatgacagatgacataaattctgctttctcctttctcactttgcttttgcacatgccctttcctctgggtcagcccagggctacagtagtggagcaataatcataaagcatgaaaccatatttgtccttatgatttgaaa

SEQ ID NO: 508208 - DNA, 597 bp, Homo sapiens
tgtaattttttgctggtgagcatcctaaactggtctctgtctccagtccggttgttacctctccgaccccacactcccaccattctccatcttcaccacagtgagctatggcaggtgcctacagtttggagtccttagtacagtagataagattcttacccctaaggtgttggtattgggaattggagcccttggaagacaatacagtcttggggacagcggtctcaataatgggattagtgcccttatgaaagaggccctgaagagacaccttgcccttccgccatgtgcgagtagagtgagaagatgtgtctatgaggaagtgggccttgaccagacagcacaactgccaatgccttgatcttggacttcccaacctccagaattgggmtaagtaaatttctgttgtttataaaccacctgatctatggtattttgttacagcattccaaacagacatgacagatgacataaattctgctttctcctttctcactttgcttttgcacatgccctttcctctgggtcagcccagggctacagtagtggagcaataatcataaagcatgaaaccatatttgtccttatgatttgaaa

SEQ ID NO: 508209 - DNA, 631 bp, Homo sapiens
tccttttcctcttgccctagcataattatctttctccctcttttatttttatttattattatttttttatgaggcatatcactcattcattctgaaccttgctttggtgagttatccaggggcaccaaacagatggacaattcagaataytggtactggtgaagactcctcttgtcaagacacaataaactcacttggaagatttgagatttgtccttgtattaaaaatatttttattaggggcaaaatgtggtatcagaaatagggtgttagaatgttttggaatcagatatcttgcagagcaaagatgctggagtaatgataatttttacctattggttttgtctctttcattcctgaactatcatcaaagaatgcaatgcacctgaaaagaaaaaaaatttgattaaacacattgatgagggtggcacctcacttcatccaggaaacaatgcaagtcaaagatccctgctttatctattttagtattggagcattccaaattgtaaaaagcatcataggaagtaagcatctgcaacagagtgaaccctctggatattttccccctcctgggtaaggagaaagaataccaataccaacgagagaattccccttcacctgtgttttcagc

SEQ ID NO: 508210 - DNA, 500 bp, Homo sapiens
gctgcgcgcccgcgggccggccggggtcgctatggcaacgcgccgccccagcctaccaaccaagcagtgcccgccccttcctgccgagacccggtagcggcaaaatttgataggcaaacttacgtcacactgttgttttgtttgttttgttttgttttgttttgttttttgagatggagtctcactctgtcgcccaggctggagtgcagtggcgcggtttcggctcactgcaacctccgcctcccggrttcaagccattctccctgcttcagcctcccaagtaactgtggttataggggcttgccaccacgcccagctaattttttgtatttttagtagacacggggtttggctaggctggtcttgaactcctaacctcaagtgatccgcccacgtcgcttcccaaagtgctgggattagaggcgtgagccaccgtgcctggccgtcacactggaccttagccttgttggggtttggactgctctgagcgtctaatggga

SEQ ID NO: 508211 - DNA, 603 bp, Homo sapiens
gagactgttacttatttttaataacattgaattaattacattttgacatgaccatgccatttggaacccttttattattaaatacgattcaaaaattcatcaaaataatctgatatccaagaaatatttcttttaaaatgtaggccatgtaggcggccctttttatttgtgattataaccatggagaaggtgaggtataattacttttagtgcatctcaatttattattgtttatgtatgcctatggattttctgaatattttgaagtctataaatagctttcaaatgtttgtttctatttttaaaatttttacttatttatgttctttgcttttgcatgatcaaatattttttagtctgtaaatagttttcaagtatttttcccacaaatcacccagatagcccaaaagttgcaatattttgacatactgaaatacacattacttttccagtatttcttctttcaaatggaaatagaacaaaattgtttgaccgaccatatatcttgatttttttttwaaactatggtttcataaaatgtttccagataatatagggagtaaaattttcttttaatgtcaaagagaatctgcctctatgttt

SEQ ID NO: 508212 - DNA, 612 bp, Homo sapiens
tggttgaaagttaggctctgccaatagagggtactggagaaacactgcaaagctgaaaggggaagaagggacatttccttcttggaattttctgtttctgccagcagcaaatgtttctgtttgtaggggtctaggcagcctttaccaatgyggtggtggcccgcacagtcagtgcaggtattcttttgccaaatttcttcatcaccacagccatgttgttctcctggttctgagataagtgaaccctatcttagtgacttcccccggccacactctctcctcagagatctgaatcttagccttgtgggacctcctctgagcttccaagttacttacttgttcgtgtcccctcatccctaaggatgctatagggaactaaggagaagacagcacaatttaaatctgtcttcagtgaataacaaggcttttacgtacataaaatataaaaaaattgatgaatacaaggagaaattgacaaatctccaattatagtgggaaattgtaacacaactctgtcaaaggctgatggaatttcagacaaaaaaagaaagaaaggaaaaaggaaagaaaaaactttcaagaacataggagctctgtgtaacataagccaca

SEQ ID NO: 508213 - DNA, 511 bp, Homo sapiens
tggttgaaagttaggctctgccaatagagggtactggagaaacactgcaaagctgaaaggggaagaagggacatttccttcttggaattttctgtttctgccagcagcaaatgtttctgtttgtaggggtctaggcagcctttaccaatgtggtggtggcccgcacagtcagtgcaggtattcttttgccaaatttcttcatcaccacagccatgttgttctcctggttctgagataagtgaaccctatcttagtgacttcccccggccacactctctcctcasagatctgaatcttagccttgtgggacctcctctgagcttccaagttacttacttgttcgtgtcccctcatccctaaggatgctatagggaactaaggagaagacagcacaatttaaatctgtcttcagtgaataacaaggcttttacgtacataaaatataaaaaaattgatgaatacaaggagaaattgacaaatctccaattatagtgggaaattgtaacacaac

SEQ ID NO: 508214 - DNA, 349 bp, Homo sapiens
gctgggtatggccgcttggctggtccgctggcatggctaggtcttacctaatgtcaaactcctgggctccagtgattctcccacctcagcctcctgagtagctgggacgacaggcatgcactaccatgcctggctaattttaaaattttttgtagagatggggtttcactgtgctgcccaggctggcctcaacctcccaaagtgccgggattacaggtgtgagccaccacactagggataggttttggctgggacayccttggggagtctgggcaacctcacctcttcacatcccagtgttgtcatctataggatgggagtggcagctagaggaagaacagctagactc

SEQ ID NO: 508215 - DNA, 613 bp, Homo sapiens
gcaggactgagggagggatccctgggtggatctgggatctgggaggttgggagtatgtttgggctcccaccccaggccctggtaaggtgggaaggtgtgcgagaagcgggtgggttagccacgtgtccaccaccaagggccctgggggactgaatgtctcagaagccttctttcccttaacagtcccacccaccaagatctctccttgtggaccattccacttgtagtatgatttgtggttttcggagcaatttgcatcccttttgttactatcactgcaactctttgatgtaaacaagacaagaattctttgtaaccaatgagaaactgaggttcccagaggccatggtttgctcaaagtcacacaacaatttagcactgtaggcaggctgaggacccagggctcctaattcctaaggccaacaccacactgcagagtcaaagctgctcaaagtcaaagccacccagggcaagactgaycacatcacacaggtcctggttcaggtgtgctggccttcctcccaggcacaggggacaaaagggaaaaaaggatgtcttaagcttctctactcagccctccatcactgcctagagtgtgccaggtagcagggcc

SEQ ID NO: 508216 - DNA, 648 bp, Homo sapiens
ctgcggtggcaggactgagggagggatccctgggtggatctgggatctgggaggttgggagtatgtttgggctcccaccccaggccctggtaaggtgggaaggtgtgcgagaagcgggtgggttagccacgtgtccaccaccaagggccctgggggactgaatgtctcagaagccttctttcccttaacagtcccacccaccaagatctctccttgtggaccattccacttgtagtatgatttgtggttttcggagcaatttgcatcccttttgttactatcactgcaactctttgatgtaaacaagacaagaattctttgtaaccaatgagaaactgaggttcccagaggccatggtttgctcaaagtcacacaacaatttagcactgtaggcaggctgaggacccagggctcctaattcctaaggccaacaccacactgcagagtcaaagctgctcaaagtcaaagccacccagggcaagactgacsacatcacacaggtcctggttcaggtgtgctggccttcctcccaggcacaggggacaaaagggaaaaaaggatgtcttaagcttctctactcagccctccatcactgcctagagtgtgccaggtagcagggccctggccaagacaaatgattgatgccca

SEQ ID NO: 508217 - DNA, 547 bp, Homo sapiens
aatcccgtctctactagaaaatataaaaattatccaggcatggtggtaygctcatgtaatcccagctactcaggaggctgaggcacaagaattgtttgaatccaggaggctgaggttgcagcgagccaagattgcaccactgcactccaccctgggcaacggaacaagattctgtctcaaaaaacaaacaaaaacaaagatctttaattctttaacgccatatgaaacaggaggcactacaattttttgagtaggattgggatttgggaagtataatgtgaaaactctttgcagaataaattggagtagggaaggaaaggagttagaaaactgtgtaaagctttcataaccacagtctagggaatatttagcaggagcaatagcagagaaaaggaagcaacagagaacacaaattgttagggccttcaaagtctcgttgattttttttttctgaaattatacatatgtttctgtcctctgcataaaaaaaatgatggctgattatttctttttggttctagagagacgatgaaaatggatatcctag

SEQ ID NO: 508218 - DNA, 413 bp, Homo sapiens
aaaattgcagacatttttctatgatttctgtaatcaccttgggaaagagaaacaagtgggaagcgatattacttggctggaaatgaaattgagagaaggaaaaacttygaaagatctgaatctggatacacttggggattttgtggttagaattttgcctgttggttaggatctcacctgcttgtttgattctccttaagatgaaaaagagtgttgcctccaaagctgagatagagcaagggactgacaagcactgagaatgtgatgtgtcagaggccatgcaaactgcaatagtagacatgcctgaaaaaacacttcacgtctttccacccaggatggtgttaaattaaaaagccaagttttctgcacccaaaaaaggcacagggattggcaaacaaacaaaaaactgtcca

SEQ ID NO: 508219 - DNA, 413 bp, Homo sapiens
aaaattgcagacatttttctatgatttctgtaatcaccttgggaaagagaaacaagtgggaagcgatattacttggctggaaatgaaattgagagaaggaaaaacttcgaaagatctgaatctggatacacttggggattttgtggttagaattttgcctgttggttaggatctcacctgcttgtttgattctccttaagatgaamaagagtgttgcctccaaagctgagatagagcaagggactgacaagcactgagaatgtgatgtgtcagaggccatgcaaactgcaatagtagacatgcctgaaaaaacacttcacgtctttccacccaggatggtgttaaattaaaaagccaagttttctgcacccaaaaaaggcacagggattggcaaacaaacaaaaaactgtcca

SEQ ID NO: 508220 - DNA, 643 bp, Homo sapiens
tgttatatgctgaagttttaaatggctaagaaaaattgtcaaayagatttatcaaaatctccaaagcacacttctttaaaatccaaaccaaaaaattttaaaagcaaattaaaatgtaacactagaactctgtaatctaattaggcttatttaaactgaaccactaaaaagtcatgtggccacttgtaattactaaactcctttgatgaaagtttatactactatttctaagtagataattttaccacacatttttaaggaaactcactaatagaaacaaagtaaaaaataaaagagaaaagaataaaaattaaccacaattcaacttagacctaacagcttttaggaaaggggaaaagagcacattggcaggtgtctgcaaggaggtaggtaataaatggaatcagttttcattctgcagaacaaccatgagacttgctgcaatgtcagctccaagcacacactgagggactccagaaaatactcattgatcatgcagcactttataatgcgcataggcttttttctcctgctaaccccgcctagcttccctttgcagcttcttctcccaagccctctccccacagtaaaataatcttcctgaagatgtgaaatagttaataaattatctcaacagtctaag

SEQ ID NO: 508221 - DNA, 610 bp, Homo sapiens
agtgtcagctgggagcagagtctgtaattcccagtagccaccaaaccaacttgacctggacatgttcaggaatgaagtaagaacccaagccttagagtcacccgggatggacttcctgattcctcggttctgagatatgtcactatgtatacagtggggtgggggtaagttggcccaggtttctgaagagtatttggcattctctattaaaattcatcaagtgtgtaccttgtaccagggcttataattttaggaaagcatcctgcggaaatacctgcacatgtgcataagaaataaacatagttgtggtcggtcatggtggctcctgcctgtaattcctgcactttggaaggccaaggcgggtggatcatctgaggtcaggagtttgagaccaagccggccaacatggtgaaaccctgtctctactaaaaatacaaaaattagccaggcatggtgatgggtgcctgcgatcccagctactcgggaggctgaggcaggagaatcgcttgaaccccggaggtggaggttgcagtgagccaagatcacgccactgcactcacacctgggcaacagagtgagactccmtctcaaaaaaaaaaaaaaaaaaaaa

SEQ ID NO: 508222 - DNA, 294 bp, Homo sapiens
tgcatcctcctacagctccaacctcacacaacccctttcccaagatctgactcctgcaagagtctggtctggaagaagctgcaataatattccacatccactagctgtccagtacacatataataaaacccacatcctcattgtgatctacaagacgttagttgatttggcctctgtctgctaatcggacctcggctgtactttctcactcatttactgcttctttgtcaaatagtccttttttaccctgttcagaaaacatrtcaagttccctccagtctctgggcttttgca

SEQ ID NO: 508223 - DNA, 539 bp, Homo sapiens
cttagtggttgttagaggacgtcatttcctcttgcagtgttggatcaagggattcattttctagctggctgttggctggagggtaccctgaattccctatcagatgggctttctccgcctagcaacgtgccttatcaaagccatcaagggatagtcctctagcaagatggaacttaaagtctcaagcaatgcaattatggaagtaacaacccatcacctttgacgtattctctttgttctaaagaagcacagctctaacccatcatctacgagaggggattatcaggagcataaatacaagtaaggacagtggggatcattgtgcagcctgttttccacaaaaagaaaagatgagtaatgtaaaaatgacctccaagaaccaagaatcaagatgatatactaggatacagtgagtttcagattaaatgtaaagtttagctaataaaagagtggtaataaaaacaattccacrttaaaaaaatcattgtaaaatatacatttaagttgtacactgaataatcgtatagttttacatttct

SEQ ID NO: 508224 - DNA, 428 bp, Homo sapiens
ttatgttataggtgggagcatgtgtaaaattacaaaatatgcttttaatttraaaatagcataattaaaatatattaatgatctgcattgatataactaaatctatagctagaaatggcatttctcctatgtacaatggatctacgcaagtgcaatgtgtccactaacctgtggaaatgtgttatggatttagattcagtgttgagtctatatagcatctcacagttcagatcctttagggcagcactatttactgaagcagcatgggacattgtcacctttcaatgaaaatgcctcggatgtcatgttaccacattgcctgtaggacttgcttcactgctttctggtagggttattttcaataaggtataaataatttattaaaaaagcacaaaaagagtatttatggtgtgtatttatgtatatat

SEQ ID NO: 508225 - DNA, 428 bp, Homo sapiens
ttatgttataggtgggagcatgtgtaaaattacaaaatatgcttttaatttgaaaatagcataattaaaatatattaatgatctgcattgatataactaaatctatagctagaaatggcatttctcctatgtacaatggatctacgcaagtgsaatgtgtccactaacctgtggaaatgtgttatggatttagattcagtgttgagtctatatagcatctcacagttcagatcctttagggcagcactatttactgaagcagcatgggacattgtcacctttcaatgaaaatgcctcggatgtcatgttaccacattgcctgtaggacttgcttcactgctttctggtagggttattttcaataaggtataaataatttattaaaaaagcacaaaaagagtatttatggtgtgtatttatgtatatat

SEQ ID NO: 508226 - DNA, 428 bp, Homo sapiens
ttatgttataggtgggagcatgtgtaaaattacaaaatatgcttttaatttgaaaatagcataattaaaatatattaatgatctgcattgatataactaaatctatagctagaaatggcatttctcctatgtacaatggatctacgcaagtgcaatgtgtccactaacctgtggaaatgtgttatggatttagattcagtgttgagtctatatagcayctcacagttcagatcctttagggcagcactatttactgaagcagcatgggacattgtcacctttcaatgaaaatgcctcggatgtcatgttaccacattgcctgtaggacttgcttcactgctttctggtagggttattttcaataaggtataaataatttattaaaaaagcacaaaaagagtatttatggtgtgtatttatgtatatat

SEQ ID NO: 508227 - DNA, 579 bp, Homo sapiens
agctgctgttacctgggaagagagtctgcgggtgatgtagtagattaatagattgaggtattttcctctcagttatggtggatgtcacattctttgcagcattcataaggaaaagagactttatttctaagcgtttgaagtggtaaaactcagaaacaccttttaattgattttctctttaggaaaagtgctttaaaacctgcagtattttatctgcaaatattatgtttgctaaggatcttggctgaactagatccttatcttctcaatatacattttagaattagcttcctaatgtctactaagaatttagtgtagttttgatcaagatggcactgagtatatagataaatccaggtagaagagatagtttactaatgacgtcttatsatgactgcttttctggcttcaataaagctttttatttaattgccttgcccactgtccagacctgtttactttttaaatggtgatatggcttggttgtgcccccacccacatctcatcttgaattgtataatccccatgtgtcaagggccaaggccaggtggagataattgaatcatggggggcagtttt

SEQ ID NO: 508228 - DNA, 579 bp, Homo sapiens
agctgctgttacctgggaagagagtctgcgggtgatgtagtagattaatagattgaggtattttcctctcagttatggtggatgtcacattctttgcagcattcataaggaaaagagactttatttctaagcgtttgaagtggtaaaactcagaaacaccttttaattgattttctctttaggaaaagtgctttaaaacctgcagtattttatctgcaaatattatgtttgctaaggatcttggctgaactagatccttatcttctcaatatacattttagaattagcttcctaatgtctactaagaatttagtgtagttttgatcaagatggcactgagtatatagataaatccaggtagaagagatagtttactaatgacgtcttatgatgactgcttttctggcttcaataaagctttttatttaattgccttgcccactgtccagacctgtttactttttaaatgstgatatggcttggttgtgcccccacccacatctcatcttgaattgtataatccccatgtgtcaagggccaaggccaggtggagataattgaatcatggggggcagtttt

SEQ ID NO: 508229 - DNA, 562 bp, Homo sapiens
ctccactcaccctccgaagatgaacccagccttwtatttaaaggatagaatccatcagaaagaacaacccaccttcctaataacgtgtattcttcctccatctacctgtctcatctccttttgcaatagaggggctaattcttcccgtaagactaatttgcagctgtgctttgaaatccaactacccttattttcattaggaataatttatgtgataggattacctgtatgtcaagcctgactagtctaagagatgcccagataggtagtaaaacataatttctgaatgtgtccagaagagattagcatttgaatccacagaatttgagaaaagaagatccatcctcaccagtgtgagtgaggatcatgcagtcccttgagggcctgagtagaaccaaaaggtagagaaagggccaggcatggaggcttatgcctgtaatcgcagcactttgggaggccaagggggcagatcacatgaggtcaggagttcaagaccagcctggccaacatggtgaaaccgagactctactaaaaatacaaaaattagccggacatagtggtg

SEQ ID NO: 508230 - DNA, 577 bp, Homo sapiens
gagaacacactgcccacagttgaactcttgggtttcagcccagaaataaatttcgtgctgcggagactgcaacattcaacacagcgtaacaccgaggagcrctggaaagtcttcaaacagtgctctctttttctctcatagattctgctgtccaagacaaacagaaacacctttccagagctatctcccttgggaatagccattctcctgctcattttcttgctttaaagatgttatttacttaaatgttctcaccacaaaacagaacaaaacaaaacagagtgctacctaggtgaagcccatggtgtgctaactaaatttttgtaatcatttcaccaaatctcatgtctatccaatcaacagcatctaactgtttttaaaaaggaaattccaaaatgaaacaatcagaaaatttttttctgtgattttttgactttttaggaaagatggaaacaaatcaaagtattaacgtgtgttgaaacctgatacagtacagggaagtgtattaccttaaactatgtactgatagagtacagggatgcctattattctatgtaccaatggagtacaggaatga

SEQ ID NO: 508231 - DNA, 577 bp, Homo sapiens
gagaacacactgcccacagttgaactcttgggtttcagcccagaaataaatttcgtgctgcggagactgcaacattcaacacagcgtaacaccgaggagcactggaaagtcttcaaacagtgctctctttttctctcatagattctgctgtccaagacaaacagaaacacctttccagagctatctcccttgggaatagccattctcctgctcattttcttgctttaaagatgttatttacttaaatgttctsaccacaaaacagaacaaaacaaaacagagtgctacctaggtgaagcccatggtgtgctaactaaatttttgtaatcatttcaccaaatctcatgtctatccaatcaacagcatctaactgtttttaaaaaggaaattccaaaatgaaacaatcagaaaatttttttctgtgattttttgactttttaggaaagatggaaacaaatcaaagtattaacgtgtgttgaaacctgatacagtacagggaagtgtattaccttaaactatgtactgatagagtacagggatgcctattattctatgtaccaatggagtacaggaatga

SEQ ID NO: 508232 - DNA, 577 bp, Homo sapiens
gagaacacactgcccacagttgaactcttgggtttcagcccagaaataaatttcgtgctgcggagactgcaacattcaacacagcgtaacaccgaggagcactggaaagtcttcaaacagtgctctctttttctctcatagattctgctgtccaagacaaacagaaacacctttccagagctatctcccttgggaatagccattctcctgctcattttcttgctttaaagatgttatttacttaaatgttctcaccacaaaacagaacaaaacaaaacagagtgctacctaggtgaagcccatggtgtgctaactaaatttttgtaatcatttcaccaaatctcatgtctatccaatcaacagcatctaactgtttttaaaaaggaaattccaaaatgaaasaatcagaaaatttttttctgtgattttttgactttttaggaaagatggaaacaaatcaaagtattaacgtgtgttgaaacctgatacagtacagggaagtgtattaccttaaactatgtactgatagagtacagggatgcctattattctatgtaccaatggagtacaggaatga

SEQ ID NO: 508233 - DNA, 661 bp, Homo sapiens
ccccctctaagccaaaacttaatgaagtatccttgctggttatatgtgtgaaaatgcctgaagaaattagagggcaggagtgatgtcaactcagtatctctaagcaaaaagattaaaaaaaaagtttctagaggtatgcttcataaattggaactcatttgaagaactctattatagttaaagaacttgaggtttgaaatcagacagaattgagtgagtcctgttctgacatttactagctaggtagtatagattctttccaagccacatttccttcaccttaaaatggaataaaatttcactgggttagattaggtactgcaagtcaaacgtagcatcttgtatatagtaaaagttcagtaaatattagctctctttattattcctatcacctgcctctggactcccattctttactgtgttctgttaggtaaatgaacttacatgagaaacaccaggctttgacatgaaaaacacagattttactttactcatgttagggagtatcggctgggggaatacctagagtctgatggtggcaggaaggtcaccacttagctagctcaggaaatgctgtgactctctgyactttaatgtcaccaactgattaggtcagttagatttacacaaatgacacaagtgacttttctaactgcttctc

SEQ ID NO: 508234 - DNA, 531 bp, Homo sapiens
tcagagtccagtatatgaggacttaaaaatcagatcttgacaaaactttttatctccatgaagatctagaagctggaggaaaaaaaaaaaatccatcacactactcaactcaccctcttcattatcctgcctgtgcacagcccagcatggtcttttctcacccccgagcttcatccacacatcttttcatacactatcctaaggcaaaaaattctcaatgaaatgccatcagaccaggtgttttctgtttcatttttctatatagtgcacaacttttaaactgtgtcccacagtgagatctttgcaaaactggcacccatccttgtattccctcagtaggacccaaattctggtttaagttctcttccattctattttctcttacccaccccaacctggggtttcttctaacattccagtgccaaagttactaagggtgcrttgtattcactatgtaaaccttgtcctagtgcagtgcctgctagatagtagtacctggcatgtttgtggagtaaaggaataaatacaaac

SEQ ID NO: 508235 - DNA, 581 bp, Homo sapiens
catgcttttgtccccctgacctttcattgaatgataccasttgtcacttttgcttgcagactgacattaaaaaggatgaaaatattgctttcttagtacagattcctattggcacagcttttgttcagactacgatgctctgacaaattagcccaggaaaacagggcaggaaaaaactgtctttacttctgcttgttattgtctttaatattaccagaacatttattgttccatatgctcctggctctttgctcctcattaaagaatgggatctgcatagattattcaatggtaaacacctaactagattgtaaactgtctgggtgaggagcttgttttaaattcccacagcactcagcatacttctgggcatgaaaatgctcagtaattcttctttgattgtatagtacacatgttgttcaatattaatattctatatttgacctctgtttccctgagtgtcaaggatctgtactaatttttggctagttctgtcaataacgatttttttttcatgagttttgtaaatacagcgggaaaacctttaataactgtggttaatgggttattatcttgagctt

SEQ ID NO: 508236 - DNA, 624 bp, Homo sapiens
catgcttttgtccccctgacctttcattgaatgataccacttgtcacttttgcttgcagactgacattaaaaaggatgaaaatattgctttcttagtacagattcctattggcacagcttttgttcagactacgatgctctgacaaattagcccaggaaaacagggcaggaaaaaactgtctttacttctgcttgttattgtctttaatattaccagaacatttattgttccatatgctcctggctctttgctcctcattaaagaatgggatctgcatagattattcaatggtaaacacctaactagattgtaaactgtctgggtgaggagcttgttttaaattcccacagcactcagcatacttctgggcatgaaaatgctcagtaattcttctttgattgtatagtacacatgttgttcaatattaatattctatatttgacctctgtttccctgagtgtcaaggatctgtactaatttttggctagttctgtcaataacgatttttttttcatgagttttgyaaatacagcgggaaaacctttaataactgtggttaatgggttattatcttgagcttttcctgtacacagtatcaaattgaaggagataaggccttttag

SEQ ID NO: 508237 - DNA, 336 bp, Homo sapiens
cttggtattcaatattacattcctctttccatcacatcagcaagcattgatattccccagagacatctgtttctgactgtagtccaaatttgtccaatgatgaaataatggacttttctgtctatgttagcttttccaagagtttatgcctattttggtgtgctatgatcctgggttggggctaagtttccaagtttatttctcagggatctatagcaggtgttagagactctgtctgtccaaacagccacagaaggagggctttktgggagattttgtgaatttactgtcagctttcttgcatttgggtggacaccctctcctcctgactgtgcc

SEQ ID NO: 508238 - DNA, 513 bp, Homo sapiens
gggaattggccccactatttctgtagtttcctatgatagagattttgtttccaaacgcagtgaactggaactaatgaaaggggagcctcagtgactccctttgtgcatctagcccaagacccttgaccaggaacaggccaagggactcttttgacttctttcgccagggccaaaccttcatcttcggcaggagttttattatcttttgtgtggtccaaaagattaatccaagggaaagaaagttctgcttgcagccttcaacaaagyagactccagtcacctattctaagcttctttttctctgttctcccttgagttcttgggacttggggaacagaaggaagaatatttttcttcctggagaatctgtacagttggctcatagtccacctgctccaagggaagaggtaaaatagagaaaaagcaataggaagtaaaccaaaaggaagaagtaaggatccaagatagagaaaaatgaagccagagagagagagacaaaggcagggagggagg

SEQ ID NO: 508239 - DNA, 430 bp, Homo sapiens
gaaaaagaagaggaaagtcgggacaataagagctacctcatagatgagagggcataggaattccttaataaatggtagctgttatgattacaaatcaacatttggaaggagaataaatcctccccatatagtcttgagagttaaatgaaaaattctstctatcctatagttttatcagctttatttcttttattaatttcaagaggtgtttcttatgcaaaaatatagctgtgcgtgttgcacatttttattcacagttgctagggatacacagtcttttgatttgagctggggatatctgttgaaagtgaaatattcacatgtggctggagaagggcaaatgaggctgcatccctcccttttctctcaagggaagcccaggaatttcctaggaagagtcattaacagggcccaggaagacctctcaggt

SEQ ID NO: 508240 - DNA, 622 bp, Homo sapiens
cgggacaataagagctacctcatagatgagagggcataggaattccttaataaatggtagctgttatgattacaaatcaacatttggaaggagaataaatcctccccatatagtcttgagagttaaatgaaaaattctctctatcctatagttttatcasctttatttcttttattaatttcaagaggtgtttcttatgcaaaaatatagctgtgcgtgttgcacatttttattcacagttgctagggatacacagtcttttgatttgagctggggatatctgttgaaagtgaaatattcacatgtggctggagaagggcaaatgaggctgcatccctcccttttctctcaagggaagcccaggaatttcctaggaagagtcattaacagggcccaggaagacctctcaggtaagacgttataatctatgcatacatccaatctcctgggacctaagccattgggatgctttgcaaagttgagattctccatcatgctgcaaaccttgccttggagacaacagacattattttctattactttatgtgcacttatgctattttcatggagtcccacatctatatataatgttttagaagtaatgagcatgtcccatttcatg

SEQ ID NO: 508241 - DNA, 233 bp, Homo sapiens
tgttcctttgcagcaatatttatctcaccttgagtgartgaggaccatgctgcttggaagcgtaataacttaaacaccttgcctatgtctagtgattaaaaactaagctctactcagctcatgtaatgcccctgacctccaccagagagaaattctaggttattccttgtgggcaaatgtgtccatggatcagcggatcagggactgctgaatcagatgtgtgtccctctcta

SEQ ID NO: 508242 - DNA, 613 bp, Homo sapiens
gtgagtgggctcctatgcccagctaatttttattttttttattttttgtagcgacgaggtccccctatattgcccaggctggtcttgaattcctgggctcacacgatcctcccacctcaaccctcaaagtgttgagattacaggcatgagccactatgcttggcctcagccttatttgtaatcacaaaagaaaaacaatctgatccatcctatgaactaaaaataaaatcctaagccgcacccattgactgaacagaccccctcttgaccaaggggatcccaagccttgttacactccttcccttttggagtttaggtgcaactctccaacattaacattagagatcttaagactgacaaggcagattctgtgtcaataaaagaccaaattataaacaagacctaargccatgccaggcaagggtttattcaggcctgcaggccatcaaccttgctacatagcatccttaacttaaaacatgcctttctcctgacatcaaattttagacagagctcactcctttaaccaactgcaaatcagagaatctctgaatccatctatgacctttaaacccctgcttcaagatgtcccacctattcaggtcacaccaat

SEQ ID NO: 508243 - DNA, 634 bp, Homo sapiens
ttaaaattacatctatgttccataaataaataaatatgtaaaaaataataaatgtttatattattcaagtgaagattatagcgatctttttgaatatctacttaacctcagctagctttaaattcagaagtagcaactccatagaaattcaacttatttctaccttattactcatacttgtctccttgaagaagcttcattgctrtcatccagtttagactgggatgtcataaatctctagactgagtagtataatattcactattaaaataaaatcaaattattattataatgttatgacacctccaaatacaaaaagcaagcccatggatgttaggttaaggtatagagacaagtattcctacttactatcttttagggcagacatatcccagccaaggtgattgcaaaatgaaatggaaactatatggtggaaggggacttgagactcacacagattggattttcattccaaccctcacatacacaagctgcatgactctgggttgattgcatattctcttagattttcaatttcttcgtctgtacaatggaggttaatgcctatgggctacggctgatgtggggataaaagaaccaacagggatgcatgggcagggcctggtccatggag

SEQ ID NO: 508244 - DNA, 634 bp, Homo sapiens
ttaaaattacatctatgttccataaataaataaatatgtaaaaaataataaatgtttatattattcaagtgaagattatagcgatctttttgaatatctacttaacctcagctagctttaaattcagaagtagcaactccatagaaattcaacttatttctaccttattactcatacttgtctccttgaagaagcttcattgctgtcatccagtttagactgggatgtcataaatctctagactgagtagtataatattcactattaaaataaaatcaaattattattataatgttatgacacctccaaatacaaaaagcaagcccatggatgttaggttaaggtatagagacaagtattcctacttactatcttttagggcagacatatcccagccaaggtgattgcaaaatgaaatggaaactatatggtggaaggggacttgagactcacacagattggattttcattccaaccctcacatacacaagctgcatgactctgggttgattgcatattctcttagaytttcaatttcttcgtctgtacaatggaggttaatgcctatgggctacggctgatgtggggataaaagaaccaacagggatgcatgggcagggcctggtccatggag

SEQ ID NO: 508245 - DNA, 632 bp, Homo sapiens
tgtttcctgtaacttcaacctatttgtctggctggactgataaagattaaattttttttttccacaagtcagcctttttaaaaatcagcataatctttgcaaatagtctccatgttaaatattcttagtcctggctgggcacggtgcctaatgcctgtaatcccagcactttgggaggcccaggcgggtggatggcttgaggtcaggagtttgagaccagcctggctaacayggtgaaacctcgtctttaacaaaaatacaaaaattagccggaagcggtggtgggggcctgtaatcccagctactcgggaggctgaggcaggaggatcgcttgaacccaggaggtggtggctgcagtgagtcaagatcatgccactgcactccagcgtgggtgacagtgagactccgcctcaaaaatacaactaaataaataaatattcctagtcctgattccagttggatatggttttctcattttcttttctttttctttttttttttttttttaagatagggtcttactctgtcacccaggcatcagagctcactgcaacctcaaacttccaggctcaaacaatcctcccacctcaaccttcagagtagctgggactacaggcacatgccataatgcc

SEQ ID NO: 508246 - DNA, 630 bp, Homo sapiens
aacagcttagttttataccactgaaccagacagaagccatggtggaatgcctccatccccaaagaccttatctctatggggtgctccacttgccatatgccacatcacatttttcacaaaggggtgctttgcttctatctccttcagacctaagtaaaaaatatgtttctatctttttgaggagcctatacatcttagaaaggcaatacacctaaagctaatcattctcaaatatttgatttattgatcattctaacaattgcacaagtaaaaggagaatgttaaaagcaacatcacatgtaaaatactaatattacataaaagtacactctcaaaattattttgtttcttttatacaacaaataaaaataagcaattactttttctattttacaaatgagaaaattcaatttctgagttttaagaccaatactgaataccttcaccctcataaacagcaaagcaagaacttgattcccactgtccaccatagctgagaactaaattctggccactgtaatcaaagaccttctttaaacttgtatattaaygctttctttaattacatatattttgtgaacattgttttctctaggataacatttaagtctcatgacaaaaataacacat

SEQ ID NO: 508247 - DNA, 585 bp, Homo sapiens
ttatttttataagactgatttctcatgagcagataaacactgtataatttaattttaaaaaaatttgttgaggttttatgtcacagattatgatctatcttcctataggygagcacaaaaatgtctaccctgctgttggttggagtgtttcataaatgtcaatttgacactgtaggttaatgggttgttaagatctgctgattttatgattagtctgtcaacggttaatagagagatgttgaggtttccatcttcaagtttgaatttgattatattgaagcagaagatgcaagaagaaaaacaaactttctttctttcctttggtatgaacagcttcctcttgaatacttaccccctccatatgactgtaccctggtcttcaagtctttatgtgtttatagattcctgttttctataactagtgtctgtaagtctgtttttcatctgagtagcaccatggaggtcatgagacatgcttaagcaagcttagattacagccacctgggtgccatagtgaaggacacgagataagattgtgcaggcatattgagcacagccacctggcccacatagcaagagtcacat

SEQ ID NO: 508248 - DNA, 641 bp, Homo sapiens
agttttttttgtacaaccctttctgattatgtatttttgcttctcttcataaaatgtaattaaaagaatttttttaattttaaagaaattaccttcagtatatctgtatgtttttctacatgtttttattaaactatctattacatgctgaataatacccttgaataaatcagtattaaaggagtcaggaatatgaacctaattttttctaaacatgcaaaagcaaagactgtttgtttctctaggtttrtaagtcaaagattaggcagtttcactgtttaatttggcaagttgaacatctggctttaggaaacttcaatatatctactgaagaaaattagtcaaggatgctaggattactatttcatctagttactataatagcatcttgctgccttcaaaaaatgcattactgtgtcctcaggaatacatatctggacagatgtgggcagaatgtctcattgcggaagctatagacctaattgagctgaaggatttccaactttcatttacccttgttcacatatgaaaagaagttatgttcccccaaataactgatatttgaggattttattatcttcatttgggaagaacataacattattttccctccacaatgtagtttaaagtaaacagcaaaa

SEQ ID NO: 508249 - DNA, 641 bp, Homo sapiens
agttttttttgtacaaccctttctgattatgtatttttgcttctcttcataaaatgtaattaaaagaatttttttaattttaaagaaattaccttcagtatatctgtatgtttttctacatgtttttattaaactatctattacatgctgaataatacccttgaataaatcagtattaaaggagtcaggaatatgaacctaattttttctaaacatgcaaaagcaaagactgtttgtttctctaggtttataagtcaaagattaggcagtttcactgtttaatttggcaagttgaacatctggctttaggaaacttcaatatatctactgaagaaaattagtcaaggatgctaggattactatttcatctagttactataatagcatcttgctgccttcaaaaaatgcattactgtgtcctcaggaatacatatctggacagatgtgggcagaatgtctcattgcggaagctatagacctaattgagctgaaggatttccaactttcatttacccttgttcacatatgaaaagaagttatgttcccccaaatractgatatttgaggattttattatcttcatttgggaagaacataacattattttccctccacaatgtagtttaaagtaaacagcaaaa

SEQ ID NO: 508250 - DNA, 397 bp, Homo sapiens
gatttacaattgtacatgcttaaaattggaaatatgcatagaacaggatgtggcttgattttagaaaaccaaggagattttagacaacagaattaaactgagatgatgaatttgtattattctccttactctttaagtttgatgggtggtgaagaatatcattattgtctgttatctgttagagcctcagcttaacagattttttcatttttccattgtaacagtttagatcaggggtccacaacccccagccatggaccagtactgatttgtggcctgttaggaactcagttgcagtaggaggtgaatgccaggtgagtgagggaagcttcaactttatttaaagtcactcygcattgctcttgttaccacctgagctccaccttctgtcacatca

SEQ ID NO: 508251 - DNA, 584 bp, Homo sapiens
ctgtatttatagcattgtgtcctaatggaaacatcaatcctgttttctgaggaaactactgaaaatcctaaccatagtattgtcctctactcractgccagactggcttataacttattccttcaaaaagctagaagctaaattctcatgccatacagagtacaacctggagatgaaattgtaaaccatttcaaaggttcatttaacatagaaacaggtattttcaggtatctaaccatcaatttcaatgctggtttctgagcagttctcaggtgtgatgaataggtgaggtggaggtgtaccccagcatctagctttgtattgggaacatgataaacaattataatatttattattcaagcatttaaccagtgggatatcacagttaatacagaatataccaatttgtgcaacaagagtttcttaagcaaaaacaacctttaggagaatctttttctacataatgtgtatgaaaaaataattttgaataaactctagtgctgtttatatttagaaatagaatcctttccaaccacaaatttttagtctaataatcagaccaataactagctctactttgtagg

SEQ ID NO: 508252 - DNA, 584 bp, Homo sapiens
ctgtatttatagcattgtgtcctaatggaaacatcaatcctgttttctgaggaaactactgaaaatcctaaccatagtattgtcctctactcaactgccagactggcttataacttattccttcaaaaagctagaagctaaattctcatgccatacagagtacaacctggagatgaaattgtaaaccatttcaaaggttcatttaacatagaaacaggtattttcaggtatctaaccatcaatttcaatgctggtttctgagcagttctcaggtgtgatgaataggtgaggtggaggtgtaccccagcatctagctttgtattgggaacatgataaacaattataatatttattattcaagcatttaaccagtgggatatcacagttaatacagaatataccaatttgtgcaacaagagtttcttaagcaaaaacaacctttaggagaatctttttctacataatgtgtatgaaaaaataattttgaataaactctagtgctgtttatatttagaaatagaatcctttccaaccayaaatttttagtctaataatcagaccaataactagctctactttgtagg

SEQ ID NO: 508253 - DNA, 551 bp, Homo sapiens
aatatattttattgaatattcataaattagaatgtgaactctttaaaaattctgtgttcgtcaactagctaataaaaatactttttaaaataaaagagatcaggacggtgggaactcagagatcatgagaggaaagacacataccttaacttaaaaagcaatgtatatgaaagcataaaacatataaccaacaagtttcttttgtttttaagtagtaaattcttaatgaattaccccaatttccatgttaacatatcacatcctcatcttctgtttacagtggtaatttagtgcaaatctaatactagaattaataattagcaattaataaacacattatttctgaggcatgacattttgagactctaaaargcaattttgtataaaaataaatataacaacaccaagagtctacaaggacacaattatgtcagaagttaaatggatactaaagaagcatcctattttagatagtcctcaaattgaaaccaagaaaataatggcacttttttctccagtggcaaaggtgaaggtaaactttaaatctttca

SEQ ID NO: 508254 - DNA, 395 bp, Homo sapiens
atgcccatcaacattggatatttagggaattcaaaatatgagaacattaatattctcactttttaaacttactgtaagaaaaacaagagagtttacaatatcaacaaagacatgcagttttataaacatgtctatattcacctattctagatggccaagcatttatgtttatattatatatatatatatatatatatacacacacacacactaaacttagtaagaaatatatatatgatatatatttatatatatgatttccacttatatataaatatatattatatatataaagatgatatatatttatatatgatatatatttcctactaagaactaagtaaaaaattatatatwatatatatatataattatatatataatatataattttt

SEQ ID NO: 508255 - DNA, 651 bp, Homo sapiens
acattgctttttaatgtgtatgagtcttagcaccttgagttaggaaagattgtcaatgattgaattaaactgataatacctaaaaaaaaaaatcctgacaattttatagtacttattatatattatatattaattaactcatttattcctcacaatattactaaagacaatataaatattattgttattttcaaaataagaaaactgtggcacaatatgttaagtaatttgcctaaaatcataaattagtacttgatgagttttgatccyaagctgtctgaatttaattttataatcaaacattcataaactgttctgcatctcctaaaataaaacttctaagataatcatatataaaatttaattttaaatataacttgaaacatgtcattttcctgagtgtctgtcttatctaatacataatatcagaatcaaatgttgatactacttaataattttattttatgtaagaaaatataaaaaagactattagcacagattgtgtgcatttcatcatgccaatattatatcattaacatgttaatttcacttataatgcaattagacattgtgtaagctttgtttcaaatacaattatgcaaaaattatatctaacacaaattcattttaattttacatgttttctctcag

SEQ ID NO: 508256 - DNA, 651 bp, Homo sapiens
acattgctttttaatgtgtatgagtcttagcaccttgagttaggaaagattgtcaatgattgaattaaactgataatacctaaaaaaaaaaatcctgacaattttatagtacttattatatattatatattaattaactcatttattcctcacaatattactaaagacaatataaatattattgttattttcaaaataagaaaactgtggcacaatatgttaagtaatttgcctaaaatcataaattagtacttgatgagttttgatcccaagctgtctgaatttaattttataatcaaacattcataaactgttctgcatctcctaaaataaaacttctaagataatcatatataaaatttaattttaaatataacttgaaacatgtcattttcctgagtgtctgtcttatctaatacataatatcagaatcaaatrttgatactacttaataattttattttatgtaagaaaatataaaaaagactattagcacagattgtgtgcatttcatcatgccaatattatatcattaacatgttaatttcacttataatgcaattagacattgtgtaagctttgtttcaaatacaattatgcaaaaattatatctaacacaaattcattttaattttacatgttttctctcag

SEQ ID NO: 508257 - DNA, 559 bp, Homo sapiens
tctcaaaaattattttctagttgtaccagtaaataatgcaaaaacatttatcacagtttgatgtatcagttaatttgaactaatcattattttctgtctctcacttacaatttgtcattatttgctgttgtatgtcctacattataaactccaggaaagcacagatatgttttggctatcttgttttgttgagggaatgaaggactggagagaccacagggtgagacagtagaattttattgagtgcagtcaggcccagcagcttaacatccaaaaactgagccaagaacaaagacaggtctcggcttttatacacacttcaaaaagggggctggctagtttgaagcaagcttacagtggtgtgaagtgtagtggcacaaaagcaagtgtgcagaaagaagcagaacaaagacagttaatcaaattgtgacaggtgcataactcaggattaygtatgacatcttgctatgtggctcagatggctgttacctaggttttactcaagtgccttgcatgggcttatctcataacattcgctatggtgcccaggtgaccgtag

SEQ ID NO: 508258 - DNA, 601 bp, Homo sapiens
  misc_feature (1)...(601): n = A,T,C or G
aggggcaaaaacctgcaaagccacaggtgcacttccttagtggaggttttccatgaggctttacctctgcagcaggctactcctccttcctactaacccccaccctcccaccaccctactgctaacccactcctcccaatcctacccatcccttttaccttccagcagcaccaacctcctgtccataattaagtcacctgcttcaacattagggattacaattccacatgagtttcatagggacacacaggcaaaccatataactctgaccctgatattccagaatytcatgtctttatcacagagcaaaataccatcatgacttttcaaaagtttgaaaagtcttaactcattccaaatgtaaaaaattcaaagtctcatctgagataaggccacagtcccttctgcctatgagtccctgaatttaaaacggagttcttttctttcaaggtacaatgatggtacaggcattgtgtaaactttctcagtccaaagggaagaaatttcccagaaaaataacacaaatgggcccacaagngtgcaagtccataacccagcaggagagtactcactcaatctctcagctccaaaatcatcaaga

SEQ ID NO: 508259 - DNA, 601 bp, Homo sapiens
  misc_feature (1)...(601): n = A,T,C or G
aggggcaaaaacctgcaaagccacaggtgcacttccttagtggaggttttccatgaggctttacctctgcagcaggctactcctccttcctactaacccccaccctcccaccaccctactgctaacccactcctcccaatcctacccatcccttttaccttccagcagcaccaacctcctgtccataattaagtcacctgcttcaacattagggattacaattccacatgagtttcatagggacacacaggcaaaccatataactctgaccctgatattccagaatttcatgtctttatcacagagcaaaataccatcatgacttttcaaaagtttgaaaagtcttaactcattccaaatgtaaaaaattcaaagtctcatctgagataaggccayagtcccttctgcctatgagtccctgaatttaaaacggagttcttttctttcaaggtacaatgatggtacaggcattgtgtaaactttctcagtccaaagggaagaaatttcccagaaaaataacacaaatgggcccacaagngtgcaagtccataacccagcaggagagtactcactcaatctctcagctccaaaatcatcaaga

SEQ ID NO: 508260 - DNA, 601 bp, Homo sapiens
  misc_feature (1)...(601): n = A,T,C or G
aggggcaaaaacctgcaaagccacaggtgcacttccttagtggaggttttccatgaggctttacctctgcagcaggctactcctccttcctactaacccccaccctcccaccaccctactgctaacccactcctcccaatcctacccatcccttttaccttccagcagcaccaacctcctgtccataattaagtcacctgcttcaacattagggattacaattccacatgagtttcatagggacacacaggcaaaccatataactctgaccctgatattccagaatttcatgtctttatcacagagcaaaataccatcatgacttttcaaaagtttgaaaagtcttaactcattccaaatgtaaaaaattcaaagtctcatctgagataaggccacagtcccttctgcctatgagtccctgaatttaaaacggagttcttttctttcaaggtacaatgatggtacaggcattgtgtaarctttctcagtccaaagggaagaaatttcccagaaaaataacacaaatgggcccacaagngtgcaagtccataacccagcaggagagtactcactcaatctctcagctccaaaatcatcaaga

SEQ ID NO: 508261 - DNA, 398 bp, Homo sapiens
cccagacttgagaacggtgagaaatacgtttctgttttttataagctacccagtctatggtagtttgttgtagtagccagaataaaccaagatacagccaatttcatcatttggrctgaactttgagagtgaaatcttagaggaatgaggagcaaatgatataggacagttgcattcagacaggaagggaaagtaacaggaaagcttaccccttcccatcctgtcagataatggaggcagaaaaaaaaagtacaacaaaaaggttcctattcccacataagaatcacacatcaaatgcaaaagtcttttaggaacatagaagtatggggcaatacactaatatcagagcagtagattattttccaaggcagagtctgcaggcccctagaacaacttgt

SEQ ID NO: 508262 - DNA, 398 bp, Homo sapiens
cccagacttgagaacggtgagaaatacgtttctgttttttataagctacccagtctatggtagtttgttgtagtagccagaataaaccaagatacagccaatttcatcatttgggctgaactttgagagtgaaatcttagaggaatgagkagcaaatgatataggacagttgcattcagacaggaagggaaagtaacaggaaagcttaccccttcccatcctgtcagataatggaggcagaaaaaaaaagtacaacaaaaaggttcctattcccacataagaatcacacatcaaatgcaaaagtcttttaggaacatagaagtatggggcaatacactaatatcagagcagtagattattttccaaggcagagtctgcaggcccctagaacaacttgt

SEQ ID NO: 508263 - DNA, 398 bp, Homo sapiens
cccagacttgagaacggtgagaaatacgtttctgttttttataagctacccagtctatggtagtttgttgtagtagccagaataaaccaagatacagccaatttcatcatttgggctgaactttgagagtgaaatcttagaggaatgaggagcaaatgatataggacagttgcattcagacaggaagggaaagtaacaggaaagcttaccccttmccatcctgtcagataatggaggcagaaaaaaaaagtacaacaaaaaggttcctattcccacataagaatcacacatcaaatgcaaaagtcttttaggaacatagaagtatggggcaatacactaatatcagagcagtagattattttccaaggcagagtctgcaggcccctagaacaacttgt

SEQ ID NO: 508264 - DNA, 398 bp, Homo sapiens
cccagacttgagaacggtgagaaatacgtttctgttttttataagctacccagtctatggtagtttgttgtagtagccagaataaaccaagatacagccaatttcatcatttgggctgaactttgagagtgaaatcttagaggaatgaggagcaaatgatataggacagttgcattcagacaggaagggaaagtaacaggaaagcttaccccttcccatcctgtcagataatggaggcagaaaaaaaaagtacaacaaaaaggttcctattcccacataagaatcayacatcaaatgcaaaagtcttttaggaacatagaagtatggggcaatacactaatatcagagcagtagattattttccaaggcagagtctgcaggcccctagaacaacttgt

SEQ ID NO: 508265 - DNA, 562 bp, Homo sapiens
ttcctgttcattgtccattgtccttgaacttctagatatttctcttcaaccatcacmgtctgcagcgatgaagggagtggctttctggtggagcctcttagaatctcatggctgtccacatttctgcctttaaccccctttagcctgtcattcgtttcagccttccaaatcttcagcaagggaagggacttcttggtaaaccaacctgtaaccatatgggaagggcattctgcaaatatagctcccaacttttctgaaagacagaggaacccttagaagggagagttggtgatgccaaattggcaataaataacccaggactgcagctcagctcagcacctaactccatagggcactcactcacttcaggaagggtgcatttactcagtaagacagattaaaggatcacttggttcatatggactcagacaaaagtgggctaagtgatctttaaacagatttgaccaagctgagaaataccaaagacttatgatttttcaatcagaaaacacagcatggaatagcagaaagagtaccagactggaagccagagaacctggaa

SEQ ID NO: 508266 - DNA, 361 bp, Homo sapiens
tcccatggaaaaattactaaaataagggcatgtggaaatacataacacttaagtcacttccaggagagggattgcaaaggtgtgtccataagacttttgactttgatgagataaaagctaggctgccttttcttccttctcactgcatcccatctcctagggccagccygttcctcaaaagagtgaaaaacataggaaaattactgccttaactatcctgatcttcattttttttcctgtgtaaaatgaagacattaataaacaatgcctttcttgttagaaatgtaaaggtcaaacataaagaaacgtgaaatcctaagtcctgcatgccttctaccactggtctagtcacgtgtgccag

SEQ ID NO: 508267 - DNA, 361 bp, Homo sapiens
tcccatggaaaaattactaaaataagggcatgtggaaatacataacacttaagtcacttccaggagagggattgcaaaggtgtgtccataagacttttgactttgatgagataaaagctaggctgccttttcttccttctcactgcatcccatctcctagggccagcctgttcctcaaaagagtgaaaaacataggaaaattactgccttaactatcctgatcttcattttttttcctgtgtaaaatgaagacattaataaacaatgcctttcttgttagaaatgtaaaggtcaaacrtaaagaaacgtgaaatcctaagtcctgcatgccttctaccactggtctagtcacgtgtgccag

SEQ ID NO: 508268 - DNA, 361 bp, Homo sapiens
tcccatggaaaaattactaaaataagggcatgtggaaatacataacacttaagtcacttccaggagagggattgcaaaggtgtgtccataagacttttgactttgatgagataaaagctaggctgccttttcttccttctcactgcatcccatctcctagggccagcctgttcctcaaaagagtgaaaaacataggaaaattactgccttaactatcctgatcttcattttttttcctgtgtaaaatgaagacattaataaacaatgcctttcttgttagaaatgtaaaggtcaaacataaagaaaygtgaaatcctaagtcctgcatgccttctaccactggtctagtcacgtgtgccag

SEQ ID NO: 508269 - DNA, 431 bp, Homo sapiens
aattaatcactcatgtaaattaataatccaatactgacctctggtgtgtaatgacgaaattgcttactggatgaactagtggatgcttgggaagagttttatgttttaatataagaacatctttctccaagcaaagaagcttcctaggctataattacaaatgtggaaattgggaaacgtaaaactaactaactgaatgtaaagaatgtatctayggtagtttatagtagtgggtaagtaaaaaaggaaaagagagaacaactgacactagaactgccccattcaaaaactttttttacaattcggccatcttttaagaaactaaacacagtgagttgagaatgaatgatgtaccctccctcacttgactatatttgacttggacttaaaaaaaagaggctgttttgaatttctgtgagtcatctcctcag

SEQ ID NO: 508270 - DNA, 449 bp, Homo sapiens
aagtgagtggtaggcttcaatgtagtcacccagaaaacattaaatatttgtcatatgttcaagatacattttgaaacatctaaggaaatagaaattatcactttgttacatgtgcatgtaggtgcacacacagagtattactcagcgaattttttcagctttattctatataattatatattttttccagccttattctgcctgactatccagattttacactgtttagatctggctgtttccaaattgcacaaactgtcttgaactgaaatggacagaaggcaggcaaatactggtagaaragggcaggatctttggcaagggctccacccacaagcctggacccacagcccaaagtgagaactatccctgttttcccacctgattgttgccttttggcccaccccacaccaccccctatcctgtgcccataagaatcccaagcccca

SEQ ID NO: 508271 - DNA, 449 bp, Homo sapiens
aagtgagtggtaggcttcaatgtagtcacccagaaaacattaaatatttgtcatatgttcaagatacattttgaaacatctaaggaaatagaaattatcactttgttacatgtgcatgtaggtgcacacacagagtattactcagcgaattttttcagctttattctatataattatatattttttccagccttattctgcctgactatccagattttacactgtttagatctggctgtttccaaattgcacaaactgtcttgaactgaaatggacagaaggcaggcaaatactggtagaagagggcaggatctttggcaagggctccacccacaagcytggacccacagcccaaagtgagaactatccctgttttcccacctgattgttgccttttggcccaccccacaccaccccctatcctgtgcccataagaatcccaagcccca

SEQ ID NO: 508272 - DNA, 449 bp, Homo sapiens
aagtgagtggtaggcttcaatgtagtcacccagaaaacattaaatatttgtcatatgttcaagatacattttgaaacatctaaggaaatagaaattatcactttgttacatgtgcatgtaggtgcacacacagagtattactcagcgaattttttcagctttattctatataattatatattttttccagccttattctgcctgactatccagattttacactgtttagatctggctgtttccaaattgcacaaactgtcttgaactgaaatggacagaaggcaggcaaatactggtagaagagggcaggatctttggcaagggctccacccacaagcctggacccwcagcccaaagtgagaactatccctgttttcccacctgattgttgccttttggcccaccccacaccaccccctatcctgtgcccataagaatcccaagcccca

SEQ ID NO: 508273 - DNA, 658 bp, Homo sapiens
gctgctttgtgctttgcttccraaggcctgcaactgagactttttttttttttgagactgagtcttcctctgtcacccaggctggaatgcagtggcatgatctcagcttactgcaacctctgcctcctgggttcaagcaatcctcctgcttcagcctcctgagtagctgggattacaggcacctgccaccaaacctggctagtttttgtatttttagtagagatgaggtttcactatattggccaggctggtctcaaactcctgacctcttgatccgcctgcctcagccttccaaagtgctgggataacaggcatgagccaccacacccggctgcaactgagactgtctttaaggatctctgcatggagctgggagaatggggagttttaaccctctgtgcagttcttaggcaatgactgactgactggtccaagtgtctgacaatctgactccctggcctcaagctggatgaggctgaagctggactttgacaaaatcacacactttcttgggttctctctcttccatatccttccttcccgtctccttccctgtcttcctctgagatcaccttcttaataaattactcccacatgactcctcatctcaggggctgcttgaggagaatatgacatcagacaatatatgcacaaagag

SEQ ID NO: 508274 - DNA, 658 bp, Homo sapiens
gctgctttgtgctttgcttccgaaggcctgcaactgagactttttttttttttgagactgagtcttcctctgtcacccaggctggaatgcagtggcatgatctcagcttactgcaacctctgcctcctgggttcaagcaatcctcctgcttcagcctcctgagtagctgggattacaggcacctgccaccaaacctggctagtttttgtatttttagtagagatgaggtttcactatattggccaggctggtctcraactcctgacctcttgatccgcctgcctcagccttccaaagtgctgggataacaggcatgagccaccacacccggctgcaactgagactgtctttaaggatctctgcatggagctgggagaatggggagttttaaccctctgtgcagttcttaggcaatgactgactgactggtccaagtgtctgacaatctgactccctggcctcaagctggatgaggctgaagctggactttgacaaaatcacacactttcttgggttctctctcttccatatccttccttcccgtctccttccctgtcttcctctgagatcaccttcttaataaattactcccacatgactcctcatctcaggggctgcttgaggagaatatgacatcagacaatatatgcacaaagag

SEQ ID NO: 508275 - DNA, 337 bp, Homo sapiens
agaggcctgaggaaaagcagatggcgctggggctctacctccagggcagaataactgatttaycctgactggcagggagtgaggttggtggctggtccaccggctcctggcacacccttgcagaggtggctggttgctctttgagccagcttggcctcgctggcatgcacaggcctcagtgcaacaaatgtgctgcaaatggagccacacagaggaaatgagcagcaggctcaggagcggggtgtgcgctgcctttggggctccattccatgcatcagggcttctacagcaccgtgggcttcttggatgccaagaggcagaccacaggccatcttga

SEQ ID NO: 508276 - DNA, 337 bp, Homo sapiens
agaggcctgaggaaaagcagatggcgctggggctctacctccagggcagaataactgatttatcctgactggcagggagtgaggttggtggctggtccaccggctcctggcacacccttgcagaggtggctggttgctctttgagycagcttggcctcgctggcatgcacaggcctcagtgcaacaaatgtgctgcaaatggagccacacagaggaaatgagcagcaggctcaggagcggggtgtgcgctgcctttggggctccattccatgcatcagggcttctacagcaccgtgggcttcttggatgccaagaggcagaccacaggccatcttga

SEQ ID NO: 508277 - DNA, 337 bp, Homo sapiens
agaggcctgaggaaaagcagatggcgctggggctctacctccagggcagaataactgatttatcctgactggcagggagtgaggttggtggctggtccaccggctcctggcacacccttgcagaggtggctggttgctctttgagccagcttggcctcgctggcatgcacaggcctcagtgcaacaaatgtgctgcaaatggagccacayagaggaaatgagcagcaggctcaggagcggggtgtgcgctgcctttggggctccattccatgcatcagggcttctacagcaccgtgggcttcttggatgccaagaggcagaccacaggccatcttga

SEQ ID NO: 508278 - DNA, 337 bp, Homo sapiens
agaggcctgaggaaaagcagatggcgctggggctctacctccagggcagaataactgatttatcctgactggcagggagtgaggttggtggctggtccaccggctcctggcacacccttgcagaggtggctggttgctctttgagccagcttggcctcgctggcatgcacaggcctcagtgcaacaaatgtgctgcaaatggagccacacagaggaaatgagcagcaggctcaggagcggggtgtgcgctgcctttsgggctccattccatgcatcagggcttctacagcaccgtgggcttcttggatgccaagaggcagaccacaggccatcttga

SEQ ID NO: 508279 - DNA, 529 bp, Homo sapiens
ccaatcctcggagcagctgaaaaaagagctagcgccacctgtggatgcacccacaatgaaatcagaggccacgtgaggtttgcaaggtggagtggcctgtagttttaactcrggcactatggcaatgcagacccaaaccaattgtgccagttcttgctgggtggcaaagtgttgtcaggctttgtggtcactcctgatttctgtttggaagcacagttctctttccaatgagaatggaaaattggaaaggcctgtaaaaggccgtagagtggagatgtataaaaatgtatggtcacccatgttttaggggtcgacaccatggacttttatctcgctcaccaacttcctcacacatacagctcactccctgtggcctcagccatctcaggcactacaaaatcctcactgcttgaaattcacttatggagtccaacaaacaactttctttaaaaaaaaaaaaggcagtaaaatctcagaatttctgtgcaatgcttgcaaccttcccacttattaaataaacagaacacca

SEQ ID NO: 508280 - DNA, 529 bp, Homo sapiens
ccaatcctcggagcagctgaaaaaagagctagcgccacctgtggatgcacccacaatgaaatcagaggccacgtgaggtttgcaaggtggagtggcctgtagttttaactcagrcactatggcaatgcagacccaaaccaattgtgccagttcttgctgggtggcaaagtgttgtcaggctttgtggtcactcctgatttctgtttggaagcacagttctctttccaatgagaatggaaaattggaaaggcctgtaaaaggccgtagagtggagatgtataaaaatgtatggtcacccatgttttaggggtcgacaccatggacttttatctcgctcaccaacttcctcacacatacagctcactccctgtggcctcagccatctcaggcactacaaaatcctcactgcttgaaattcacttatggagtccaacaaacaactttctttaaaaaaaaaaaaggcagtaaaatctcagaatttctgtgcaatgcttgcaaccttcccacttattaaataaacagaacacca

SEQ ID NO: 508281 - DNA, 528 bp, Homo sapiens
caatcctcggagcagctgaaaaaagagctagcgccacctgtggatgcacccacaatgaaatcagaggccacgtgaggtttgcaaggtggagtggcctgtagttttaactcaggcactatggcaatgcagacccaaaccaattgtgccagttcttgctgggtggcaaagtgttgtcaggctttgtggtcactcctgatttctgtttggaagcacagttctctttcyaatgagaatggaaaattggaaaggcctgtaaaaggccgtagagtggagatgtataaaaatgtatggtcacccatgttttaggggtcgacaccatggacttttatctcgctcaccaacttcctcacacatacagctcactccctgtggcctcagccatctcaggcactacaaaatcctcactgcttgaaattcacttatggagtccaacaaacaactttctttaaaaaaaaaaaaggcagtaaaatctcagaatttctgtgcaatgcttgcaaccttcccacttattaaataaacagaacacca

SEQ ID NO: 508282 - DNA, 351 bp, Homo sapiens
tggagttacctggccatgtaaaaggacaagggaaggcagaccatcctcaacttcttcctgtgtttctagcagggaaggaamgcaatggctttagtccctccgcctctaggtaacaaggcaaaggcctccgtaacccaggcagacaggatgtggggaaggtcttgtgacttttcctaactcagaatttctgagtcagtgggctcccggagaaagactgtcctcttggcatgtgaccctgaaggcttctagcaccaaaggctcgctaacacctcagagcctgtcttcaggtaaaggggatgggaggcagaacccttctcctgattggtgcctgaaggaggcaagaacgagcat

SEQ ID NO: 508283 - DNA, 351 bp, Homo sapiens
tggagttacctggccatgtaaaaggacaagggaaggcagaccatcctcaacttcttcctgtgtttctagcagggaaggaaagcaatggcttyagtccctccgcctctaggtaacaaggcaaaggcctccgtaacccaggcagacaggatgtggggaaggtcttgtgacttttcctaactcagaatttctgagtcagtgggctcccggagaaagactgtcctcttggcatgtgaccctgaaggcttctagcaccaaaggctcgctaacacctcagagcctgtcttcaggtaaaggggatgggaggcagaacccttctcctgattggtgcctgaaggaggcaagaacgagcat

SEQ ID NO: 508284 - DNA, 351 bp, Homo sapiens
tggagttacctggccatgtaaaaggacaagggaaggcagaccatcctcaacttcttcctgtgtttctagcagggaaggaaagcaatggctttagtccctccgcctctaggtaacaaggcaaaggcctccgtaacccaggcagacaggatgtggggaaggtcttgtgwcttttcctaactcagaatttctgagtcagtgggctcccggagaaagactgtcctcttggcatgtgaccctgaaggcttctagcaccaaaggctcgctaacacctcagagcctgtcttcaggtaaaggggatgggaggcagaacccttctcctgattggtgcctgaaggaggcaagaacgagcat

SEQ ID NO: 508285 - DNA, 513 bp, Homo sapiens
aaaaaatgagacaatatgaaaggttttgtgaaatatatttcttctgtagtaaatgacagctaatatattcaagaaggcaatgttctgtataaattactatcactaycaatttttccttatacacacgcatacattatagaaatgtgtaaaacaacatcactactcataataatataattcggctgtgtgtaaaacatcactactcacaatataattcagcctatattccaaattatttacaaaaatataattactacactacacacacacagacacacacacgacacacacagtgtttcaacttgttgtttcattttgtgttttaactttatgttttggacatatttccaagttagaacatttagagctacaatgttttaaactgtatattattccacctttgaatataccatacattatgtaaccaattcccaatcaatggctacagagctgtatccatgttttctacattgtaaacaatcctactttaaacatctttgacagagattttta

SEQ ID NO: 508286 - DNA, 526 bp, Homo sapiens
taccgaaatgccatggagctaattgattttcttattgttttggcaggcagttgatccacttggattgaggccaaaagttctggccagccttttgtgagttatgatttcaatgtcagttagtttaatattcaaagtctttgccatgatatttagatctctttagtgtgtgcacaacccttggccagtctgagacctgagcagtcatctcttttgtatcagttttaaagtctttgttrggatcagatgcttaggatcagatccatgcattcatttctcctggattagctgaggagttcataaacaactttatagggacaatcccaagctgcatcttctccatgatctccttgctacttacccattttctgggtctctcctattttgtttttcagccagaaaaaaaatgaggttttatttacccttttcatctctgtgtgtcccccaaattcatttgcattcaaggccaagtcacaggaaggcagagagaaaaaaaagggaacagggtgtaccccattcttttggagtc

SEQ ID NO: 508287 - DNA, 594 bp, Homo sapiens
atttgcatctcttataattgtatcatggccttattatgtgtaataataacatttcagaaaatatctagttgaaatatatattgaatataaatcattatatatccagacccagtttaaatttaaatatacaggccacaattacaaaagtaatttgcagaragtaatatcactttgggaattcctatgccagcaattagttttatgggtaaatacaacagaattaggaagggctaggcaaggagttgcatggagaaacatataaaaggagttgaaataaaaataaaatgaattcatgaactacatattattctcatgccactctctctcctgctccggcaccacctatttttgttttgttttgtattgttttgttctgtcagcatacaatattcctccctcaggatctctatgctagttgttctctatttctggaatactagtaaacaccatatgtttgcctagttgtttttttctaatcatttggcatgaatgttactttctccagtgaccaagatgcctttcctgaatactatttgtaatgtagtcccacctcaccatcttccatatcaccttgctttattacttccaaactac

SEQ ID NO: 508288 - DNA, 617 bp, Homo sapiens
tacgttgcattctcttaaaatcatgcaggggggtgataaaagaaactgactgataaaccatctagattttctcatttttaaaatggagaaaataatggtatttgtcaatgagagttgttatgaggattaaatacactactatacaaatgaacaatgcctgtcacaaagagcccaataaatgctatgtattagtaatggtagtggaattaataagcaggtataatagtcttaatatacacaatagtagaaatgttatcattattggcgttgttagtagatgtaatagaaatagttatttcaagattgctaaaatataagaaaatcatcaccaccactatagtaaattttagctgaatgcattcagtcagtggcaaatgccaatcagttttcaaatacctaatatttagctacagtaggtcaacactgattggctgatttactgattggtgtgtggtgtgaaaattcccaccagacacgtggaggtaattgggtttcgagtaaaatagctaatcatctttttcttattcttcctaaggaaaaacaaaaagaaatcaaataggagagacattaaaaagtataytattatgcaatgactggtgtttttttaatgtttatat

SEQ ID NO: 508289 - DNA, 572 bp, Homo sapiens
gctgtaagagtagtttatagtgacactaactataactcttttattacagaaaacaaatataactggagtaatactatcttcctgattaaaaaaataataatccattgtgtaaagaaaatgcattatgagatttgagactttagtagtttcttgtcaattagatttactgagtagctaaataataaagaaagttaagtaatcccaattatcgaagacataaatgtactgtgaatcaagtcctggtaagtactagcattaatatttttaaattcttttgttgttgtttatttggcttagtggccaaatcatgataaataaaataaaataatattattatgcccaaatgaaaaattaatataatcgacacttaaatatgtagaacattgcaatactatcttagattgttgataggcagaactgtgagagtagtcgttacttacggctatcaaaaattttccttaaggctggatatcacacaaatcaactatattttcctatttcrtatacagtgttagacaaactcctgcccaatacattttctttaaaactatgcctataacgttttagtaatt

SEQ ID NO: 508290 - DNA, 621 bp, Homo sapiens
gataaaaaataatgttgagtctaatcctatgataggagaatgttagaaaaacatgctttcttagatatgaacctctcatctttgtaaattacctgttcttgggaccttaatagtgccaaattatagtcagtctttttgtatccttgaaggagtaatttacttcaagtgaacaaaaatttgctttcaaaatagaactccacttttatgactgtaacttagcctgatattagctagtgaaagagcagtatcaatgatattctctttggggaaatcctgagtgtttgtttaatagataatgacaatatatatttttaataagttaaagagtatttttaaaagccctcaagagaatatgaagaaayggaatttgataattgttgtgtgtgtttctttacatggacattattccataacagaacagaataaaccatttagaaaaaaactccgagtggacttttttttactattggtcacttaatttattcactaatttttcaaacattgttagatacctgtcattggacagaatcagagatcaataccgaatactgggaggaagggacagaggaacatcactggaaaagctgagagaggcttcacatgggcagtcagtgggcaaaa

SEQ ID NO: 508291 - DNA, 540 bp, Homo sapiens
catatttagttatgttcaaagtacacttgaaaacaaaaagtaacaaataacttaaaagtatggaacattgagaaacttgttatagagattatttttacttattttcaaaaggarccataatccttatgtattacttaatcccttggatgaaaaataaaaatgtgaagcaaatatctgtctgatccacttgccaatttgagagcaatattggatcatacacatttgaaaatcaaaggtcctggtagagacataaaacatcatttcctaaagaaaatacttcttaaatgtcagcttctaggttactttttaagaaatttccactcttccctgatatcctattttgacatgaccttctaaggaaacaggttgttcatactaagtaaatttactagaaagtaatttacaatgaaaatataaaggtctcgatagctttatatgtggactatgctctaacatctccacttagaaatccatgttaatcaacatttattaaatatgtatttgccagtagattataatttgtgatatatttacgaatta

SEQ ID NO: 508292 - DNA, 524 bp, Homo sapiens
aaacacttaataacaattattattgtatttattctacagattaaacatgartttaaatgcaaacaattgttgtctatagtagaccaagatgcttccctcaagcaacaaaatattgggataagagcttaaacctccaaaacatacaaaaaacatctaaacatttcaataggaacatggttggaagatgcattattgtgtttttacactttaaaatttcaaatagtaaacttaacatatcattgttcacatttatacatagtctgtggaagacttgcatttgtgaccatcatcaatgaggctcagtaacagcttctgaaggagttagtgaaacctagtattcacaggaggcaggaagaaaaaagttgggtcaggattagtgatgtaatcagcatgaaatatgttaaattagaacacttgagaagcaagaagatctatattgcttcattacaaacatgttccaaaaaaccatactgctgggaataacatagcattgctaccttttcttattaatgtaaaattatcta

SEQ ID NO: 508293 - DNA, 524 bp, Homo sapiens
aaacacttaataacaattattattgtatttattctacagattaaacatgaatttaaatgcaaacaattgttgtctatagtagaccaagatgcttccctcaagcaacaaaatattgggataagagcttaaacctccaaaacatacaaaaaacatctaaacatttcaataggaacatggttggaagatgcattattgtgtttttacactttaaaatttcaaayagtaaacttaacatatcattgttcacatttatacatagtctgtggaagacttgcatttgtgaccatcatcaatgaggctcagtaacagcttctgaaggagttagtgaaacctagtattcacaggaggcaggaagaaaaaagttgggtcaggattagtgatgtaatcagcatgaaatatgttaaattagaacacttgagaagcaagaagatctatattgcttcattacaaacatgttccaaaaaaccatactgctgggaataacatagcattgctaccttttcttattaatgtaaaattatcta

SEQ ID NO: 508294 - DNA, 524 bp, Homo sapiens
aaacacttaataacaattattattgtatttattctacagattaaacatgaatttaaatgcaaacaattgttgtctatagtagaccaagatgcttccctcaagcaacaaaatattgggataagagcttaaacctccaaaacatacaaaaaacatctaaacatttcaataggaacatggttggaagatgcattattgtgtttttacactttaaaatttcaaatagtaaacttaacatatcattgttcacatttatacatagtctgtggaagacttgcatttgtgaccatcatcaatgaggctcagtaacagcttctgaaggagttagtgaaacctagtattcacaggaggcaggaagaawaaagttgggtcaggattagtgatgtaatcagcatgaaatatgttaaattagaacacttgagaagcaagaagatctatattgcttcattacaaacatgttccaaaaaaccatactgctgggaataacatagcattgctaccttttcttattaatgtaaaattatcta

SEQ ID NO: 508295 - DNA, 524 bp, Homo sapiens
aaacacttaataacaattattattgtatttattctacagattaaacatgaatttaaatgcaaacaattgttgtctatagtagaccaagatgcttccctcaagcaacaaaatattgggataagagcttaaacctccaaaacatacaaaaaacatctaaacatttcaataggaacatggttggaagatgcattattgtgtttttacactttaaaatttcaaatagtaaacttaacatatcattgttcacatttatacatagtctgtggaagacttgcatttgtgaccatcatcaatgaggctcagtaacagcttctgaaggagttagtgaaacctagtattcacaggaggcaggaagaaaaaagttgggtcaggattagtgatgyaatcagcatgaaatatgttaaattagaacacttgagaagcaagaagatctatattgcttcattacaaacatgttccaaaaaaccatactgctgggaataacatagcattgctaccttttcttattaatgtaaaattatcta

SEQ ID NO: 508296 - DNA, 598 bp, Homo sapiens
ccctgaaagacatatccagaagtaatattaaaaaaaatctcagcatcctgtggcccagtcaagtttatacataaaattaaccatcacaagttttaaagcgttgtgtaatgtatcaagacccattttcaatgtaaatttcagccaactaattccttacttacagaaacaattgggaaagtaacaacttaaatgcattgttttaacttaatctgactatttattacatttttatttttctttgttgaaaartgtttctcacagtcaaatcttagcaaaggttatcctacctaaaactgtatataattggatatcctctgctatctaatctgtcaggttgtatttttgggggagggggattgtttgattgactattttttaatccttttattgacaatgtctatctccacacttgagactatgtctcattcatttcaatagatctctccttctaccctcatgctgtcctttcagatcgatcagctttgttaagagaataaaagctttcctcaaatccagatagattatcattagtatgttgtccattttgctacttcattgctgtgggaaaataaataataagtacattcaattgagtttt

SEQ ID NO: 508297 - DNA, 598 bp, Homo sapiens
ccctgaaagacatatccagaagtaatattaaaaaaaatctcagcatcctgtggcccagtcaagtttatacataaaattaaccatcacaagttttaaagcgttgtgtaatgtatcaagacccattttcaatgtaaatttcagccaactaattccttacttacagaaacaattgggaaagtaacaacttaaatgcattgttttaacttaatctgactatttattacatttttatttttctttgttgaaaagtgtttctcacagtcaaatcttagcaaaggttatcctacctaaaactgtatataattggatatcctctgctatctaatctgtcaggttgtatttttgggggagggggattgtttgattgactattttttaatccttttattgacaatgtctatcyccacacttgagactatgtctcattcatttcaatagatctctccttctaccctcatgctgtcctttcagatcgatcagctttgttaagagaataaaagctttcctcaaatccagatagattatcattagtatgttgtccattttgctacttcattgctgtgggaaaataaataataagtacattcaattgagtttt

SEQ ID NO: 508298 - DNA, 490 bp, Homo sapiens
tgtttaaagacctaatggaatagtaaagtgtgaataagtttgttccttctatatcggcttccactgtatcacagcttgcttctactctctgaagaatatttgaataaatgttcagggggaggtaggaaggaatactgctatgactaattagtaaagaggctttatatcatctaaattggatccgctgtgacattccattactcactacactgtagtatacgttgagtttaagcataaagttaatgtatgtttgtaaacagtargctctctccctcttgtattttatatctcagagatgccagatatctctttaagattttgatgatattaaataaataaatacacacacacagacttcttaacaaatcattttataggtttttggttgatatttaattcctctgttccaaggaggggagcctgctgattccaaagaccatattggtctcctcactctagaaactgtgcaagccaagatgacaagtgagag

SEQ ID NO: 508299 - DNA, 562 bp, Homo sapiens
ttttttcttgtaaatttgttcaagttccttgtagattcttaataatagccctttgtcagatggatagtttgcaaaaattgtctcccattctgtaggtagcctgttcactctgaggatagytgtttttttttttttttgttttgttttgtttttgctgtgctgaagctcttggagacaagttttataccaagatatgtgagggcagggggtcctttgtcattagcttgtttcctagaatacaaaatgatgcacaggtttttaaactataactgctttcaatgagtgcagggctcggatacagttcaacattgccatcccatgaacatctttggtcatatattttcaaactgatcttacttcagttgaacttgatacattacttgtactatatgtgtctaaagtgacttcatcaacaataacctctgatttaacattgcaacagaaagttatatgttgcacctttataccctgaaaggcacagaaacagaccaatttgttttaagtgaagcaagtatttgccatttgaaggacgatacaatctcatttttccttggaagcctca

SEQ ID NO: 508300 - DNA, 562 bp, Homo sapiens
ttttttcttgtaaatttgttcaagttccttgtagattcttaataatagccctttgtcagatggatagtttgcaaaaattgtctcccattctgtaggtagcctgttcactctgaggatagttgtttttttttttttttgttttgttttgtttttgctgtgctgaagctcttggagacaagttttataccargatatgtgagggcagggggtcctttgtcattagcttgtttcctagaatacaaaatgatgcacaggtttttaaactataactgctttcaatgagtgcagggctcggatacagttcaacattgccatcccatgaacatctttggtcatatattttcaaactgatcttacttcagttgaacttgatacattacttgtactatatgtgtctaaagtgacttcatcaacaataacctctgatttaacattgcaacagaaagttatatgttgcacctttataccctgaaaggcacagaaacagaccaatttgttttaagtgaagcaagtatttgccatttgaaggacgatacaatctcatttttccttggaagcctca

SEQ ID NO: 508301 - DNA, 562 bp, Homo sapiens
ttttttcttgtaaatttgttcaagttccttgtagattcttaataatagccctttgtcagatggatagtttgcaaaaattgtctcccattctgtaggtagcctgttcactctgaggatagttgtttttttttttttttgttttgttttgtttttgctgtgctgaagctcttggagacaagttttataccaagatatgtgagggcagggggtcctttgtcattagcytgtttcctagaatacaaaatgatgcacaggtttttaaactataactgctttcaatgagtgcagggctcggatacagttcaacattgccatcccatgaacatctttggtcatatattttcaaactgatcttacttcagttgaacttgatacattacttgtactatatgtgtctaaagtgacttcatcaacaataacctctgatttaacattgcaacagaaagttatatgttgcacctttataccctgaaaggcacagaaacagaccaatttgttttaagtgaagcaagtatttgccatttgaaggacgatacaatctcatttttccttggaagcctca

SEQ ID NO: 508302 - DNA, 562 bp, Homo sapiens
ttttttcttgtaaatttgttcaagttccttgtagattcttaataatagccctttgtcagatggatagtttgcaaaaattgtctcccattctgtaggtagcctgttcactctgaggatagttgtttttttttttttttgttttgttttgtttttgctgtgctgaagctcttggagacaagttttataccaagatatgtgagggcagggggtcctttgtcattagcttgtttcctagaatacaaaatgatgcacaggtttttaaactataactgctttcaatgagtgcagggctcggatacagttcaacattgccatcccatgaacatctttggtcatatattttcaaactgatcttacttcagttgaacttgatacattacttgtactatatgtgtctaaagtgacttcatcaacaataacctctgatttaacattgcaacagaaagttatatgttgcacctttataccctgaaaggcacagaaayagaccaatttgttttaagtgaagcaagtatttgccatttgaaggacgatacaatctcatttttccttggaagcctca

SEQ ID NO: 508303 - DNA, 597 bp, Homo sapiens
atgacttcacataatcttaactaactctttaaatattctatctctaaatatrgtcatattgagaagtttacctttaatgagatatatattgttgtcaataaactgttatgcttatcactcactctggcctcaatacttcatatatattgtctaaggtacctcagaaggtatttggtttcattcgttcataatgtcagtcagtaagtcaggagataagtcagctacagtacccagtaaactctgccttatgtgtacctatgtgctgggctttgtttcagaggctgatggacaagcaaaattcttgacgttagaaagctttctgcctagtacagtaacttagaaaactttttgctttagtttcattaattgattttgaagtcttcaaaaaaaataaaatcattatatatcctcaatcatttttgtctaattcttcctaaatagggtgagttttatgtctaaacttcccttctagacaaatgagtgcttggaggcaaatgatcatatgtgaggatgggggattgaagaccctgggtctggcaatggggcaagatttcagaagtcctcagtttgtatattatcaaagcccaaagacacaat

SEQ ID NO: 508304 - DNA, 597 bp, Homo sapiens
atgacttcacataatcttaactaactctttaaatattctatctctaaatatggtcatattgagaagtttacctttaatgagatatatattgttgtcaataaactgttatgcttatcactcactctggcctcaatacttcatatatattgtctaaggtacctcagaaggtatttggtttcattcgttcataatgtcagtcagtaagtcaggagataagtcagctacagtacccagtaaactctgccttatgtgtacctatgtgctgggctttgtttcagaggctgatggacaagcaaaattcttgacgttagaaagctttctgcctagtayagtaacttagaaaactttttgctttagtttcattaattgattttgaagtcttcaaaaaaaataaaatcattatatatcctcaatcatttttgtctaattcttcctaaatagggtgagttttatgtctaaacttcccttctagacaaatgagtgcttggaggcaaatgatcatatgtgaggatgggggattgaagaccctgggtctggcaatggggcaagatttcagaagtcctcagtttgtatattatcaaagcccaaagacacaat

SEQ ID NO: 508305 - DNA, 665 bp, Homo sapiens
cttgagcatactttgattattagacttaatatagtatatgcagatttatttatttatatgtcagtttctctttccagagaaatggaaagagaaattactgtatatgaggcaagcacagtgcctcatacacagtaaataacatatagtagaaaacaaatgttggcaaaattaaattgaactaaacacaaaacacatgatttattcattgatgtatttcttgacatctccctcttacatgctgaatcaaattctcaccaaagccagtcagttctgttttcaaagtatctctaaaatcctctctcaccacctccagtttctactttgttggtgccaccataatccttcactcagatgactgtaatatcttctgtattagtctgttctcacattgctttaaagaaatgcctgaggctgggtaatttataagaaaagaggtttaattggctcwtggctccacaggccatacaagcatggctgcatctgcttctggggaggcttcagggagcttttactcatggtggaaggcaaagccaaagcaggcatcttcacatggctggagcaggaggagcgggcagggggagcatacagtaccaagcgggggatgatgctaaatcattcatgagaactccgcccccacgatccagttacctcccaccaggccccac

SEQ ID NO: 508306 - DNA, 381 bp, Homo sapiens
atatatgtgattttaaagaaaagtaatatcaaactcttgccttctgtagtatctgagactgtgggtcaccaatgtgattagggtttatttcctagttcctatagaagcaaaagtgggactaactgctggactaaacttgtaacaatagggaatgtggtgtccgtttacatttttcagagtttaaaatttatgccttggtgactaatagttatctagttactgtgtgtgtgtgtgcgcacatttgtgtgtgtgtgcatgcayaggagaaacagatgcctaacccaagacatcttagctagcattgccatgtcttcctgcaggggacctggcctgaagacctcgcctgactggtgggacagtatgctgtggcaggaggtgctg

SEQ ID NO: 508307 - DNA, 601 bp, Homo sapiens
gggcccagcactgtcacgtgccaggagtgagctgcccctgagcctgggcaccacgaggccgaggtgacattgatagctctcacaggcccctgcccaagagccccagaagcccctgtgtgtgcyggcgccctgtgcttgctgccaggggccggttgagcacatacccgctggagccatccctgatccgagtttggaggtgcagggcccgtcaccttttgtgcgttgacgaactttcctccaggccagcctctctcatccccggccctgtggacactgtggcaggagagctccttgctgtgaggctggcctgtgcattgcagaggattcagcagcatccccggcctccacccctagatgccggtcaccctctgccgccccgccacacacacacacgcaatacacccatggctgcaggcattgccaatgtccccaggaatccagtgtggccgccagtgagcaggaccgccctgggcccatgagtgctggaacaggcatcacacagtcatggccccccgctggccccaccccacagtgacttggctcccagggacccgaaggacaactcgtagttgttcaagttcgttcagagaccctcagatcc

SEQ ID NO: 508308 - DNA, 601 bp, Homo sapiens
gggcccagcactgtcacgtgccaggagtgagctgcccctgagcctgggcaccacgaggccgaggtgacattgatagctctcacaggcccctgcccaagagccccagaagcccctgtgtgtgccggcgccctgtgcttgctgccaggggcyggttgagcacatacccgctggagccatccctgatccgagtttggaggtgcagggcccgtcaccttttgtgcgttgacgaactttcctccaggccagcctctctcatccccggccctgtggacactgtggcaggagagctccttgctgtgaggctggcctgtgcattgcagaggattcagcagcatccccggcctccacccctagatgccggtcaccctctgccgccccgccacacacacacacgcaatacacccatggctgcaggcattgccaatgtccccaggaatccagtgtggccgccagtgagcaggaccgccctgggcccatgagtgctggaacaggcatcacacagtcatggccccccgctggccccaccccacagtgacttggctcccagggacccgaaggacaactcgtagttgttcaagttcgttcagagaccctcagatcc

SEQ ID NO: 508309 - DNA, 601 bp, Homo sapiens
gggcccagcactgtcacgtgccaggagtgagctgcccctgagcctgggcaccacgaggccgaggtgacattgatagctctcacaggcccctgcccaagagccccagaagcccctgtgtgtgccggcgccctgtgcttgctgccaggggccggttgagcacatacccgctggagccatccctgatccgagtttggaggtgcagggcccgtcaccttttgtgcgttgacgaactttcctccaggccagcctctctcatccccggccctgtggacactgtggcaggagagctccttgctgtgaggctggcctgtgcattgcagaggattcagcagcatcccyggcctccacccctagatgccggtcaccctctgccgccccgccacacacacacacgcaatacacccatggctgcaggcattgccaatgtccccaggaatccagtgtggccgccagtgagcaggaccgccctgggcccatgagtgctggaacaggcatcacacagtcatggccccccgctggccccaccccacagtgacttggctcccagggacccgaaggacaactcgtagttgttcaagttcgttcagagaccctcagatcc

SEQ ID NO: 508310 - DNA, 490 bp, Homo sapiens
gggcatggtggtgcacgcgtgtagtcccagctacttgggaggctgaggcacgagaatcrtttgaacccgagaggcagaggttgtagtgagctgagatggcgccactgcactcaaacctgggcgacagagtaagaccccgtctcaaaaaaaaaagaaaaaaaggtgaagtcctttgtctttttcccacttctggtcctagctccctgggggcagagggagtgggtggggttatcttctgaatgttcagcaggatctcaaataaagcattactgtattaataaaaaggaataggggctggggcttgggaaggagggtgaagtgtgtgtgcaaacgaagggccttctcttggatctggggaccaatcctagggttcctcaggtgccgctggcatgtctttcacatggaagcctgtcttccctccatcagccccccggggttccaagcctcccatagggtggttggttttccaaagcccagaacctgggccagg

SEQ ID NO: 508311 - DNA, 490 bp, Homo sapiens
gggcatggtggtgcacgcgtgtagtcccagctacttgggaggctgaggcacgagaatcatttgaacccgagaggcagaggttgtagtgagctgagatggcgccactgcactcaaacctgggcgacagagtaagaccccgtctcaaaaaaaaaagaaaaaaaggtgaagtcctttgtctttttcccacttctggtcctagctccctgggggcagagggagtgggtggggttatcttctgaatgttcagcaggatctcaaataaagcattactgtattaataaaaaggaatrggggctggggcttgggaaggagggtgaagtgtgtgtgcaaacgaagggccttctcttggatctggggaccaatcctagggttcctcaggtgccgctggcatgtctttcacatggaagcctgtcttccctccatcagccccccggggttccaagcctcccatagggtggttggttttccaaagcccagaacctgggccagg

SEQ ID NO: 508312 - DNA, 490 bp, Homo sapiens
gggcatggtggtgcacgcgtgtagtcccagctacttgggaggctgaggcacgagaatcatttgaacccgagaggcagaggttgtagtgagctgagatggcgccactgcactcaaacctgggcgacagagtaagaccccgtctcaaaaaaaaaagaaaaaaaggtgaagtcctttgtctttttcccacttctggtcctagctccctgggggcagagggagtgggtggggttatcttctgaatgttcagcaggatctcaaataaagcattactgtattaataaaaaggaataggggctggggcttgggaaggagggtgaagtgtgtgtgcaaacgaagggccttctcttggatcyggggaccaatcctagggttcctcaggtgccgctggcatgtctttcacatggaagcctgtcttccctccatcagccccccggggttccaagcctcccatagggtggttggttttccaaagcccagaacctgggccagg

SEQ ID NO: 508313 - DNA, 633 bp, Homo sapiens
taggtctgtttttacctaaagaaaagaatttcagtgttgagtgggtttttttttttttttttttttttggattttgtgtttttttgaaatggtgtcttgctgtgtcacccaggctggagtgcagtggcgtgatcatagctcactctagtctcgaactcctagactcaagcaatcctcctgccggggcctcccaagtagctaggactacaggcttatgctatcatgccccgctatatatatatatataaatttatttattatgattattttttgtagagatggactctcgctatgttgcccaggctgggctcagacttttggcctcaagctatcctctcgcctcagactgccaaagtgccaggattacacgtgtaagccactgtgcgcagcctagattttggaaatgagcataaaagatcgtgagcctgcactctgcttcaacttaaagcagtttaaaaataaagatgctgcaaactctacctctggcacttttcttgctgctttatttttgcgatttcctcccaaatctactctgtcaccctggaagagtcctgagttatgctgcatattaatgcaytgcatccacaaactgactcattcaataaacatgactgacttattggacatgtacta

SEQ ID NO: 508314 - DNA, 644 bp, Homo sapiens
taaatctgggttgctgtttcactgacccagtgctgagcctaagacaaacattacaaagtatgtgctttatggtccctgtattagtccattctcacactgctataaagaaatgcccaagactgggtaatttatgaagaaaaaaggtttaattgactcacagttctgcatggctgggggtgtcctcagcaaacttacaatcayggtggaggcaaagcagaagcagagaccttcgtcacgaggcagcaggaaggaggagtgctgagtgaagggggaaaagccccttataaaatcatcagatctcatgagaaatcactatcatgagaacagcttgggggaaactgcccccatgattcaactacctccacctggttcctccctcaatccttggggattacggggattacaattcaagatgagatttggatggggacacaaagcctaaccatattagtctccttgcctgagtcctgcttcctgggccaaccatcccctaatgccttgtttgcccagcctcacccgtttgtgctgcttctgtacttcactcagtcgatgctctacttgaaggctttgtctcaactatgctgtcttttggaaacagatgtacaaggtggatgctcacagccatgaccatttgaactggcagt

SEQ ID NO: 508315 - DNA, 584 bp, Homo sapiens
tcccacaaggctcctttctgatgactgatatgatcctggcattctctcctccatctctcacctttttattccttttggtgctgaccttcatggtgtaccccatacctgaaaatatcttgctcccttagggctaagcaactttccctccttcctctcttatcaaactcttcctttatctgagccttccaaggctgatctcattgcaaactrtgtttgaacaacatgactagcttttatattatctcatgaatcatgaccatctgaattccatttccatttccttggagaaaagcccagtctggtatgtgttccacatagcccaacatgaagagatggcactcaataaataacacattgtgatgatatcaataccatgaacatatactgcagaaatatttcacaatgaatgaatgactgttgggcccttggtccaggaactgaacttttctggccaccatgggctttggtctgagggtatcttacctgctgtgtatcagtggcttcccgactgtcagaagtagcaaatggttctttagggttcccagaactaaagggtgaatagaataacaaaaaacatgcaaaga

SEQ ID NO: 508316 - DNA, 605 bp, Homo sapiens
tgtgccacatttaagccatttttaaaatgcatttgtaatcctttagaatgatattcttgaaacatacaccttgctcatcttccacgaaggctccagaggttagaaactcacaaatatatattttttttctaaaaagagatcccttttcaatttccttcatgggtcttcgatgtgtccaattttccacacccaattttttatatattaacacatcatcagtgctgtccatgttatttttacatgctttaatatgttgacaacattaaacataaaatcaaggtttcttgtttacaagttacatagctgaatgtaaagaagatccctgggcccttatttctttttttccatcttattcagaggaggattgaaattctttgtttgatggtcattctaatattacacatttccccttttgagatagtgattatttcctcaaacctattttctctggtttctgtttgacttctaaggcatcagccaattttagatattcatttagcttgtcrtttgcctcatgacttttattttcttggccaatagttaatcatcaaaataaccctcaaaatcctaatatctgcgattgctgaaatgtacgttttcaattt

SEQ ID NO: 508317 - DNA, 556 bp, Homo sapiens
tagagatgagatttgaactcaggcagtttgattccagagcctaaattattgatctcagttttgtgccatgctatccactctagtagaagcacattttgaggtgagcatatatgagagaatttgattccaccacatttaacaaatactgagataatatatgtaaaacatttagaactgatcctggtgcatacaggctttcaacaaatattagttatttcccaactggaagatgaggattcttgttacacacrggtatgtatagaaggtgagacgggaatgaaggggaagagatgttccaggtaaagaaaaactatattaaattggcttgaagagtagatggttttttattatatcatagaagttttcagcaggttgaaagtctccctactacagccataactaattttggttccgaccagaggatagagaggcatttttttaaatatctgtgttgtgtcaggcactgaaatagctgctagacattcatcatctcattcaagagaagaaacaaaaggcttctagctggaagagatttacaatttaactacaagaaaaa

SEQ ID NO: 508318 - DNA, 556 bp, Homo sapiens
tagagatgagatttgaactcaggcagtttgattccagagcctaaattattgatctcagttttgtgccatgctatccactctagtagaagcacattttgaggtgagcatatatgagagaatttgattccaccacatttaacaaatactgagataatatatgtaaaacatttagaactgatcctggtgcatacaggctttcaacaaatattagttatttcccaactggaagatgaggattcttgttacacacgggtatgtatagaaggtgagacgggaatgaaggggaagagatgttccaggtaaagaaaaactatattaaattggcttgaagagtagatggttttttattatatcatagaagttttcagcaggttgaaagtctccctactacagccakaactaattttggttccgaccagaggatagagaggcatttttttaaatatctgtgttgtgtcaggcactgaaatagctgctagacattcatcatctcattcaagagaagaaacaaaaggcttctagctggaagagatttacaatttaactacaagaaaaa

SEQ ID NO: 508319 - DNA, 611 bp, Homo sapiens
cttctctgcattgcaagtgtggagaagttaatatcctggggccactctcaaccagtgtggggtttggaggcacgtggataaatgcccaaccttccttttctctcctttggggggtaaagtttgaagtgtttcacatagtttctgaaaaggtctccagtgagactgagctctgtctgcccacagtggcaacatgctcattaacacactctttggctttattccctttcctgtcccactttctttactmctacacttgtgcttcctgccattacatctcatgaatacctgcacccagtgcttaacttagggtctgcttttggggaaaaccaaactaagacagccccccctcgctgttcctagtcacactattctaatcccacttctgtttcttaccttcaaaaaaaattctttgcacaagcaagtatttatacatatatgtatgtatgtttatatatatgcatatatatgacatacgcttttaacaatttctcaactatcaaaaatagaaaaagtccataacctaaacaacagcctaagatagctaagtttcttttataaaaagatacatctgcacttaaaagagaacgaatcttacatggctaatcacattt

SEQ ID NO: 508320 - DNA, 605 bp, Homo sapiens
ttacccagtctccagtatgtctttatgagcagcaggagaacagactaaaacaccaagaaacacccaaagcttcaagacattaggagagagacttctctggaatagctttttccttctctggaatagctttttccttgtggctctcagaaggagccaccttttcaacatcatgattttagacttgtaccctccagaactctgagacagtacacttctgattaagccacccagtgtgcactgttttgttagggcagccccaggaaactactacagatacaaatcataaacagaaacaagagccaggagaaaccagaacctccaactytccatgcagtactctatctatcctttctttctggaggtttttagaaggcatttcaaggattcagcagggggttggtagaccactgctgggcccactatgtcccattcctgccagattccctgcagtaactgcagggtttactagcttacactttcttttctgttgactgcttctcatgatgcacacttgaccctatgccctctcttaatcctggcagctccccatactctgctaaataaataccagtggacataactaccaacatgccatattcctcaat

SEQ ID NO: 508321 - DNA, 649 bp, Homo sapiens
ccccttcctctgcaataacctaaacacaaaagtctcaaacgttttagaatgaattcctaattttatacatcaaatgaccaccctctcatcacattgaatacctattgtaagaagttagaatcctctatcttgtccttccttgttagtktagggtagaagggatttttttttttctcatccatcactaggttcatggctgaagcacctatgacaaaagacagtttaacaagagaaaagcatacgtatttgtttaatgtaaattttacatgacatgtggaccttcagaaatgaagacccaaagaaacggggaaatctatgtatatttatgcttaggttggatggggagtagacagtcatgaggaagtatgattgaacagagggagtatgatctaatggtaatacgctgggggaacttagcaaggcctgtttgttcatattactttctgcatcccagtgtgacattccttctctccagatatgaggcacatgaggctcttataacatacttcacaggaagatcagattcttttctctttttttgtttttgagactgagtcttgctctgtcgcccaggctggagtgcaggggcgcgatctcggctcactgcaagctccgcctcccgggttcccgccattctcctgcctcagcc

SEQ ID NO: 508322 - DNA, 614 bp, Homo sapiens
aaattcccgcgatcacttcaaggtggctggctagttaacaaccccgccattgttgagatgctgccagcccgtgattcaggtggactgagacccaaaatagccaccagagcaagacacacagacattgtactcagcacaattcttgcatgccttccttatcaatgtttccacttttaaacccctgccctcacccccaaaattgaagtggttggtttagatgggaatccggccacatcccctttactagttttggttagtaaaatcactttctttatacgagacctcgctcttgtgaattggactctgcaagtggtaagcattcagatctgtrttcagttacaaggaagtgatctctctgcaatggacacagaaaagataaaaggttcaaggggaaatataggggaagagggagggggaacttaaatattggggataaatgaatttgggataattaaaaccaaatatagagaaaattctgaagggaaactgataatagtgtatatgtagacattatgctcctcaatggaaattttaaggatacaatattgtttccagtcatctgtctttcagcaatatcacccagtgactcgatgcaatcaaatgtgtatatgtag

SEQ ID NO: 508323 - DNA, 614 bp, Homo sapiens
aaattcccgcgatcacttcaaggtggctggctagttaacaaccccgccattgttgagatgctgccagcccgtgattcaggtggactgagacccaaaatagccaccagagcaagacacacagacattgtactcagcacaattcttgcatgccttccttatcaatgtttccacttttaaacccctgccctcacccccaaaattgaagtggttggtttagatgggaatccggccacatcccctttactagttttggttagtaaaatcactttctttatacgagacctcgctcttgtgaattggactctgcaagtggtaagcattcagatctgtattcagttacaaggaagtgatctctctgcaatggacacagaaaagataaaaggttcaaggggaaatataggggaagagggagggggaacttaaatattggggataaatgaatttgggataattaaaaccaaatatagagaaaattctgaagggaaactgataatagtgtatatgtagacattatgctcctcaatggaaattttaaggatacaatattgtttccagtcatctgtctttcagcaatatcaccsagtgactcgatgcaatcaaatgtgtatatgtag

SEQ ID NO: 508324 - DNA, 536 bp, Homo sapiens
cccttcacttctagtttttcctaattattctatatgactttattgaaagcttcacttcaaaatcaatctctccccttctctagctatctttcccaataaggataattgtgaggaagttcccatagctacgtaacaccctctaattcccaagactttgtgaatgtttctgactattaattttgaagacatcccagaaatagagtttaagtttgattataaaaraacaataacatcttggctatgactatatttaaatatttagcattatttaaaattaattttctgcaaaaaattcttggagggaaatgagaacaagagtttatttaagaagtagtattttattatttttttctacagatcgacttactaacactatggttctccatagaaataaataaaattcacatatataaaaaactgtagagaatattaaatatgccaaataaagaattcctttaagcatatatatatacacacatatatataatatatatatatatacgcacacacacacatacatatacttttatgcctgc

SEQ ID NO: 508325 - DNA, 470 bp, Homo sapiens
gcattccctgttacaactgctgatcttttattcctataatggtacagaattctttgagaaaaataaattcatcttttcattcatttaaggaaaaattgtcagcacgagcctatggctataatgttctccatcatttaaagaataaaaggaataatctggttgaaattgaattatctaagcttatatatggttttgattcaatggttaaygtgcatttttaacaagtgatatggtttggctgcaacatttacttattcaaatacctttaaagatctgttttttgttttgttttgttttgttttttgcctgtacttcccaggaatttgatgtcagatgcattttctattatttccatatctattgaaatgaactcaaataaaaaaaggggatgtttcattacacacttattaatgtgtaatttaagattaatgtgtaatcttgtaattcccataatccttatgtgtcaaggg

SEQ ID NO: 508326 - DNA, 662 bp, Homo sapiens
ctgccaatgccttaatcttggactttcctgtctctaaaactgtgagacaaaaaaaaaaaacaaacaacaacaaaaaacaaaaacaaaaaaagtaaaaaagcaaaaaaataaaagttggttacttataagcaacccagtttatggtattttgttatatgagtgtgaatagaataagacacatgggaaattcccaaagtatggttcacaatctaatgtgaggtaaaaactatcagaataaaactaatattaatacattatatgtctctgtcactgtgtcaacatttgcrctgattatgtataagccatggtgaataaaactgtgggcatcttagcccttctgatgactgcagcatcacttgaagaaagttattttattcatgcatttttattttcaaagttttttactgctgttgcttgctttgttcgtttttaaccatttgccacgtcccatgaccctctaaggttttctgatacagagaggctgaggctcagctaagagagggacatttaagttcttagagcaaagctaccaggcttagatggcatttttatttctacagaaaggaaacaaaatagtttaattatatttacattaaataagataatttgattaaaattacaagaataaaactttgttacaaatttgaatccctaatttggtc

SEQ ID NO: 508327 - DNA, 679 bp, Homo sapiens
tgttaccatgacagtcactcaaaatttgatatatatatatgtaatttccccaacaaaaacctcttcactatatttttccttagtgaatcttcccctatagatatacttttcataagaacattaagaaaatagtttaatcaaataattcccattccataatttttttattttaatttttttaaacaggaatagtggatacctgaaaggcatttgggaatgtgaactcagagactgtgaaaggcaaaaacaaggtaaaactctggctgtgcttcagatgtttctgtggcattcattcaaaactaaatatgtgacaggtaccatccaagactataatactgtaaatctgatgggagcaatctaggtaattttaatatctagtgaggattagggactctggttaagccaacaaagctgatgactatttatatccaactacagttgcaaaaaaatggcagttccttcctcaatttccygttatctagctgtaaaagtaagagcctggggccaaaagctctctaacgaagaaaagcaaactgaaatctctactcatctccactctttccgaattaaatactagtaatttctctcaccttctcacaaaaataacccttctcataaaaataagcaaatatgcagtgacataaacatacacaatatccttgctttgctttttcattct

SEQ ID NO: 508328 - DNA, 679 bp, Homo sapiens
tgttaccatgacagtcactcaaaatttgatatatatatatgtaatttccccaacaaaaacctcttcactatatttttccttagtgaatcttcccctatagatatacttttcataagaacattaagaaaatagtttaatcaaataattcccattccataatttttttattttaatttttttaaacaggaatagtggatacctgaaaggcatttgggaatgtgaactcagagactgtgaaaggcaaaaacaaggtaaaactctggctgtgcttcagatgtttctgtggcattcattcaaaactaaatatgtgacaggtaccatccaagactataatactgtaaatctgatgggagcaatctaggtaattttaatatctagtgaggattagggactctggttaagccaacaaagctgatgactatttatatccaactacagttgcaaaaaaatggcagttccttcctcaatttcctgttatctagctgtaaaagtaagagcctggggccaaaagctctctaacgaagaaaagcaaactgaaatctctactcatctccactctttccgaattaaatactagtaatttctctcaccttctcacaaaaataacccttctcataaaaataagcaaatatgcagtgacatawacatacacaatatccttgctttgctttttcattct

SEQ ID NO: 508329 - DNA, 528 bp, Homo sapiens
aaattctctcacttatatttccatttaataaaactttcattacaagtgcatatctgttatagactaagtttatattttttttattaaaaagaaagcatccgtgcacatttctaaagcaacataagaatgaaggagatgtgtctgggccggtggtggggaagcctctaggtgactgcccatgagtggatgcaaggtaacagattccagcaaagaaagaaaattaatttgcagatccgttgctgtaggacaaagaaaatttgtttcaggagctgagcagctcgtcattgccattgtagcagctctgtttccaattctgactttcttaagtcaagattctgaagatttggtaccccaggatatgcaagtcttctgcgcctgtggatttgatgtgaagaagaatcccactgttcagtagcagaggcctgtcagaacagaactgacaactyttttctctcattttttgtaatgtgccttagaactaaggtaaaagaaaagaaaataaaaattgttatttcttcatgaaaaaat

SEQ ID NO: 508330 - DNA, 528 bp, Homo sapiens
aaattctctcacttatatttccatttaataaaactttcattacaagtgcatatctgttatagactaagtttatattttttttattaaaaagaaagcatccgtgcacatttctaaagcaacataagaatgaaggagatgtgtctgggccggtggtggggaagcctctaggtgactgcccatgagtggatgcaaggtaacagattccagcaaagaaagaaaattaatttgcagatccgttgctgtaggacaaagaaaatttgtttcaggagctgagcagctcgtcattgccattgtagcagctctgtttccaattctgactttcttaagtcaagattctgaagatttggtaccccaggatatgcaagtcttctgcgcctgtggatttgatgtgaagaagaatcccactgttcagtagcagaggcctgtcagaacagaactgacaactctyttctctcattttttgtaatgtgccttagaactaaggtaaaagaaaagaaaataaaaattgttatttcttcatgaaaaaat

SEQ ID NO: 508331 - DNA, 395 bp, Homo sapiens
gtaggaatctgaattaagatacccrtaatcttaagcataaactaatgtcaaaatacctgtgaatagagctgtcaaaataccaacatttctgatgccccatccctctgaaagagtcatagttgaatgctgctagagaaacatttcatagtctttctggatggacttgcttcaaatttatgaccactgatctcaaatagtctctcaatgctattcaacaatgcatctccatttctctagtaaattgccttttctgctctctgggatggctctctcatactttctcctcaactcttcaacagctcctcccaactggactctcagcacgggaataaaataactgagctcagtcaagaactacttcctcttccaatcaccactttaaaaatcgtgtaccc

SEQ ID NO: 508332 - DNA, 395 bp, Homo sapiens
gtaggaatctgaattaagatacccgtaatcttaagcataaactaatgtcaaaatacctgtgaatagagctgtcaaaataccaacatttctgatgccccatccctctgaaagagtcatagttgaatgctgctagagaaacatttcatagtctttctggatggactygcttcaaatttatgaccactgatctcaaatagtctctcaatgctattcaacaatgcatctccatttctctagtaaattgccttttctgctctctgggatggctctctcatactttctcctcaactcttcaacagctcctcccaactggactctcagcacgggaataaaataactgagctcagtcaagaactacttcctcttccaatcaccactttaaaaatcgtgtaccc

SEQ ID NO: 508333 - DNA, 609 bp, Homo sapiens
actagtttggtttatagctccctcgtaagtctttactcctagagttatttgcctggcttcgtagagtggcacacttggcatattaatcttaatatttagtcagagctttaagtgaggctgttttaaaatttctggatatatcttcctctctgtagctatctcctctatagtaacatgctctacaaattctaatcatctcagcctttttaacctcaggaagactttcttgttccgcttggatttcctttccctgtgcattgttctgcaaatgattctagcaagaaagcctggcaattgtagggtgtattagatatrtttttttcttctttcagggatcctaggtctgttatgtctgttgtccaaaatatgtgaagaatttcttttcgtattgcttttctaattttctagggctttgttgttgttgtttgtttgctttgttttgcattaatggcaagaggactaatttaatatcagtttttcaaccttggccagcagttcttattacttttaaactgttttattaatgtgatatcaactttcttttcactttctttactatgaaaattcttatggttgtttacttggtataactgttgatagctttatatt

SEQ ID NO: 508334 - DNA, 614 bp, Homo sapiens
tttgactggtttagacttctggaagaactttttttgctctatgttagttgtcagtccaagagagccataataataagygctgatttgatgggctccttggcagccctcaacttaagtattaactggaattccacaattagtatctttccacactagtgataaagatagtgagtttaaaagagagagagagagagagagagagagagaacaccaccaaggaacatgaagagaataagaattaagaatttcttaagactaagtcccaaggtgaatgtgatctaacttatcctcttcaggactctgtcatatgtgaaccacctgtgagtctttttctccttgcactagtgggcagaatagggatgcttccagagatcagattttccacaaggaacaatagccccagcaagaggcagtgaaaggatttgtctccaactcatttaatgaggaatgcagcaaagagaatcctcgatttattttttccatgaaattaaataatataaagctattaaagcattttaacagaaggatgacagctgatattcattttataaatacagaagagagaggaaggggaaaattcatgttaatctggatattttgagactagtttgatg

SEQ ID NO: 508335 - DNA, 614 bp, Homo sapiens
tttgactggtttagacttctggaagaactttttttgctctatgttagttgtcagtccaagagagccataataataagcgctgatttgatggsctccttggcagccctcaacttaagtattaactggaattccacaattagtatctttccacactagtgataaagatagtgagtttaaaagagagagagagagagagagagagagagaacaccaccaaggaacatgaagagaataagaattaagaatttcttaagactaagtcccaaggtgaatgtgatctaacttatcctcttcaggactctgtcatatgtgaaccacctgtgagtctttttctccttgcactagtgggcagaatagggatgcttccagagatcagattttccacaaggaacaatagccccagcaagaggcagtgaaaggatttgtctccaactcatttaatgaggaatgcagcaaagagaatcctcgatttattttttccatgaaattaaataatataaagctattaaagcattttaacagaaggatgacagctgatattcattttataaatacagaagagagaggaaggggaaaattcatgttaatctggatattttgagactagtttgatg

SEQ ID NO: 508336 - DNA, 272 bp, Homo sapiens
tcattttataaatacagaagagagaggaaggggaaaattcatgttaatctggatattttgagactagtttgatgtgatttaatttgatgacaatctaaatacaggcaaacaatgaggaagaaaaggagacaaatgtgaragagaagtacagtcagaacccgctcctccccgccaaaaaaataaaataaaataagcacaagaacagtttggattatgcaggctctgagagagtagggatatcagatggttctcaaagttctcccttgacaacc

SEQ ID NO: 508337 - DNA, 595 bp, Homo sapiens
ctgttgttttcaaagtcaacatccatgctgtaatgttttgaggtttctccattactttataatatttcttctatttctctgctgtcttcccagccaaacttgcattcagaagcaggcatcttactagcattgctctcatawacaaatccaggatatcagaagtacagagtcaaccataactaacattttaactaaaatttgttatgtcattctacagtttctcaacaaaatactctcacatccttcaaacaaataaccactatattacttagaggctgtgaaggtagaagactttctcagttggaaacacgtttgggtctatggtagggttgtgatttcaatttttgcagttagctaaggcaaagagacacactgcaaattttcttcacatgtctggaatttaaacttttattaggtatggaaacagtagactaatctacaaacatatgttcatattaccaaataaatagagctttttaaaaatgttaacatttgccctatagacatgtaagaacttggattaggtcttcagtatgtagaactgaatatgaggtatcttgtgagataaaaacttctatctcttttttctttgtat

SEQ ID NO: 508338 - DNA, 595 bp, Homo sapiens
ctgttgttttcaaagtcaacatccatgctgtaatgttttgaggtttctccattactttataatatttcttctatttctctgctgtcttcccagccaaacttgcattcagaagcaggcatcttactagcattgctctcataaacaaatccaggatatcagaagtacagagtcaaccataactaacattttaactaaaatttgttatgtcattctacagtttctcaacaaaatactctcacatccttcaaacaaataaccactatattacttagaggctgtgaaggtagaagactttctcarttggaaacacgtttgggtctatggtagggttgtgatttcaatttttgcagttagctaaggcaaagagacacactgcaaattttcttcacatgtctggaatttaaacttttattaggtatggaaacagtagactaatctacaaacatatgttcatattaccaaataaatagagctttttaaaaatgttaacatttgccctatagacatgtaagaacttggattaggtcttcagtatgtagaactgaatatgaggtatcttgtgagataaaaacttctatctcttttttctttgtat

SEQ ID NO: 508339 - DNA, 551 bp, Homo sapiens
aggggatgtggtgtggagcagaggagaaggaaggggcaaagagatggagaaagtttcatgccacagaatactttctcctagggacatctctgagcttgcttgaaataaacattttgataatctrcttggggaaaagggtataggtcgtccagggcctgctcaggtaacaaaagataagcattagccagacatggtagcacacgcctgtattcccaactactcgggaggctgaggtgggaagatcgcttgaacccaggagttcaagaccacactgggcaacacagtgagactccctataaaaaatttaaaaatcagccatgcatggtggtgcatgcctgtagtcccagctactcaggagactgaggtagaaagatgacttgagcccaagaagtcaagattgcagtgagccaagatcactgaagtctgggcaacagagtgagacactctctgtctctctctcagaaataaaaaaaattaataaataaaaaaagttaagccaccaggaaaggcccaagttctcagaaaatcctacagaatctacaaatacctgg

SEQ ID NO: 508340 - DNA, 606 bp, Homo sapiens
aacattcatgtggaaccacaaaagaccccaaatagccaaaacaatcttgagcaagaacaaagcaagagacgtcatgcttcctgatttcaaaatgtattacgaaattatcaaaacaatatggtactggcaggaaagaacagatatatagagcaatgaaacagaacctagagataaaagataaatctatcaatctatgattctttgatctttgtttgctcaagggtgccaagaatggctacaggcgcccaccaccacgccaggctaattttttgtatatttagtagagacggggtttcaccatgttagccaggatgacctggtctcgatctcctgacctcrtgatccgtccgccttggccttccaaagtgctgggattacaggtgtgagccaccacgccctgccagtacattttaaatacatacaatttttaattgtaaatgacacctcaccaagttggggggctgagggagtggagaaacgttatgaccagagtttttctcatttaaaaattgcatcgttagaacagtagtggaagtttatctattcaaagaaagaaacagaataaaaaaaaaaaaaaatgttactggccttggccctcctgaactt

SEQ ID NO: 508341 - DNA, 512 bp, Homo sapiens
aagaccattctcttttatatccataaaacwattattaaaataaggaaaataacgttgatacaatactattacttaatatacagaccttatccattggcatctttctctattctatcttttgtagcaacaaaaaggaaaaagtctgcaaatatttgatttttacttaatttttcatatattttaagctctttaagtaacttttaaaacttttaaaacacattaaagtgtttgtgggctgccatgtatcaaactttaacataggtattacttttttaaaatagtttaaagtgaccttaaagtgtcttctgctaccttattgaattaaaaagtataacacataatagtattcattcatttgttcacccatctatttagcagtactagtagtgttggagatctatatagcactgagacaggatgagacattaacaggatgagatgacctgttaatagactgtgatcattctataaatattgcagaattcatagaaataaacctagaagctgaggct

SEQ ID NO: 508342 - DNA, 512 bp, Homo sapiens
aagaccattctcttttatatccataaaactattattaaaataaggaaaataacgttgatacaatactattacttaatatacagaccttatccattggcatctttctctattctatcttttgtagcaacaaaaaggaaaaagtctgcaaatatttgatttttacttaatttttcatatattttaagctctttaagtaacttttaaaacttttaaaacacattaaagtgtttgtgggctgccatgtatcaaactttaacataggtrttacttttttaaaatagtttaaagtgaccttaaagtgtcttctgctaccttattgaattaaaaagtataacacataatagtattcattcatttgttcacccatctatttagcagtactagtagtgttggagatctatatagcactgagacaggatgagacattaacaggatgagatgacctgttaatagactgtgatcattctataaatattgcagaattcatagaaataaacctagaagctgaggct

SEQ ID NO: 508343 - DNA, 648 bp, Homo sapiens
tgttgtttttcccctccccatatagccgaacattatgaagacctggcaccttctcccaactgyttcccccgtccaaccccaatcccactgagaactcaggatctccctaattctagccagtctcctcctggtccccacctcgaattctgtttttttccagtccactctctagacctcttaaactggttttctaaattatatttgagtgtttttctctttataaaattcctcagtgtttccacactgccttcaggaagaaactgataacttctacttatgaaatatgaagccctttctgatctggcctttggcagcctatgttgacccctatttcctgctaaacacccccttggactcatcctgctacttggacatttttccaggtaccatgccattctcttttaagcctaagaattaatacttgcctagaacctgtccttttccctactccttgcccttgaaaattaccaccaatatagtgggcatgaatctgggtctacaaatcaaaaaaacaagaaatgcaattttatttttctgtaactcaacctaagcttttttgctagatgtcatttcacctaaatggtagaaactcaatctcagcccttttctgattcatctaacctacttctggtttcctagggtttcctc

SEQ ID NO: 508344 - DNA, 250 bp, Homo sapiens
taattgcaatgcagtttttagtaacttgatcaactctgagaatgaagctttagamagtgatttactgaggtcactgaagccctcaaagtcagtaaagtctcacgggcacactttgggtttactttatttctccttttatatcatctttatggaactcaggaaaaaatttaaaaagagatatgtctttgagacaagattactccctaaggaatggttgatttccttatttttaaaaggacttgaaagcatt

SEQ ID NO: 508345 - DNA, 547 bp, Homo sapiens
acagtgtgaggccacagttagttcatgttccctcttgtcttttgtcccatccttgccctcccaaaatgctccactgatcactctaagggaaattgtatacatgctgagttccaaattcccattaaatgaggaatcacattcaaactctagaaagtacattttctagaacttatgaatctgaaagattctgcacattttccctttgggctactgtayggctaatggccaattttatggaaaggaaatcaacaggcaaattggatatgttcacattatttcctcatttttctcacttgattttctattacaagtaaacactgtgcaaggagaggtagaaaactgtccaggaaggaagagtggcacactgtaatatagcactctccatcctgacttcatttctcagtaatcagttggtgggccatcaggactatgatattaatgggtgtttttttctatcaaaacggaggtctcagtaggcccccaagggttgctgatatccaacgaacaaacattcactaacttttcttcagctgtaccataatagggt

SEQ ID NO: 508346 - DNA, 615 bp, Homo sapiens
ttctcatttcacaaggaatggcttagtcattgagatttattaatttttttagcatctttttcttaaataattatataaactaggaaaaattaacttaggaactaaaaatagaactactatcattttgttattttgttgaaagggaaacagcctcctcaccatgartgacagtcaaaacaataccaaatgacaaaaaaaaaaggagtaaaaattaatcatccttggttacaaaacaaagcagtacattttcttcctttttctgaataaaattaacataggatgtaactttaggatgttaatgctcagactttattgatgcttaaacaagattcaaactgaatcacaactgtaacatttacctatgtaagcttggcttctacactccaaattttcagactcctgtttaatatagtccccccaattcctgtattttcagaggactggaaaaaccgtcaaagcacagtaattacatatagcatccccctaaccaattcatttgcaactattcatccacgcagatgccaaaagtgttgctctccatctgttcatgactgggtacaacaggagaactcaagtcaaagtctttggcctcaatgtgttcacactttactgcaa

SEQ ID NO: 508347 - DNA, 646 bp, Homo sapiens
agtgatccagaaagagggttggtactatgtataatttactggaagataaagagatggaaacagcataacattattaaatgccattaacctcggaacttaaaagtcatagaaytgggagttgcaaaaactgcctatgccactcagtccacacaaagtaaaagaattccatctctccatttctccacttttgtctcctttgttattcaaatgagcaaaaacttgttttttttttcctttttcattctgtttaagtagagttattctagaaaactatgtagaaaaattgtatgtgcaaaattaaataagttgtgggtgagagggtttaaggtcaccttttatgatcaagccaagattgtcagattcatggccactgtaacacacaaggatgaatagttggactaaaggattcaagatcacattttcagttctgaagacaacatcaacattaaagttcttgcttctcaccacataagatttgacgtgtacactaatgaagacaactccagacaaattatatatacttttcacagaaccaaaaaaaaaaatctcggaagtcaaatctgtttgctttcattctgtactaaattcttcttataatctttaaaatccatatttttccgttctcatttcaagtatttcaagataa

SEQ ID NO: 508348 - DNA, 646 bp, Homo sapiens
agtgatccagaaagagggttggtactatgtataatttactggaagataaagagatggaaacagcataacattattaaatgccattaacctcggaacttaaaagtcatagaattgggagttgcaaaaactgcctatgccactcagtccacacaaagtaaaagaattccatctctccatttctccacttttgtctcctttgttattcaaatgagcaaaaacttgttttttttttcctttttcattctgtttaagtagagttattctagaaaactatgtagaaaaattgtatgtgcaaaattaaataagttgtgggtgagagggtttaaggtcaccttttatgatcaagccaagattgtcagattcatggccactgtaacacacaaggatgaatagttggactaaaggattcaagatcacattttcagttctgaagacaacatcaacattaaagttcttgcttctcaccacataagatttgacgtgtacactaatgaagacaactccagacaaattatatatacttttyacagaaccaaaaaaaaaaatctcggaagtcaaatctgtttgctttcattctgtactaaattcttcttataatctttaaaatccatatttttccgttctcatttcaagtatttcaagataa

SEQ ID NO: 508349 - DNA, 497 bp, Homo sapiens
cagaagccattttttagggattcactcagaagatatagatatagatatagcttttcctaatttttttttacttaatttttcacttaatattattagccaacctatgatttctgtaataagtatatgcattcataaattatagcatattttctcaatttagagttctttccaacaacaaaattgttattttcctgtraaggaactatgggtagttgctatggccaaccatgatactaaaagagaaaatatagttggttgttatttctgtaaaagttctcactgaattgtgtgcatgtacagaaagacaagtttttgcaatcaaaataagtatgtggtgtttaaacataacattcttctccaatgtagaagagggtccaacgtatctcttacattggacatgagtagcttggggaacattgaaccctttgtgtctataccaacaccacgggagaaggtagcaatggagtatctgcagtcagccagccgaattctcacaa

SEQ ID NO: 508350 - DNA, 517 bp, Homo sapiens
ggcaagttcacatttactccaaagtgaattcatggtgagccttctatttattgttcactcttcagtcggtattttgatacatggggcactagagacgtatggaaatgatactgtcctatacttaagcagtctacagtaaacaaatggcaaagtgaaatggttttagattcactcagtctcatccactattgataagtattaaaattggaatgtagagctaaattaaggcagaatatgcaagaattggygaggcaaataagtggtatagggagctgggcagagaaggggcattccaggacaaagaatagccttgctgtcactgtctggggaattaaactgttcagtttaactggaacattgaaatcaaggtgggaagtggcaaaagttgagcctcagaagtataaaagaaaccctagccttaatatatgtttaggagcttggactttatcttatgttttggatagatcattctatttgcagtggagtaggcactaaaagggagcagtttagaggctct

SEQ ID NO: 508351 - DNA, 479 bp, Homo sapiens
tacagtctaattttaatcagcatttcagtgtttgttttcttgtcaaaaatattgtaccagrgcttcaccatgacagtaagaatttaagaaaactaagcattcctttataagcctttggtgattataatccttgagtacagcataatcctgctgctaatggacatcatctaggctcacaaaacagcaatttatatgtgttttaaagtttgtgattttcttatatttttgctacaatagataaaactttttttcctgaactatattctggaaaaatagcatatttttggccagtagataaggttatatactcaattcactacatggcttactaactaaacacactatattctggaaaaatagcatatttttggccagtagataaggttatatactcaattcactacatggcttactaactaaacacacttctatgaatctgatattaaagcctgaggtggcattataaaaataacccctaa

SEQ ID NO: 508352 - DNA, 528 bp, Homo sapiens
cagacagctcacaacattgtcattcatgaggctttgctatacagatatacaagcttgtcaccataaatatggagcaaaagcacacagccctgtaaaaaataaaaacttaaaatgaataaaacattttttaaagattacataagcaaaatgtaaatagatttatctctagaaataagtttcagaaatgctgtatggttgccatattctaaaggtactatgtgtcccataataacagcaaaggtgtctctggtgccccagtgctaagcgatattttcagttaactgtagcccaagcccaggaggctgttatctatggcaaaackcaaagttcctgttccctacaaatgtgccagggcagattcagaaatcaataactgtctgaatatctagaaagcccactgatagagtcagagccaagatcattgtaggcccttttaaaagtgtgataaaatgcctggctggggctgccttttgaagaagaattgcatgggagggaatgagcagcccagaaaaacttgaagttctttat

SEQ ID NO: 508353 - DNA, 436 bp, Homo sapiens
ctgtaacgtgggagccactttgccttatgttgttattttatatccattgcttcttcccccaatttattgaagacttttttcataccaggcacagtgctagataactgagggcgatataagatggtaaagacacacttcctgccctttagaagtaaacatccaatgaggcgacagggagcccacaagggagcaccgtgcaacagagtctgtaacaaggatattagagaggtaacactgaggaatgagtgggagagtaattccaacccaggccttgaggaggtctaatagagggaaagggatttgagaaaagaccagatgactccatctctaaatgctttaaggcaggcccaggcctcttttctccattagcactaaatccacattttgggtggtagrgggctgattctggctctgtggtatcaagaggtatgtgttt

SEQ ID NO: 508354 - DNA, 640 bp, Homo sapiens
aatatattagctaattaatagtgtaatacaatgtgatataattctagtcaataatacattcaaaacagaataaagggatagaaggaataataagatttaaagtttttcaaaaaaatattaatagttgawcatcaaagactttttgcaatattatatatgagacaacaatagtaaaagggaaattaaatatgtgaatattgtgaaaagaacattttagcagagaaaataatttccagaggcaatgaggctgaattttacttgacctgttggaggaacagaagcaatagtagatcaatgggagctgagagaatagtgataagtttgaagaacttttttaacaaccatggtaaggtctctatgtctatggtaggcagaattttatgatagtccaagattcctatctgctggtatacttgccatgcatagccctcttaccttgtgtgtgagtacaacctgtaaatatggtggatgccactcccatgattatgttacattatatagggaaagtgaagggatttttttgcagataaaattaaagtccctaatgagttcaactgtgaggctcaagaagacgataatctttcatggacctgacctaatcagtcaagcctttttataacagggtctagagggaggaaac

SEQ ID NO: 508355 - DNA, 640 bp, Homo sapiens
aatatattagctaattaatagtgtaatacaatgtgatataattctagtcaataatacattcaaaacagaataaagggatagaaggaataataagatttaaagtttttcaaaaaaatattaatagttgaacatcaaagactttttgcaatattatatatgagacaacaatagtaaaagggaaattaaatatgtgaatattgtgaaaagaacattttagcagagaaaataatttccagaggcaatgaggctgaattttacttgacctgttggaggaacagaarcaatagtagatcaatgggagctgagagaatagtgataagtttgaagaacttttttaacaaccatggtaaggtctctatgtctatggtaggcagaattttatgatagtccaagattcctatctgctggtatacttgccatgcatagccctcttaccttgtgtgtgagtacaacctgtaaatatggtggatgccactcccatgattatgttacattatatagggaaagtgaagggatttttttgcagataaaattaaagtccctaatgagttcaactgtgaggctcaagaagacgataatctttcatggacctgacctaatcagtcaagcctttttataacagggtctagagggaggaaac

SEQ ID NO: 508356 - DNA, 640 bp, Homo sapiens
aatatattagctaattaatagtgtaatacaatgtgatataattctagtcaataatacattcaaaacagaataaagggatagaaggaataataagatttaaagtttttcaaaaaaatattaatagttgaacatcaaagactttttgcaatattatatatgagacaacaatagtaaaagggaaattaaatatgtgaatattgtgaaaagaacattttagcagagaaaataatttccagaggcaatgaggctgaattttacttgacctgttggaggaacagaagcaatagtagatcaatgggagctgagagaatagtgataagtttgaagaacttttttaacaaccatggtaaggtctctatgtctatggtaggcagaattttatgatagtccaagattcctatctgctggtatacttgccatgcatagccctcttaccttgtgtgtgagtacaacctgtaaatatggtggatgccactcccatgattatgttacattatatagggaaagtgargggatttttttgcagataaaattaaagtccctaatgagttcaactgtgaggctcaagaagacgataatctttcatggacctgacctaatcagtcaagcctttttataacagggtctagagggaggaaac

SEQ ID NO: 508357 - DNA, 574 bp, Homo sapiens
gaaactgtcagctaactaccctcctcatgagcttctcacgcaagtggatttgagcagtgcacgcccgcagcctctagagaactccctgaagacaataattgtgttggtattattgcttgtacctagtaagttctcaacaattgtttgtcgaaaactgaatacgtgatggtttttagcaaccagcaggaagaacaacccatttgctaaatccaggtggattaggtctcataattcctgaagaaagaaaatgtcttccatcatttgaagtaaatgacaaggctcagaaaatactcctgtggcatagcagatcccagcctccaaacaataagtgggttgggggtgctgaggtgatgagctgacagcaaaagaaagaagtgtcaggcaaaagtggcctgaattawacccaccattgacttcattatgcacttaatttcacttgtatagacatagccacaggatgaagtaaccaacagtgggtatggcctcaaaggtaaaagcaaggtggtacaaaaactgcttctgaaacagatgacagagtggagagagcctcaggagctcggggtggagggaagat

SEQ ID NO: 508358 - DNA, 603 bp, Homo sapiens
gctcaaaactcagtttcatagaaggttgagcagcagcatatcctagataagaacaatgtgtcatggagcaatctaacgtgagctctaacatgatctctcaaaccttgaagaatcaaagaaagaaccttagtttggaataaacagtcaattctcaagtaaagcttataggcatttgaaaaacactctggtgctatttcttcagaggtgcacattaataaatgtcttgggccctcttttgactgcaggtgtcatgatgttggaacagtaacaataactcaaccaaccagggcttstctgaatacaatcctacagcagcaggagctgtggagatatagaaggcaaggaagaccaggttgtgagggaagacgaatttactcccaggaatgttgggattgagagtaatattctccaataatggtggaagacagaccaataaaagcccaccagctccttctgcatggtgggataagagaaaagccaagggcagaagtgagaaaaataaccatcaccaaactgaaaagaaaacctttataaaaaaactggattgataaatgacctttagtagtggaaagataccattccaatgaagcatgaattgaaagg

SEQ ID NO: 508359 - DNA, 603 bp, Homo sapiens
gctcaaaactcagtttcatagaaggttgagcagcagcatatcctagataagaacaatgtgtcatggagcaatctaacgtgagctctaacatgatctctcaaaccttgaagaatcaaagaaagaaccttagtttggaataaacagtcaattctcaagtaaagcttataggcatttgaaaaacactctggtgctatttcttcagaggtgcacattaataaatgtcttgggccctcttttgactgcaggtgtcatgatgttggaacagtaacaataactcaaccaaccagggcttctctgaatacaatcctacagcagcaggagctgtggagatatagaaggcaaggaagaccaggttgtgagggaagacgaatttactcccaggaatgttgggattgagagtaatattctccaataatggtggaagacagamcaataaaagcccaccagctccttctgcatggtgggataagagaaaagccaagggcagaagtgagaaaaataaccatcaccaaactgaaaagaaaacctttataaaaaaactggattgataaatgacctttagtagtggaaagataccattccaatgaagcatgaattgaaagg

SEQ ID NO: 508360 - DNA, 626 bp, Homo sapiens
tggattttctatttaaaactatcctctcctcttaattcccactcccactatcctgttctcattacttctgtatagactggagcaatccactcctcctttggtacctctctttctctaaagcatattctcacttacgctaatctaatctgaaggtacagctctgatcaaacatgacttcataacttccttctcaaatgcctttgactgcagaaaaaagtcacaacttcttattgtataatatatcccagatcttttttctacctttatttcctaaaacactccatcaaatatccaagacctaaaccaaattgaaccactctctcgctctctgttcccagaaattctagcacttccgtactccagacccacggttggtttaagtgtttctttttcctggaatgctcttctccatgtctttatcctgttcttcattgaaaaccagcaaaaataacacctctttaattaaactttcctgttatccccaaacctggaatcagcactcttaaccctgtaatgttttatatgggtcattatttttttaacgatttactttgtactgcagcaacttttatgtgtcctrtctcccttggtagactataatcattattcaaattacttttgcattc

SEQ ID NO: 508361 - DNA, 497 bp, Homo sapiens
ggcatctggtgagggcctcaggctgcttccactcatggtggaaagtgaaggggagccagcgtgtgcagagatcacatggggagagaggaagtgctttaggggtggcaagtgaggggttggccggagggaggaggtgccaggctcttttcagcarccagctctggcagagctcatagtgagaactcactcaccatcaggggagggcattaacctatttatgaagaatccgcccccatgaccctgacacctcccactaggccccacgtccccactgccacactggggatcaaatttcaacataacaccagactggaggaagttataggtgtcaaagtttgaatcttttgtaaaaggaacaaagccttttcaccattgtctttcatagttgttctcctcactagcaaatctgtctctcagacctggcattacctagacttgaggcttacagcatctactggaaggacaggtaggtagtaagtggtaatagtcatgttgta

SEQ ID NO: 508362 - DNA, 664 bp, Homo sapiens
gcctaacctgcccctcctgattaccccggccctggggagggcactgtggtttaagggaaacagtgggaaagctctttccttaattatctcttctcatattaccarctggagattaattgaatgtgctttagtttaatctgatatttcctttccccctttatatttagttgacttcagtcactttaaggaataggaggaggatgtggtgaggagggaaaggaatgcttctgggctgaacaattctattgttggtgataggagagggcggggaatgattgattctgggcctttgcacaactgagggacaacgtgagagacttctgtatacctaagatgcaggcgagggggacctgggggatagaaaggagataaaagagggtcaatcctggtcacaaagaccagaaaaaaaaacagctcctctccacctaagtacccttgtcgtttttaagtgttgtaagggccctcataccactttatctttccttccttggaatccaaaagtgatagatatcactcaccttgttaattaatcccagggttctgcccagtgcagatctaaaagcattctcctgaggccatctgaggaattgtccatctttgtacattagaaaccacaggaacccttacaggaacgtctacagcatctggaaaataattctcaagg

SEQ ID NO: 508363 - DNA, 664 bp, Homo sapiens
gcctaacctgcccctcctgattaccccggccctggggagggcactgtggtttaagggaaacagtgggaaagctctttccttaattatctcttctcatattaccagctggagattaattgaatgtgctttagtttaatctgatatttcctttccccctttatatttagttgacttcagtcactttaaggaataggaggaggatgtggtgaggagggaaaggaatgcttctgggctgaacaattctattgttggtgataggagagggcggggaatgattgattctgggcctttgcacaactgagggacaacgtgagagacttctgtatacctaagatgcaggcgagggggacctgggggatagaaaggagataaaagagggtcaatcctggtcacaaagaccagaaaaaaaaacagctcctctccacctaagtacccttgtcgtttttaagtgttgtaagggccctcataccactttatctttccttccttggaatccaaaagtgatagatatcactcaccttgttaattaatcccagggttctgcccagtgcagatctaaaagcaktctcctgaggccatctgaggaattgtccatctttgtacattagaaaccacaggaacccttacaggaacgtctacagcatctggaaaataattctcaagg

SEQ ID NO: 508364 - DNA, 388 bp, Homo sapiens
gcttcccatatatttgctttagtctcttcaacttttaaaagggcatttattaaaacaaatctgtaaaaatttatcctaaatatctcagtgtagtgartacacagataatttatatttcagaattttgctcctctgtattttaaaatacctacctattcacagtgaaataaaaaaactgaaaggcacatttattacctactaaaacaattatcaaggtatacattgaactagatatttgaagttaaattaatttaaagcaatgtaaaatactatcatgaaactagtagaatagatttttctaaattctcaagtgcatagaaataatcactgagaatgcattcttcatgttaaattgtgctgattaaaaaggtgttcaggttttctaaca

SEQ ID NO: 508365 - DNA, 579 bp, Homo sapiens
agctgtttttattacgttaaagatcaaagcaattagtcaatgaaatgaatcactaaacaaactataacattttaaaagttaactccattttgacacaaacttcacaggacaggttttgcgggacttccgtcttctttttggtccctctcttaacagagctagtcaattcttttgaaattgttctgtcctttttacatgtatatagttttgtaaaacaaattaaatktcaacttcttagtattctgagagactgctgttcttaaaataaatgaagataaaatatgtaggtaaatattcactaacaaggtaagttcaagattaatcatggcaatacagattataatagccctgtactggaaacaaccaaaatgcccatcagcagtagaatgggtgaaatattgtgtgatagtcaatggaattctacacataatgaacatcatctactgctacataaaaaaaaaactcacaaattagtgagtgaagaggccagtcccctagacatcacacaatgatttcatttatataaagttcaaaactaggaaaaattaatctatgatccgagaaatcaggataatggtg

SEQ ID NO: 508366 - DNA, 649 bp, Homo sapiens
ctgatttttgttagaaagtatcttctcaaaatgaggacatccattgtctctaaatgtcgtaatttaagcaaattaatttataaacttaaaacaacaaaaaggacattatgtgggagtatgaattaaactttacagatactagtatttatttggctttaatatggtaagactgcttttatctacctcagtgttttttaatggcttaaatgtcttttatctatgtatatttcctcctaagactaaataatatgtttatcttatgtaatggtatatataaaatcaaattacattaaaaagattttcattatgaggcaaagtatttacacagtaatgccaagtaaaagaggcaaaatacataattatatacggtatggcttccactattaaaaatattcaaaaacaactggaaggagatacacaaaaatattaacatatgatatttatttttggtggtggaaagacaggtgattgttaagttacttttayatactttcctgcatgtgtacattttatacaatgtgcataattttactatataatcaagaaaatgccactttttaaaaagtccttttgccttaatacataaggtggccttcaagtgaggtgacactggtcaagctgtctagctaatatgtccaagtttcatcag

SEQ ID NO: 508367 - DNA, 552 bp, Homo sapiens
agatgctttggaaattggtaacagcattttaaatttatatattcttaatattaaagacacatatatttgaagaagtgtagaaaggtaagtacacaaagatgcttactgcagaatgtatakagtagtaaaaaaagaaagagaaatcaatacaaccagttaaataatgttacatccataaaatggattgctacaaagtcatttagaagaatgacatggtttttcatatttactgacatggaaacatttcctatatataatgttgtgcaaaaaagtaggttgcaaagcaatatatgtagaaatattacttttatataaaagcatatataatattaacctctatatatccatgcagatgtataaatatatattatgtgcataatggatgtctttgggtggtaaaattaggtgactttttaaaatttttattttatgtatttccatatacttttctataaaaatgtttatttttgtttatagaaactgtaaaatttaatattttaatgaattcattttgcttatctcttcagttataataaaagttactttatgcta

SEQ ID NO: 508368 - DNA, 632 bp, Homo sapiens
attccagtatagtgctgtgtgttgatgggtctgaactcagctgtatctacttctaaagctgggaatggggtataatttttcatacctgaaaaaattacaagtctgtttggaattggggaatgaataacaattaggtaaccaattgtgtctactaaaaatgggatatgtagmtattatatttaaaatgtacaatcaaaagcttcatttgaacttcaattggctgttcatgctgattaaacacactgcgtaaatttgtagtttatccacattactttaatgatatgtgttgcttgagttcaaggttatgaaacaagtgtaaattctcatccaacgtaaatgtctcatatcactattttccttaaaaatctgctttatgataggcaggttaatttgcaaataaaaaaattactgtattctagatacctttgttgctatcatatttatagaaaatgtttggatttttaaaaaaacttaggagtgaatttttattgttctgaaaccatagctcaatgacaaagatagtattgagtagtagattgtgctggaaacaaaagactatgccaaaggatagtaattagagaaagctttatataaaagcatttggatgagtacacaagacagaaatgcacaga

SEQ ID NO: 508369 - DNA, 638 bp, Homo sapiens
tgttttatagcagttttatgttattatattctccctatattttttattatcttttttcaaaaagagttgttgctgattctcgtaatttaaatgtgttatcatttttgatgattagaagaaacataacacaaaacatgtttttatttatattttcaaattttcttatatcactagatttacgaaaatacatctttcaaaaaagccattcatttattcattctttatttatttaccaatcaagaatccagagtacctattatgtgcacagctttaagtacattggggaatgaaaagatgaatagttttcaagcaaaatctttattgctgatatattttaagaattatatacctaatgagaaacataagacatgtattttttgtcttataaggttttttcttttaaaaaatacattatagatcaccttaaaaggagaaaaatattaatgcagtaaatcagttttaacsttgctagcctaatgtttacattattattcttggtataattaaaaaatactaacaaatattaacaaagattaaacaaaaatgaacttatctagatctaaggaagtaaatggttcttgactatttagggctttcagtgaagtgtgcgcagcttggctttttcgaagagaatgaca

SEQ ID NO: 508370 - DNA, 638 bp, Homo sapiens
tgttttatagcagttttatgttattatattctccctatattttttattatcttttttcaaaaagagttgttgctgattctcgtaatttaaatgtgttatcatttttgatgattagaagaaacataacacaaaacatgtttttatttatattttcaaattttcttatatcactagatttacgaaaatacatctttcaaaaaagccattcatttattcattctttatttatttaccaatcaagaatccagagtacctattatgtgcacagctttaagtacattggggaatgaaaagatgaatagttttcaagcaaaatctttattgctgatatattttaagaattatatacctaatgagaaacataagacatgtattttttgtcttataaggttttttcttttaaaaaatacattatagatcaccttaaaaggagaaaaatattaatgcagtaaatcagttttaacgttgctagcctaatgtttacattattattcttggtataattaaaaaatactaacaaatattaacaaagattaaacaaaaatgaacttatctagatctaaggaagtaaatggttcttgactatttagggctttcagtgaagtgtgygcagcttggctttttcgaagagaatgaca

SEQ ID NO: 508371 - DNA, 502 bp, Homo sapiens
aaagaattcatgtttgttcttctttaaaagtttggtggaatttagcatgatatggtaagccttaaaarcatttggtttaattttccttgccagctcaaaaaggatgactgaatgaataccttagtggcatagttgtaaaaatctgaagaataaaacttttacctcatgtgtctctgggtcagtatattcttggttccagttggggaccctaggatcactgctgtctatagatttcttgatgagaacaaaatgtctcatttttttctcaactcacatattgattttggagagagggccaccccattctgccctgccctcataagacctgtgttgtggaatacatgttctttaagttgttgggaggagggatgataatgagttgttaggggtctcagatagtgaggcttctacaagagtagcttttccgagtgagctgtgcccctcaaggtgacatgagtagccagagaagaggactttttggaaatagcatctcaaagtagcc

SEQ ID NO: 508372 - DNA, 526 bp, Homo sapiens
ttggcttgcgacagagattgggggaacctagaggtttgtgtcttattcaatattttatttacgtaattacctgtagatttaaaaatccacgtgttccataaattacagcaaaatgcaagaaactatgtccaatgaggcttccctctgcttctccaggaaacatcccaaatgcctgctactattggtttatcagttacgagatccttcccacggagcaatgggagtgatgggacagcaagcattggcattattatggaatgctgccattccactggctgtttatcatgttctatattatctcagtgctatctccactcattgatagcaccakgtattggaatcagaaaaatcaaattagtccttctttccttctaaaggcgatgatacttcactagagcttttctgcttaacaaaatgtgcaactgcacatgcacacagacacacacatatgcacactaaagatatatgccagtgtgtaaaggggatttgggtagaatgtataaatgttctctttaggcattgctgc

SEQ ID NO: 508373 - DNA, 597 bp, Homo sapiens
cagtttctttgtttgcaaaatggcaataataatagtgttcctgtaggagtttgttgtgaagattaaaggtgtgatagagagctttgctgagcccctggcccacatcaaatgctccataaatatcatctgttagtattttgctgtgtttattctttttggtgattgtttcagcttgatttgctagcatgagagtggcacctctgaaaggtaagcaaacctcttttcactgtctttcaaataaaagtttattaatgtttacctatcattcaccatggcaagcaaacttcgtattatagttttcagggcattagtgaccttgtttaccaagtgtgaatttcccagtatcttctctctaaagtcaggaaaacagtgaatagcaggtagagaggtgctgctttgggcagaggagctcactttgtttgagctacttccagtgcttcctgmcccctctctgacctcctttcctctaccactatgctcctttggcccattgcccaaggcttctcttcttttccagtttttttacttctatctcctccccaaacctagaggcataaatgccaataaagtttgcatttcagagttgacatcagctga

SEQ ID NO: 508374 - DNA, 609 bp, Homo sapiens
ttggccagagagttctcagcacacagatgatatttgtactcacggaagcagatgaaataactcaggagtacagattgagacaagaagrgagattagggcagaactcaagaaaaatggagaatttaaggaatgaagagaggaaatctattaaaaacggtagaaagttgtgtacagcgataggaagaaaacccagagtgtacggtgctatagaagtcaaatgaaacaaagatagagtcaacatctttaaatgctgcaagagctcaagaatgataaggactgaagagtcttaagtgtattaaacatcaaagaggtcactggtgatgttcagaagtgtggtgtaagtggagaggtggggatagaaactgaattacagggagctgaactgttagtagagcaaagacaataaagcttagatgtatgtgtgtgtgtgcgtgtgtgtgtaagagagagagatctaaagttgtcaaagggtttttaattttgattttaaatttatatttaattaatttttcagttaatgtaggaattttatttcaaatctaaaattgccttttctataaattaaactttaaattttcttataattgtagattcatatgaagttgaaag

SEQ ID NO: 508375 - DNA, 609 bp, Homo sapiens
ttggccagagagttctcagcacacagatgatatttgtactcacggaagcagatgaaataactcaggagtacagattgagacaagaagggagattagggcagaactcaagaaaaatggagaatttraggaatgaagagaggaaatctattaaaaacggtagaaagttgtgtacagcgataggaagaaaacccagagtgtacggtgctatagaagtcaaatgaaacaaagatagagtcaacatctttaaatgctgcaagagctcaagaatgataaggactgaagagtcttaagtgtattaaacatcaaagaggtcactggtgatgttcagaagtgtggtgtaagtggagaggtggggatagaaactgaattacagggagctgaactgttagtagagcaaagacaataaagcttagatgtatgtgtgtgtgtgcgtgtgtgtgtaagagagagagatctaaagttgtcaaagggtttttaattttgattttaaatttatatttaattaatttttcagttaatgtaggaattttatttcaaatctaaaattgccttttctataaattaaactttaaattttcttataattgtagattcatatgaagttgaaag

SEQ ID NO: 508376 - DNA, 628 bp, Homo sapiens
cttctgtcccagtctgacgtggtttctgtttccttccccagaatactctggagcagtgcaatgtgtgttccaagcccatcatggagcggattctccgagccaccgggaaggcctatcatcctcactgtttcacctgcgtgatgtgccaccgcagcctggatgggatcccattcactgtggatgctggcgggctcattcactgcattgaggacttccacaagtaggcaacctactctctcrtcaccaccctgccagtccttttggagtctgttcttactgcttggcatctgggcatacattcttctctctcagaactacagaatttcaggatttagtgaggcttttaaaagagcttattgatcccctcctccaatgcaagaattaatatcagacaatccatgcagtcatccagcctggtctctgtgtcaaggcttccccagagcttgtccattgcatctctgggtaattctaatgacgaaaaagctggctcagctatagtgtgtatgtgttagaaagaaacaggatcctggcctaaatatgaacaaaatttgtgacatttggcattgttcaacttatttgagctcttcagtttggtctttagatcaaaccctctctaaagctctctcag

SEQ ID NO: 508377 - DNA, 406 bp, Homo sapiens
aaccatgatttgtctgttccaaaatcaaaattttggtgaaagcatctgaatggctgagcttgggtcacaagctgtgccccgggcatgaggataagggaaagcaaggatttaaccttctcatcatctgtagaaggaacagagccctgttttcaccaagacagacackgctcacaattaggaagggcattcagatgctgagcaggaaacaacatgtgacttgttgaggagagcatgcaagtgcaggccagagcagaattgctagggacaatagaaaggagattcaaggttgctccataggagaacaactttattcattcattccacacagagtactagcgagagacaggactagctggatttcctaggccaactaagaattcctgagcctagctggggaaggtgactg

SEQ ID NO: 508378 - DNA, 344 bp, Homo sapiens
ctccacgtcgatgtccaggaagccgccctccgccacctcgaagatgaggcccatcttggtgcccgaggtgacccgctcaaagaagcactcttcagcatgggcgtcgatgctaacgaaatagcccgagaccgtggccaggagagcggccagragcaccagcagttcagcaagcgtcaccatggtggggctgaggccgaagccaggacccggactgcggcctccacagccgccgccgccgccgccgccgccgccccgctgccttctcagccaccgccgcctaagctccgccccttccgcctgcgccaccagtgggggctgatgcgggcgcagtggattggcgggct

SEQ ID NO: 508379 - DNA, 511 bp, Homo sapiens
gtggtcaataaatgctagggaactccaaagttaaatttttcaaattgtcctaattcaaatatttacttaaactctttttatattatgcgcaatacagggggaatgacattgttagctgtgcgtttcctggaactgactaactgctacaaggccacagataaagtttgtttatagaaaaacaaaatatgaaaaaacatttagcagtgttctatttggggtttaataatcccacacatgctgagtgggagaaaggatagtcatccagaacctttctctccccatggtaacagaggatgaaaatgctttaaccccatctagtgacagatgagtcatgatttagattagttcagttgttcaaaatttgagtggtaataccaaatttttgggataaataagtgatgccccaagaaactcatagtttaggaagagggcaaattttcatttcaccttyaggttttaaaggataaaaaattcccctattacatgtgagtcctcaatatcattacttggt

SEQ ID NO: 508380 - DNA, 431 bp, Homo sapiens
tcagagtcacaaattcattctctgctgctgtgcgcttgttgatttcatcctcatatctacaggaagaaaggcatgggacacatttgagccagtgggtaggatgaaacagaaaagcagcytgggattcaacattttcccgaatggaatatattctaattgggctttcctgccacagagagcctaagagacgatttttgcttctgctaaatttgccacttctttaatctccccatcctcccataaccatctgtggttcttgcaggtttgctcctagggactaatttgtgctcttcatttccatggacatgggttgttaggaatattacccccttctggccctggtcacccaatagtcttgaagtgtgtgctgcaggaaactgagtccatttctcctgtttaactcacttgttcttgaagtcctccaccaggtc

SEQ ID NO: 508381 - DNA, 410 bp, Homo sapiens
gggtgctgttctggtttcccctagaaacacagtgtccttcaatgctttagcccagcacatcacattcccttggggtataagactctgggcaggctgcttttcagggttccttagctgtagtgtaagtgggatacatgactccatccactctgggcagcttttctaggctttggggacccactcaacatgaatcctgggcttctgttgttctttgctgtctggaagcaataaatatttttcctgtaacttgttgcatgtgagtgtggtctgcctcgctggactcagacaagttagtaacctctggacagtgagcctgcttcacaaacccctgttggtggagggaggggatccttcaacttccctgggcayaacccaatgcagaacacttctctgggtcctcaccttggtct

SEQ ID NO: 508382 - DNA, 228 bp, Homo sapiens
ctgccccctccaatggagatcctcttggagccccccaggccatacagactgcggctgccaaagccagctcctccacatgcaccacccaggccaccactgcccctggagcgggacacggagaygctgctgaagccagagcggctgaccccagggagcctggctgagttggcactgaaaccccggcggctgctgctgtggctcctgatggtggtggatgtgctggccatg

SEQ ID NO: 508383 - DNA, 607 bp, Homo sapiens
ttactttcacatttgctgacatacaataattgacaattcttcatggtcttaatccatactgaagctcaaataatacttatacctggggatcctattaaatttaaacaaggtacccctgtaatcttggggaagttaatgaacaaaaaatagagaacaaacaggcatgcctcactttaattagcagaactactgacttgcttaaatttcccacgatcatagcatcctctaacgtttcccacaatgggcatggacagtctaacccaataagtcataaattaaaattaaatcaagtccttggcatttataaattggtttggcaaaatgggacaccatgggcctccccaagccctagttaaaatagttaatatgccccagtgtaaattaaaacaggacctttaaggagtgaagcccattaaacaggatctatttagagaagggttgtttatatccattatttttccatcaacaacctaatttggcctatttttaaacttsggaaaaatgaatggtgcctcacagtggattaccacaaccataatgtcatggtcatgcctactaaggctccatacccaatattactgaaattattgacttatccaattggcag

SEQ ID NO: 508384 - DNA, 610 bp, Homo sapiens
agcgcaacacagcagcgtgctcccgtggcttccgatcatgctgcgtgggaaatttggctgagtatcaccacgcttcaggcaaaggcaggggttagagggtttcactggagcaaggagtcactactcggaggtcacggctgggccaagagaggagcagggaggagaaagggctgggaaatgaccacaggccrctggcaactgacctcctgaggctcatctgattatggcccctgccatgaacagggtctgtccagttgcatggcatagggcagtgggcagaggctagggtgcaagagacctgggcctcctgtccttcgaagggcatggcctatgatgactatgaggagaggcttctcagccaggtgggctgtggcctggctggaaggaagaaggcttctatgacaggtgacttctgactctgctttccaaactggtcttcctgctttcacccttgaccctgtatagcctatacttgacaccacagcagagccatcctttaaaagcatgtcacgacactcctccatttgaatcctccagtggcttcttgtctcgactgaaagaaaagcccaagtcctacaaggccctatattacttgcccttcaacccgcag

SEQ ID NO: 508385 - DNA, 590 bp, Homo sapiens
tcaaccgcaccgtccagaggctgcaggcagagatcagcaacgtgaagaagcaggtgggacgggtgcttagggagggctgaccaagccctgcacctcctacaatgccctgccagatcgagctctggaaacttaaccattaaatggtctccaactgtctctggagcagattgaacagatgcagtcactcatttcggatgctgaggagagaggcgagcaggccctccaggatgcgtggcagaagctgcaggacctggaggaggccctgcagcagtccaaggaggagctggcccggctgctgcgtgactaccaggccatgctgggggtcaagctgtccctggatgtggagatcgccacctaccgccagctgctggagggcgaggagagcaggtgggtctggcagctgtgtttctggggctaaggcttgagatgcacccatgaagctgtgggactggctatttggagaaaagataagccccacctttttgggaagattggtagcccagggtgagcagaaacattccaattagaggcagaggctgtgtgaatggacaagcctcttcacayagggagaagtcattgttatcattcct

SEQ ID NO: 508386 - DNA, 566 bp, Homo sapiens
tgcagctcgaaacttggcccagcccagaaggagaaggcccagggagtgaggcagcctcttcaatgtgcgcagacctacctaccccaggaggcgggcagaacaatgccatggaaagcaccctggataaaggcaagagccccaagttccagtctccaggctcctctgggcctccttttagcccattgtaaagtagagctgataaacctcttctctgcctgttgagcctctactcctgagcccatcaagggccaggtgagtgaagtacaaaaagggccttataaactagaaagcaggarcgccttgggaactgagggatcacagcggcagcagggagtcaggccgtagaatgctagccaggtagcaggctctaaattgacacttatagactttttcaaccttcatggcaaccctctagctctttttttacagatgagggaaactgaggctaaggagttaaacaacttttccaggggcccacagccaataagtggcagagccaagcctccagttcagtttctgtcccagcctggagcacatgctacggactgaggcatatacgactcaga

SEQ ID NO: 508387 - DNA, 612 bp, Homo sapiens
aatgaatggactggatacttgaaggcattcattcatctgagactgagcaatgctcaccattctggtgaccaagagagttcctaacatcccctctgtctgcctgtggctccctgggtggctctgttgattctgtttttcaacctgctgcccagggagcctcatgtcactcatctcacatcccgtgcccagtctcttccactttcaaacatgcccccttagtccccttttcaggcccctgtgtattctgctgcctgcattcccttcctgcctctcccctgcagtgagggctgcacccttgtccacctgacaacagatgccatgatgacaggatcctctctgcctggttctccagggctccccattgcctagcacagtgcctggcccatggtaggctcccagatttttttttatcagcaactattcggttcctcctgcttatagcattggcctctgtgtgggtagttgtgtgtcccgcctccactgtcatgctggagaagaaaagtcttggccctccagacagccttctacccaatcatctcctgccccaaacccaggacaggarcctgtatgcatgaacttaagatggggttttgagatacagactgactaaat

SEQ ID NO: 508388 - DNA, 637 bp, Homo sapiens
actgtcccctcctagactgtcaggtaacagagcagagcctctctcaggacctcgtcctggaatttaatgttcatccctagcccccttagagtgcatcctcctgaccattatccagtagaagggaaacgtagtttcatgtcagctcctagcttcctaacctccttctscagtccgtctccatcaagacagcttgcctatctctcgtgagcacttcccagtctctcaaaggatctggcaggtgcattatcttgccgatgcctgcctgcctgcctgcctgcctttaggatggaagcctcatgaaaccaggtccatgtgtctcattccctgattcatccccacatcctgagcagtgctgggcagatggcaggaaataaagtcatattttgttgaatgaattagtcatccttatgattgagaatcaccaagggaaccacaggcacacaggctgtccaagttggaaaggattttaaacttcttccagtccaattttccacccaacacacaaatccaaagttccatttgttgcagaatcatgtcccacaaacgtttctcgactttaagaccatttcaaaaagtatactgtggtggggtttgtttatttatttatttattattattttttttttcacaaagaagc

SEQ ID NO: 508389 - DNA, 637 bp, Homo sapiens
actgtcccctcctagactgtcaggtaacagagcagagcctctctcaggacctcgtcctggaatttaatgttcatccctagcccccttagagtgcatcctcctgaccattatccagtagaagggaaacgtagtttcatgtcagctcctagcttcctaacctccttctgcagtccgtctccatcaagacagcttgcctatctctcgtgagcacttcccagtctctcaaakgatctggcaggtgcattatcttgccgatgcctgcctgcctgcctgcctgcctttaggatggaagcctcatgaaaccaggtccatgtgtctcattccctgattcatccccacatcctgagcagtgctgggcagatggcaggaaataaagtcatattttgttgaatgaattagtcatccttatgattgagaatcaccaagggaaccacaggcacacaggctgtccaagttggaaaggattttaaacttcttccagtccaattttccacccaacacacaaatccaaagttccatttgttgcagaatcatgtcccacaaacgtttctcgactttaagaccatttcaaaaagtatactgtggtggggtttgtttatttatttatttattattattttttttttcacaaagaagc

SEQ ID NO: 508390 - DNA, 495 bp, Homo sapiens
gaacttgacagtcaccttttgtcttcacattacagatagagaaaccttctgcaatggcaaaaagaaaagttatttgatgattgcaattcaggggaaaaactcaatttgatttasagaaacataaaatgattgtttttaataaagaacagggaccacttgcttctagtcaatatgtctgagaaatgtcttacaaatagactcagtgtcacaaatagatgatttacaaatagactcagacccactgtagcgttaaggatggaacctggattatgcattcagtgcgggcatcaattttgacactcagagaccaggtgaaggtgtccaagagacgaaagctcagctctctcatcactcaggtgaaggagaaaggggaccagtggttccagcacgtgttccgcaggccggcagcatcagcatcacctggaactttttaggaacggagatcggaagtcccaccttgacctgccgagatagctctggggtgggcccagcaac

SEQ ID NO: 508391 - DNA, 495 bp, Homo sapiens
gaacttgacagtcaccttttgtcttcacattacagatagagaaaccttctgcaatggcaaaaagaaaagttatttgatgattgcaattcaggggaaaaactcaatttgatttacagaaacataaaatgattgtttttaataaagaacagggaccacttgyttctagtcaatatgtctgagaaatgtcttacaaatagactcagtgtcacaaatagatgatttacaaatagactcagacccactgtagcgttaaggatggaacctggattatgcattcagtgcgggcatcaattttgacactcagagaccaggtgaaggtgtccaagagacgaaagctcagctctctcatcactcaggtgaaggagaaaggggaccagtggttccagcacgtgttccgcaggccggcagcatcagcatcacctggaactttttaggaacggagatcggaagtcccaccttgacctgccgagatagctctggggtgggcccagcaac

SEQ ID NO: 508392 - DNA, 633 bp, Homo sapiens
ctggaaatgctcatgtctgttggaacttgtatgtcaggtagagctgccatagaaaaatggcttcaatgtcttttctgtctttcacttctcatatgagtacttcttgttagcagaacctaaattgtattcatagttcaagccacaaaagagtcttggaagtatagtttttagccttccacctaaaatatagagggagaatataaaggcagacatttgggtgccaaaggacaacagacaatatcgagcataataagactgagtgaggtcacccaggaaatagatagaggagaaccaaagattgagccatggatcattccagmattaaggggatggggaggtagaagaaaactgacaaattgtctatgaggtagtggagtaccagaatagcatcttatcctagaaaccaaatgggtgatgagcaacccaatatcttcagatgctatgcatgttcaattttttgttaaaaaaaaatgtattattgttgttaagaaaaaagatataaagagtaaatatccttgaaattctatttaggtagaagtaatcacaaaacatctgaaaaactactccctattatgtataagtatttatataataatagttctgtatactcacatatttgctattatctactta

SEQ ID NO: 508393 - DNA, 574 bp, Homo sapiens
caaaataaaatgtaattacttcactgaaaagttcaagaaagaatggcggttggcctagttaaccccaggagctcatggctcaaattatattgtcagctttctctctctctctttctacttgtgtttcttcctctctcggtctttcttctgtgttggcgtcattctcaagcaagacttctgacaggaggcctcagaaagccccagctcccattactcctacagctatgaaatgaagtgaaaaaaaaaaaaaaaaagaaggtyctctctcttaaaaatgctaaccaaattcctggcatggagtcccattacaccagcttgaggaacctgctcatccctgcaccaagcacaatgtccagggaatgggatatgctgattggtcacgtgctcccctggagctgagacgttggtcagcacttcccagagccatagactaaaggtagaggacagattttctccaaagaaaaggaggggaatgggtgccaagggcacaaaaataacagatgtccattacagaagaccaatgtagtcatttttacatttcataaggctcaaatttaagccacttgggcctcag

SEQ ID NO: 508394 - DNA, 580 bp, Homo sapiens
  misc_feature (1)...(580): n = A,T,C or G
gctggccgttgcctgccctgcaccaggtctgtggccataggcatgtaacttacccaaagttccatttcctccactgtaaaatgggcctagtaataatgcttacctcatatagagtggttgtaaggattcgatgagttaatacatgaatagtagctgctacttaggactacaggagtggtttgttgaataacacatgggttctctctgtcactaagaatgtcctagtagttaatgatttattgactgatttctctgggtcaggcattgtgttttacgtgctttaatttttttcatttagccttcacacanttcataaggaagataccgtatgatagtatcctcattgtatggatgagaaacttgggattgagagatattaactttcttttcatgatccatacagatayctaagtagcaggactctaaccctaggttcctgaacactgtagcacaccaccctcaccagaagacttgcagggagccttcctgcccatcatgtagtgtattttcactctctaaaactacacacactagggtgagtgcttgagccagaaaattcaattcaactttttgagccaag

SEQ ID NO: 508395 - DNA, 675 bp, Homo sapiens
aggtcttacctcatcaggatttgatcccccaaaaagatttgtccctctctgggctatctttataacttgtacatacttctatttgtggactatgttataataatgtggctatatgtctgtgatctcagcgtgagctctttgaggacagagtttctgtctgaatcctcagggttctgtttcaccatccacttaatgaacgaamgttgacactgattgggttgaaagtgtcttaaaattccccaggtgcttctgtcctctgggatgttatgtaggactcgggctgcttttgtcaggttctcagcaagggtagtttaaaaaattaaggttttagcataaaattgtctctccatagaaagcattataatttcaaagtgtactaggttttacaattatttgcctttcttaatccagtgtttgtggtgtaagaaataaggaaataaggatgatttgtttctccctatgaaaatgatgggattttgaatgtacacatacgtaggtaaaacaaattctcttataattttttcctgaatgatggggaagacaaccaatctcccaaattgtattgttttatagaaaaacctaaatgatctgtggtcatagcaggggacttaagaagagaactcagattatctgatgggctaatgtattgctccacctacaactagtgagtggtga

SEQ ID NO: 508396 - DNA, 675 bp, Homo sapiens
aggtcttacctcatcaggatttgatcccccaaaaagatttgtccctctctgggctatctttataacttgtacatacttctatttgtggactatgttataataatgtggctatatgtctgtgatctcagcgtgagctctttgaggacagagtttctgtctgaatcctcagggttctgtttcaccatccacttaatgaacgaacgttgacactgattgggttgaaagtgtcttaaaattccccaggtgcttctgtcctctgggatgttatgtaggactcgggctgcttttgtcaggttctcagcaagggtagtttaaaaaattaaggttttagcayaaaattgtctctccatagaaagcattataatttcaaagtgtactaggttttacaattatttgcctttcttaatccagtgtttgtggtgtaagaaataaggaaataaggatgatttgtttctccctatgaaaatgatgggattttgaatgtacacatacgtaggtaaaacaaattctcttataattttttcctgaatgatggggaagacaaccaatctcccaaattgtattgttttatagaaaaacctaaatgatctgtggtcatagcaggggacttaagaagagaactcagattatctgatgggctaatgtattgctccacctacaactagtgagtggtga

SEQ ID NO: 508397 - DNA, 471 bp, Homo sapiens
agtagtgtttgctctaatggttacctgtggccttcatgctgcttttcctaatgagtgctgaacccaatctgtatatcagtggtgctttctgttggatttgttgrgctgttctctcattcagtctttaaactctctgttctcttggtttctgtgactctcttcttccttttctctgcaggaactttccttcttcatcttcttgtgagtgcttccttttctgccaattgctcaaccttgaggtcccctagggttccctactgagctctctgcttatatgattttgccttctcttgtggttttaattatgactcacgtgtgatgacttctaaaccttaattcatcattgacattaatatgtgagcctattcactcagcagatcaatttgatgttggaaaacctaatctgtctacacttgatttctttcctacaaaacttgttcttctttttgtttgctatctcagcaaataaca

SEQ ID NO: 508398 - DNA, 471 bp, Homo sapiens
agtagtgtttgctctaatggttacctgtggccttcatgctgcttttcctaatgagtgctgaacccaatctgtatatcagtggtgctttctgttggatttgttgggctgttctctcattcagtctttaaactctctgttctcttggtttctgtgactctcttcttccttttctctgcaggaactttccktcttcatcttcttgtgagtgcttccttttctgccaattgctcaaccttgaggtcccctagggttccctactgagctctctgcttatatgattttgccttctcttgtggttttaattatgactcacgtgtgatgacttctaaaccttaattcatcattgacattaatatgtgagcctattcactcagcagatcaatttgatgttggaaaacctaatctgtctacacttgatttctttcctacaaaacttgttcttctttttgtttgctatctcagcaaataaca

SEQ ID NO: 508399 - DNA, 550 bp, Homo sapiens
ggcatggtggctcaggcctataatcccagcactctgggaggccaaggcgggaggataacttgagctcaggagtttaagaccagcstgggcaacatagagaccttgtctcttaaaaaaaaaaagtaataataagaccacttaattattgtaaagtaaataataatggactggttgatcaaacctgaaagaaaatattcctaaatggttcctcatttgcccttcaatcctctctttcagtgtaaacctatctcatacaagattttgacctcaatcttacacatttttagcaccacattctccagcattcaatcgtaaacagaggaatatgataccaactgagctgccagccactcagacaaagcctctgtgtgttcccaagctccacacccaacatctccgtctctctccctctgctctgctagggcccagtcacaattgtgttctggccagtggtgacctgtataataatgtacatagtgttccctaattaagagactgggttttattcaattttcagtgttaaaactcactctataggagccataccacc

SEQ ID NO: 508400 - DNA, 550 bp, Homo sapiens
ggcatggtggctcaggcctataatcccagcactctgggaggccaaggcgggaggataacttgagctcaggagtttaagaccagcgtgggcaacatagagaccttgtctcttaaaaaaaaaaagtaataataagaccacttaattattgtaaagtaaataataatggactggttgatcaaacctgaaagaaaatattcctaaatggttcctcatttgcccttcaatcctctctttcagtgtaaacctrtctcatacaagattttgacctcaatcttacacatttttagcaccacattctccagcattcaatcgtaaacagaggaatatgataccaactgagctgccagccactcagacaaagcctctgtgtgttcccaagctccacacccaacatctccgtctctctccctctgctctgctagggcccagtcacaattgtgttctggccagtggtgacctgtataataatgtacatagtgttccctaattaagagactgggttttattcaattttcagtgttaaaactcactctataggagccataccacc

SEQ ID NO: 508401 - DNA, 550 bp, Homo sapiens
ggcatggtggctcaggcctataatcccagcactctgggaggccaaggcgggaggataacttgagctcaggagtttaagaccagcgtgggcaacatagagaccttgtctcttaaaaaaaaaaagtaataataagaccacttaattattgtaaagtaaataataatggactggttgatcaaacctgaaagaaaatattcctaaatggttcctcatttgcccttcaatcctctctttcagtgtaaacctatctcatmcaagattttgacctcaatcttacacatttttagcaccacattctccagcattcaatcgtaaacagaggaatatgataccaactgagctgccagccactcagacaaagcctctgtgtgttcccaagctccacacccaacatctccgtctctctccctctgctctgctagggcccagtcacaattgtgttctggccagtggtgacctgtataataatgtacatagtgttccctaattaagagactgggttttattcaattttcagtgttaaaactcactctataggagccataccacc

SEQ ID NO: 508402 - DNA, 615 bp, Homo sapiens
gggagttatccttgactacatcccctcttttgccgacattcctctccytcatccaaacaaactgatgtattacttctgcttctcaaagatcaattaaatctgtgtactttatccctactgccattatctcaggacatcatcatctcttgcctagattacagaaattaaatcctttggtgtctccttgtcttcagacttgcctccagctcccagaaaagtatctggcatgttgcaagtactcaataaatgtatattgaatgaatcaatcaatggctgtgcatagatgagttctttttggcgcagccacgctcaaaggaacctcatctgtttgaaaatgtccactcgcttcctgatggaacgacccaggaaatgactttagagctgtttgtttttgaattgaagacttgaatagttttcttaacatatgtagcacccagaagctttcaacacatttgtagatcagtcatgtcggttaagtttcacattcccctatgaaataaatgaccttgagaactccctttggtagctgagtctcttttttgcagagttacagagtctaaatcattttcccagagttagcaaggtggcaaggagaagaggcagggctcaggtcaa

SEQ ID NO: 508403 - DNA, 615 bp, Homo sapiens
gggagttatccttgactacatcccctcttttgccgacattcctctccctcatccaaacaaactgatgtattacttctgcttctcaaagatcaattaaatctgtgtactttatccctactgccattatctcaggacatcatcatctcttgcctagattacagaaattaaatcctttggtgtctccttgtcttcagacttgcctccagctcccagaaaagtatctggcatgttgcaagtactcaataaatgtatattgaatgaatcaatcaatggctgtgcatagatgagttctttttggcgcagccaygctcaaaggaacctcatctgtttgaaaatgtccactcgcttcctgatggaacgacccaggaaatgactttagagctgtttgtttttgaattgaagacttgaatagttttcttaacatatgtagcacccagaagctttcaacacatttgtagatcagtcatgtcggttaagtttcacattcccctatgaaataaatgaccttgagaactccctttggtagctgagtctcttttttgcagagttacagagtctaaatcattttcccagagttagcaaggtggcaaggagaagaggcagggctcaggtcaa

SEQ ID NO: 508404 - DNA, 636 bp, Homo sapiens
gaattttttccatatgaccacccatacttcagatccacactgatgtaaagatttatgaagtctgttgagctttccaagggccgtcatttcttctgccctctccctgacctcaatctggttgcactaggggtaggggccttagtttgctttattttcctcttacctgtattttatcagtgaaggaatgcagaggactgtggagatgggacttctggcagtgcagagggcataggcagaaatgggaaatcacttggttgtggtgaattagcttgtcacctgagggacagggggaattagcacagagggagctcccaccagggcactgaactcctatattaggttctccaggttgmgatgtgtgagtgcaaagagtgaaactgcattcggaaatcctgaggtccttagagcaaaggagctcggcctccatcctacagtagcaagaattgttggaggctctcagcaagggtcctggattctccaatgacatatttattctttctcttctgcatctctgttgaagcacgtgtgctccttttaccaattatgagatttttttcctgatcttctgtctaacaataacttactctgagcagacactctgtagtctcaatatgtaatattttttatctacgtgca

SEQ ID NO: 508405 - DNA, 568 bp, Homo sapiens
ttcaccctgcgtttcttgaattctttgtgaacatccctttctcctgtagctgacagcttctgttctttctcttggggcttatgagctttctgagtcagatcttttagcaaagccttagttttctgctcatggagatcattaaggatctctactaccagctgccagattttgcatttattttcaactagagctttggtggctggcagcagttaaaaaatcattttccaagtttaaaatttttttcttccagctgatgccttgctgacacttcattatttggcttagactataaatggcatcttttttttttttttttttccarttcttgttaatgtgggttttggcattgtctgatgaccctaacttttcatctttttaccatggtaatctgccagttgactctttattttcaaatcatctagttcatttccttttctatgcgttttctcctctgactcaaagatcaagtgctttcagctgtctagtatatttattcattactacaactgcattattttcctaaaccgcagcttctttctgagacttgagatcttatctgatttgctca

SEQ ID NO: 508406 - DNA, 266 bp, Homo sapiens
caaatttccatagcagaggagggagataacaaccaatccctccaaattcctcctgccaatagycctgtttgctgtcttgcctcctctgttcaccccacttgggcctaaacaagaaacagctcaaatctgagagttctcagagcatcattagcccaaacagatgtatgacaggtctttattacattactaaagattctggaattatggtgggtaaggagtcagggagaggaagtttatctacctttggcttccccttatcctgagag

SEQ ID NO: 508407 - DNA, 520 bp, Homo sapiens
tctccaaatcacattacaaaatagaatggatttcacctgcccagtggactctggtgcttgtcagctcagccatagaggctactgtttgctgcccttgccatgtgacttgagcatgagcttcacttttgagactatgattcctacatcttgtaattccctggaattacagaattaatcttctggacccatcctccctagggtaaactttgtgcctgatcactagtcagagaagaactgacgtggagcctgcaattgtggttcaagttccttccttggcactcactaattttaagacttgaagttattccgcctctctaggcctcaattttcttacttgcaacgtagagacttactgatgtcacaaggattttgtggggagtaaatgaggtcaaatacgtacctttcacacaggaggtgttcaacaaacagtgatctggatagtctccrtgcaagtccattaacatcacaactgcctcgtacccttttatagaaaccaatctaatccgttgtacttgttaat

SEQ ID NO: 508408 - DNA, 520 bp, Homo sapiens
tctccaaatcacattacaaaatagaatggatttcacctgcccagtggactctggtgcttgtcagctcagccatagaggctactgtttgctgcccttgccatgtgacttgagcatgagcttcacttttgagactatgattcctacatcttgtaattccctggaattacagaattaatcttctggacccatcctccctagggtaaactttgtgcctgatcactagtcagagaagaactgacgtggagcctgcaattgtggttcaagttccttccttggcactcactaattttaagacttgaagttattccgcctctctaggcctcaattttcttacttgcaacgtagagacttactgatgtcacaaggattttgtggggagtaaatgaggtcaaatacgtacctttcacacaggaggtgttcaacaaacagtgatctggatagtctccgtgcaagtccattaacatcacaactgcctcgtacccttttatagaaaccartctaatccgttgtacttgttaat

SEQ ID NO: 508409 - DNA, 281 bp, Homo sapiens
cccagctaacatccagcactaacttgccagccaagagaatgacctgtattgaaagtggattgtccakccccagttggagccatctcagcagttgccatgtggagcagatgcaagtcattcctgtcaaactctgtgcttatttgtgagcaaaagaaataattgtttttgttttaatcaacttagctttcagggagtttgttactgagcaatagataactgatacaatggaaaaattctagaggcattttcactaaagtcagaaacaagacatggataaccca

SEQ ID NO: 508410 - DNA, 594 bp, Homo sapiens
gttagaggaagagtgccattgytgagtgctggaagctggctccagcacagagggcatcaccacggccagaagccacctctccaactaccgtgaatggaaagaattctgtactgttttgcttcttggcatctgttgttccatatgaaaatctcaggcaagagcatctgatgggtcgccctttggtcatatgactgagctctagctgccacagggagggcagacagagtatcagccttttcagcttctgtcacagaagactggacccaaccttccatcaggaccccacagtaatgatttcctcagatacaggaaggagcttcagattgtgggcagccacacattggacgaatgcccccttgagtattcaataccctattccaaatgttttcccttaatctcaccatgaagaaatctctagtttttgtctatctcagcgagatttgcaaatgtttctacttcatattatttgcagaagaaataaacatttatgttcttttcaaaggaggacaggagatgataactcagattaaaatatggaaattaataagtaataagattaagaaaggcttaaagtcccaaggagattcagtagaa

SEQ ID NO: 508411 - DNA, 185 bp, Homo sapiens
aaaaatgcctagattcaaagaaaattcaataawgcaaaattcaaagatcttgctaatagaaaaaaatgtgagctaatgtcttgtagaaaatataggattatatatttgttgactgaggttggggaagcacttcttaagatcaaataacttggacaataaggcaaaaaattgatggattttattat

SEQ ID NO: 508412 - DNA, 618 bp, Homo sapiens
aaaatgcctagattcaaagaaaattcaataatgcaaaattcaaagatcttgctaatagaaaaaaatgtgagctaatgtcttgtagaaaatataggattatatatttgtkgactgaggttggggaagcacttcttaagatcaaataacttggacaataaggcaaaaaattgatggattttattatattcaaattaaagatttccagtcaacaaaaggttagttggatcaagttaacagacaaatgacatattgggagaagatagttgcaacatctaaaatgaacaggggatttatatcttgaaacatccagaaattcctacaaatccacaagaaagagacaaaaatattcaactgagaaatgagcaaaggataagtatggaatttactgaatgagaaatcctgagtggccaatgagtatatatgaagaaatgctccaattcaacaataatgagaaaaaacacaaattacaacagtaagggaaatcacttctcatctattaaaccggcaaaaaattagaaggatggaaatgccaagtgctaaatatggggggtagggatggggtagcctcatgcattccaggcgggagcattgactggcacagccattctcaggagtact

SEQ ID NO: 508413 - DNA, 618 bp, Homo sapiens
aaaatgcctagattcaaagaaaattcaataatgcaaaattcaaagatcttgctaatagaaaaaaatgtgagctaatgtcttgtagaaaatataggattatatatttgttgactgaggttggggaagcacttcttaagatcaaataacttggacaataaggcaaaaaattgatggattttattatattcaaattaaagatttccagtcaacaaaaggttagttggatcaagttaacagayaaatgacatattgggagaagatagttgcaacatctaaaatgaacaggggatttatatcttgaaacatccagaaattcctacaaatccacaagaaagagacaaaaatattcaactgagaaatgagcaaaggataagtatggaatttactgaatgagaaatcctgagtggccaatgagtatatatgaagaaatgctccaattcaacaataatgagaaaaaacacaaattacaacagtaagggaaatcacttctcatctattaaaccggcaaaaaattagaaggatggaaatgccaagtgctaaatatggggggtagggatggggtagcctcatgcattccaggcgggagcattgactggcacagccattctcaggagtact

SEQ ID NO: 508414 - DNA, 618 bp, Homo sapiens
aaaatgcctagattcaaagaaaattcaataatgcaaaattcaaagatcttgctaatagaaaaaaatgtgagctaatgtcttgtagaaaatataggattatatatttgttgactgaggttggggaagcacttcttaagatcaaataacttggacaataaggcaaaaaattgatggattttattatattcaaattaaagatttccagtcaacaaaaggttagttggatcaagttaacagacaaatgacatattgggagaagatagttgcaacatctaaaatgaacaggggrtttatatcttgaaacatccagaaattcctacaaatccacaagaaagagacaaaaatattcaactgagaaatgagcaaaggataagtatggaatttactgaatgagaaatcctgagtggccaatgagtatatatgaagaaatgctccaattcaacaataatgagaaaaaacacaaattacaacagtaagggaaatcacttctcatctattaaaccggcaaaaaattagaaggatggaaatgccaagtgctaaatatggggggtagggatggggtagcctcatgcattccaggcgggagcattgactggcacagccattctcaggagtact

SEQ ID NO: 508415 - DNA, 347 bp, Homo sapiens
ctggttgatagaatcctaaataagccaactctcttgtgctgctttcttttacgggcactttatggggataataatccatcaagtatgttggaagatgcagagtacaaggaactattgtgacagtagctgaacaactatttgcaaaattgccaaaatgataaacatttattatgctcttgcttaaatggtttcattaatttttacaactatgttaagctggttgttattataatgttattagtataatacatttctcaccaaatcctcagtgaaatgctgcttttyagtttgaaccctgaataaagatggtgtcagttttccctggtctgtatcagctacgtgtgcaa

SEQ ID NO: 508416 - DNA, 661 bp, Homo sapiens
ctaacttgtgtgttactttgtaacccttgcagaattgttgatagtgattttttatgacccgtgaggtcagtgagaatttgaataacaaaaaawggaaagaactcattacctttctctttagagcttggttttgtggaaaatcttaggaagatgaggcattaataaacattttcaaacagggtagatttttctgactagaggggaccatataagtgtacagggaaatgtttttgggttatgatgttctggaatttgtcatttcaactaattgaaagacttatgaatctgtgaaagtccaggagttgtggtaagaactgttttcttattccagtcccaccacgatattatagaatgacttgaaaaaattatttctctggatctcaatttcattgttgggagacaagaaaattttagactaaagctttagggtatttttcagctctgttcatgtttattttttgtttctcacacacagttttggcccataatgggtactcattcaaaaaacactgactgatcctggccttcacaaaaccatgtgtttctaagaaagagaagtggtcccacgggttgggcaaacaagcagagaaggatatggatgaataaacctacaaattgagcgtcttgctgaagtgtatcataaagaagatctgcctggctc

SEQ ID NO: 508417 - DNA, 643 bp, Homo sapiens
aagtgaagtgtgtgcatgatcagtcccatgataactcagacatttacatttacattctcatctcttgaaaatcaagccactcattctctattgccaatttgctttaaaccaacatgtcaataatgggcaaactgccacaagtcaaatttgctaaaaacagaaccatggcataaatagaaaccagagctttaaccactgctaatgcaatgtgaaagttaataagaacgacacaagtcttaaacctcttgcttgttgaagcttactctagggatttgacaaacaatgataaacaaggaccagaaaaaatccattcagactgtcacttgaaatatgggttattccacatctccacgttgattatcctgmtaatgtagattgtctctagttaaacttacaacatgtgctgaccctctttgctacccaatacatcctgtttactgtgtatttgtgtatgagtgtggggcttacctagtttctccagataggagatgaaaccagatttgaaatccccattgggtcttcctacttctttgccaactccttaaaagttttgcataattcagatttttataaagactagtcaagaagaactgattctatactattaaaaggttaacaagaatttgccagtatacaatacgta

SEQ ID NO: 508418 - DNA, 447 bp, Homo sapiens
tggttattttcactgacaaacttatcatttgtaagcttcaggcctgcctgaattgatgaccatgttgaataaatgtgatttttatttttactgctgaatcattgctgwtgaccattgaatgaaatagtttattgaatggcctttaagttttattgcttttgcaccctagtttaaaaacaaagagcttaatttcttaaaagttcaataaaatgtatttttgatatttccaccagaactttacaagcaatttctctcctctgccctttaataaccaccttctgcatttttatgatttagtttaacattattattatactttttttactgggagagctcatcaatgcccttggcagtaagattttgttacaagaaatccagaagccgagcctatcactggttgcaacaattacaaagtttctctgggttgagttcagaggcttactctga

SEQ ID NO: 508419 - DNA, 636 bp, Homo sapiens
tgacattttagtttttaaaccataaaactgtatgagtctacttccaagttgttttatttctggcctttcgtctgaactmtagacccccatttccaaatgcctgctaaatctttactcgaaaatctgctagcaactcacactcaacttgccccaattttagcttactaccttccttctaaaccagttcctcttcagtccctcttgtcttttcaattctgtaaacaatattatcattggaggggcaaaacctaagtatcatctttgacagcaacctctcattattcctgccatcctgttgacaagacttatagacttcttgtcagcatctcctatcccactgtcttgcaaccatgaggccctccttctgcctattaggctaccatcatagcctgctaaactaaccttttctcctgtaacctctcccttcaccatcccattgcacacacagtgccacagtaattagtctaagatgagaacatgatactcctggttcaaaacttttcatggttccccactgcttaccaaattaagtacaaattttcaacctggaacacaactattcactcatttattcagcaaacatctattcagcatctactatgtgctaggttctgttccaggtgctaaaagcacagc

SEQ ID NO: 508420 - DNA, 542 bp, Homo sapiens
ttgtgagagacaggcctcttgcaggactgaaccagatgtctaaacttctacaggcaacttttacacacgagttttcatatctgggttcctgaaggtttttttagagctagctgacaatttaactcttcttgttgttttaagaactgtaaccaagcatttagaaaaagttgttttgagttttctcttgcgcactgaaaagatcaaaatggcgcatctgtgtgatagggatgggtacaaagtatcttataggaggagtgagttgcrtgtgcctcagccaatgagtcggccatatagattatttgctgcctatcacatcgcccacccatatgggcgtggacaatcatttccttcagaggagctgcttctcgtttttgccaggctaagttctgtgtgtccagcctgaatcaataaatgagagagggagagagaatgagcaaacctaaacccaattaaatacaggccaagatggtaaatgctatagataagataaagggtccaaaggaatagggagagttaggggaaagggtgttgtccttttatat

SEQ ID NO: 508421 - DNA, 200 bp, Homo sapiens
gaaattgattcaaaaacttattcctgccttctgtcattcaggtgggaatacagaagcccctgggctctgcgagsccaccagatcctgtagctctcctcctccttagtgccactgcacacaccctgcacagaccctgaggcctatccctttaaggactctgtctgagccaccttccctctcaggaaagaagcctagacaca

SEQ ID NO: 508422 - DNA, 200 bp, Homo sapiens
gaaattgattcaaaaacttattcctgccttctgtcattcaggtgggaatacagaagcccctgggctctgcgaggccaccagatcctgtagctctcctcctccttagygccactgcacacaccctgcacagaccctgaggcctatccctttaaggactctgtctgagccaccttccctctcaggaaagaagcctagacaca

SEQ ID NO: 508423 - DNA, 696 bp, Homo sapiens
gctggcggcccatcaggacaaacgtccagtcagcagcatgtcagagccggtgtcacatgtgcgtgcactaggggaaggcagcctggggtcgctccctggggccatctgcctgcaggaatgagtccaccgacttgtagctgagctgcaagggcgtcaggcagcggaaagtgccaggagagtgggggatctgcacgcaggccctctgtgaggacaccaccatctccccaggagacagccagggtggcactctggcgacgaggctggggcccaatactcgccctgacaccacccccstcccttgtctcctcagcatcatagttgggggcgtcctccgtgtctgaaatttgcaagtctttctcctgaatggtgaaattgtgcacggggctctacctgggcagctccctattggggatgctgctgttttaccgcttctgggcgctcttcggcttgtacagcttggctgccttcttgttctggttgatcccgagcttgctcaacttgaaggactccaggtgcttcctcatggacctgtcgaagatttcctgctcctgcttctcgtcctcagttggtgtggctgtagcgacgaatgtactccttccccggcttgcacaggtactgctgcagcgtgtggtgcgtgacggggtcctccccataccgaacgtctgccacgttcagggactgaacgtccagacagac

SEQ ID NO: 508424 - DNA, 566 bp, Homo sapiens
tgctactgttcatcttacatgagggttaggctctaacacagaactgactgtgcttttctgttttactgactaggtattcttcaaatacagacaaggaaatgatagttttgaaaatggtagatttgaatggagatgacttgggccttatcaggtactgtatttcctttttaaaaataattctgtcgggtagcttttcttaattaaagagaagggaaaagagactagaatagtaccagcacacactgagaataagttgtgtggttaagagtccaggttctgaagtcagacacaactgagggtccagccaagggccttgtacagggttctcagtctctcagggcttagttctgcacttacaaaacagatttaatacagggaagataaatgagagatcttggtgaagagcttggcacagcatctcgcatatgatacaaaaattcagtaaacattaacacttattatgttatcaagatctcacatgtggaacttccatgatgrtatacagttatctcctagtaaaatgaaaaaacaatctaaccaaccaggaaagtgattatggctttgag

SEQ ID NO: 508425 - DNA, 566 bp, Homo sapiens
tgctactgttcatcttacatgagggttaggctctaacacagaactgactgtgcttttctgttttactgactaggtattcttcaaatacagacaaggaaatgatagttttgaaaatggtagatttgaatggagatgacttgggccttatcaggtactgtatttcctttttaaaaataattctgtcgggtagcttttcttaattaaagagaagggaaaagagactagaatagtaccagcacacactgagaataagttgtgtggttaagagtccaggttctgaagtcagacacaactgagggtccagccaagggccttgtacagggttctcagtctctcagggcttagttctgcacttacaaaacagatttaatacagggaagataaatgagagatcttggtgaagagcttggcacagcatctcgcatatgatacaaaaattcagtaaacattaacacttattatgttatcaagatctcacatgtggaacttccatgatgatatacagttatctcctartaaaatgaaaaaacaatctaaccaaccaggaaagtgattatggctttgag

SEQ ID NO: 508426 - DNA, 634 bp, Homo sapiens
cgtgatccacctgtcttggcctcccaaagtgctgggattacaggcgtgagccactgtgcctggccaattcaccagatatttactgagcacccaacctgtgccagccactgtgctagaatcaaggaagacagcagttgtagaaaaggagaggaaaatccttatcttctcagagcttacattctgctggaagacaatggatgggcaaggagatggatgaatatatgctatgggaccaagcctttgctccaccctcaccttgctggatgacctggggtatttcactccacctcagtgagccacagttttccatttctgtcaaataaggaagtagggcaagatggtctccttagaattcaaaacattcccagagggtctgcagggatttctcaaacattgaattgtcttccatccaatgtcaatgctttaagcatactgaggaccctgtttgttscttggacttaattaagcccagggttgtgtgggcaggaaactcaatgctcatgttttaggaaaagcactggatccaatgattgccaagccccagcccagctcagatcagctaatcagggaccccatgcttctgcattatcttttttctgtgtgtaaacaggcacatcctaggtgcttcaatatt

SEQ ID NO: 508427 - DNA, 634 bp, Homo sapiens
cgtgatccacctgtcttggcctcccaaagtgctgggattacaggcgtgagccactgtgcctggccaattcaccagatatttactgagcacccaacctgtgccagccactgtgctagaatcaaggaagacagcagttgtagaaaaggagaggaaaatccttatcttctcagagcttacattctgctggaagacaatggatgggcaaggagatggatgaatatatgctatgggaccaagcctttgctccaccctcaccttgctggatgacctggggtatttcactccacctcagtgagccacagttttccatttctgtcaaataaggaagtagggcaagatggtctccttagaattcaaaacattcccagagggtctgcagggatttctcaaacattgaattgtcttccatccaatgtcaatgctttaagcatactgaggaccctgtttgttgcttggacttaattaagcccagggttgtgtgggcaggaaactcaatgctcatgttttaggaaaagcactggatccaatgattgccaagccccascccagctcagatcagctaatcagggaccccatgcttctgcattatcttttttctgtgtgtaaacaggcacatcctaggtgcttcaatatt

SEQ ID NO: 508428 - DNA, 580 bp, Homo sapiens
tgtatgcaattgataaactagaaagaagcatatgcaygttctggttaaaagaagagagcaaggaagcaaagatggtttcatcaccttgtttgcactgtgtaaggtgtctgcctgagctggaagatcaaaactcacaccggcctccccactcccgggaaggacaggcacactttccagaccgtggctccttctgtgttcagatgaaggaaaagccaattctggcaaaacaggctttacttcagagatctgggaagccgctgtgggcagcaaggccgctgggttgatcgctaaatttgcctaaagaagaaaaatgaaactctgtatttgttcttcaacacagcagtctattatctttattgtgacacatgacaagattcggtgcacataatgtataatacgagaggagtagagaaacgtaggaaaatcgcccgatctagtctcagaattaaaacagagcgtcttacacctatgcccaccactgggctcaaaaaatagatgttaaagacgcagcacacaggagacaacaactaggtgcaggggaggggaggcgggggaagagatgagaagatgcttggcagca

SEQ ID NO: 508429 - DNA, 634 bp, Homo sapiens
ctttcttcctgatatagtttggctctgtgtccccagccaaatctcaccttgtaacccccataaatcccacgtgttgtgggagggacccagtgaaagataattgaatcatggggtccagtctttcccacgctgttctcatgttagtgaataagtctcacaagatctgatggttttaaaaatgggagtttccctgcacaagctctctctctttgcctgctgccatccacataagatgtgacttgctcctccctgccttcygccatgattatgaggcttccccagccacgtggaactgtaagtccattaaacctctttcttttgtaaattgcccagtcttgggtatgtctttatcagcatcgtgaaaacggactaatacactgccccttctcctaattcttctaattgtttcttcttagtaatattactttctggccctgcttctgttcatcttccttaaagtaagtggttccaaaaggcctgtcatccgaatctcttttctctttcttatatgccctcccttttgcaaagtcatcaactttcttgatttcaaccatcagtttgaagtttgatgcttcccatatatctgatctgttgccctactttctctccagtgtctctactccacatttcccac

SEQ ID NO: 508430 - DNA, 634 bp, Homo sapiens
ctttcttcctgatatagtttggctctgtgtccccagccaaatctcaccttgtaacccccataaatcccacgtgttgtgggagggacccagtgaaagataattgaatcatggggtccagtctttcccacgctgttctcatgttagtgaataagtctcacaagatctgatggttttaaaaatgggagtttccctgcacaagctctctctctttgcctgctgccatccacataagatgtgacttgctcctccctgccttctgccatgattatgaggcttccccagccacgtggaactgtaagtccattaaacctctttcttttgtaaattgcccagtcttgggtatgtctttatcagcatcgtgaaaacggactaatacactgccccttctcctaaytcttctaattgtttcttcttagtaatattactttctggccctgcttctgttcatcttccttaaagtaagtggttccaaaaggcctgtcatccgaatctcttttctctttcttatatgccctcccttttgcaaagtcatcaactttcttgatttcaaccatcagtttgaagtttgatgcttcccatatatctgatctgttgccctactttctctccagtgtctctactccacatttcccac

SEQ ID NO: 508431 - DNA, 593 bp, Homo sapiens
ttatttacaagtcatttgtatcactttccaacctaacttacatgtaatctaccaccttttgttccacctctttttttaaaaaagtgttcgtttgtctacattacctttcattagacaatacttttatgagtgtaattcttaatttattattaaataatccattgaatattgacaattttacacagtactcatcaaaaaatctagacctggaaaagagattattcagtgcttttcaaagaagtcaaaaaatccttaaaaccagagtaggcagggtacagcaaataaaatgcagacattttaacatgagaaacaaaatctccaaaattgttctcctacctacccaatctgccatattccactttttccaccaatttcaggagtttctgccacatggtttggctccagtgagccagtccctgcagcatccacagacatgaattggatctgtgtttttatatcaacagataagttcaattacttcatgatattcttttatgcacaggtaaagaactgatattgataatccaggaatttggttttrtttttacacatgaactgcgaacatagaactgcatgccctagaagaaatgaca

SEQ ID NO: 508432 - DNA, 365 bp, Homo sapiens
ctgttgggatgatgggagcttgggcttcgattgctcaacaaattygtgatactttcacctgggcttggtgtagaacgctgagtgttgagctgtccttgccaggtcacagccaccaggctggttcatgctggagacagagcccaggaggctggtgggggtggagaagatgtcactcatttggcatcgcagctcctaatacagggactctgacacatacaagggtgcacagacacaagacacacaggacacataacaaggatacacatggacacacaaagttacagataccaagagaaacacctttagagacacatatggggacccagacacacataggacttatacaaggagacagtgacacacac

SEQ ID NO: 508433 - DNA, 365 bp, Homo sapiens
ctgttgggatgatgggagcttgggcttcgattgctcaacaaatttgtgatactttcacctgggcttggkgtagaacgctgagtgttgagctgtccttgccaggtcacagccaccaggctggttcatgctggagacagagcccaggaggctggtgggggtggagaagatgtcactcatttggcatcgcagctcctaatacagggactctgacacatacaagggtgcacagacacaagacacacaggacacataacaaggatacacatggacacacaaagttacagataccaagagaaacacctttagagacacatatggggacccagacacacataggacttatacaaggagacagtgacacacac

SEQ ID NO: 508434 - DNA, 365 bp, Homo sapiens
ctgttgggatgatgggagcttgggcttcgattgctcaacaaatttgtgatactttcacctgggcttggtgtagaacgctgagtgttgagctgyccttgccaggtcacagccaccaggctggttcatgctggagacagagcccaggaggctggtgggggtggagaagatgtcactcatttggcatcgcagctcctaatacagggactctgacacatacaagggtgcacagacacaagacacacaggacacataacaaggatacacatggacacacaaagttacagataccaagagaaacacctttagagacacatatggggacccagacacacataggacttatacaaggagacagtgacacacac

SEQ ID NO: 508435 - DNA, 365 bp, Homo sapiens
ctgttgggatgatgggagcttgggcttcgattgctcaacaaatttgtgatactttcacctgggcttggtgtagaacgctgagtgttgagctgtcctkgccaggtcacagccaccaggctggttcatgctggagacagagcccaggaggctggtgggggtggagaagatgtcactcatttggcatcgcagctcctaatacagggactctgacacatacaagggtgcacagacacaagacacacaggacacataacaaggatacacatggacacacaaagttacagataccaagagaaacacctttagagacacatatggggacccagacacacataggacttatacaaggagacagtgacacacac

SEQ ID NO: 508436 - DNA, 492 bp, Homo sapiens
gcaacaaatcccccttttcagctaagctcgctggagttgggttctgttgtcaccaatcctgactgataaggcctcctcctctgtactggggcctcaggggagtcatggactcaaatcctggctgtgatttcaggaaagagagattgagacggggaagaggttggaagaaggatctgaggacggggaagggcaaggggatacaattgggtcaaatgaacatcaaggacgataagaaaaaaaagagtcccacttagaggcccaaagatgaaagaaatgctctccacatgatcacaaataattctcacaagaaatgtgaaagtcttattcccatttgtataggtaactattatttttgtctgttcagcctccaggccccttccttcttataacaggaccccgggtttccaaggggtccttaccttcccctgctctctagcctgttggtttatgtggagttarcaccaccctgggatccttgtgccccaggcctag

SEQ ID NO: 508437 - DNA, 553 bp, Homo sapiens
tatattgttttaaaccagtaactgcataatgtgttacaatagcaatgggaaacctatacaaatgccatagyaaattacgttggcttcatcttcaaaatgtagccagaatccgaccatttttccccagtgctgctgttagcattcggggccaagccagttccattccttgcctgggctgttgcaatggcctgcatatgggtctccttgtttaccctgaccacccagccttttctgctccctggaggcagtatttgagtctctcagtatttgagtctcttgatatgctgtctaggaggccctctggctttcacacctgacactttctccagtgcttcagtagctcccagcaatggccatccaattccattgtctttataatgactactcaatagttcacacaggcctggtacattccacccaccagggcatcccttgcctccatataccatcctagttcaccatgcatgacagatttgacaattgcactgcctcagtttgttggggctatttgtacttcacctataatcagcagtagggctctccttgctagcca

SEQ ID NO: 508438 - DNA, 629 bp, Homo sapiens
tcctttccaaaaatgccttcctttatttagacaccaacatccttgctattttggatttttcaatgagcttccttattttctccctattctgtcctattcagcaaaatgaatgaataaatataggttcctaatgttacaaatttaattttcttctagaaatgaaagtgtttatttctcttcttttatttctcaagccaaaataattatttcctccttcttagaagtccaggaataggttaaactttaattaaaagtcttatggttcaacagttggaatgaggatcaggtaataacgaagaaaccccgtaaacaccctgagragaaccagcaccccctccattggttgttttagctcagcccacagctaacagctcagctcagaaagttcctaccacccactccgcttctaacgccttttaatattcgcacagagttttctcacattgtggctctcacacacttcctttatacatgctgtttcctcagcctggaatgccacctctttctttacctggagaacccctgtcccttaaagacgcaggtcagaagtcacgtagtactcctctgctaccacctaatgcaaagcgtgattattccttcacttctcttctgcatttaaattattgagg

SEQ ID NO: 508439 - DNA, 593 bp, Homo sapiens
ccaaaagcaaaaccaaggatggtatgggtccactctgttcagtaagtatgaacaaaattagaactgggtagccagcccggggtcggtggggaggtcccaaggtttgaagtgggagtaaaaaaggggctaatgctaaatctcagttagctaaatgctaagtctgcccctgggattaactttcaggccaggccccaggaaggcctgcttagggatctggagtcacagggagctgaggatagtcctattctcttattcctacccagagacgaaaagggctggggcctttttctcccaaatayggactctcccctctacctcaccccatcccacaaaatccacaatctcagagctgtgcagaagaaaccagaagcttccccttcccaccatgaccccttagagactcctggtttgccatgctctccatagaggcaatatatttcactgatctaaaaggcaatgctttggctaaaaacaaacctttctgaaaatgagaacctgtctgggtattgaggtttcactaagaattctaggtgtttctgactgcatttgagggctatttttggtttctttggaaaactacaagacttacgagc

SEQ ID NO: 508440 - DNA, 580 bp, Homo sapiens
gccaaaagcaaaaccaaggatggtatgggtccactctgttcagtaagtatgaacaaaattagaactgggtagccagcccggggtcggtggggaggtcccaaggtttgaagtgggagtaaaaaaggggctaatgctaaatctcagttagctaaatgctaagtctgcccctgggattaactttcaggccaggccccaggaaggcctgcttagggatctggagtcacagggagctgaggatagtcctattctcttattcctacccagagacgaaaagggctggggcctttttctcccaaatatggactctcccctctacctcaccccatcccacaaaatccacartctcagagctgtgcagaagaaaccagaagcttccccttcccaccatgaccccttagagactcctggtttgccatgctctccatagaggcaatatatttcactgatctaaaaggcaatgctttggctaaaaacaaacctttctgaaaatgagaacctgtctgggtattgaggtttcactaagaattctaggtgtttctgactgcatttgagggctatttttggtttctttggaaaacta

SEQ ID NO: 508441 - DNA, 601 bp, Homo sapiens
tcttcctgctctcagtggaggagggtggcagttcatcactgaggtgtgagtgagcctcagatgtttacgaggaggagtttcaggcgcatataactcaaagaaaacggctggtctttcggaacttgctagcagacctacctgccacccagaactaaattcaatgaaactttatttcatcccttataaagcatctctcattttgtggactgggattgattccttyaaaaggtgcccttacagataccacatctgcaatggtccaatcataagggtaaccactcttggtaaactatgtacatgctttgcttgagggcattaaagatcaatatgtccatggactggcctcttctcaaaacccaaccaccagccagttgcctttaccataactcttatccttaaaagccacatctgatggcatggccatgatggctaagttgggtgcctgatgaatccagacagaaatttaatagtaggcccaagttacaagattccagttctggaaagtcagcccacgtccatctgaaagagcctatggtgcagtggtgacaggtgggagctcccaaggacactgcctggtttaaatcccagtcattccacccac

SEQ ID NO: 508442 - DNA, 601 bp, Homo sapiens
tcttcctgctctcagtggaggagggtggcagttcatcactgaggtgtgagtgagcctcagatgtttacgaggaggagtttcaggcgcatataactcaaagaaaacggctggtctttcggaacttgctagcagacctacctgccacccagaactaaattcaatgaaactttatttcatcccttataaagcatctctcattttgtggactgggattgattccttcaaaaggtgcccttacagataccacatctgcaatggtccaatcataagggtaaccactcttggtaaactatgtacatgctttgcttgagggcattaaagatcaatatgtccatggactggcctcttctcaaaacccaaccaccagccagttgcctttaccataactcttatccttaaaagccacatctgatggcatggccatgatggctaagttgggtgcctgatgaatccagacagaaatttaatagtaggcccaagttacaagattccagttctggaaagtcagcccacgtccatctgaaagagcctatggtgcagtggtgacaggtgggagctcccaaggacactgcctggtktaaatcccagtcattccacccac

SEQ ID NO: 508443 - DNA, 601 bp, Homo sapiens
tcttcctgctctcagtggaggagggtggcagttcatcactgaggtgtgagtgagcctcagatgtttacgaggaggagtttcaggcgcatataactcaaagaaaacggctggtctttcggaacttgctagcagacctacctgccacccagaactaaattcaatgaaactttatttcatcccttataaagcatctctcattttgtggactgggattgattccttcaaaaggtgcccttacagataccacatctgcaatggtccaatcataagggtaaccactcttggtaaactatgtacatgctttgcttgagggcattaaagatcaatatgtccatggactggcctcttctcaaaacccaaccaccagccagttgcctttaccataactcttatccttaaaagccacatctgatggcatggccatgatggctaagttgggtgcctgatgaatccagacagaaatttaatagtaggcccaagttacaagattccagttctggaaagtcagcccacgtccatctgaaagagcctatggtgcagtggtgacaggtgggagctcccaaggacactgcctggttyaaatcccagtcattccacccac

SEQ ID NO: 508444 - DNA, 566 bp, Homo sapiens
taccagctattattatttacagtggaatactatgtaggttatgattatgtctgaagaggaatgcatgatactaaatacctttaatattatatcagttctatttctgaatgcatgaaaaaagactatggaaggatatgtcaaattttaacaatggtgagatttaggtgtttagattttctttcggttttggtttttaatttaatttttactttctgttcatttatacctttctcaatgttttaaataagctataaagcatatatatacaaagcatttataatcagaaaaataataatgaagacttattmgactgtcaaagtcacaattactggagtgcaatgtaacatgtgtgataacttatcatatcttgaatataaaaaatccaaagaaaattattttctaaataataattattaaattaaccacttgggatgttgaactttctaaactgaactccttccttgctgaaaaagaaatagcaggaaaaataagtactagttcacttcatctcaattgctcaaatcaacatcatgaacatctgctatagatacccgggggcctaacgt

SEQ ID NO: 508445 - DNA, 585 bp, Homo sapiens
ccctcttattttatagacaaattacttgagagatgtggggacatctacatctacctgtatggcaaagtacatgaccataaacctttacacacacacacacacacacacacacacacacacacacacacacccctacctacccgggaatctggatgaaatgtaatagagcttgaattaaagtaagagtaatctccaggaacaccaaggaaagtgcactgaaaactattgacctgattttccaaatgagtcttagagaggggaaggtgacttgctcaaaattatatctttgtaagcccagtgtgagcacttgtacmattattcaatagaacctgaagaaaatattgacacataacaatggaagaattcctgcattaccacatagtaaaacttactgtaatgctactatgatgaaaacaacagtaacaactggagagagggggcagtggagatcagacgtggtgagtttgagagaactgttagacctccaagtggagatttgatgtggacaaatagacacattcctctgaagtttaggaaagaggtttcatatggagatttggaagcatcagtgtagatatggcattg

SEQ ID NO: 508446 - DNA, 654 bp, Homo sapiens
cgacatcaagcctcccctaatcttcttccttcattcctgccttcatgattgactcaaagcaaagccttaatattatcctggagcacatttcttccataagtgggttttcatacagattttcctgttattctattttgaccccaactctctgttatatcaataataataagcttagccgttttataagcagwcaaaattcaaagcatagcgctaatcagcaactcacaacagtttgcaaaaattatttgacccaaaataaatagtgatagaaaaaacaagcgccacagaaatttgccccaatgcatgacctgcaatgttgtaaacacaaaatcatcctaagtgttatgcttttggaataagaatttgggatgatcaatgcaggaacagaaaaccaaataacacatgttctcactgctaagtgagagctaaatgatgagaacacatgggcccatagaagggaacaatacacactggggcctatcagagggtggaaggcaagaggaaggagagaataagggaaaataacttattggcactaggcttaatatctcagtgatgaaataatctgtacacctaacctccacaacacaagtttgcctgtgtatcaaacctgcccctgtacccttgatcttaaaataagagttaaaaaaataa

SEQ ID NO: 508447 - DNA, 605 bp, Homo sapiens
tttcattcgctaacttattttgcagcttttgccaaacacttgttatatttcagtgctgtgtgctacatgattaatttctgcagtaattagagttttcacttggaaggttaccagtatgttttggatatatgtgtaactcagtcttttttttaaaggcacactgaagagtttctgaatggatttttgaacttttttgaaagaaaggatatttcccaaatataagttatgtgattcatgatatttggattgcctagggataatcagtagtgtgatattacagtgcagctgagtcttttgtttaagaaaataatactttttttatttagccctttattaaaggagagaaccagggaacagtctttatggtagtactgagatttattcagttgttcattcattttatttgtctttatagagcgctgttggtataggacaaaaatctctggcttcatgagtcttagaagataaatgaatataatgttaaataagtgcttaagagcccccccccccccccacaaaaaaaggcaaaatttgaatgatwagagagggagattgaaatttttatatagtaagactagggagggcctcactgagaaggtactatt

SEQ ID NO: 508448 - DNA, 566 bp, Homo sapiens
caaggataaaggtgcctcctctgtagagaatttgtttttgtagttgccgcataaaaactgtactatttagcctgggatcactttaaattcatggcttgaggttcttgtggaccacccagatgatgtaaattttaggtaaaaatttttgttagagctamtttgtagttaaaaaaaaaaaaaaaatctcaggatggggatttccctcttgttcagctcagcataaaggcaacttcctttgcattcccctggagatggtgttggtgttggttatatttctggtcttggggtaccttgagtgctttgatttatttcccttcaccccaacaagtagaattttgaagttgctgggactgacaaatgatctcaggataaagatggctgctgtgatcacttatctctctgggttctcacttttgttcagatatcttttgttatttgttggatctcccttgtcttaagggctaatttaaaaatattttagccagcattttaaattgctttcagtgggagggttggtatgaataacctagcttgccattaccaaaaatagcagtacaattttttaa

SEQ ID NO: 508449 - DNA, 646 bp, Homo sapiens
atggtagctggtagtaggaaagtaaatctgattcataatgtgcataatggatgtggtctggtccacttatcaagtcatttgcattttacagagggtgtttgttaagctgaatgaatcttctgttttagtgaaaaagatgrtaaaataaagatgagtaatccatgtcagaggtttggagggtgatcttttttgggaagaggtgagccagccttgtttgcttgccagaggtggtttgcttctgtgcttaaagcacatctgcttttacggcttcttcctttcttccatacacaaattctcttgaaagttccatttttatccataaaggtatttgtgttgctactgcagcagcagcatggagttccatagtcaggagtacacggtgtgaaggctcagagatgggtaggggtggggggcagtggtgacagtgtatttatcaattgtttgtaaattgaatatttatacattgagagctaactgtattttgtttgaaaagtttcacctgcagttggaggatctgaaagatgtgattatggttgacctttcttccatgtctatgtttaatttccatctatgtttatgcatgtggatgcagggtaattctgaataatgctaatgatgaagggtcatcattacacagaagatcatt

SEQ ID NO: 508450 - DNA, 586 bp, Homo sapiens
agaggcactgaatgaatgaatggcacaatgcatcatccttttctttccaggctccagacctaggagagacagaaatacttgcagactcttactgcatcaaagactgagtggatgaagttgatctcctcrggcagagatttgaccttggcttccagctccaccttgttcatataggcagcatctacgtcctggaatgacagcgcaggatgctcctttgagtctgcagccccaagtatctagtccaaaagaagctgagcagatttctccccagcccatctagtttggattttagaaaactctgggtctgggtgatttggggttggggatgggtaattacggagaactgggggcttgaattccctgagctcacagaaacccaagtagggctaatggggccatcaacgtagagggaacatgttgggaggtttgaactctgcagatattctcaaggttgatgtgacatttcttgggtggcccaagggtcagaggtcaggttaccccacactccagattccattttaaaccttctcctttgagagaaacatccccactcacctttttcagggctacaaattcattctcagca

SEQ ID NO: 508451 - DNA, 535 bp, Homo sapiens
ggctaatatccagcatctataaggaacttaaacaaatttataagaaaataacaaccccattaaagaatgacaaagcacgtgaacagacacttttcaaaagaagacatacatgtgactaacagtcatatgaaaaacagcttaacattactgataattagagaaatgcaactcaaaaccataatgagataccatcacacaccagtcagaattaaagagtcaaaaaataacagttgcagagaaaaaggaatggttatgcactgttggtgggagtgtaaattagttcaaccattgtggaagatatgtggattcctcaaaggcctaaaaacagaaatactatttgacccagcattctcattactgggtatataccctaaggaatataaattattatcttgatactagtataagtatgttgtaggataaagcagataaacmatatgttaatgtcatttagagccaaacttatcagtgtgagaaaatttaaatacaggtatgcattattctattaggttggggcaaaagtaattactgtttt

SEQ ID NO: 508452 - DNA, 616 bp, Homo sapiens
tgtgccatcagtggcggctatggcagcagagccggaggcagctatggctttggtggcgccgggagtggatttggtttcggtggtggagccggcattggctttgrtctgggtggtggagccggccttgctggtggctttgggggccctggcttccctgtgtgcccccctggaggcatccaagaggtcactgtcaaccagagtctcctgactcccctcaacctgcaaattgaccccgccatccagcgggtgcgggccgaggagcgtgagcagatcaagaccctcaacaacaagtttgcctccttcatcgacaaggtgagccagtgccatgccctccatcgggcacttcagggtccccagaccagaagagcaacaccttcctgccggagagaccctaggagggagggagaaggggactcagcccagctctgcagagagtgcaggtggctctcggtgcacaggaggcagcacagatgggcatcactcccccatgggatatctggagtggccctcactcctgcctagggagagccataacttttcataaccctgaagcacagatgaggccatcagagagtggagtaggttaattctcccctctgaagtgtttaagagatta

SEQ ID NO: 508453 - DNA, 616 bp, Homo sapiens
tgtgccatcagtggcggctatggcagcagagccggaggcagctatggctttggtggcgccgggagtggatttggtttcggtggtggagccggcattggctttggtctgggtggtggagccggccttgctggtggctttgggggccctggcttccctgtgtgcccccctggaggcatccaagaggtcactgtcaaccagagtctcctgactcccctcaacctgcaaattgaccccgccatccagcgggtgcgggccgaggagcgtgagcagatcaagaccctcaacaacaagtttgcctccttcatcgacaaggtgagccagtgccatgccctccatsgggcacttcagggtccccagaccagaagagcaacaccttcctgccggagagaccctaggagggagggagaaggggactcagcccagctctgcagagagtgcaggtggctctcggtgcacaggaggcagcacagatgggcatcactcccccatgggatatctggagtggccctcactcctgcctagggagagccataacttttcataaccctgaagcacagatgaggccatcagagagtggagtaggttaattctcccctctgaagtgtttaagagatta

SEQ ID NO: 508454 - DNA, 616 bp, Homo sapiens
tgtgccatcagtggcggctatggcagcagagccggaggcagctatggctttggtggcgccgggagtggatttggtttcggtggtggagccggcattggctttggtctgggtggtggagccggccttgctggtggctttgggggccctggcttccctgtgtgcccccctggaggcatccaagaggtcactgtcaaccagagtctcctgactcccctcaacctgcaaattgaccccgccatccagcgggtgcgggccgaggagcgtgagcagatcaagaccctcaacaacaagtttgcctccttcatcgacaaggtgagccagtgccatgccctccatcgggcacttcagggtccccagaccagargagcaacaccttcctgccggagagaccctaggagggagggagaaggggactcagcccagctctgcagagagtgcaggtggctctcggtgcacaggaggcagcacagatgggcatcactcccccatgggatatctggagtggccctcactcctgcctagggagagccataacttttcataaccctgaagcacagatgaggccatcagagagtggagtaggttaattctcccctctgaagtgtttaagagatta

SEQ ID NO: 508455 - DNA, 616 bp, Homo sapiens
tgtgccatcagtggcggctatggcagcagagccggaggcagctatggctttggtggcgccgggagtggatttggtttcggtggtggagccggcattggctttggtctgggtggtggagccggccttgctggtggctttgggggccctggcttccctgtgtgcccccctggaggcatccaagaggtcactgtcaaccagagtctcctgactcccctcaacctgcaaattgaccccgccatccagcgggtgcgggccgaggagcgtgagcagatcaagaccctcaacaacaagtttgcctccttcatcgacaaggtgagccagtgccatgccctccatcgggcacttcagggtccccagaccagaagagcaacaccttcctgccggagagaccctaggagggagggagaaggggactcagcccagctctgcagagagtgcaggtggctctcggtgcacaggaggcagcacagatgggcatcactcccccatgggatmtctggagtggccctcactcctgcctagggagagccataacttttcataaccctgaagcacagatgaggccatcagagagtggagtaggttaattctcccctctgaagtgtttaagagatta

SEQ ID NO: 508456 - DNA, 627 bp, Homo sapiens
agcaacagcagcagcaagaacatggttttgacccgcagttcttgcccatcaaagagctgtgccctgtctgctcccactgacaggcagataaatacagagatctgttggcaagtacatatttatgtgtatctacagttccctcacacagacttacagagaatgcataacagcttctagtggtataacaaatgcacccactaatggggtgagacccattactcacaaatgggtgaaaagaagcatcaatatgcaggtcttaaccccagtttgtgggcagaaacctgtcattccattgcaggccgataggtctcctattcacacagtccttgtttaattttccaaacaccctttctctaaatggtgctactctgagctgtgtagtgcagacagacaggtttgacaagcagagctgtcaatttcacatttttcatcccaactgcagggcaaaattaggccttgtaygtaactggggttgactggttaggaaggcaggagaggttggcatttaagaggtattttccacattagaaactcagaactcaagatagaaaactcaaaaagggttgtccctattcaacatccatgaaatcaggagagtccaaagatgtgtactggtggtctactgtg

SEQ ID NO: 508457 - DNA, 545 bp, Homo sapiens
  misc_feature (1)...(545): n = A,T,C or G
gtagataatatcctgaaattggctatataataatagcatgagccatattctcataatttcagtaaatattaaacaaaataaccccacaatatataattataagttgtgagtgaattgcaatagagtaacataaagggtttggtagtctctttgtgaagtaatagttaaactagaccaaaattgttagcataatttacccagtttgagggatggggggaatttcacatagaaataacaatatatgcaagggcccaaggagaagaaagaattcagcatatttaagaaccagaaaagcagctagtattggcaaaaacatattgaatgtaccgaaattgaagccaccctcacagggttcacaagaattccagacagaaatgtagttataattaagcattaatcargctgcactttgacccacttgcttttaaccaacacatagtaccagatactgaccatgtgcatccccattgtatctatagataggatttccaccttagaattatatgacttctgtttagatttacntaaaatgctttccagtgaaa

SEQ ID NO: 508458 - DNA, 549 bp, Homo sapiens
atttttaataaaggaactcagtaaatgactaaggccaaaaagttgactcttctttatcagtactccctatcataataattctgcaaaactgctttattcttttctgaccttctctgtgctttggactttatgccatagttgagggctgtgtttcatcaatgtttcttttccctctgttcctcgaagcaacataatttgtttggcaaaaaactaagaatgaaatatctcctgctttatagatagtttttatacaacattctttgtaattgtgtaaagtctgagaattgtgtctaatgaaatatctggtaaaggcaaatggtaaataaattctcatttaattgataaaattaatttggtttctccataataaaagtatacttgtattagaagtctacttagtttaaggagtcacattacatctccatgactcaacattcccctttgaggcactgggggaaaaatccaatartaataccaaaataaaataactttgaccctcaacaatgctatgcattgtaaactgatgccacccagaaagatgtaaggaaa

SEQ ID NO: 508459 - DNA, 585 bp, Homo sapiens
tgtgtgcacgcgtgcgtgaatcattgccaaggaattgacacatcacacaaggtaatactgccaaagaatctactcaggcatatattgtgggttaagctaaatccttcagtataccagataagctcattaatgcctgagaagagcgggataagaagataattttttctttttctttctttctttyttttttttttttttttggagacagggtctcgctctgtctcccaggctggagtgcagtggcgcgatcatagctcactgcagcctcgacctcctgagctcaagtgatcctccaacctcagcctcctgagtagctgggactacaagtgtacaccaccatacctggctagtttttgatttttttgtagagacagggtcttgctatgtggctcaggttagaaagagaaatttctaaaatgtcttttccttttctcctttcttgaccttgtaacttttcccttctctctctgcatcctccttacacccctgattttcacgagcttttctaggtcttcaaagtgttcttttatcccttttaaatttttctcctaaatttatcttataaaatatccagaagtcatattt

SEQ ID NO: 508460 - DNA, 585 bp, Homo sapiens
tgtgtgcacgcgtgcgtgaatcattgccaaggaattgacacatcacacaaggtaatactgccaaagaatctactcaggcatatattgtgggttaagctaaatccttcagtataccagataagctcattaatgcctgagaagagcgggataagaagataattttttctttttctttctttcttttttttttttttttttttggagacagggtctcgctctgtctcccaggctggagtgcagtggcgcgatcatagctcaytgcagcctcgacctcctgagctcaagtgatcctccaacctcagcctcctgagtagctgggactacaagtgtacaccaccatacctggctagtttttgatttttttgtagagacagggtcttgctatgtggctcaggttagaaagagaaatttctaaaatgtcttttccttttctcctttcttgaccttgtaacttttcccttctctctctgcatcctccttacacccctgattttcacgagcttttctaggtcttcaaagtgttcttttatcccttttaaatttttctcctaaatttatcttataaaatatccagaagtcatattt

SEQ ID NO: 508461 - DNA, 557 bp, Homo sapiens
ctgggggcccattcttggggcaagcgctagtgggagcgtgagtcagggcaatgggagttatagaaggatagggccctgtccctggggagggtctcatcttggaggagcacagasgtgaaagtaaccacagaacatacctaccctgcacagccaaaggcagcaaggagctgctgtgttctgcagggagggtgcagggcatctagaccaccagggctgggcagggtatcactcaagtcagggagcatccagctccacacacagcctgggcggggccactgctgcttcccagcatggattccaaggacaacggagcactgggttcaacattcctgctgctcccatgctcagctcccagcaccactgaagaggtcaagctttaatccaaataccaacattctgcctctgcttggacccagggaccaatagcctttgccttggagtaactggaatatctgatatcaccccttacattcttcttgggggtagggaggcaggggtggagcagaaaaagatttgctctcttcaatcgacagcactgcaaactatttttccaaatt

SEQ ID NO: 508462 - DNA, 557 bp, Homo sapiens
ctgggggcccattcttggggcaagcgctagtgggagcgtgagtcagggcaatgggagttatagaaggatagggccctgtccctggggagggtctcatcttggaggagcacagacgtgaaagtaaccacagaacatacctaccctgcacagccaaaggcagcaaggagctgctgtgttctgcagggagggtgcagggcatctagaccaccagggctgggcagggtatcactcaagtcagggagcatccagctccacacacagcctgggcggggccactgctgcttcccagcatggattccaaggacaacggagcactgggttcaacattcctgctgctcccatgctcagctcccagmaccactgaagaggtcaagctttaatccaaataccaacattctgcctctgcttggacccagggaccaatagcctttgccttggagtaactggaatatctgatatcaccccttacattcttcttgggggtagggaggcaggggtggagcagaaaaagatttgctctcttcaatcgacagcactgcaaactatttttccaaatt

SEQ ID NO: 508463 - DNA, 637 bp, Homo sapiens
taatgggaccatgcaccctgtgtgttcactccgtgctagatctccagatgttaaatcctgccctgactgactccctttaacctgaggccagcctgttgatcccagccctagctgtgcataggctctcatctcctgcctgcatgggaatgatgtcaccaaaacattctttactttttctcaataagtggaccaaatggttcctttaagggcagtttcctggggtctttacttacacactggctgcttgctaccttcaggctggcatttgtcccaccatggtgttttggggagatatacaggcgcatccttgaaggttaattaagaagaaaataaagcaccttgaatcctaggagtcagatttacaaagctttccaagaatacccaattaggtaaagggaggtaattctgctctaatgtttacatcctttyccttcccctgcttgtgaatgttttcaagtacaactcctactcccagcagtacatgccacaccaatgccactgcaagattggctctaggtctatgccatcccctcatggccaagtctcctgcagccaagtctcctgctgatctgtgaccatacctcatggagaactgttctaaagatgacgagtatcatccatagttcagcttacttct

SEQ ID NO: 508464 - DNA, 272 bp, Homo sapiens
aaaaattaaccaaggctggtggcacatgcctatagtcctagccacttgggggggcggaggcaggaggatcgcttgagcctgggaggtcaagactgcagtgagccatgatggccccaccctgcactccagcctgggtgacagagcaagaccctgtctcagaaaaaaaagtaaataaaatttcttctcttctgctcttccttgastgaccttctttctcagccctctctaagtttttttgtttttttgaccaccttggcgatttggaaagtggc

SEQ ID NO: 508465 - DNA, 597 bp, Homo sapiens
gcattgggcccacagaaagaatggttgaagactgcagtgtattttgagtttctgctttggaggggagggttggtcctgatgcccacagacgaatggcctcctggttccaatcaaggccagcccaaagtaagtcagtgaagaggtgaaatgtgacttcagaaaaactctgctcttttttcattttactatataatccttgatataagtgtaactacactttcacatcctcagtgcttttgataaaaattctgctctgagagcttttattcatattacattataagtgattgataactacagttaaaggttaaagtgtttcctatcycacagggatttccattccaccctaaacactgtgctaaaaaaaataaagctctaagggtgggtctcgaggcgagtggtgagggagaattttttcccctacatggggacataggctctgaaaaccacattggatggatacatatccttttcatgcttgaataaaaaatatacatttctggtccaaccgagtttaatacacatcttgacattttattttaatatttctagtaagatatctttttttttgcaagatggagtagccttattgagtcc

SEQ ID NO: 508466 - DNA, 470 bp, Homo sapiens
  misc_feature (1)...(470): n = A,T,C or G
cacaagtgtttgaagcagatgtgtccaaggattttggccagctgtactttaccgtgaaggccatttctggagacattcatagggaacgactctgttataaaggatcgggggagaaagagacaagcaatggggagagtcactgatattcccggtagtctaatgaactcaaggtctcgtggatttactatttcttttcntgtatgtttcttttttaggactccagcagcaggggatcttcagagtgccaggatctcaggtggaagtcaatgacatcaaaaattcctntgagagaggtgggtgcagagcgaccatcttaggcttgtggccaggggaagccagggtgaatattcacgtgtgtctcagagccagtggtgtgcagaagccrgcctgcagtggtttgcaggagctgattgtgcacatctcttcccaacttcacatgcagtgcctttgtcctggtacttggaataagc

SEQ ID NO: 508467 - DNA, 521 bp, Homo sapiens
ctggttacaagccctggccctctgccccacacttggagaaacactgagtctactctcagtttacactggggaggacagggaggctcagaaatgctcggtaatctgcccgaggtacccagtgagtgaccacagttctgagcttctgtttccttctgggtagaacgggcctgatgatgttttccccatttgccatccaagactctgatgaggcttaaacgtacgtgtgtgaaaactgtcaagtgctctgtggatacaagtcgagtgactcttaatggccaataggccaggtcctgggagcctaggaccatggaaaaggagagaggacaccacaacctcccaccagcccagtcgttccagaaacccatcaaggtgggccagtgtgaggtgaccccagtcttatttgtgtatrtgtcagcccctaccccagtgggtctttcccccatagctgtcaatgggaaggtggtgatgttagaggccctcctctatagttgacttgggggtgtctgagcctctgcagctca

SEQ ID NO: 508468 - DNA, 614 bp, Homo sapiens
aatatatatttttcagtcaacgacagaaccaattactagaaataaataaactgggacttttagaaatgcragaatatgaggaatatgtaccactcagtcaattgtcttcctgtgtggcggcttgccagacaatcactggagacatctggaggcagagaacaaacacttctgcccacttctctgctcaaacttgagtcatctgctatttgtacttagagaggtaaagagcaaaactatctcaaggcagacactagcttcaggcatttatctgtccaaagctgagaacccactgtttcgtctccaccagtgcctcacaccccactttgggaggctaaatattgtatatgttttcttttccattcatcctcttcaccttgtttcacctgcttggcctcaatctttcccatgggaaatgaatgaatgaatgaatgaaaaatataattgaagatcaacatcttatttctagcctctcttatttcaacctatagaatagagggtagagatagacagcaggggatggaacagatgtgcctcacttttttctcttgccttgcagttgagaattgggttgtcaagttgaagaaaaagaaattgtgtctcctttctgattaatg

SEQ ID NO: 508469 - DNA, 614 bp, Homo sapiens
aatatatatttttcagtcaacgacagaaccaattactagaaataaataaactgggacttttagaaatgcgagaatatgaggaatatgtaccactcagtcaattgtcttcctgtgtggcggcttgccagacaatcactggagacatctggaggcagagaacaaacacttctgcccacttctctgctcaaacttgagtcatctgctatttgtacttagagaggtaaagagcaaaactatctcaaggcagacactagcttcaggcatttatctgtccaaagctgagaacccactgtttcktctccaccagtgcctcacaccccactttgggaggctaaatattgtatatgttttcttttccattcatcctcttcaccttgtttcacctgcttggcctcaatctttcccatgggaaatgaatgaatgaatgaatgaaaaatataattgaagatcaacatcttatttctagcctctcttatttcaacctatagaatagagggtagagatagacagcaggggatggaacagatgtgcctcacttttttctcttgccttgcagttgagaattgggttgtcaagttgaagaaaaagaaattgtgtctcctttctgattaatg

SEQ ID NO: 508470 - DNA, 559 bp, Homo sapiens
tgcctcctctcggtcgggtctgtccttctcctgtgtctctggggtatcccttgatccacacacacagccctggcgtggacccgccctcacttgcactgtgctcttgggttgtgggggtcaccatcaggtgcttctgtctgcttggggctggctcccagctctgctcacttcctgtgcaaacttgaatgatagactaagattctctaagcctccatttcttcatctacaaaatgaggctaataacaggaacaatgccatcaggttttcaggatgaaatgaggtgacagacatttggcacacagccaggwttcgttgagtgtttgctcttaggaatatgatcatagtttgaagtcagtcagtcgaaagctctttaaagtcagagaattggctttgagctttctatttcatctctgcaggactcagcatggggtagaacatctgtagatgctgaatacttgtcatttgactctatttcctagagtttaatgattttctattagcacaccctggcttttttgactgtgacctgggtgtttctgcccaggtaacaatgaggctg

SEQ ID NO: 508471 - DNA, 586 bp, Homo sapiens
ttcttctgccttcatccctgtggcctcctgcctcctctcggtcgggtctgtccttctcctgtgtctctggggtatcccttgatccacacacacagccctggcgtggacccgccctcacttgcactgtgctcttgggttgtgggggtcaccatcaggtgcttctgtctgcttggggctggctcccagctctgctcacttcctgtgcaaacttgaatgatagactaagattctctaagcctccatttcttcatctacaaaatgaggctaataacaggaacaatgccatcaggttttcaggatgaaatgaggtgacagacatttggcacacagccaggattcgttgagtgtttgctcttaggaatatgatcatagtttgaagtcagtcagtcgaaagctctttaaagtcagagaattggctttgagctttctatttcatctctgcaggactcagcatggggtagaacatctgtagatgctgaatacttgtcatttgactctatttcctmgagtttaatgattttctattagcacaccctggcttttttgactgtgacctgggtgtttctgcccaggtaacaatgaggct

SEQ ID NO: 508472 - DNA, 568 bp, Homo sapiens
gctgcttgcttcttgctctaaaattgctaatgcatgggctcatgctgctgtcaccttgctcactggaaggctggactgccttttttatgtctgtattctttgccctcctctcattctttggtacttcgtagatgcccaatttccgttcattgaataaatgaatccctcacttggctcaagttaaaatcaatcatcttacctggactgataaacatttcagctccctggagctcctcagtcataagtatattgaggtagcaggttacctagatgaagacttacaaagcaagaccaattatctcccactccttccctgctttccttccttttatcattcttctcgtagagagaagaggacctggaaaagactagcattttggagactgggaatggtgactgggaggccacaagagrgctgcctgaagaatgtgctggaatgagggaaagagattgtgtgagagggtttgggctaccccatcctccagggctcattcgaaagcactgttcagtcactagcgtttttctacttaatcaatggtgaatagctttccacaggatttcacttttg

SEQ ID NO: 508473 - DNA, 624 bp, Homo sapiens
agctgttcagataataacatttgttctcccccattacaacatggtaataatgtggtgaatgtgataaaagggaggaggtgtggttgtatagaagagatcaagactgacgatgccagggaatgcctcagtctgctttagccctctattggtgtttatgcctttccacgcaaagccaataaaaagtctagagtgaagccctttggaggcagggcagcggaygcgagggagacagaccaaatggcccctcgtgatgtttacattctagaagcagagacggacaacagatacacaaatgaacatatgacaatgtcaggcagggatagtaccatgaaagtaagaaataaaaataaaatcctaagaccaccactcaactgaatggatccactcttagccaaggaggccccagagaaactttaaaaactgagttcctggccatgacagaacaggaggctggagacacctcggtataccccctccttcgctaacatccagtgaactttatttcctcagggagaaacagaaaccagcccttttaagaaagacttgctccactgcagatttcaaacacctacctgatgctgtaggctttttgtggttttgacacaacaactgacagcatttctt

SEQ ID NO: 508474 - DNA, 624 bp, Homo sapiens
agctgttcagataataacatttgttctcccccattacaacatggtaataatgtggtgaatgtgataaaagggaggaggtgtggttgtatagaagagatcaagactgacgatgccagggaatgcctcagtctgctttagccctctattggtgtttatgcctttccacgcaaagccaataaaaagtctagagtgaagccctttggaggcagggcagcggatgcgagggagacagaccaaatggcccctcgtgatgtttacattctagaagcagagacggacaacagatacacaaatgaacatatgacaatgtcaggcagggatagtaccatgaaagtaagaaataaaaataaaatcctaagaccaccactcaactgaayggatccactcttagccaaggaggccccagagaaactttaaaaactgagttcctggccatgacagaacaggaggctggagacacctcggtataccccctccttcgctaacatccagtgaactttatttcctcagggagaaacagaaaccagcccttttaagaaagacttgctccactgcagatttcaaacacctacctgatgctgtaggctttttgtggttttgacacaacaactgacagcatttctt

SEQ ID NO: 508475 - DNA, 589 bp, Homo sapiens
ttgcagcatccagttcatcttaatgtcaacgattagtcatgcaataaatgttctggttttaaaaaatacaaaataaataaataaataaataaaaaataaattaaaaaagacagccctacaggccaattttttgtggactcctgttctaaaataatcacaatctgtgtactaagacaaaaatgcctagcaaatgcacatcattaagtgtatttaatccttgctctatctcgtgatcctaccaaaatgtatttctatttaactagtcagaaaaggaaaagaggcaatcatggagaagaggtagagtgaatggtaggggcgatggcattgctttgataaaataataatgcttcttatygcgattaaaaacatatctctatatatactcatagatgtataaaaatataaatctttgtatgtgtacaagtgtatgtacacatgtatgcaaatgtctcaggttgcttagtttcgtacttttgtaactgaagggctatatttaatcagacatcttaaaaacccgctggcaaggctttcttgggggtgcttggtgttactgtttgtagattcccagaatctcagggttagatggatt

SEQ ID NO: 508476 - DNA, 547 bp, Homo sapiens
ttttggagggagacaatcatagctagaattaaaatattatatagtgattattgcattgctttaggagaaaataattaaactgaagtttctgtcagtatgcctatgtccctttcttttgtggtattcttggattcctgtaaagctttgaaagtatcagtggcagcaggtaattgttgggcatgttgccatgtgcctgtagtcccaactacttgggagttggaggtgggtggattgtttgaacccaggaggtcaagcctgcagtgagttgtgacagwgccattgcacctccagcctgggtgacagagccgttctctgtctcatacatgtatgagggttaatattttatagggtactttgaggccagttatcaaatttaacattttataggtgtggtggtgagaaaagatttaaagaggactattatgaaagaaaagaagagaatgaggagatgcataatatggtaaaaatgcaaaggtaagtctgatggtccatcaaggatttcagtctgaaggttttgggaggaagctctctactcaggaagacacct

SEQ ID NO: 508477 - DNA, 607 bp, Homo sapiens
ctttaatgatgctatgcagaatttgagattgtactacttgggtttgaagaggaagagagtgcaaatgcatacagtttaacaattctgtaaagatgtgcctgcatgtagattttkttgttgaaacagggaatagaaagttacaaactgggtggaaattccaccacatctaggaatgcaacaagcagcttaagatgaaagaaaattccaaatggctttgggcatttttctggctttatctccagtttgatttttagtgatctgctcatagctcttagtcatagatattacatatattcttttgtatagatattttagtacatttccttgtagaggtgttttgtgatttaaaaaaagtgttagtgctatatctttttattaaaagatacatagtacaaaggaaaattggcactgactgcagacatgttgattggaaacatggtcaggctattatttcaaagacgaaggtaaaatctaagtagatgttttatagactgtcacttgccaggacatgttacagctcctcagaaaaaaacacatgaaactgaaatcacaattctttgtttgttcaaaaaagatagaaaatatatcaaagtacattttttactgt

SEQ ID NO: 508478 - DNA, 607 bp, Homo sapiens
ctttaatgatgctatgcagaatttgagattgtactacttgggtttgaagaggaagagagtgcaaatgcatacagtttaacaattctgtaaagatgtgcctgcatgtagattttgttgttgaaacagggaatagaaagttacaaactgggtggaaattccaccacatcyaggaatgcaacaagcagcttaagatgaaagaaaattccaaatggctttgggcatttttctggctttatctccagtttgatttttagtgatctgctcatagctcttagtcatagatattacatatattcttttgtatagatattttagtacatttccttgtagaggtgttttgtgatttaaaaaaagtgttagtgctatatctttttattaaaagatacatagtacaaaggaaaattggcactgactgcagacatgttgattggaaacatggtcaggctattatttcaaagacgaaggtaaaatctaagtagatgttttatagactgtcacttgccaggacatgttacagctcctcagaaaaaaacacatgaaactgaaatcacaattctttgtttgttcaaaaaagatagaaaatatatcaaagtacattttttactgt

SEQ ID NO: 508479 - DNA, 607 bp, Homo sapiens
ctttaatgatgctatgcagaatttgagattgtactacttgggtttgaagaggaagagagtgcaaatgcatacagtttaacaattctgtaaagatgtgcctgcatgtagattttgttgttgaaacagggaatagaaagttacaaactgggtggaaattccaccacatctaggaatgcaacaagcagcttaagatgaaagaaaattccaaatggctttgggcatttttctggctttatctccagtttgatttttagtgatctgctcatagctcttagtcatagatattacatatattcttttgtatagatattttagtacatttccttgyagaggtgttttgtgatttaaaaaaagtgttagtgctatatctttttattaaaagatacatagtacaaaggaaaattggcactgactgcagacatgttgattggaaacatggtcaggctattatttcaaagacgaaggtaaaatctaagtagatgttttatagactgtcacttgccaggacatgttacagctcctcagaaaaaaacacatgaaactgaaatcacaattctttgtttgttcaaaaaagatagaaaatatatcaaagtacattttttactgt

SEQ ID NO: 508480 - DNA, 590 bp, Homo sapiens
tattaatagtagcgaggatttgagcctacaacctacactctgaactactttttcatagtgcctcctgtgtgaataacaaagagagagagaggataaaagatataagaaaaggctgggcacagtggctcatgcctgtaatcccagcactttgggaggtcattgcgagaggatcgcttgagctcaggagtttgagaccagcctgacctggtctctactagaaataaaaaaaaattagccaggtgtgatggcatgtgcctgtagtctcatctactcaggaggctgagatggagaactgcttgagccaggaggttgaggcttcagtgagccatggtcaygtcactgtactccagcttgggtgacagagcaagaccctgtctcaaaaacaaaaaaaaaaaaaagaaagaaagaaagaaaaaacccataaagaacagagggatgaacatgtgttcttaaatgctgaagatatttagggtggctttcatagaaaaacatcttgtattccaattcaggtatttaatccatacaaatattacaataaatttaatatgaacagataataattgtgcatgttaaaatatttgaggcctgag

SEQ ID NO: 508481 - DNA, 680 bp, Homo sapiens
ctggaagctgggatccgctactttgacctgcgtgtgtcttccaaaccaggggatgccgaccaggagatctacttcatccatgggctttttggcatcaaggtctgggatgggctgatggaaattgactcgtttcttacacagcacccccaggagattatcttcctggatttcaaccacttctatgccatggatgagacccatcacaaatgcctggttctgcggatccaggaggcctttggaaacaagctgtgcccagcctgcagtgtggaaagtttgacgctgcgaactctgtgggagaagaactgccaggtaggagggaaggagagataagcttccaagagcaagaatttaactcttcctgcttttcctgtattgccgtctgtaaaatcactcaatccagggctcttaggctaaagagtggattgtttggaatattaaacatatgcaaactagttcctgggctctagaataggttcaagggccagggctaacacctgccaaatacttaaagcttgtccagcaaactgtttracatctaattgacttttagtggcctggccagaaccaaccaaggcaaagttgtaaaattgggccaataggtcattactattctctgtttcccgaggtccatttttacccttctggttcccctcagggatagtctgttccatcttgccttc

SEQ ID NO: 508482 - DNA, 571 bp, Homo sapiens
gcatgcttcttctctacatctgcaccccctgaatagtaagccttctgattaggatttggtttatgttctkcactgttcctgtctaaagagaaagcccttaaggcttcttgttcctagttagagggaggtaggaaaataaggttgctttcttaagccacttcagacctgtgggggactgggtgaggtggcagcagacactctctgcctctatcccacatgcttccaggcagcttctcatctgctgtaggaaacttttaggacttggcttattcctccaggcctccaccaagaagagagcctctcctttctaccatcacacccccaaacttctctggagctttgcatttacttgcttgcttttgaagcttactcttgttttagatggtggaaagttggaagaagtgcaggccgctgagatcattttcataagtgtctgttttgcttttccttcaattctttttgagaacatgaatagcaatattgtgtgatgtgtaggaatacatacgtcacagtcatattataaaaacatgtctggaaaaggcaaacccaaattcaaatgaaagtaacctcc

SEQ ID NO: 508483 - DNA, 571 bp, Homo sapiens
gcatgcttcttctctacatctgcaccccctgaatagtaagccttctgattaggatttggtttatgttctgcactgttcctgtctaaagagaaagcccttaaggcttcttgttcctagttagagggaggtaggaaaataaggttgctttcttaagycacttcagacctgtgggggactgggtgaggtggcagcagacactctctgcctctatcccacatgcttccaggcagcttctcatctgctgtaggaaacttttaggacttggcttattcctccaggcctccaccaagaagagagcctctcctttctaccatcacacccccaaacttctctggagctttgcatttacttgcttgcttttgaagcttactcttgttttagatggtggaaagttggaagaagtgcaggccgctgagatcattttcataagtgtctgttttgcttttccttcaattctttttgagaacatgaatagcaatattgtgtgatgtgtaggaatacatacgtcacagtcatattataaaaacatgtctggaaaaggcaaacccaaattcaaatgaaagtaacctcc

SEQ ID NO: 508484 - DNA, 571 bp, Homo sapiens
gcatgcttcttctctacatctgcaccccctgaatagtaagccttctgattaggatttggtttatgttctgcactgttcctgtctaaagagaaagcccttaaggcttcttgttcctagttagagggaggtaggaaaataaggttgctttcttaagccacttcagacctgtgggggactgggtgaggtggcagcagacactctctgcctctatcccacatgcttccagscagcttctcatctgctgtaggaaacttttaggacttggcttattcctccaggcctccaccaagaagagagcctctcctttctaccatcacacccccaaacttctctggagctttgcatttacttgcttgcttttgaagcttactcttgttttagatggtggaaagttggaagaagtgcaggccgctgagatcattttcataagtgtctgttttgcttttccttcaattctttttgagaacatgaatagcaatattgtgtgatgtgtaggaatacatacgtcacagtcatattataaaaacatgtctggaaaaggcaaacccaaattcaaatgaaagtaacctcc

SEQ ID NO: 508485 - DNA, 571 bp, Homo sapiens
gcatgcttcttctctacatctgcaccccctgaatagtaagccttctgattaggatttggtttatgttctgcactgttcctgtctaaagagaaagcccttaaggcttcttgttcctagttagagggaggtaggaaaataaggttgctttcttaagccacttcagacctgtgggggactgggtgaggtggcagcagacactctctgcctctatcccacatgcttccaggcagcttctcatctgctgtaggaaacttttaggacttggcttattcctccaggcctccaccaagaagagagcctctcctttctaccatcacacccccaaacttctctggagctttgcatttacttgcttgcttttgaagcttactcttgttttagatggtggaaagktggaagaagtgcaggccgctgagatcattttcataagtgtctgttttgcttttccttcaattctttttgagaacatgaatagcaatattgtgtgatgtgtaggaatacatacgtcacagtcatattataaaaacatgtctggaaaaggcaaacccaaattcaaatgaaagtaacctcc

SEQ ID NO: 508486 - DNA, 617 bp, Homo sapiens
cagagttctggctcaggtctaaattggaggtcttggcgtaagctcaaaggctaagtaaagactcctacctctgtttccccctaaaatactagtcactgtcaggatcagaatgcttgggttttgaccaacacactgatgaaacccagttcactcaactaaccacagtgcagaatgcaaaggaaaccagagtgagggggtgaagccagtgcccctgcctccgccgagccccagcccctgaccagaggagggaaccaccccagcttaagaagcccagggacatwggtcagccccaggtgcacaggggtgagcttgcttcaatcacagctttcattttatccaaacatggtctccctccaaaaataaaaacagagagaggaacatggttactgatttcacctgaactacaacttttcttcttctttcattgtatttgtgtttgttttttcctttaataattacatgggaaatatctgatgtgcagaattagggttgaaatgatctctttcactttagtttcacaatcacgagaaataagaggagatgcaaaacactgctgtgttctcattctagcataattcaatctttttggcagttgaactcttatgactgacaactgt

SEQ ID NO: 508487 - DNA, 617 bp, Homo sapiens
cagagttctggctcaggtctaaattggaggtcttggcgtaagctcaaaggctaagtaaagactcctacctctgtttccccctaaaatactagtcactgtcaggatcagaatgcttgggttttgaccaacacactgatgaaacccagttcactcaactaaccacagtgcagaatgcaaaggaaaccagagtgagggggtgaagccagtgcccctgcctccgccgagccccagcccctgaccagaggagggaaccaccccagcttaagaagcccagggacataggtcagccccaggtgcacaggggtgagcttgcttcaatcacagctttcattktatccaaacatggtctccctccaaaaataaaaacagagagaggaacatggttactgatttcacctgaactacaacttttcttcttctttcattgtatttgtgtttgttttttcctttaataattacatgggaaatatctgatgtgcagaattagggttgaaatgatctctttcactttagtttcacaatcacgagaaataagaggagatgcaaaacactgctgtgttctcattctagcataattcaatctttttggcagttgaactcttatgactgacaactgt

SEQ ID NO: 508488 - DNA, 608 bp, Homo sapiens
gcatctgggagacgctgagagttgggctgtgctttgcctctgcctcagtgccctgacactcctctcttgtaataggatcrggaaagtgatgccggacaggggcagacagtagccccctctgctgcagtttacaggatattggcaataaatgcattgaaggaggaaaatataaccttaccttcaacaagggggatgatttagaaaacccagacaggcaatccacacccatttgttgcttcaaattttggaaaagtgtctccaatttaaaaggacttcactaactagaagtggcctttatacattgttcttagttttaaaacgcacgtaaaatttcacataagtgtatataaagggaagcagtttttaatgagtaaaaaaaatctgctttgggattcacaagtactggatgaagctccaacacatgatattggacaatcctttctttcagtgtttattttattcttgagataaaattcatccaggcatagtgactcatgcttttagtcccagcactttgggaggctgaggcagggagatcacttgagtccaggagtttgagaccagcctgggcagcatagtaaaactcagtctctacaaaaattagccag

SEQ ID NO: 508489 - DNA, 626 bp, Homo sapiens
tgttacagggcagctcaggccaggtgaggtggaaggggacgcctgagcatctgcgttcctagccatctcccaggtgacgaccctgcagcccggcgggacctgtcctcctgcacatagactcccatgtctaagaaggtcaggaaagagtatttctggcagggcgcgatggctcacgtctgtaatcctagcactttgggaagccgagacaggcagatcactcaggccagcctggccaacatggtgaaaccccatctctactaaaaatataaaaattagccaggcatggtggcatgcgcctgtaatcgcagctactcgggaggctgaggtaggagaatcgcttgaacctggcaggyggaggttgcagtgagccaagatcatgtcactgcactccagcctgggtgacagagcaagactccatctcaaaaaaaaaaaaaaaaaaaaaaaccagtatttccaggtcatattgaactgtcagtttccacctgttaagtttagcctgaagctgccttcttacacattttaagttcggcctaaagtttctctttctctggcgtgggtcagaggcaaggcagaggagagtcatcgacctcgggtgttctgcaactttgcaatgcccttttagagca

SEQ ID NO: 508490 - DNA, 497 bp, Homo sapiens
ttccttacaaactgaattgaaatttttcatcggttatttgacttgtttaagtattggttctacctaggtggcttttgaagatttagacatacaattgaatagcaaatgtaattagaatacaatgtaacaataacatcagtgtcctctttcggtttgttaaactatgaattggaccaaactcactccctttctgtgacaggctttccattagcccatccacacagtacctgttgcacagtaagtgaggaatatgtgtttgttgaatgaatagttgtcttggatagtccaacccttaattattgcaaaatgaaattttgatatatagtatagttatcataaaactttcaagttttagagagccttaaatagtatgtgcttctggrttggtaaatacatcccaactcatatgccaaccaggaaactactaataggtctgtgttagaaggggttggaagtcacaccgtgaaccatcagagaagagggctgtgattgagtac

SEQ ID NO: 508491 - DNA, 601 bp, Homo sapiens
gtggcttcttcctcatgaaacagtaggacaatttctgggttcttcaccgccggatttccaaaccccaatacaggcattcatcatgcaataggcctcgtaaatatttgtcaattttattttaaaggagaaaataaaatgtactgattrtgttcactccttgaatggatattaaataattgcttgagaggcctcaaaagtgagattattcaattattttgtccaaccaatgcatattattttctctttatatgttaggtacatctacatatatacgtatatataggtgtgtgtatatatatgtgtgcgtatatatatacacacatatgtatataaaataaaatacatattcatttaatacatatatacacatacatatattaaataaaatatatacgcatatatacacacataaaataaaatacatattcatttaatacatatatgtatatacacatacatatgttaaataaaatatatacgcatatatacacacacacaaacatatatatataaaattttagattattcaattattctgtccaaccaagtagtcttctgtctttttaaaaattaactaggttttgtctatgacacaccaacc

SEQ ID NO: 508492 - DNA, 555 bp, Homo sapiens
ctgtgtaacacatatgacttcttgctataatgccttaaatcctacctggggtggaaatgctgcacctcccagtgtgattttttctttgagtatctacagggatttgtttttaatccgagcaatgaatgaaagtcatatattgccttaagtgccataaaggcaatcttgcaagagtgctgagaatgtacctgcactcaaatgccatcatggttttaggacacacaaaaatgaatttcaaaaatattgtacattttatgtttttaaaaattttaaaattatgtcaatgaattgaagttatattcatccaaattgacataagtacagtgaattatttaaaatgctatatgtctacaataatgtagtcttcttttttcaaaaacttaaaatattctgcataatttaaaaaatggattgaaaaatgtttccattggaaaatgctttgaataagtgtatgaaaaatcttgaataagcagtttaaagaacaagtattagtaaagagtgatcttagtrggtctgctggtgatttgtaaaataccttacttgcctttggttctt

SEQ ID NO: 508493 - DNA, 613 bp, Homo sapiens
ctgtgaatccaaggccaaatgtgtgcacacttcttcagcctggcatatctttgtaaaaattaccatagctcctactggtttaatcacaatattcatggtaactttcaaaagagtttctgatcaagtcttagaggcacgaatcatccatgttgatgattaatttgtgaaataagagaaactctcaatatatatccattgacaaggtagaaagaattacagtttttcttaatttttaaatttttaaaatttttaaatagacacagggtctcactatgctgcccaggctgatcttgaactcctgggctcaagcattctgcccaccttggcctcccaaagtgctgggattacaggcmtgagccaccatacccagcctgcattaaagtttttagtgagcattagtgaattgcctttgttccacattgtatttatagagtgagatgagattccgaaggaagcaccccatgtcttatctttacaggattcaaaagaagatcattgggttcccttttctttccgctgagacccctacgtcgttttctgccatctccttgtatcagccacagaaatatacattagcagaccgatagcttttaaataaatgagttctaatttc

SEQ ID NO: 508494 - DNA, 622 bp, Homo sapiens
caagttcctcattgccctgtgctgaaccgaactgcagcaagttggatagaggaggcagttttagcttgaacgcaaacatcctgtcggagaacagagtgattatagttttagctgcacacggggaaataacagcacagaggtgaatcatggcatctgtttactgctaattaacccctccgtgtacaccagtgttgtatgtgagccggcctgcggtctgaaccgcctcctataaggagggctcccttggcagccaaaaccagttggcccaaatgccttgataggcttcctgcttcacttgttgcccatgtggtctgattttagataaaagcattgcttttgggccagataagctttgagttctttaatgaagcactgtgtgtattggagagaggcacagagcacccagagctgaagctggtcagtcctggtcggccacagtttatggggctcctgggaggttttaaactctgtgctgcaactggggaagkttgtgggggaaggttgggtccagggagctactatttattgagggcttacaatatatcacattctgagctggccactttacattggtagctggtaaaattctcacagtgatcctgaaggacaagtgtggttcagt

SEQ ID NO: 508495 - DNA, 573 bp, Homo sapiens
tccatgcccacaaccaagatcacccaatgtgtgatgaaaaccagcaacaaataaacaaatacacgcataaatagaaacagaacaacccaggctggaagaaacataaatcaggatacagagagaatttggaagaaaacactaattagtagctccaggtacatccaagaagaatattctatctataaaacaaggtgctatgaaaaaaaatccaagaacaacaaagaacttttggaaattaaaaatatgatcattaaaattaaaaatgcaacagatttaagggccaggtgtggtggttcatgcctgtaatcccagcgctttgggaggccaaggcagaaggatcacttgaggctgggtgtaatggctcacrcctttaatcccagcattttgggaggccgaggcaggcagatcatctgaggtcaggagttcgagaccagcctgactaacatggtgaaactccatctctactaaaaatgcaaaaagtagccaggtgtggtggtgcacaccctataatcccagctacttgggaggctgtggtgggaggatcacttgagcccaggaggtagaagttgcagt

SEQ ID NO: 508496 - DNA, 509 bp, Homo sapiens
aatttagaggcaaagaaggaaaaacaggtttctgggagaacttaaaacactaggtttttggggttttttgttgttgttgttgttttgttttgagatggagtctyactctgtcacccaggctggagtgcagtgtcatgatcttggctcactgcaacctctgcctcccaggctcaagcaactctcctgccactgcaacctccgcctcctgggttcaagcaattctcctgcctcagcctcatgagtagctgggattacaggcagcagccaccatgcctggctaattatttgtatttttagtagagacaaggtttcaccatgttggtcaggctgggattatagacgtgagccaccgcgcccggccaaaacactatttttcagacacctccttctatgtccctcatctcctcctctttgcccacacctgtctgtatatagctccagggagagcataatgtagaggaaagtacatgggcctcaaatacagacaatacaatgcagggtgatgtcca

SEQ ID NO: 508497 - DNA, 509 bp, Homo sapiens
aatttagaggcaaagaaggaaaaacaggtttctgggagaacttaaaacactaggtttttggggttttttgttgttgttgttgttttgttttgagatggagtctcactctgtcacccaggctggagtgcagtgkcatgatcttggctcactgcaacctctgcctcccaggctcaagcaactctcctgccactgcaacctccgcctcctgggttcaagcaattctcctgcctcagcctcatgagtagctgggattacaggcagcagccaccatgcctggctaattatttgtatttttagtagagacaaggtttcaccatgttggtcaggctgggattatagacgtgagccaccgcgcccggccaaaacactatttttcagacacctccttctatgtccctcatctcctcctctttgcccacacctgtctgtatatagctccagggagagcataatgtagaggaaagtacatgggcctcaaatacagacaatacaatgcagggtgatgtcca

SEQ ID NO: 508498 - DNA, 534 bp, Homo sapiens
ctgttagttcataaaggactacttactctttctcaaggaacttccaagattcctcctggggacttttcaatccaaatctgtgtcctcagaaactcttcaactttttctttccatttatagcttaatcgtttctctgctgcctgttttctaagttcataactttatttttctttcttatgaaggtagactacacatgcactaacgtgcccaagtctcatctgctgcctttttttttttaactgaaaaaagggatctattactgtttggtggcaatgtggctctgagccctgctttcctcacctgtaaatggggattatactgtttgctttgcaggactgtggtgaagttggaacagatattcataagcacctagcacagtggctggcrccttgtaggtgctaaataaatgctcacccaggagagatgggctctgctccttactcagaaatccctcagattcctaaagactggtctgcctctctttaccttccttctgatttccaaaccccattcctttcccatacctggcttgtt

SEQ ID NO: 508499 - DNA, 465 bp, Homo sapiens
tcatagtatggctgtaccgtttatctaagcagtcttctgttgatggacatttaggttgttctcattgtttaaagtattacaaagtaatgatgcaacaaacatgcttttcctagttcatgtagggcagtatcttcaaaatggcaatgtttaaaggatatgcaggatactatctctctctctctcttttttttttttttttttgacagagtcttactctgtcgcccaggctggagtgcagtggcatgatctcagctcactgcaacctctacctcccaggttcaagcaattctcctgtttcagcctcccgratcacaggtgcctaccatcacacctggctaaatttggtatttttagtagagacagtttttcaccatgttggccaggctggtctcgaactcctgacctcagatgatccacctgcctcagcctcccaaaactctgggattacaggtgcaagccacctcg

SEQ ID NO: 508500 - DNA, 456 bp, Homo sapiens
tgctgcgtgtgaatggatctgggtttgacctgaacatctgtttctctatccacggaataaaaatactttggtccagtttgagctgtatgcttttaggaagaacaaaaacaaaaaggggggkggggtggggtgcgggtaagacagagaacaaatgacaacaagacccaggcaggaacagggcagagggaaagtccttgaagctctgtctgcagaaaggcttgatctttccacccggaattcgggtaattcaggcttcttgtgatgcggccagtgggctgtggctcttcagggcccaccatctgctcccaggggtgctcgtgggagcctaccctcctccccttagccaaaggcaggcagcgggggtcactagtgggactgagaactgctccagcagggctgcttggggtgcccagcagccgggcatgggacccttgccctgggtaggcggctgctagg

SEQ ID NO: 508501 - DNA, 456 bp, Homo sapiens
tgctgcgtgtgaatggatctgggtttgacctgaacatctgtttctctatccacggaataaaaatactttggtccagtttgagctgtatgcttttaggaagaacaaaaacaaaaaggggggtggggtggggtgcgggtaagasagagaacaaatgacaacaagacccaggcaggaacagggcagagggaaagtccttgaagctctgtctgcagaaaggcttgatctttccacccggaattcgggtaattcaggcttcttgtgatgcggccagtgggctgtggctcttcagggcccaccatctgctcccaggggtgctcgtgggagcctaccctcctccccttagccaaaggcaggcagcgggggtcactagtgggactgagaactgctccagcagggctgcttggggtgcccagcagccgggcatgggacccttgccctgggtaggcggctgctagg

SEQ ID NO: 508502 - DNA, 456 bp, Homo sapiens
tgctgcgtgtgaatggatctgggtttgacctgaacatctgtttctctatccacggaataaaaatactttggtccagtttgagctgtatgcttttaggaagaacaaaaacaaaaaggggggtggggtggggtgcgggtaagacagagaacaaatgacaacaagacccaggcaggaacagggcagagggaaagtccttgaagctctgtctgcagaaaggcttgatctttccacccggaattcgggtaaytcaggcttcttgtgatgcggccagtgggctgtggctcttcagggcccaccatctgctcccaggggtgctcgtgggagcctaccctcctccccttagccaaaggcaggcagcgggggtcactagtgggactgagaactgctccagcagggctgcttggggtgcccagcagccgggcatgggacccttgccctgggtaggcggctgctagg

SEQ ID NO: 508503 - DNA, 456 bp, Homo sapiens
tgctgcgtgtgaatggatctgggtttgacctgaacatctgtttctctatccacggaataaaaatactttggtccagtttgagctgtatgcttttaggaagaacaaaaacaaaaaggggggtggggtggggtgcgggtaagacagagaacaaatgacaacaagacccaggcaggaacagggcagagggaaagtccttgaagctctgtctgcagaaaggcttgatctttccacccggaattcgggtaattcaggcttcttgtgatgyggccagtgggctgtggctcttcagggcccaccatctgctcccaggggtgctcgtgggagcctaccctcctccccttagccaaaggcaggcagcgggggtcactagtgggactgagaactgctccagcagggctgcttggggtgcccagcagccgggcatgggacccttgccctgggtaggcggctgctagg

SEQ ID NO: 508504 - DNA, 573 bp, Homo sapiens
tccatgcccacaaccaagatcacccaatgtgtgatgaaaaccagcaacaaataaacaaatacacgcataamtagaaacagaacaacccaggctggaagaaacataaatcaggatacagagagaatttggaagaaaacactaattagtagctccaggtacatccaagaagaatattctatctataaaacaaggtgctatgaaaaaaaatccaagaacaacaaagaacttttggaaattaaaaatatgatcattaaaattaaaaatgcaacagatttaagggccaggtgtggtggttcatgcctgtaatcccagcgctttgggaggccaaggcagaaggatcacttgaggctgggtgtaatggctcacacctttaatcccagcattttgggaggccgaggcaggcagatcatctgaggtcaggagttcgagaccagcctgactaacatggtgaaactccatctctactaaaaatgcaaaaagtagccaggtgtggtggtgcacaccctataatcccagctacttgggaggctgtggtgggaggatcacttgagcccaggaggtagaagttgcagt

SEQ ID NO: 508505 - DNA, 626 bp, Homo sapiens
tggtctggagtcactgtttcattaggtattccattcatcacacaaaataaggcgaataaatagaaccacacatatggggaagagggagataaataaacatgaaataaaacaaatgaaataygtaccccacattcttgcaaaaaatcattaggttgagtgattccctttaagtggtgagactatgggcactcagtttgtttcccttctttgtatagatatcctccatattatatgaacatattttgcaatggaaactgaaaaaagtacatttttaaaatacctttaaaagaaagttggtacccattgggtaccagttgtaagggtatacactgaagaggctatatctttagcatcatcacttagagagctgtgtggtcattaggtttatcccagtgaaagtgtgctgtactatcacttgaacatcattatgcctagtgcttgtcgaaaaaggtctgaaccttagatactgaagagcttcccattataaggcagggagaggagaaagatttaaaaacacatataaacatcttttctttgtggataaagaagtgtggtcaaactctataccttacctgtaactctggaatgttttgagaatgagccaaaatgtcagattcttcccccta

SEQ ID NO: 508506 - DNA, 525 bp, Homo sapiens
cctgagaacacactttgggaaatggctctttaacaatagccaagatacattgttaagtsagaaaaacaaggtgtgtccaggacacactcatctgtgtgaaaagtaggagagggaaaatgtagctaagtgtttgcttgtgacgttttaattgtgtctggaaaggtccatgaggaactggtaatgctactcaccttcaggcgggttaaagctgggagagagacatcacacagtagttattttctgcatcttgactcttgcattatgccaatatactttattacctaaacaatcaattaatccatctgtcagtcaacataattaaatttttaaaccaaaaggtaaaatagtaaagcacttggaaaacagtttggcagtttttaatcaagttcaatagacacttaccatgtgtcccagagttccatctctaggtattttcccaagataaatgaaaacatgtgtcctcacaaagaacttgtaaacaagtgttcatagcagctttattcataatagccctaaactggaaac

SEQ ID NO: 508507 - DNA, 525 bp, Homo sapiens
cctgagaacacactttgggaaatggctctttaacaatagccaagatacattgttaagtgagaaaaacaaggtgtgtccaggacacactcatctgtgtgaaaagtaggagagggaaaatgtagctaagtgtttgcttgtgacgttttaattgtgtctggaaaggtccatgaggaactggtaatgctactcaccttcaggcgggttaaagctgggagagagacatcacacagtagttattttctgcatcttgactcttgcattatgccaatatactttattacctaaacaatcaattaatccatctgtcagtcaacataattaaatttttaaaccaaaaggtaaaatartaaagcacttggaaaacagtttggcagtttttaatcaagttcaatagacacttaccatgtgtcccagagttccatctctaggtattttcccaagataaatgaaaacatgtgtcctcacaaagaacttgtaaacaagtgttcatagcagctttattcataatagccctaaactggaaac

SEQ ID NO: 508508 - DNA, 688 bp, Homo sapiens
ggtgtctcagtaggtcatgcgccttaaagtccactggttctgagctcagttcagcaccagaacttacctaggaattggagtctttgtgacctagactgcctttcaagtttatttagggcccaaaggcctttagccctcagtggtgcrgcttgccagaactcaagttccaactactgggatgggcaattcctctctggctagggctggtttaaatactcccttgatgggtgggtgtcggctaagttcagcccagttttgctttctgttgtgacagggcagcactgagttcaacacactgtcccacaattgttgcactctcacactgaagtgaacagattctttctccgtgccgtgcagctcccggcagaggatgagggaagggtaccatcggtgattcagcactgtgtttcctatcctcttcaatgactctttcagcgatatgaaggtaaaaccaggtactgtgagtgctcatcttatttttggttcttttgaaggtgttttttggtgtagatagttattaaatttggtgttcccgcatgggggaacaattgatagagccttctatttgatcattttgctctgctcattctatataccacattttctttatcaaatcttatttaattttgattccataatttactaaagactaaatgtgatatgctaagtttttcacaacaattatatt

SEQ ID NO: 508509 - DNA, 497 bp, Homo sapiens
tgggtttcttccactcccaggatttcccccttccttttcactggagcttttctttgaggcctgaaatcctgactgccgggacaagacacagcaaaattctgccagtcacctgccaggctgtcataggatctaggcatcaatgaactgaagcagtaatgtgtcacctgcatagggaaaaatatttacctttctcagcaaagagccccarcctctttccccagattccatctctgattctagtgaaggcgacttggaaaatagtcccaggcattaggcaatttggggtgttaatgtttttttaaagcagacactccccttcccaactacaactaccacacaaaccataagcctgaactgaatagaaatggggttttcacaaagtactagtgttgccacatacattcctagacatgtgcatgtcacaatttctcaaacacttatttactatattccagacatcacactagattccgaaaatggttaaaacagtccagaca

SEQ ID NO: 508510 - DNA, 471 bp, Homo sapiens
ggtgggatgaggttaggaaaatccacctctgctatctgcctggaaatgyctgataacattgttctcaccctgcttgagtagaaacaatcagagtccctctgcttctcacagagtgatagagagggaagacaccctgctgaaccaggctggggccaccatacagtataaaggccactgagtgctcatgtactttggtgacttgcagaaacagaaaaaactaatcaaattactgggactttcatttatctttagtaggcttttagtctaccaccgtaccaccctgaatgtgcctgatctcaccaacccgacttttacatccaggtgacaggcttagagtttttttccaacgatacctcattttcttgtgatcggaaggtcatgacatggtcttacactcaggcacaaataattaattccctattaggcacacaccgttgtcctaaacagttccttctgacctcatgacattag

SEQ ID NO: 508511 - DNA, 569 bp, Homo sapiens
ctgatctgcagtgtacccttcatgagtgtgcattatgataaacctgtctactgctattgkgtacttataataacttaggttattcttcctccaaatcttccatgtgtttctggagacgtcgcagtgtaatttagctcaagttaatgatagtcctcaatgcaatattaccagttatcatttttcactttaacatagcacataagtggctaatgttccctggcatagatgaagtcctaggctagctaatgaggagattatgatggacagaacaaagaggtcacaggaaattgtgcttctggctctctaatcagatcaggtttacctcccagatttcacctgtctcaggaaggcaaaggactgaaaggaaattggttgctaacatcaaggaataaatagtattctcctacactgtgtaggggatatattttttggaggaaaattcaacaatatataacaaaagccttaacactgtgtatgttctttgatcaagcaacttaatacttagaaatttattttaagaaatgtctaaagcagaattttctgtaatataaggaaaataaaacagaaat

SEQ ID NO: 508512 - DNA, 549 bp, Homo sapiens
ttcacatatcagaagtgtcaatgctctcttgttcccaccatttctgcagaaaaccaagagctggttttcgggaacatttgcacccactcattctagagctggtcgtgacttctgacrgcttgtataggtcactaaggcagcccagaaagctgtcagagcccaggaatttcaatttcttttgttgcatggagaagtggaaatgaaaacagaccactcgacaagctaaactgcatacagcagagacttgaaaaaatattctatcggcaatgtaatatcctgagcccagaatgaatctatccattgggacagaaattgaatcagaatcctcctttgtgtaaatgcccttcatgttgatcttttctttccatccagtgctgttttggtatcagatagaatctttcaattttaagaaagtgtagtacttaaaggactttgaactggctgagattttggctaacactatgcaaaaactgctttaatcagaagagtcctgggggatgtctgctaaacagcttcatctcaagcaggatgggaatggctccctctgat

SEQ ID NO: 508513 - DNA, 622 bp, Homo sapiens
tatctggaatccaaatacctagtggaagaggaggctgagatttaggattgtaatcaggcttagacagtttttcacatatcagaagtgtcaatgctctcttgttcccaccatttctgcagaaaaccaagagctggttttcgggaacatttgcacccactcattctagagctggtcgtgacttctgacagcttgtataggtcactaaggcagcccagaaagctgtcagagcccaggaatttcaatttcttttgttgcatggagaagtggaaatgaaaacagaccactcracaagctaaactgcatacagcagagacttgaaaaaatattctatcggcaatgtaatatcctgagcccagaatgaatctatccattgggacagaaattgaatcagaatcctcctttgtgtaaatgcccttcatgttgatcttttctttccatccagtgctgttttggtatcagatagaatctttcaattttaagaaagtgtagtacttaaaggactttgaactggctgagattttggctaacactatgcaaaaactgctttaatcagaagagtcctgggggatgtctgctaaacagcttcatctcaagcaggatgggaatggctccctctgatcag

SEQ ID NO: 508514 - DNA, 583 bp, Homo sapiens
tcctgttactgttagaggctgcggttgtccttatagccacttccagagcactgccctgttttccgtgggttaatgatatgttaaaattagtaggactgagctaaaaatagtatgtttgttaaaatttgtgcattttattatatagcttaagacttcataaatggaaagtaatattgagatttagctacctttttaaggcagtgtttttttgttgttgtttttgttttctttcagacagtgttcattgccatcactaattttattattttgtattttttttttttttgwgacggagtcttgctcttttgcccaggctacattgcagtggcgcgacctcagctcactgcaacctctgcctcccaggttcaagtgattctcctgccttagcctcccgagtagctgggattacaggtgcccaccaccaggtccagctaatttttaaatttttagtagagactgggttttattatgttggccaggctggtcttgaactgctgacctcaagtgatccacccgcctcagcctcccagagtgctgggattacaggcctgagctaccacgcccagcctatcatcactgattt

SEQ ID NO: 508515 - DNA, 610 bp, Homo sapiens
aatcctcttagccgtctctaataaaatcctctcctaagtatcttcgaatcctcttctctttccttgtctccttacatgaaacacataagctctcagctcttaactcccaaaatatttcattctggaacagaaaataacaaaaagcaattgtctggtcttcttgccacccaaactatatttctatttaaaaagtgttggctaaggctgggcgcgttggctcacgcttgtaatcccagcactttgggaggcygaggggcgagtggatcacgaggtcaggatttcgagaccagcctggccaatatggtgaaaccccatctctactaaaaaatacaaaaagtagccgggcacagtggcatgcgcctatagtcccagatactcgggaggctgaggtgggagaatcgcttgaatctggaaggcggaggttgcagggagcagagatcacgccactgcactccagcctgggtgacagagtgagactctgtctcaaaaaaaaaaaaaaagttagcttctacctcatgtttttcctaccatggtagattccaaatgaatccaagattaaaatataaaacacctaatccataaatataactgatgaaaacataatcatttt

SEQ ID NO: 508516 - DNA, 592 bp, Homo sapiens
ccactccctatcatcccatgccttgcctgactgactcacttatgttacctgtctgttcccatatctgtctgtgtttgagcttgctgtgtttgagatgagaaagtcaaggtagataggtcacgtgactcgcctatgctagtaagtggcagaattcggttttaaacttagttttcttggctgtagcttcagggcagtttttcatatagccagataattcagttatcagatactgaatggacggcgatgctgaaaggagggtgaattttgcaagtgacctagaaatcttttctctgattcaacttctggrctataatagatgactatgtcatgaacgagtacctgcccactttaactggcatatccccctcctcctaaacatcctccttcctctagaagtttctgttcttgctcccccgcttagacccctgcagattctgccatgtttttagaggaccctacttctctagcctcacttgattgtcctggacgtggatatgtgaccaaagttgagccaatttcaatgctttttcccatctggccagggatagttggttcagggctgagcattgcatccaagttgtgtgaactattt

SEQ ID NO: 508517 - DNA, 592 bp, Homo sapiens
ccactccctatcatcccatgccttgcctgactgactcacttatgttacctgtctgttcccatatctgtctgtgtttgagcttgctgtgtttgagatgagaaagtcaaggtagataggtcacgtgactcgcctatgctagtaagtggcagaattcggttttaaacttagttttcttggctgtagcttcagggcagtttttcatatagccagataattcagttatcagatactgaatggacggcgatgctgaaaggagggtgaattttgcaagtgacctagaaatcttttctctgattcaacttctgggctataatagatgactatgtcatgaacgagtacctgcccactttaactggcatatccccctcctcctaaacatcctccttcctctagaagtttctgttcttgctcccccgcttagacccctgcagattctgccatgtttttagaggaccctacttctctagyctcacttgattgtcctggacgtggatatgtgaccaaagttgagccaatttcaatgctttttcccatctggccagggatagttggttcagggctgagcattgcatccaagttgtgtgaactattt

SEQ ID NO: 508518 - DNA, 592 bp, Homo sapiens
ccactccctatcatcccatgccttgcctgactgactcacttatgttacctgtctgttcccatatctgtctgtgtttgagcttgctgtgtttgagatgagaaagtcaaggtagataggtcacgtgactcgcctatgctagtaagtggcagaattcggttttaaacttagttttcttggctgtagcttcagggcagtttttcatatagccagataattcagttatcagatactgaatggacggcgatgctgaaaggagggtgaattttgcaagtgacctagaaatcttttctctgattcaacttctgggctataatagatgactatgtcatgaacgagtacctgcccactttaactggcatatccccctcctcctaaacatcctccttcctctagaagtttctgttcttgctcccccgcttagacccctgcagattctgccatgtttttagaggaccctacttctctagcctcacttgattgkcctggacgtggatatgtgaccaaagttgagccaatttcaatgctttttcccatctggccagggatagttggttcagggctgagcattgcatccaagttgtgtgaactattt

SEQ ID NO: 508519 - DNA, 647 bp, Homo sapiens
  misc_feature (1)...(647): n = A,T,C or G
ataaactgagctaaaaagtagttcaagtgggctgggtgcagtggctcaygccggtaatcccagcactttggaaggccaaggtgagcagatcacgaggtcaggaggttgagaccatcctggccaatatggtgaaacccccgtctctactaaaatacaaaaaaataagctgggcatggtggtacgtacctgtagtcccagctacttgggaggctgagggaagggaattgcttgaatccgggaggtggagattgcagtgagccgagatcataccactgcactccagcctggcgacagagcgagactgtctcaaaaaacatacatatataaaaagaaagtagttcaagtggtgtccaacagatgtccagcattactgagttttccttgaaagcttaaaatatcccctggcacccctgaatttggtgtggcaatctggggtgcctcatcccttagtttgggatagagtggacttgaagccgtaaatcatctgtttaggtaagagactgtgatgcaattccggctgatgaaaagggagngaagtcttttgagagattcctagaaaagggtctcctcaccctatcaaagctgtttgggaggatgccttctgctgggggctgttgcagagtctgcgtaggaacctggacccgcag

SEQ ID NO: 508520 - DNA, 413 bp, Homo sapiens
tttttagaggaacatttgggagtaattttggaaacattttgcttctttctcttttctttgcaagtggtaagaggagagggagagaagcccaggaaccatccctcccacayggctaaggagggaaagcaggactccatagtccctggctcctcctggcagaatttatagtccgcagcctgcaaattactggagggaacatggaaacctgggtaatgatgtgggagagaacattctccagtgctgacgtgggtttccctgcgccagagaaccagagatggggtaattgaagctcatgctccgaacagttatagcaaaggtaatttccatggcggcatttgaaatatccccagtgcacagggaggagggtggtggcggggaagccagacctgatgaatgagacagaatcatggatg

SEQ ID NO: 508521 - DNA, 413 bp, Homo sapiens
tttttagaggaacatttgggagtaattttggaaacattttgcttctttctcttttctttgcaagtggtaagaggagagggagagaagcccaggaaccatccctcccacatggctaaggagggaaagcaggactccatagtccctggctcctcctggcagaatttatagtccgcagcctgcaaattactggagggaacatggaaacctgggtaatgatgtgggagagaacattctccagtgctgacgtgggtttccctgcgccagagaaccagagatggggtaattgaagctcatgctccgaacagttatagcaaaggtaatytccatggcggcatttgaaatatccccagtgcacagggaggagggtggtggcggggaagccagacctgatgaatgagacagaatcatggatg

SEQ ID NO: 508522 - DNA, 558 bp, Homo sapiens
cacagctgcaggcattgggctatggtgtggcctcagggaaacttccattctagtggcagagacagataaatgctaagcaaagtaatacatttatcaaccaaacmaatacaatgatttcatagagtgattacaacatcgaaagagttaaaacaggatgatggggtggagaatgcctggggaccggggagggagtgaggaggcctcgcatttcattaaaaatttcaagtactctgcggaaatcttgaaagaagtcttgtttactgttgtgagagtcatcagtttcatcagaatcagggctttgaatcaccattttttgagaggttttttgtcaagaaatgagagcagactttaagaaactcactgactgtgcagaggccttctggagacacaaaattgaacttcaagcacttttttgttgagagaaaaggaaagaccattgttaaaaccatttgccaagcttgaacatttattagtgtcacaaattgttgtaaatatttttttctataatttttgtgaaagaaatacatttccaatgcaataaaaatccattatgactat

SEQ ID NO: 508523 - DNA, 675 bp, Homo sapiens
gctgctgtatctggtgggaaagcgaatgctttagcgaaaataacaggcatcccataaatacatagactagaaataagttttggtttcattaagagcccagaagaatgcctttgttgtccaaccccagtttgatgctctttgggaatctgacgaataccttgtccttaatctatgtgaatcatactgactacacatatagtttaccgcactttgttcttagacaaaggtgcatgccagaaaaatggcttgcaatccttttgcaaagcaccttcacaaaatatgggtttgcccagactttttgtagccttctagatctctctttgcaccccactctaggtgttagctgygtctgtgcatactaggtgtggttcagcaagccttccaccaaaagccagcatcctttgatgttcttgaggttagaaagccttgatgggcttgatccagaactctcagaagaatttggaaagtaaggctgtccattcagaatcagtaagacaaatttcatcagtctttggaaagtgagactctatcaaagcagtaagttccagtacagtaacttatcaaaactctctagaggaagaaaagtgaacagacagacaaccacagaagaaaaagttgactctaatattgtagcttccagtatttcaaattagaaggtacaaaatagtaaattga

SEQ ID NO: 508524 - DNA, 679 bp, Homo sapiens
ctgccaagataacatgattaactcttggagttatatgccactgttcatttatatcttatttctccaattcgttctctattascatttgcaaaaggacataatggtataataaaaaatggccagagaaaacattcatcccttaattcattttcaatatgaaatgatgtgaaacaggtcatgggtttgatctgagaagcagggcactcaggctccctgattttcttttttcttttttttttttttcttcaagatggtgtcttgcactgacgcctgggctggagtgcaatggtgcaatcttggctcaatgcaacctccacctcccaagttcacacaattctcctgcctcagccttccaagtagctcacattccaggcacacaccaccacacctggctaattttttgtatttttagtagagacagcgttttactctgctagccagactggtctcaaacttctgacctcatgatccttccacctcggcttcccaaagtgctgggattacaaagttccctgatttccggatgtgtgttcactgcttaccaagcaccatgctgatggttttggtggttggacttgcaattcagatgagtctgggtctaatcccagctctgccacacacattgtgacatgacctgggcaagtcaccaaccaatctaggtttcaaatgtcattattta

SEQ ID NO: 508525 - DNA, 593 bp, Homo sapiens
ggggctggactcaggggttccaattcaagtgcaaagattgagtcttatggcctggattgagtcatgttcctgtccccgcaccagttgcatggcaggcagtgcgtggctaggctgagcctgcggagtgtgccctcagcagctcctcagagaaaaatcaatcaaggcgccatcaagcctggagaaagttcagtgtgtcctgggcagtttcctgcctgggccccagttgttctttctkgggtagggatgtcctctgctctccctgctgtcatcagtggtggttgtgcccggacaccactcagggcctgtggtaaggcattctttctggaaattgagattctctgttccttcaaccgtgcagagtggggaaggctgcaagagcagcttctgaggtcctccagtcaaataagaggtcgccaggtcctctgagggtcgtcccctcttaacccacaccttcgatgagcatccccaccctgcctcgctgctccctctgaggtggagagtgagctccatgctaacaggctctggtaacgggcttgttcaactgggcccctttcttccccaaagcctgttgaaaatagctgatgtcaaaacac

SEQ ID NO: 508526 - DNA, 564 bp, Homo sapiens
actgatggatttctaacaccttagcaactttctaataactctattccttctgatgattaaggaatggggaagcatatgcttgttaatgtaaatgcggtgttttgatactggactccagtattcaacttgaaggttaagtgatcagctccagaggtaaagaacccttggcacacagggtctgacacagaggtataccattcacttcctatactcagaccaagatcagactgggatggggtagtgggtggacttcagcgaaagaaagacttattggaggatgccaaattcagaagtggtgcctgagtaacagggccctgtctgttcccacctcaactatgctgactggcagatgcagcaagaattttgggctgtctctttccactaagtccctcccatcagaawgtactgatagttaccccagtcactgctgtgcttcccagctcccttcccactgtcccttagtggagtcttactcccaattcctctatcttgaggttcagtttataaataagaatttaaataaattatttttaaaacaccaagggaaatattagaatttcaatc

SEQ ID NO: 508527 - DNA, 634 bp, Homo sapiens
aagcttccatggagaaacatgycctcttagtaggaaactgttagaatctcagctcatactgggattggagaaaccatacatctttaatttctgaatatatcgtgtgagaaagcaattgacaaattgatatctaccaggtaaagaactacattaaaaagaatagtttcacaaaatcatacaatagttatatttatataattatgacttaaaagagtttctgatgaagctgtgaaaacctcatttatcatactataaaatagctgtttgtatgaccaataccagaaataataatatcacagttgtacatctttatacaacttgtaccatatcattttaacctcactataattatttgaagaatagaggcttgctattattctattgagattttgagaaactgaggttctaagtggttcctttaaatagatcacactacttgaaatgtttgaagaccactgagttactgaaattttcttccaagttctcacatggacctaaataataataggcttggtagtaatagctcagctctgtcctggtgtaatacttcattatatccatcattatcatgaaatgtaaaagtattgagtcttatttaagcagtacaaatcatagataggatatgttttagtac

SEQ ID NO: 508528 - DNA, 634 bp, Homo sapiens
aagcttccatggagaaacatgtcctcttagtaggaaactgttagaatctcagctcatactgggattggagaaaccatacatctttaatttctgaatatatcgtgtgagaaagcaattgacaaattgatatctaccaggtaaagaactacattaaaaagaatagtttcacaaaatcatacaatrgttatatttatataattatgacttaaaagagtttctgatgaagctgtgaaaacctcatttatcatactataaaatagctgtttgtatgaccaataccagaaataataatatcacagttgtacatctttatacaacttgtaccatatcattttaacctcactataattatttgaagaatagaggcttgctattattctattgagattttgagaaactgaggttctaagtggttcctttaaatagatcacactacttgaaatgtttgaagaccactgagttactgaaattttcttccaagttctcacatggacctaaataataataggcttggtagtaatagctcagctctgtcctggtgtaatacttcattatatccatcattatcatgaaatgtaaaagtattgagtcttatttaagcagtacaaatcatagataggatatgttttagtac

SEQ ID NO: 508529 - DNA, 614 bp, Homo sapiens
gcctcccaaagtgttggcattacaggcatgagccacctagcccggcctataatttaatttttaataatgaatacaactaacaattggctcacaaaattccttaaaatttaaaaattttccttggtgacctattatgaggtagtttcagcacaccactggaagacagctcttttytttctttttttttttttttttgagacggggtctcactctgtctcccaggctggagtgcagtggcacaatcttggctcactgcaagctccgcctcccgagctcaacccattctcctgcctcagcctcccgagtagctgggactacaggcgccaaccaccacgcccggctaatttttttgtatttttagtacagacggggtttcactgtgttaaccaggatggtctccatctcctgacctcgtcgtgatccatcctcctgggcctcccaaagtgctgggattacaggcgtgagccaccgcgcccggccaagagctcatttttaactggctcctttgaaagctttatttccctttatattgtcacctttccatagaggaattttaccgagcaatgtaacattcaacaccacatttcttatgtatctagtccatccaagattga

SEQ ID NO: 508530 - DNA, 614 bp, Homo sapiens
gcctcccaaagtgttggcattacaggcatgagccacctagcccggcctataatttaatttttaataatgaatacaactaacaattggctcacaaaattccttaaaatttaaaaattttccttggtgacctattatgaggtagtttcagcacaccactggaagacagctcttttctttctttttttttttttttttgagacggggtctcactctgtctcccaggctggagtgcagtggcacaatcttggctcactgcaagctccgcctcccgrgctcaacccattctcctgcctcagcctcccgagtagctgggactacaggcgccaaccaccacgcccggctaatttttttgtatttttagtacagacggggtttcactgtgttaaccaggatggtctccatctcctgacctcgtcgtgatccatcctcctgggcctcccaaagtgctgggattacaggcgtgagccaccgcgcccggccaagagctcatttttaactggctcctttgaaagctttatttccctttatattgtcacctttccatagaggaattttaccgagcaatgtaacattcaacaccacatttcttatgtatctagtccatccaagattga

SEQ ID NO: 508531 - DNA, 614 bp, Homo sapiens
gcctcccaaagtgttggcattacaggcatgagccacctagcccggcctataatttaatttttaataatgaatacaactaacaattggctcacaaaattccttaaaatttaaaaattttccttggtgacctattatgaggtagtttcagcacaccactggaagacagctcttttctttctttttttttttttttttgagacggggtctcactctgtctcccaggctggagtgcagtggcacaatcttggctcactgcaagctccgcctcccgagytcaacccattctcctgcctcagcctcccgagtagctgggactacaggcgccaaccaccacgcccggctaatttttttgtatttttagtacagacggggtttcactgtgttaaccaggatggtctccatctcctgacctcgtcgtgatccatcctcctgggcctcccaaagtgctgggattacaggcgtgagccaccgcgcccggccaagagctcatttttaactggctcctttgaaagctttatttccctttatattgtcacctttccatagaggaattttaccgagcaatgtaacattcaacaccacatttcttatgtatctagtccatccaagattga

SEQ ID NO: 508532 - DNA, 614 bp, Homo sapiens
gcctcccaaagtgttggcattacaggcatgagccacctagcccggcctataatttaatttttaataatgaatacaactaacaattggctcacaaaattccttaaaatttaaaaattttccttggtgacctattatgaggtagtttcagcacaccactggaagacagctcttttctttctttttttttttttttttgagacggggtctcactctgtctcccaggctggagtgcagtggcacaatcttggctcactgcaagctccgcctcccgagctcaacccattctcctgcctcagcctcccgagtagctgggactacaggcgccaaccaccacgcccggctaatttttttgtatttttagtacagacggggtttcactgtgttaaccaggatggtctccatctcctgacctcgtcgtgatccatcctcctgggcctcccaaagtgctgggattacaggcgtgagccaccgcgcccggccaagagctcatttttaactggctcctttgaaagctttatttccctttatattgtcasctttccatagaggaattttaccgagcaatgtaacattcaacaccacatttcttatgtatctagtccatccaagattga

SEQ ID NO: 508533 - DNA, 489 bp, Homo sapiens
tgattagacattatagatggtgctttcttggggattttgatgattagacattatagatggtgctttcttggggattttgataggcaacctggatgctaaagttgtccaaagctcactttccctatgtgtcaagtggaggataacattctctgattagaaaacattctctgattacaaaaatcaaataggaaagccttttaaaaatgataaatcaccaaaccaaaaggaaagatgttaagttttgcatggtaaacattcaatcsaaattcagtgcatgacatcatttttaaagttcacctggtgcaagatgcttaaaatctgaaatattgaggcctatgggaatttgttacaatcagcaaaattgcactgtcactaaattgttcacattctacctgatgctagtattttcatttagttttggaaggcaaaaaaatgatcaattttactgaaatttttcagagttgccttgttcaacctcacaaatacaag

SEQ ID NO: 508534 - DNA, 597 bp, Homo sapiens
aaaagtgagaaaactgtcatttagagaatgtgtcccatacatccgtgaaatacttgaattgtgaattaaatcattcaacccaggttatcttactcagtggcctgcctttttaactatcttgaatacctatgattgaaacaagtcaagaaagttaggaaagaaggagaaggagtgcctatccctctctttggggataaagagaggttttcaggaagaagtgatgcctaagctaagatataatggatagttgtatttattcacaaaggagtgagggagaacatagaaagagcattctacacagaaggaacatctagaatgaaggcctgctagcttgagaaaagatgacgtatcagtcagttactgttatgcaacaaaccaccccagacatcagtggtacttagctttttgcatatgtggggttcatctaatcgatgttatgcaatgctggtattggctgggacyggtcatgtgtctgtgggtctctgctccgtgtatctctcatcattcacctggtacaaggcctttctcttagcaatggctgaagaataggcgggaatatagaagcaagacagtgcttgagaactagagagaaaagca

SEQ ID NO: 508535 - DNA, 614 bp, Homo sapiens
aattgctggttcatttatcaggtgtgaaggagggatgttaacaggtaggtctgaaaacttggaagaagggataacctatttaaatcattgttggtgaaggtgtggagaggttcctgacaggacagtgaggtaagctggaggggctgccaaaagctgactgatgtccttctttgagtcaggaagtgtaaatttctctcacagagattttgaggttgactgcatttgcacctctaaagctttactrgcatgtatgtaaaaatagccatcccatttattccaattaaaatatgcggttgcctcagatgtaactgtgcttcaattcttagactgataaacttctatctacctttcaggacctggttgtaaagccacctcctttggaaaacttttctaaagctcccagtagagtcagttgtttccttctctgtgtttcttcagtccctggtgctgtgtgtactgtgtggtgttgtaatttattttggacagtcttttttgctagatggagctcttctaggccaggagtcatgttttaacactttctgtaccctcttaataaaagtctgttgtatggataaatcaattggcagggaaagggcgctatgcaaacttatatg

SEQ ID NO: 508536 - DNA, 596 bp, Homo sapiens
atttgcttttacttttggggagctggttttgttttagcagcaaaagttaaccactataagaatgtatgttaggtaaaattgacccggaagggaacacctattccagtaataattgatctttcacgtactttagattgtgcatacctttatgttgagattgtkctacctcttctagaggtagctttttatatttttatctcaacataaagctttttatatttttcccttcaagtttatcttgttcattagattgtgaaatttaaggtcgaggaaaaagatttttgtattttacttttgttttgtttgctttttcatctccaaacttctcaaggagtccaagaagtatgaaatatcaactaaaattgtttttgaacttagaatattttattgctaccttattcagatttattttttaatatggatgcaataaattgtgtgtttttggtatcaagttccgtgtgttttgataaatacggagtagtataacaccactacaatcaaaatacagaatatttctgtcaacccatatgcacacacatacacaacacacacacacacacacacaccacacacacaggtgctagcctttttcagtt

SEQ ID NO: 508537 - DNA, 421 bp, Homo sapiens
ctgggaacaccaaattcgaaactagaaagctaagagacatcaaattcactctgtagaaacaacttccctcttcaaggatttggtatttgtagcatctgggacaactgtaagtaaggtaaaagtagaactaaaatgagatttttttttttttgaaagtgtttaagaagtagacatctttccagttacctccccacttatgtttagaaaatgcctatccagccctatcctgccttttgccccacaaagcaatgggtagtttatcatctggagaggataaaacagaaggtctacattggggaaatgctgtactgtcataagtccttcctgtatttctatgagatgggaataggagcatgcataaggttatactatgygcattctttttaaatcatttcatgaggatgccagacatgaacatgtg

SEQ ID NO: 508538 - DNA, 468 bp, Homo sapiens
ctttgtttctttcccgtaaagatttatttattggctaacattcttagtaatggcaactctgggagggcaggaaatctgtcttcctcacagtgcctgggatttgttcgcagctcaataaatatttgatgcrtgaataaatgaaccaatggcttcttagaatcagagctacacatgcacacacacgtatacacatataccctttgcttggagagacctgttttctttccctgttttgtatctgggagcacagctgcaaccccatgggtaattttttttctgttattgttcttttttcagcatgaatctattaataatcaaaccaaattattcaggaattgcacagaaggtaatttcttccccaatgcacacaggaccaaagggtgggggaaaatcaagctactgaaaatttccttcccctgcagacttttaaactgctaatcagcacaagcagcttgtagcagactgagc

SEQ ID NO: 508539 - DNA, 256 bp, Homo sapiens
ctggagtcccagctgctaggattcaaaggcaacagggaagacttcctagagtttcaygtgatcataaaaacctttccagacgttttaagtgattatgatttctatgctgcattgacttacaattagagatcattcaagtaacttagaattcagtaacttctaggtcacagagaggctcagatacacactgttgacagccttttggtgtctttgtatgtgtgtgtgtgtgtatacatacatacacactaaactgtac

SEQ ID NO: 508540 - DNA, 256 bp, Homo sapiens
ctggagtcccagctgctaggattcaaaggcaacagggaagacttcctagagtttcatgtgatcataaaaacctttccagacgttttaagtgattatgatttctatgctgyattgacttacaattagagatcattcaagtaacttagaattcagtaacttctaggtcacagagaggctcagatacacactgttgacagccttttggtgtctttgtatgtgtgtgtgtgtgtatacatacatacacactaaactgtac

SEQ ID NO: 508541 - DNA, 568 bp, Homo sapiens
attctattggaaatgtctttaagttctatttgtcattcttacattagaaaataaggaagtgtttactaactgcaagtattatgataaaacagcaaaattaacaaacctgtgatggtcactgttgattggacaccgaaatgtctgtagttctcctcgtgttactaaacttgtcttcacaagcaagataagcagctgagcaagtaacagtcttttaaaagtaggtactagaaacaaatacaccaatgagtagtagagccctgtttctggtataacaattttgggtggaaagccccagtcctcaggataggagtgaggacaagataattgagctctggatacacratgggatttctgcactctggatccttaccatacctactgggatgacatacgaaggtttttttattttccagtataacttaaggaggggtgcagctgaggcaaggcacagtctaaaaggacttgctaacatcaaactctaaccatgtacatatccatgatatgttcagcacatcatatcctaggaacaaggcaactggtgtcataactttcttctttgcttattgcc

SEQ ID NO: 508542 - DNA, 622 bp, Homo sapiens
attaacttttttaaactttatacaggaaaattcagacaatatgattcttttctcattaaagggaaatggagtaagtagaaattaaatatgcacactaggagaataacttccaactaatctttaaacactggtatacctcatctgaatacactcataagacgacatttcagtcccagaatggcatcacatttgcttgtgttatcaagcttcctgttaaacataggtagaaaataagctgtaggctgggtgcggtggctcacacctgtaatcccagcactttgggaggccgaggcaggcagatcacctgaagtcaggagtttgagaccagcctgaccaacatggagaaaccccgtctctaytaaaaatgcaaaattaactgggcatggtggtgggcacctgtaatcccagccacttgggaggctgaggcaggagaattgcttgaacccgggaggcggaggttggggtgagccgagatcgcaccattgcactccaacctgggcaacaagagtgaaactccatctcaaaaaaagaaaaaaaagaaaaaaaaaaaaagaaaaagaaaaaagaaaataaactgtggtgagaagggaaataaaagatattagaagtctacaatttctaa

SEQ ID NO: 508543 - DNA, 506 bp, Homo sapiens
gctggtaagtggagaagctgagatttgaatccaggtccaggtgaacacagagtctgagctctaggctccatgtcatatggcaccaggccttctggtaccaggaagatattttcacaaagatccctgcactgacttgacacaagctgatcagaaaatcagttaaaattgggtggcatgttgtttatcatccaagccggcatactttatcctgtacacatgataaagcaaacaggaccccaggataaccagcataaaccaggaagtatagtcaccctagttaagatgcacatagcatagggaaggatgacrgtttagcttgtaatgtatttcatggattctggacacatttttacttcacatttaacatcgttacaatcaccagcatcctagcttcaaggaaatgccatggttaggagcaacagtgagaagctggaatgcatctgtgaaggggaaggagaccagagggaaaggttcagtattccccagggaccccaacctggaggctg

SEQ ID NO: 508544 - DNA, 506 bp, Homo sapiens
gctggtaagtggagaagctgagatttgaatccaggtccaggtgaacacagagtctgagctctaggctccatgtcatatggcaccaggccttctggtaccaggaagatattttcacaaagatccctgcactgacttgacacaagctgatcagaaaatcagttaaaattgggtggcatgttgtttatcatccaagccggcatactttatcctgtacacatgataaagcaaacaggaccccaggataaccagcataaaccaggaagtatagtcaccctagttaagatgcacatagcatagggaaggatgacggtttagcttgtaatgtatttcatggattctggacacatttttayttcacatttaacatcgttacaatcaccagcatcctagcttcaaggaaatgccatggttaggagcaacagtgagaagctggaatgcatctgtgaaggggaaggagaccagagggaaaggttcagtattccccagggaccccaacctggaggctg

SEQ ID NO: 508545 - DNA, 484 bp, Homo sapiens
tgccctctgacagtgatggcaaaggggcaggtgtaacagccttttttgggtacccatgctcagtgggtcccaagctcttgtccgggatctaagaggaatgaggtcacatggacagttgaagtatggtggaggtggagaattttatttagcaatgaaaatggctctcagcagagaggggagctggaggggtggaaggacaggyggataatcttccctgaagtccagctatatctggccagttcttctccaaagttaagccatctctcctctaaagtccagccgtccccctcaaatcaagttgattctttccagtcaagctgcttccccctctctactgactgagtctggggtcgttacaggcacagggtgggggctgctggtggtgcatagatacttttggaaaaggcaacattagatttgtgaaaagacattatttagaaagaaccagttgggagagagccagcaaacagggatagaaattctc

SEQ ID NO: 508546 - DNA, 528 bp, Homo sapiens
ctgctgctctgggccagaaagtctgctggctgaatgaattttaaggaagtctagtgggttcctggctctggagatcacaggagagaagtctgctagagacaaagatttacctgtccagccaaaggcaaygttcccagatggtgtggatgagattgcccagggaaaaagagtccagatgaaacccaagggaacaatagcattaaagagctgacaagagacaaccaaagcgaaagctgaaaagcaggggactttcgagacaaaggaataacacatttttctttttttttttttaattatactttaagttttagggtacatgtgcacaacatgcaggtttgttacatatgtatacatatgccatgttggtgtgctgcacccattaactcgtcatttaacattaggtatatcccctaatgctatcccttcccccttccccccaccccacaacaggccctggtgtgtgatgttccccttcctgtgtccatgcgtcctcattgttcagtttgcacctatgaatgagaacaagcg

SEQ ID NO: 508547 - DNA, 294 bp, Homo sapiens
tgcaatatttcccaccaatttaccctcctactctcctagacagctattttacagcttctgagctttcctcaaatctcccaacttctcttttgggtcatgctgtttgctggagggagggacttcwccacatacttacgaaggggtcatgagcaaccagaacttccttttttgttcatctgatacagggtttcactttgtcacccaagctggagtgcagtgacatgatcacggctcactgaagcctcaaactcaagcaattctcctacctcagccacccaaggcgctaggaccaca

SEQ ID NO: 508548 - DNA, 533 bp, Homo sapiens
tgatattatatttgagaaacctaagayaatccacagaatattttcactatgagaatgttcaaattaaagtacaaaatcgggtaaataaaaggtgtcaacacattaaaaacaataatagattgtaaatgtaaaataccagttattcttacttctgcactaaggattattttgacaattacagcatataaaagcattcccagaagatgtgctgttcttttaccatttttttttttcagttgactacatgatttgcattggttaatgataacccccaggactcctcaaggattttttggattgtgtaagatgtctcaatgatattttatcctttttctacttatagtagttgtttgttcctgaagttcttgataactgtgtaaacgtctagaatgtactaagggacttggctttactattcttctctgtatcattaatacagttatttgaagcacaattcaagtgtgtattaagttagacaatgttgttattaatcaaagataccaactatgacatgactaataagccattacact

SEQ ID NO: 508549 - DNA, 533 bp, Homo sapiens
tgatattatatttgagaaacctaagataatccacagaatattttcactatgagaatgttcaaattaaagtacaaaatcgggtaaataaaaggtgtcaacacattaaaaacaataatagattgtaaatgtaaaataccagttattcttacttctgcactaaggattattttgacaattacagcatatraaagcattcccagaagatgtgctgttcttttaccatttttttttttcagttgactacatgatttgcattggttaatgataacccccaggactcctcaaggattttttggattgtgtaagatgtctcaatgatattttatcctttttctacttatagtagttgtttgttcctgaagttcttgataactgtgtaaacgtctagaatgtactaagggacttggctttactattcttctctgtatcattaatacagttatttgaagcacaattcaagtgtgtattaagttagacaatgttgttattaatcaaagataccaactatgacatgactaataagccattacact

SEQ ID NO: 508550 - DNA, 359 bp, Homo sapiens
aggaccagctaagcctcatctaggaagagcccctcacccatctccacctccactccaggtctagccagtcctgggttgtgacccttgtctttcagccccaggagagggacacacatagtgccaccaaagaggctgggggagggcctcagcccaccaaaacctggggccagtgcgtcctacaggaggggaaccctcaccccttcaatycctttaggagacccaagggcgctgcgcgtccctgaggcggacagctccgtgtgctcaggctttgcgcctgacaggcctatccccgggagcccccgcgcctcctccccggcgctccgccctcgcctccccccgccagttgtctatcctgcgac

SEQ ID NO: 508551 - DNA, 560 bp, Homo sapiens
gaatttcttcccttaaagagtcatagaatggaaagaaagtttttttaaaaaagaaaacttgaagtagcctacttggcacctctatgtagagagtaacaggatccctggctctgtgccccgatggtcccctccctgccccattaaggccaggagcccaggctggggttcagagcgtccagggcctggcaacaagagcgtgtctacccccatcagcctgtacacagcgttatcaactcctgctgcacaggacgtcccgggaaggctgggggtggagacgcttttaccacctaagggacctcacgtggatcagtcaccactgtgggctcctacccaggagttaaggaagggcatcctgcggtccttgctgggccaggggagaggcaggagcacctgtaggcagacacttcaggtcaggatgargtcacaagagcaagtggctgggcagcagatttggccatgtccagacagtcaggcccatccacagcccctttgccattgcttctctgtgatttgccaccgtctgcaggatgcctgattggatgttgtgggaggtggagcag

SEQ ID NO: 508552 - DNA, 601 bp, Homo sapiens
agtccctcagtgtcactaccagcaaggaggtttgaacggcagggtctcttcaacaccacatgctccccctgatggcttgcgaggaccatctgagtcctcactcctgatccygttgggagcaagtgccttttctcacaggagggagaggccactctcctcctctgcctgacctctttatctccacagcaatgtcatatgaggcgaaactaggaggataagatatctaggggaatctctgtgtagtagtgggaaacattttaagcttgcgtgctatataatttttcatagtttgacggagcacatcaataagttaaaccctccccagggctgccatgttgcacaactcagtcctacctggggccctaccagtctctaatcctgtgccccagcctcaggcttctctgagaaagcttcctcctttgtgcttctgccttacagatctgacttgcacatctttttactctggcttgcaaatcttctcccacttttcaggaaatctcaccttcaaagtctagggcttgatcttaccccaaagcatctccttctcctcaataccattctttaagtctgagttattgagtctgggatgatatccagggtc

SEQ ID NO: 508553 - DNA, 616 bp, Homo sapiens
tgaggctgggtgtggtggcatgcacctgtaatcccagctactagggaagctgaggcatgagcattgcttgaactggggaggtggaggttgtggtgagccaagatcatgccactatactgcagcctcctgggtaacagagtgagactctgtctcgaaaaaaaaaaacattatactaagtaaaagaacaagtcataaaaggccacattttatatgwttctgtttatgtgaaatgtccagaagaggcaattttacagacacagaaagtaaattagtggtttccaggaactgaggagaaaaggtaatggggaatcactgcctagcgggtatgggattttccgtaggggagatgaaaatgtggtgaatattgtacaatactgtgactgcactgtcattcatggtaaattttacattatatgtattttaccactctaaaaaacgtgtcatcaattatttcccaaaagactgctaattccttaaaattttctctcacctcccccaaaataaacttgttttaacagcaagactattttttttcaagtataagcttatgcagaaactctatctctgaaacagataaaagtggaagtcttggagtagagagatccctgtgtccctt

SEQ ID NO: 508554 - DNA, 499 bp, Homo sapiens
aagtgactcaaacaattcagaaaagtataatgaagaaaccatttaaaatcctctaaaatccacttgcccagagagtactattaacttgatggagacaccctgctagacagctttctayccccaaacatagggaataaatgggctccttcagttgaaaaccacagagatccactgaagctgacttatgtaccagatactttgtttcgaggacttaggggtgtctcctggaactgcacaccagtcagcttcatgaagaactggaagcagtgcagaaagccgggaatacaggggcctcttttttctctctggggcttaccatctacttctccctgcctcctctagtcttctcttctttggctgactgaccttggtgtgcacactccatgtggctgccctcccttgctttgtattactccccaactccagcatctaacaagatgtgctgatggccttgagtcacagatcccattttctgggagagaaaatgggatccagcaca

SEQ ID NO: 508555 - DNA, 499 bp, Homo sapiens
aagtgactcaaacaattcagaaaagtataatgaagaaaccatttaaaatcctctaaaatccacttgcccagagagtactattaacttgatggagacaccctgctagacagctttctacccccaaacatagggaataaatgggctccttcagttgaaaaccacagagatccactgaagctgacttatgtaccagatactttgtttcgaggacttaggggtgtctcctggaactgcacaccagtcagcttcatgaagaactggaagcagtgcagaaagccrggaatacaggggcctcttttttctctctggggcttaccatctacttctccctgcctcctctagtcttctcttctttggctgactgaccttggtgtgcacactccatgtggctgccctcccttgctttgtattactccccaactccagcatctaacaagatgtgctgatggccttgagtcacagatcccattttctgggagagaaaatgggatccagcaca

SEQ ID NO: 508556 - DNA, 499 bp, Homo sapiens
aagtgactcaaacaattcagaaaagtataatgaagaaaccatttaaaatcctctaaaatccacttgcccagagagtactattaacttgatggagacaccctgctagacagctttctacccccaaacatagggaataaatgggctccttcagttgaaaaccacagagatccactgaagctgacttatgtaccagatactttgtttcgaggacttaggggtgtctcctggaactgcacaccagtcagcttcatgaagaactggaagcagtgcagaaagccgggaatacaggggcctcttttttctctctggggcttaccatctamttctccctgcctcctctagtcttctcttctttggctgactgaccttggtgtgcacactccatgtggctgccctcccttgctttgtattactccccaactccagcatctaacaagatgtgctgatggccttgagtcacagatcccattttctgggagagaaaatgggatccagcaca

SEQ ID NO: 508557 - DNA, 538 bp, Homo sapiens
cggtcctgggcagcccccactgccccactttactcctttacaggataaaggcatgctgttgttaataacaagtagaactaggagaaagatctctattaatcccaccaggctgagacaactgctattaattctggttatgtccttcctgactttttgtgtacacaaaaaacacagatgtacattaacacgaaatatcctgcgatgatactgtttgtttctaaattaacgaactttagttgttagagcagttttcagttaacagaaatttgggaagctagtgcagcgttcccatataacctcycaccgctccctcagtttcccctgttattaatatcttgcatttgtcacaattgataaaccagtattgatatattagtattcactacatttcatggcttatattaaggctcactctttgtggcgtgaagttctttgcgttttgacaaatgcataatgtcgcatatccaccattacagtatcatacagaacaattggcccaaaaaatcccctgtgatccccttgttcacctctcaccctc

SEQ ID NO: 508558 - DNA, 575 bp, Homo sapiens
tgttctattcttggtacacgacatgccattgcaaaagcagtttcaggctcatagaattttagaaatgggcctagtttcccagccggatgaggtgagtgggtgatgggggaagaatcagccttgattgaatgcctgttgagtgccagccactgttggcatttatcagagtttatttaatcttctcatcaactactattgttaccctcagttgccaagtgaagggagcatgcgggaaggttaagtgacttgcccaagcccacacaaccggtaggagccccaattccaggccctagttccaaggctacattcttccaggcggcctccaactgggttggttaagggttgaaaggacagtgggacaataactgaggcccgtattgcccagagcgtccccatcccccgtccggagctggaagaggccatagaccgctgcctccacatcttttcctctccttcgggttcggtgactcacgacmcttcttcctctctcccgggatatgacctcaaatttcacccctgcgaaatttgagtacacgtgagtcagtcagtcggcctggacccataagagccccagc

SEQ ID NO: 508559 - DNA, 606 bp, Homo sapiens
gttttgccattaaatgcaattagaatcagctttatgatttctcaaatttaatctcctcctaaaccattccatacccaagacaaaaaagaccttgacctagggcaggtccagccccacaatgaggtgggccacagggctcccatctccctgaattctgaactaagtaatgctatgagtaacctagttgaataatactgtgggagtaaatctgtttccatcctctggcctaagatctcagcctccatgtatggtattgttcccatgggaaaatgcattccaaattccaaacgactgatttgcatgtgaactttcactctggaagttagtgactgccagaatatattctcctgtggctcagtctaccaatagcttctcacgagtcctgttctctgtccacctcctcacytcccacctcccctatatgtaccctcaatattgacatggtacctctattagtttgttctcacgctgttaataaagacacacctgagactgggtaatttataaaggaaagaggtttaattgactcacagttccagatggctggggacacctcacaatcatggcggaagagcaagggatgtcttacatggcagcaggcaagag

SEQ ID NO: 508560 - DNA, 618 bp, Homo sapiens
ctttttgtggctctgaatcaagttggagaaatcatcctggatctcaggagccacttcatgcttttcagggcctaacaagacatctcactttcccttagcaaacacaggcagaagcaaacctgtattgggctgggcctatttccgtaacatgcatgcagccatgtgtatggctaccaagcagcactgtttaaagacaagaaccagaaaactgtggatcagaaccaaatgtgtacatagatatgtgtacacacccctccaaaactagtgacaaatcttttttgtttttttttttctgagacagagtctcactctgtcatccaagctggaatgcagtggtgcartctcactgcagcctctgcttcctgggttcaaacgattatcctgcctcagcctcctgagtagctgggattacaggtgtgtgccaccatgcccagctaattttgtatttttagtagagatggggtttcaccatgatggccaggctggtctggaactgctgacctcaggtgatcctcctgcctcggcctcccaaagtgctgggattacaggcttgagccactgtgcccagcctattttttaaattattattaatttttaattgacaaaatttgtatatat

SEQ ID NO: 508561 - DNA, 546 bp, Homo sapiens
gcttcaactcgtggcataaagcaggagagcagctatgtgcaaagagattacatggtgaggaaggaagcaagaaagagaaaccaacaagagtgagaactcactcaaccccacaggagggcattaacctgtttatgagggatctgccccagtgacccagacttctttcattaggccccatctcccaaccctgatacattggggatcaattttttttttttttttttgagacggagtttcactcttgttggaacaagagtgcartggctggagtgcaatggcatgatttcagatcaccacaacctctgcctcctgagttcaagcaaattctcctgccttagcctactgcgtagctggaattacaggcaagcaacaccatgcctggctaatttttttgtatttttagtagagacagggtttctccatgtaggtcaggctgatctcgaactcccgacctcaggtgatccgcccgcctcagccacccaaagtgctgggattacaggcgtgagccaccatgcccagccgaggatcaaattttaacatgagttt

SEQ ID NO: 508562 - DNA, 635 bp, Homo sapiens
ctgtgatggaaggaggactccatgccctgcagcagtcacagcctttttgaggagacaaagcatttgaagagaatgtgcagcaataaacatctatcttatctggggtcagtgagggtttctggtcccttctgacaaagaaattggcagcagagattccataaaaatttcaataagttttagcattctgaaacacttcaattagtttgatgttaacgtttaagcaccttgatgaaataaatttatctcttccaaatcctagaaagaatctccctttcggcaaagattctgcagatgggttttgatgccatttttccattttgtagttagatctctatcatttatcacactgtagaccaaatggtcgytttagtgccattaaaaactgatttgcaatttgctgttaaattaagatgtttcattttcctactgtatatgattttccttttcacagatgagtgaggatacaaggggcaatcagaccctagtgcagacaagaaaataccatcaaaacccctagagatcccaaatctaagagatttccttttattcattatcaaacctaatcaatctcttatcaaaagaggctcagaaatcatgtatagtaaatatgaagaggatatctgtagaaccccttg

SEQ ID NO: 508563 - DNA, 592 bp, Homo sapiens
gtcaagaggaaatcctgtctgcagacctctcagagaaacctgggtctgcttgcagaacaaaggctccttctgtgacatcaagcagcaggtttaagagctccctggcttctggctttggccctctttcaaaaccacaagtacatccaagggcagccaagacaacaacaaagccaagagatacagtcaccaaaagagaagaccaactcccccttccaggcctgccttctgcctggctctcagcaggcaaggctccattctccccaaagtaggtgtccaaagcactgaatacaagcagggtactgacccctgtgcaagaagatagctcagaggatgsccacagctggtgccaacattcttcggaggctatggaacacactgtctggggaaggccctataatactttctaggttctaatcctagctcagttatccattaaggtatgatcttaggtgcctcaacatccctgaacccatttcctcaactctaaatgatgacactgatgatggtgataacaatgttcataatgaaatctgctatgtctctcacacagggttacaatgttcaaacaaggtagtttatgaacatatccttt

SEQ ID NO: 508564 - DNA, 592 bp, Homo sapiens
gtcaagaggaaatcctgtctgcagacctctcagagaaacctgggtctgcttgcagaacaaaggctccttctgtgacatcaagcagcaggtttaagagctccctggcttctggctttggccctctttcaaaaccacaagtacatccaagggcagccaagacaacaacaaagccaagagatacagtcaccaaaagagaagaccaactcccccttccaggcctgccttctgcctggctctcagcaggcaaggctccattctccccaaagtaggtgtccaaagcactgaatacaagcagggtactgacccctgtgcaagaagatagctcagaggatgcccacagctkgtgccaacattcttcggaggctatggaacacactgtctggggaaggccctataatactttctaggttctaatcctagctcagttatccattaaggtatgatcttaggtgcctcaacatccctgaacccatttcctcaactctaaatgatgacactgatgatggtgataacaatgttcataatgaaatctgctatgtctctcacacagggttacaatgttcaaacaaggtagtttatgaacatatccttt

SEQ ID NO: 508565 - DNA, 560 bp, Homo sapiens
tgagcacttgctatgtgctaagcattattgtaagtgctttatgaatattagctcatttaatccttacaacaaccttatgaagtagtcactttcatcatctttgttttactgaaaagacaacccgggcacagagagtaatttccccatggtcagagttaacaagtgtcacagtgaggcatcacaaacagtctgacctgagtccatgatcttgatattgaactgtaatggctttgtggaggtatcaggcattaataataatataggctgttattattcagcatgttttccccaagttgcaagccagtataaaagtctgggccctgctgccgttgctgtcattgggatgttggggcctaaccacyaacccctaccattaactgatgttagttacaacttccttcaagtgccacattctaaattacatttctggctccattgagcatatttcctgaagccacctaacagatttaggcactggtcacttgatgtcagccgagcaaggactctagctcagagacaagcaggcaaaaagccacgctttcaccctggccatctgcagc

SEQ ID NO: 508566 - DNA, 630 bp, Homo sapiens
aataattggaagataacttataacaaaatattgggttttaaaatttactattgaatgatacaattttaaagacagatacatacacacacatatatttatcagtgtcaataaaatggtaattcattttattttatacaaaatatgaattccattcgattacttattaacattctgttactttcaagcaaatacatggtgattaaaaacatagacttgcctgctgttgctctcagttattagcctacttagtctctgcatgcctcaggttccacatagttacaagggaggaaatgacagtacctatttcaggtgttgattgaatgaatttatatatttatatataatattttatatttaataaaataaatataaataaaataaaayatgtaataaaaatatatatttataaatatttaaaatggttggagaagtggttggcacacagcagatgttacatcacttttgatctttatattttgtaattttttctgaacataaagagtctatatttttacaaacaatgaatacaaaagtgataaaaatgatagcatactcatattaacaccaagaaaataaatggatgtagaaataacttgttttattacactttgctttattgcactttgtaga

SEQ ID NO: 508567 - DNA, 597 bp, Homo sapiens
tgagtcccttggaatctcacttattatttgtaaaatgagtttaaagtactagagaaattatttcaagttacctttcctcaatcatttctatgattactaagtagagagaaagagaaaattctggaagttagggctctaggatttctcctttgtgagaactgcagcaggtgtacatttacctgttacatrtatttataggtcttggaggtaagattcctttgaaagatagttctgactataaaacgtgcataaaaattcatggattagtacttaatgaaatcattttactatcctaaataggattccagactgaaaagcataagactgatattattacatcattttattctatgttggtttaattgcatgaaattacagtttatgtaggtcaaaggtggtagacttatatgattctagtgtacaatagcaatacttttacaatagttaagttttaccctcccaacttcaaaagacgtcagtccttattctgctttaatataaataaatggataaaataaatgtttgaaagtttttatcaactaaggcttatttctatcatgtttgtgttgaccttagtaaatgataagaaagaaatgt

SEQ ID NO: 508568 - DNA, 564 bp, Homo sapiens
ctggcacataattgcaaactttgattaccacatttactgattgagtccctcttctaatgcttagtgtttatatttctttggcttgtttctttcccctgacatcctcaactacactcttattgatgatagtgatagtatatcaatttctgtttcccttattacctgatcaaaataaatgacatatgttataagctaaatttatttagtgttaagtactccaggatttagacagaataacgtaatatatgaataatataatatttatctatcttcagtaatttcttaaaaatttcagtgttatctttccaggcatttttgacaatggcagtttactaatttttcttttgattgtcttagtgtagaacacttggtcacaatgatagggtctggggacttgatgccatgtttggtttttctatgaacatattctcttaaatcrgtgtgtaattttatgacacatagcataggatgactatgtgtgtgtgttgaagagggtggaatatggagatttgtgaggagggcagcgtttgtctccagggctcctatgttttcctggcagggaac

SEQ ID NO: 508569 - DNA, 624 bp, Homo sapiens
cagcaacaaaaacctattagtctatgtaatgtgaatggcataattataaagcataacgtaatgactgtgtgaagatctgtgcaaccaatgcttagagaataaccattatgttaaaatactcataggacatttatayattccagagaaagaagaggggagtcatgtgctagtacctttaaaccccaagaatcatcagctatttggaaactacctgaaagacagagaaaaataacaagattagaaataaaataaatgattccgaataaaatattcaaggaacagcaaagctttttaaacaatcaactttttcttatttgcattgagagacagttgagaagatagcaccactacacaaaatgttgatgatttgaaaataaaataatcagttaacaacaatgaagactatattcaaaagttgactcaattaacagaggagtctgtgcaaacagattaaaaataagactattaggacaataagtaagaagagacaattaatagaaaaatattgtacataatcagggaaaatacagtagtacaataaaataagataggaaaatataaaaaggtaagaaagtggttcaagacaaaataaaataagtatatgttgctcaggtcactattaat

SEQ ID NO: 508570 - DNA, 627 bp, Homo sapiens
taatttgcattttacttagccagtgatgtgctggagctagctctaactgagtcataaagataactttgacattttttcccattttcctatttggtgacgtgaaagtgggaacttgaagttggtcatgctaaggaaattaacaccacagaaatcagcaaatagtacataactgagcttttggcccactctccagtgaactaattgctaaatattcactgtcacatcattgcttatagagcttcataaactgatcctaccacactcacatctaaaggcgaagataatttaggaayctggtatgtattgtaatttctttactctttgtgacttgggaaacaatgtaagatttcttacaattctgcaggctcttctttgtttttgtcacattgctttgctgactttatctcacaaaccacagttcctttcatttcagtgtttgtactattctttccccagtccaagaagtttaacatttaaacttacacaggtctacatgtacatactctttcctcactatttatcaacacctgttaaaagacatgacaaatgctttgaagataaaaataataagtcatatctttttttctgtactctaaatcacactagatattttggtatatatgtgat

SEQ ID NO: 508571 - DNA, 595 bp, Homo sapiens
aggtcagttaggcaataagtgatcaactcttcaattttaactaagactgtctgactcaaaaaagcatgcttttttcaattgttattttttctgcaattaccaagtaagagtaaaggagttaaatcctgtagtctaattcacttcattaaattctgtaaataatttttagccttattacataacaaaaagatatgacatgatctcatatcatacacaaattatagtagacctgagaagaaataagggatttataggtagtcagaktttctgcattacagtttggactacaaataattcctatctccctatctacctcccacacacattctattctatagtacaaaatccagtccttcacttgcccaatgaggaagatactatcacaaattaagaatatctatctatctacctatctatctagtcatccatccatctgtcctagatttcttttctcactcagatgtttattaatatctaattcattcctgtcttgctgctttagttataaataagtatacccaactggttgggaaaataatactctgaaataagctacaagtacctgaaatcttggcttttaaaaattattatttat

SEQ ID NO: 508572 - DNA, 632 bp, Homo sapiens
cacaaagaacataataactgaagagaacagacaaaaaaatgatatcaaatagtgatcctctaatctaccccaaaagaacaccaaaggaaacaaaacaaaaaatattcaaatttaataatggaatacaattttaattaaaagaaaacacaaacttttaataaaacatttgcctgtacttcaggcaaaattaaagacatttggtgatggtaattagtattattgatcccaattctccatttctccttgtgttcacagcctttgttcatgtaattttgtagttttyccactggaagtggaatttacttccctcccttctgatgatgggcctaactgtgtacttgttttaaccattaataggtatgaggaaaaggcagcagtgtgtaatcactaagtccaagccttaagaggcatccatattccattttgcttttcttaagcttcttccatccctatgagattttcagtgcactagaatccatgcctctcatttacatctaatacctggtttattcaatggttcagatagcataataaacatgtggggcagatgtggacccaaactgcagcttgaaatattgtccagctaagcccagccttttcaaccagacccctgattaacctaccagcacatg

SEQ ID NO: 508573 - DNA, 578 bp, Homo sapiens
tgtgtcctcctaattcacaatgccttcagtcatgcagaagatattggtatctccaatagaacacttcataaatagttgtaccttmcctggtaaggttctaaaaataattaaaaagagtaacttagggtgtaggataaaatattactattattatttacagcaatggacatggagaatgtgtttactgtggaatccaaataggtctctcaactgagctcaacaattagggaattaaatccacccagttacttcgactgagtcacatttgtagcatgcatttgtagcttggagaagtagaggataattcgtgatttctactgctgtgtagaccctaaagaaagagaacagcccagaggacagcccgggatatgtatgtccagtttattcttcccacatttctcatcagctaagtcactatccttctcctagagaggatagactaatggaaaaagaaatgacaagaatcttatagctactggagttccacgcatgggaagaaagtatcatgattgaaaatataactccttctaataaaattaaataagttcatcccacaagaactgctcttgataagacat

SEQ ID NO: 508574 - DNA, 578 bp, Homo sapiens
tgtgtcctcctaattcacaatgccttcagtcatgcagaagatattggtatctccaatagaacacttcataaatagttgtaccttccctggtaaggttctaaaaataattaaaaagagtaacttagggtgtaggataaaatattactattattatttacagcaatggacatggagaatgtgtttactgtggaatccaaataggtctctcaactgagctcaacaattagggaattaaatccacccagttacttcgactgagtcacatttgtagcatgcatttgtagcttggagaagtagaggataattcgtgatttctactgctgtgtagaccctaaagaaagagaacagcccagaggacagcccgggatatgtatgtccagtttattcttcccacatttctcatcagctaagtcactatccttctcctagagaggatagactaatggaaaaagaaatgacaagaatcttatagctactggagttccaygcatgggaagaaagtatcatgattgaaaatataactccttctaataaaattaaataagttcatcccacaagaactgctcttgataagacat

SEQ ID NO: 508575 - DNA, 542 bp, Homo sapiens
gtgcccacccagattaagggtgggtctgcctttcccgatcccctgactcaaatgttaatctcctttggcaacaccctcacagacatacccaggatcaataatttgtatccttcaatccaataagttgacactcagtattaaccatcacagatacttacatttaactactccccaaaccttagagcttgttcatcagaaatgtttgttactttagtttcctcttttttcctcacaactattgaaattgttcataagctagaatttaatttgcagaattatatgccagaaaaagtatagaagaaaaagtacaattaaaakaaactgtgagataaattaatatgctttgatgacataaaatagtgtgagggaactaacaaaagaataaagataatttttggaggtaaatgaatacttccagtgacatttgaataatggaagcaaataaaaaagataaaacaaaattgagaatgagttaaactttatttgataagataaagaaatacacattagaagagacatcaaaagaagaaagaatggatctg

SEQ ID NO: 508576 - DNA, 559 bp, Homo sapiens
gcacagagggtgatgtaaaaaccacaatgcaatacagttaaatattgccttactccattcccaatttggtattaccgtgagttagctcaaaatctcccatgtacgtaatgaagaacacagcatcagcctcaccataatatactgagttggaatattctcacactcttgcttagcacatgagaagacartacagaaaggtcagatacttttccaaggtcacgcaaacaaccactggttttatagcatttggtaatgtgggttctaagcctctgcacacaaaattgggcaaattctcaaaaagacaaaggcaggctgtgcccaatctattccatggatgctagcaaaggccttgacagggttatttggaagacattttagggtcctctgcgtcttgctcagcccttgacccacgctcagcttgctttcttccatcatagtacaatagcacagagctggcccaggcttggccccagcaaggctctggccagaacaaggaataaatctagatttgaagagtgatcacttgcactctaatgttaacactcagtgaattaaaaaa

SEQ ID NO: 508577 - DNA, 343 bp, Homo sapiens
cctcccagtccctcaagggccggcctcagccttgttacaggacggttctctcgggcaggagctggagcccacagccctctgaatcagatgccactgggccagatttgtcactgatgaagactagaatggcctcctctcctctctgaagcaagagtttggtcagcaaatcaatggtgcaacaagagttggggtggagagctgcraagggggcaccccacttaacctactcgagaggggcccatccataatcagcaatctccatctgcatgcccacaattaatgtgctcctgcccttcagaaatgttctcttttcattaagggtgtccccatggggccgcagctt

SEQ ID NO: 508578 - DNA, 343 bp, Homo sapiens
cctcccagtccctcaagggccggcctcagccttgttacaggacggttctctcgggcaggagctggagcccacagccctctgaatcagatgccactgggccagatttgtcactgatgaagactagaatggcctcctctcctctctgaagcaagagtttggtcagcaaatcaatggtgcaacaagagttggggtggagagctgcaragggggcaccccacttaacctactcgagaggggcccatccataatcagcaatctccatctgcatgcccacaattaatgtgctcctgcccttcagaaatgttctcttttcattaagggtgtccccatggggccgcagctt

SEQ ID NO: 508579 - DNA, 628 bp, Homo sapiens
agacggagtctcgctctgctgctcargctggagtgcagtggcgcaatctcggttcactgcaagctccgcctcccaggttcccgccattctcctgcctcagcctccccagtagctgggactacaggcgcccgccaccatgcccagctaatttttttgtattttttagtagagacggggtttcaccatgttagccaggatggtctcaatcgcctgacctcgtgatcacccaccttggcctcccaaagtgctggattacaggcgtgagccaccactcccggcccgtcttgcttttgtgatattggcagcccaggacctgtgacacctgaatccagacattcagcagaagtagcagagtggcagtgttctcttctctcactcctttttcatggagtagctagaacccttccataaacagacccctccatcatctactgtttgcttacccactggtagaattcaaaaacgaaagctgggtaattaacatttctccctttatttaccagtcagaataatgagttactgcctccactttcattactccattttaaaagcttccatcatcaggaaatggttcaagcaatacatttattgagtttcatgcttaaataggctcaactatttagaaaag

SEQ ID NO: 508580 - DNA, 652 bp, Homo sapiens
atggtatgaatagtataggtcatagtaaaggtgtattatcctaatttttaatacttaacatttaaattgtgattaaatctttaacactgttgaaatgatactgtagtatagtaatagtttaaaaaagatactgatttagtgagcctgaggtttcatactcattttggtaagtatggaaatgctgacaatttttttttgtagcctatgtagtaaactattgctaccataacattttagaaaaggaatatttattatattttcacctaagccctttctgatgtatcttactctttgtagtatctctgtgccttttatatcagatgtgattttattgcatttaatctcatttgcacacggtttacatttcttaatggtttgacttggtttctagagtcagcattaagtttaggttcatgatgcagtaatgtagtcctaaaaataaatattgattttattcttcttttgacaaatgacagaaaagcggagagatagttctataaagaatcataattttaggctttggacttacatacaaaaggaagaaatgggaaatatattcccctttaatttcttatcaatggtgttttcaaattcagcttatatctgtttataatraaaattatctgatatttttatgtgttatatcatttca

SEQ ID NO: 508581 - DNA, 564 bp, Homo sapiens
ctaagctgcaggctacagccctggggcactgggaccctgtttgtagctcactgctgtggtcacttggggttggattttgggtgcagtgtaaaacctgaagggcttccaaagtgccagaatgmattcagatggagcaaagcactcaaactggcaaacagaggctgtactgtgtacaagcttctatggggcagccagagaggggccatggggttgagggttctggtgggccggtattcctgcagaacatatgtgtcacagttccatttgaaagtaggttctcctctctccccattggttagctaaggccagaacctattagaaatagatgtgcatggtatgtgggcacttatggttgggctccaccagaggtgacctatgcacaaaggtccctggctttttgtctgcagcttcatctctgtgtaatctctgggagacccctctgccagtccacatgtccctgaaggtatggagccccatctagccaggattccagatgtctacagtgagagggagctatctactagtcctttcactcaggtcttccctagaaactgttcagggcag

SEQ ID NO: 508582 - DNA, 471 bp, Homo sapiens
agtgtaaaacctgaagggcttccaaagtgccagaatgcattcagatggagcaaagcactcaaactggcaaacagasgctgtactgtgtacaagcttctatggggcagccagagaggggccatggggttgagggttctggtgggccggtattcctgcagaacatatgtgtcacagttccatttgaaagtaggttctcctctctccccattggttagctaaggccagaacctattagaaatagatgtgcatggtatgtgggcacttatggttgggctccaccagaggtgacctatgcacaaaggtccctggctttttgtctgcagcttcatctctgtgtaatctctgggagacccctctgccagtccacatgtccctgaaggtatggagccccatctagccaggattccagatgtctacagtgagagggagctatctactagtcctttcactcaggtcttccctagaaactgt

SEQ ID NO: 508583 - DNA, 471 bp, Homo sapiens
agtgtaaaacctgaagggcttccaaagtgccagaatgcattcagatggagcaaagcactcaaactggcaaacagaggctgtactgtgtacaagcttctatggggcagccagagaggggccatggggttgagggttctggtgggccggtattcctgcagaacatatgtgtcacagttccatttgaaagtaggtyctcctctctccccattggttagctaaggccagaacctattagaaatagatgtgcatggtatgtgggcacttatggttgggctccaccagaggtgacctatgcacaaaggtccctggctttttgtctgcagcttcatctctgtgtaatctctgggagacccctctgccagtccacatgtccctgaaggtatggagccccatctagccaggattccagatgtctacagtgagagggagctatctactagtcctttcactcaggtcttccctagaaactgt

SEQ ID NO: 508584 - DNA, 471 bp, Homo sapiens
agtgtaaaacctgaagggcttccaaagtgccagaatgcattcagatggagcaaagcactcaaactggcaaacagaggctgtactgtgtacaagcttctatggggcagccagagaggggccatggggttgagggttctggtgggccggtattcctgcagaacatatgtgtcacagttccatttgaaagtaggttctcctstctccccattggttagctaaggccagaacctattagaaatagatgtgcatggtatgtgggcacttatggttgggctccaccagaggtgacctatgcacaaaggtccctggctttttgtctgcagcttcatctctgtgtaatctctgggagacccctctgccagtccacatgtccctgaaggtatggagccccatctagccaggattccagatgtctacagtgagagggagctatctactagtcctttcactcaggtcttccctagaaactgt

SEQ ID NO: 508585 - DNA, 603 bp, Homo sapiens
accctgctttactcacctgttgaaccatctgccagcctaaattttcrtggccctgagatggacaaagacaccattgcgttatttagtccacctatttacactgtaatgacatctgctttttaccattaatctttaagcctcttcctatttctcaaagattaaagtcacgtgaactgaacggtaccacagtttttaacttctctttaaaaaatattagatgcaagtgtttgtctttttcaggccaaaatcatttagagctctttctgcagacattacacataacacacacgcagacaggcaggagaaaacccagttcctgggtggggttttataagagccaggccaaggaaaacatgcagatatcaaacctgaaaaagagtcagtccctaaggcaggataagcccctactttgtgcaacaaaatgcacagtgcaggtgagtgtggctgtttcctgccaattaagtgaagcccaagctccctggttcatggataaaagccttgttagtatccatggcatagatgaggtctagggactcccagactactgaaagcaggggagatagggtgtatgtgggtaagtgggtaagagtgaatgttctcacc

SEQ ID NO: 508586 - DNA, 558 bp, Homo sapiens
ttgaacccaaccgtctgactcaagagcccccatatttaattactacagtgtactgtcaccctgcactagaatttcgatgctctagactctgacatttcctagttctgtgtcctccggaaagtcactgatcatgtctaagcttcagttcctcttctgtaaaaaggggaatttctgcttcacaaggtcattgtcaggatcaagtcagggaatgaaagtgaaagctatatataaaccatggaatgttgtagaagcatccaggattacttttattatttcctgattttttattgcttattacctttactgctttgtcttytctgaaagccccttacattttggcacaattctccctggctcaccagaactcaggcagtaacagtaaaacttctattatttcataattgctgagcacttacactatgcacctatgcactgtgttaaaaactctatgtcattgtatgaattaattctaagaaaaatcatcatatatacttattcttaccctgattttaaaatgagactgagactcagagaggttaagtagcccaaggacagcca

SEQ ID NO: 508587 - DNA, 574 bp, Homo sapiens
catgaagggagagcccttatgtataagattagtgcccttataaaagaaatccagaaccatctcacctattccaccatgtgagggcacaatgagaaaatggccatctatgaaccaggaaagaggccctcaccaggcagtgaatctgccagtgccttgatcttgaactttccatcctccagaattgtgagaaataawtttctcttgtttataagctactccacctatggctgtcttatatttattctgtttatttgatgtctcctccaaatgtaagcttctgtgctttgcctttgtgtgacacagtattggccaagaccctggagaatggaaaacaatttatctttttggttcactttgtgttgcctatgctaagatgtgttccaacaaagcaggtgtattgatgggaaaggggagtttcaaactggctaattgtgacaaatttaataaagggacaatttacaaacgtgggcagtgtgaaaggtcaagaagcaggactacatcaatggctacgcattactattctcaagcctgaaactacaaagagggaacaaatcccagaactcagaaatagcag

SEQ ID NO: 508588 - DNA, 574 bp, Homo sapiens
tgaaagaacacgataacctagctgtggtaaagggaggagtaacactcaagtttctaaaacaatgtcaagaaaactgaaataaggttgaaatatgctgatatttttaactttcgatcccaccctagcagacagaagagagccacaggcattagtgcagggagggaggagaggagaggggttaagctagggttgagagtccctcaggaaggcattcaaatcccacttacacagatgagaaaaccaaggctcagaaaggctttctgaaaatccaacactgcatgttctcattcataagggggagctaaataatgtatacaggggagctaaataagggagagctaaataatgtggatgtagagtgtggaacaatcacactagagactaagaagggttggaggttggaaggggttgagggatgagaaattacttaatgggtacaatgtacattatgcaartgatggtcactctaaaagcccagacttcccctaaagcaatagatccatgaagccaaactgcactttaccccttaattttatgcaagtgtttaaaaattaaaatgaaaaaaatacaaaca

SEQ ID NO: 508589 - DNA, 524 bp, Homo sapiens
attacacttcatcacctgctcctctcttgcaaatcatcttacttttaaatcacatacatgttaatttgctcagaagttggtttatccacatttctgtttatatgtttatttacatatatggggagagtcaccgctgagctccccaagagcagtggcatcaccttcaaggtttaycactctgttcccaaccccttgcaaatcctcaataaatattttttgaatgaatggatggatgagcagaggaactgggtaacaaattacatacagggcttaaagcttagtagtgaagctgccaagtatgaaaggttcttttttttggagacacacaaattaaaaacagaaaggtacgcatttgaaaaaaaaatcaaaagaagaaaaagacaaaaatgagagcagttgaatcttataataaaatgtttacttcagaccagggtgctgtagcggcacagagagtcagtattttaggctttgcaagccgtaaggacactgctgtaactactcaactctgctgttataaacataaa

SEQ ID NO: 508590 - DNA, 524 bp, Homo sapiens
attacacttcatcacctgctcctctcttgcaaatcatcttacttttaaatcacatacatgttaatttgctcagaagttggtttatccacatttctgtttatatgtttatttacatatatggggagagtcaccgctgagctccccaagagcagtggcatcaccttcaaggtttaccactctgttcccaaccccttgcaaatcctcaataaatattttttgaatgaatggatggatgagcagaggaactgggtaacaaattacatacagggcttaaagcttagtagtgaagctgccaagtatgaaaggttcttttttttggagacacacaaatyaaaaacagaaaggtacgcatttgaaaaaaaaatcaaaagaagaaaaagacaaaaatgagagcagttgaatcttataataaaatgtttacttcagaccagggtgctgtagcggcacagagagtcagtattttaggctttgcaagccgtaaggacactgctgtaactactcaactctgctgttataaacataaa

SEQ ID NO: 508591 - DNA, 566 bp, Homo sapiens
tggtaaagggaatctagcctggtmcccccagtgtctactacagtacaggttctcaaacattaatgtgcatgagaatctcctggagggcttatcaagacatcgtttgctgggattcacctccagagtttctagttggtctgggatgagacccaagaattcatacttctaaattcccaggtgatgctaatggtgccgatcctgggatcacaggtaaacttcagagaccatgtatgtccacaagagaaagatcgtccactcttttcaggagctgacgtgattgaagactatgcttcttaagagactctaccactatacttgtacactgcacttttaattgtacttctggctaaaataaaaagaaattaaaatcatagttttaagaatgctttcatatacatgaagggatctcaatccaaaaacaatgttaaagccattttcttttggcctttcactaaaggcatgttgcaaagaatcaaggcactttgggaaccactgtattatgataataattcctgagagcagaaagctaagggcttagatgacccatagtttttattatggcttat

SEQ ID NO: 508592 - DNA, 601 bp, Homo sapiens
ctccagaaatctccctgagatcaggcgtgaagttaggctaacctacttacttaacccattttcctgcctcaccctactgaattcacatcccttgcccatgtttccacttaagagaaccccactcttaccctcatctcaataaatcacctgcatgagaatcctcacctccagctccaggatcaaagaaacytaaaccaaggaagctctatcccaagggtctttgcatttttatattgaacctgttcctttctctgtctctccatatgcagtcagctctactcgtagaatctagatcagaaagacaaacctggctttgccttcgctaagttactttttcatctgctaccactcctgtctcatgaagggaagagaaagaaaacttcaagctgcatcctctaccaaccaccccaaagaaaagaaataaagagatagagacttctcagccattgcccagagataatttcagagcttacagagaaaaccttaaggaaaatcgtttttgaagccctggacatttgtccatccctttagtaggggtcattctcatgaatgtggttttaaaaggttttttttggattccatcatctctccatctattatc

SEQ ID NO: 508593 - DNA, 601 bp, Homo sapiens
ctccagaaatctccctgagatcaggcgtgaagttaggctaacctacttacttaacccattttcctgcctcaccctactgaattcacatcccttgcccatgtttccacttaagagaaccccactcttaccctcatctcaataaatcacctgcatgagaatcctcacctccagctccaggatcaaagaaacttaaaccaaggaagctctatcccaagggtctttgcatttttatattgaacctgttcctttctctgtctctccatatgcagtcagctctactcgtagaatctagatcagaaagacaaacctggctttgccttcgctaagttactttttcatctgctaccactcctgtctcatgaagggaagagaaagaaaacttcaagctgcatcctctaccaaccaccccaaagaaaagaaataaagagatagagacttctcagccattgcccagagataatttcagagcttacagagaaaaccttaaggaaaatcgtttttgaagccctggacatttgtccatccctttagtaggggtcattctcatraatgtggttttaaaaggttttttttggattccatcatctctccatctattatc

SEQ ID NO: 508594 - DNA, 624 bp, Homo sapiens
tcatttgaaatgctagcctttcaattagtgctatgcaccaggaagtgacagattctggaggaagcattgcttctctagatgatcataatgagagtagggtgtcacaacagtgtggtggaaccagagaagattcccatgaacaagtccatgaaagtctctttgaacttgtttccccacccccggtggacattgttggtgctctatttggatgtcctcatatccctcttattgggactgtgcacccgttcccccagtttccacttgctttgctactaatggctgccttctgctcccatggacactgcacctgcacagagcctgactctcacaggcacccacagctagtgactgactggtgcagaagtacaaaagcttggctcctctgctttaaggctgggcaaactctggggtgtaatttatgctccagagcctccagcagaagcaagctgagtttgsggattcacttgaaatcacactttcgcttggcttcctccccctctttttcctgcttcccacaatcccttattggcctttccaggggatccttccttaataaatcatttgccaggaaggtttggctcagggtccattttggggagaagatgatatcagatgcatcaggca

SEQ ID NO: 508595 - DNA, 624 bp, Homo sapiens
tcatttgaaatgctagcctttcaattagtgctatgcaccaggaagtgacagattctggaggaagcattgcttctctagatgatcataatgagagtagggtgtcacaacagtgtggtggaaccagagaagattcccatgaacaagtccatgaaagtctctttgaacttgtttccccacccccggtggacattgttggtgctctatttggatgtcctcatatccctcttattgggactgtgcacccgttcccccagtttccacttgctttgctactaatggctgccttctgctcccatggacactgcacctgcacagagcctgactctcacaggcacccacagctagtgactgactggtgcagaagtacaaaagcttggctcctctgctttaaggctgggcaaactctggggtgtaatttatgctccagagcctccagcagaagcaagctgagtttggggattcacttgaaatcacactttcrcttggcttcctccccctctttttcctgcttcccacaatcccttattggcctttccaggggatccttccttaataaatcatttgccaggaaggtttggctcagggtccattttggggagaagatgatatcagatgcatcaggca

SEQ ID NO: 508596 - DNA, 214 bp, Homo sapiens
taagggtactgatacattcactgaagagctttctagaaatctaaagacccttatacattcaggagaaatgaasttttagctaaggaagaattcaggaactaagataagcaaacacttatttgtatttgtatatgcgtggctgtgatttatatatataaagcaagcatctctttgtttttttttcctcaaaaaataatgtattgcaaaaatgttt

SEQ ID NO: 508597 - DNA, 591 bp, Homo sapiens
gcacaaagtgttgtatattgttgagactgatgctttcaataaatgaagcagtgttaatatgttagtcctattgggaagagcaattcacttgtgtagatgaatcctggagtctaaaaattacttaaatgtattagtgtatcatgcattgtatagttctacattccataaataactgatatcagtgcaataaattgatagatttaaaacctactttgaaagtatagttattaatagcatagttaacttttgaagatgtaaagttgtattaactggttttcatagtatctgaacagtatcaattaatgaatgcttatgtgaagaaaactaaaaatcatagggtgtttaatcttaatcatggtgtttagtcttatattcagaaaactgtattttatcactttatcaaattttggcatttcatatgggaatatttctatttaaatcaatttctttcaaacacatttaaatattttctagtttaagtttttaacatttttaggataccaacaatttcttttttttcttttttttttttttggagacggagtcttgctctatcacccaggctggagagytatggtgtgatatcggctc

SEQ ID NO: 508598 - DNA, 542 bp, Homo sapiens
ctgagagaaagacaggttttaggaaataaaatttcaggatcccataagcatgttgggggtagagtgagggttgggataagaatgtaacaactgacaaagtaaaacattcaataagcattaattaaacatttacagcatgcaacagcactgaattaaatgcaatactatgcactataggagtacataaaagtagaaaacagaaatccttcttcttattccctcatcaccccaaaaatatttatgggagtaaacatgtttatctctgctccctccagaactacagtaaaatgacaatacaagaactaaaaggtagaaacycacaagtgaatgtaagaaaagacaatggaagatgatgggtgtcaacacaattttcaaagatggagaacatacatatgataaataatgcagagccaaggaagctgaattataactgcctacaaggttgggagaaaggaactaaattgacttgatacatgatttgatgtactcgaatacttgaaaatgtactgttaggcatttagtacacataaaaggaaatttta

SEQ ID NO: 508599 - DNA, 581 bp, Homo sapiens
gagaatattgatgccgtaaactttgcatgtatatacacccacatagattaccagtcattcatcattaattcagctaatgtttattgagtagctatagattcccaattactaggtgtgtactagtgaacaaataggaaaaaaaaatccctgccctcattagcktatattgtagtgaatgaagcaaacaatgaacaaagtacttaaatagaatacatagttcatgaaataatgacaactaatggtaaagggaagcaaagaaatgggttagaaaatgtcaaggggtaaagtgacatttcattgaaggagtgagagagaaagctgtgtggcttcgtggggctagaatattccaggcctagggatcaacaagtgcaaaggctagttgggattgagtgtggtgatcattatagctggagcatagtgaaccagggggagagtagcacgaggtcagggaaggtggagggccagaacatgttggccctataaggcatagtaaggattttgacttttacttggagacagatgggaaaccattggaagctgtggagcagaggagtgtcatgatctgagctacatttcaagag

SEQ ID NO: 508600 - DNA, 524 bp, Homo sapiens
ataagactcttacctcagctcttttcagcatttcccatttattcaatattttcatggcaaacactttatctgcattttttagttttactacagcaacctagaaaagataaaggaaatataaattttaaaataatgacaaataattttttcagccatccattttcctttttcctctgtaaaaaaataaataccaattatcaattatgtcaatgcagttcaaattctaagatcctaaattaaataatgttgcagatgaaaaagttagtgaacatgtgccaaactaataactgtatttgtgaatgctgtattagttggtatttgtgaacgctgtattagttggtatttytgaacactgtattagttggtaattacacattaatccccctttccaacttttctgccctggaattcaaactcaatatctactatcactaagaaactgaacaaaatgctcaacaggaaagaactagagcttattaaataatgcatgcaaaattccaacaccatgttacaaggaaggccag

SEQ ID NO: 508601 - DNA, 625 bp, Homo sapiens
tgccaaaacaaatatgttttgtgaggatcaaacaatatgaaataaactgaaaacgatcctatttttcatatcacatactcttacatactataccataacccccaaaccacatacacacatatacatacgcatagagagcaattaaaactaacgattttacaaaaactaaactttacacatcccttccaaaaagaaaaaaaaaggaacatctatttctgtattttatatttcaattgcagatcaaaaactatcaaatacaataaataaaatccctttctcactctcaacaaattgattwcatttctatctctctgcttcagtttaaccagataatctgtaagaccacttccaggccattggacttgccataggccacaggctagcccacaaaagaggaaaacaaaggttgaacgaggatgtttccagttactgggggtgggtggggaggaagagaaatgctactctaatatgcagaaagggaggtcaaactatatacagcagatcttcaaactgctgttcaacgggatatttccaaaaacagagtataggtttaaattcaagtgcaaaaaaaaaaaaacttaatagcaaatgtgcatatcaaggttatttaataaatttatatttg

SEQ ID NO: 508602 - DNA, 552 bp, Homo sapiens
caaaacaaatatgttttgtgaggatcaaacaatatgaaataaactgaaaacgatcctatttttcatatcacatactcttacatactataccataacccccaaaccacatacacacatatacatacgcatagagagcaattaaaactaacgattttacaaaaactaaactttacacatcccttccaaaaagaaaaaaaaaggaacatctatttctgtattttatatttcaattgcagatcaaaaactatcaaatacaataaataaaatccctttctcactctcaacaaattgatttcatttctatctctctgcttcagtttaaccagataatctgtaagaccacttccaggccattggacttgccataggccacaggctagcccacaaaagaggaaaacaaaggttgaacgaggatgtttccagttactgggggtkggtggggaggaagagaaatgctactctaatatgcagaaagggaggtcaaactatatacagcagatcttcaaactgctgttcaacgggatatttccaaaaacagagtataggtttaaa

SEQ ID NO: 508603 - DNA, 678 bp, Homo sapiens
aaacattactgcacctatttaacattgtactgaaggtcattagactccatggtaagagaaaaaaatagcacatataaagattgtgaagaaacaaacccaaagtttctcataatttacggattacatgatttattatatgaaaaatctagaagaatctataaactattttaaaccgataaaaaattagcaagattgctagattcaggatgaatatacaaaatcaattctaatcctaaagaagagcaacacactattaaactgcaaatttaaacaagtatcatttataatacaggtaacattaaaaaatccataagtcrtttaggagcaaatctaactcatctaggtaatggattaatagtaaacatcatggaactgtattaacagacataaaacctgaaacaataaaaagaaacacaacattcatagatgagaagattccatgttatagacataaatgttcccaaaattaagctaatttcaaagcaggtcttaaatacataagccagtgtttatgaaggattgttcacatgtatgtacatgtatggatataaaccaatatgctaattctaacaatcacatagaaaaatgaagggccaagaatagccaagataattttagagcaagaaaaagaattatagcaaacacctcaccatcagaaattgacttcttaaggtaaat

SEQ ID NO: 508604 - DNA, 634 bp, Homo sapiens
ttaacagacataaaacctgaaacaataaaaagaaacacaacattcatagatgagaagattccatgttatagacataaatgttcccaaaattaagctaatttcaaagcaggtcttaaatacataagccagtgtttatgaaggattgttcacatgtatgtacatgtatggatataaaycaatatgctaattctaacaatcacatagaaaaatgaagggccaagaatagccaagataattttagagcaagaaaaagaattatagcaaacacctcaccatcagaaattgacttcttaaggtaaattgattcagctggtatggttttgaccgagatataacagaaaaagtaagttgaaacttaatttgaaagtcacaaacttgggaaaagctcgtagatttgaggcagctgtccagataataaataatgacccacacaaagtcaacaatcataacatttcaggacattgggaataaataaaacattctaaaagcttccagatatagagagaaaggctgtaataaaaggactgagactcagaatggtgtcagatgtcttaacagcaacactgtaagttaaaagacaacataatgccttctaaattctaagaggaaaatagtttcaaatctagaatactat

SEQ ID NO: 508605 - DNA, 395 bp, Homo sapiens
taggctaatttctgatgtcacttaagatagsacttcagccacaaagagtttttggattacaaaaatatgaaatctgaagaaaaacaacataccaggttttggttttgtaaagagtatgtgaaaacaaatactccaaagtatcgaacggtatatttttgtcttgagtagatatttaagtcagcggtccccaacctttttggcaccagggactgattttatggaagacaatttttccatgagcgtttggggggtggtggagatgattttggaatgaaactgttccacctcacatcatcaggcattagttagatgctcataagaagcgtgcacagttcaccatggagtttgtgctcctttgagaatgtaatgccactgctgatctgacaagaggcgga

SEQ ID NO: 508606 - DNA, 523 bp, Homo sapiens
ttggtcatggcgtgtatactggctagaactgctttctcagatgatgaaatagaggctttttcttatataccaacagtcatcaagcaagacctgtatcagaggacttggtctaccatagactgttactacatctaacacctgctacgcttttgtaggttcaagaaagatatccttggaaggaaaaagaaggttggattcagtgcatcatttttactttacagagccctgtctttacagcagtccttctcaaccccaggtccaggagaaaagtaagccctgaggtcctgagacatccatggaatagaagcaattcacttttcccctgcactcctggaatgatccttgctaagtactgctcttggaacattgagaaaaaaaagtcactcccattaggttctgcagggcttaattctctcgcagagcctttttraaaggctggcctagactctgctgcgcctgcccagtgttttatgtagggccccaccctacatggtcaaacatctacttctaagaaggagccagg

SEQ ID NO: 508607 - DNA, 608 bp, Homo sapiens
ttcagtttgtgttgtctacgaaagacatggcatacagtatcataagttactgcaaaagatgcctaattccctggagatcaagatctaataacaaatacgaggaaaactttaaaccycaagttgtggggtgtgtggtaaggtgggggcggatgtgtcagctagaaccttgctgagaacgattgctctgcagctctgtcatctcagctcatctaatgaccaaaagcagatggaagtttttgtgtgacctctccaaggccttcttaatggtcagagagaattttccttttatggcctcccccctttccccttcatagcattgtgggagagagagattcattcacaaccaatttgcatggcaattttttagaggttttatgatctctcaagcaaaataaaatcttctttactttcatttgatctgaaaaggtaccacttttggaaactgtccaggggaagcacgggacccctggatttggatccagttcaaggtggccttgatgaaaatagacccctatcctgcattttacatctccttcctggcttttctattctctcaaacctgcaaacccatattctttttgccttcgtttgctgtcatttacccccta

SEQ ID NO: 508608 - DNA, 562 bp, Homo sapiens
gaagacatggccactcaacgcctgcgcctggggacagtggtggtaggggagggtgaggttgggatgacctgtggtaggaccaaccatggaataacagggtcaggagttaacgattcaaggggtgcctccgagttcccattgtgcaggtcaggggtggctctaccgagtgaatgcccttcttctttcttccgtacgcacggaactgttttgcatcttggttccaatgcctccctgggttctatggcattgcagctttgccccgtcgtgaaggcaagtccccgggccacatgtataatgttgggggaaagaggtatacagggtttgggaggaatggggttttcctccattttcccagatagggaaatgtgtggtcagaaatatgaaagaactttgaaaagaacatgagatgaggtctgtgaattgtgaaacatggtgctcctcttagttctggggcagatttttcaggatcaaraactaaaaccaagaatacctttgaacactttagtgtggctcatctggtggccacactcacattgctatttccagtaaattacatcgctta

SEQ ID NO: 508609 - DNA, 582 bp, Homo sapiens
ctcagtaatgttttgaggctttcagtgtggagctcttgtgcatcttttgttaaatttatgccaaagtatttgggtgatggactttggggactcaggggcaaagggtggaaagggggttagagataaaagactacaaatggggttcaatgtacactgctcaggtgatgggtgcaccaaaatctcaaaaattaccactaaagaacttactcatgtaaccaaatgycacccgttccccccaaaacctatggaaaataaaaaataagtaaaataaaattttgaatacatcgaaaaaaagagaaaaaaattaaaaaaaaataaagtcactaaatgctggaaagcttgagtcttgagagttatttaggagaagatctatacccaggcagccatccacgaagcctgctgatctcaaaggctgggaggcaaagtctgttgaagctgagatttgctccccaagaatattacaaagtaggcctctgctggaacagcagggagggtggtcagctgcaaaagaaagaaggacagggctgagaggagctcaagagggaacaaggtccagagttcaggcagtaggtagtgtgtgag

SEQ ID NO: 508610 - DNA, 620 bp, Homo sapiens
tgtaagggtccaggtctgcacaaggtgcctgttgggtgcagggttctgttggctccagtgatatatctcaggtgggctaatttttacggacatagccgctgcaaaaatctatcaaacaataataaagggatagctacttgcatgctaatttaccattgtatagaagggagaacaggcatcagattgttttcgtcaaataaaagcaaaaccaagatttatgaagaaaagaggaaagaggaaaaaaaatcgcctgggacctttgtgattttgctccccttggataagagacttgacagaaagctttcaaagaggtcactgtggcctgtcttcttgagacacacgacacttgttcaccacggaaaacaattacagatgttggaggactttaaaatatcctagtttagcagttcatcctatgccacagaatctgtgtgtgatgtccaccatgtccttctgtggtacaccccttcagttaagccaggagggtgcctctccsctcagtggaatatcatacatcaatgtgtagaaagtttgttgtgctggcaagtaaatgacaaaagggacattgatagaattaggaaacaaattggaatatgatctgttaccgttcccatggaaga

SEQ ID NO: 508611 - DNA, 493 bp, Homo sapiens
tgcctggctatcaagaagatagctccttgcattttttgggggagaacacttttgcttcaagggagtgtttcctcccaggattagaaatctttctgtaacctcaggaaacattgctgatgaaaaccaagcatggtgtgctgtacaacttgtagtaataaggcagaagttaaaaggaaaagacaggtttccctgtacttggctgactccaagacctgccatagatagagccctagcagatcctcggtaacacgatctgaaaagtcagagccccgaggaatgtgttccggagactctctcaacacagcccctagcaaagataagaggaaaaaacaacaaatgcctttactaccttctctttccccctttccatttctaattattcaagttttgttaagttcytgatttcccttcagtgcagctgcaaggtcaccagccatacttgcattgcaagacctgtgacagtttgattagctgcctttcttctgcttctgta

SEQ ID NO: 508612 - DNA, 619 bp, Homo sapiens
ctggtttggtggggtgacctcccacccctggtgcagctctggcctcaygaaggaccaggctgtcacctggagcggaaaagtcagggctgtggccaagtccttctctcttgccttggagttccttgcccctccccagcctctttctcattagggttcccctagccattcccgcttcctctgagtcttcctgtctcaggggtggatgaaccacctagggaaaatctccccctacgcccctcaaacacaccccctattgtccactgtctctgcctgagaatgtgcaggctcagccttggaattgtcaggccccagtattccacaaactgaagttttacggaggcagaagccccagaggggctccagcccctatctgtccacatctggagcttgctaactctgagaatctagacaaggaggggaagccccagccctagcagaggggcttggaatccaagggtagaactgggagagaagttgacaaatatcgactatgtcaccctttcagatcacttgggacccttttttgtttacagctttattgaaatttaactcacataccatacagttcacccatttaaagtgtacaattcaacggcttttaggatattcacagagttgt

SEQ ID NO: 508613 - DNA, 547 bp, Homo sapiens
gtaattccagctactcagaaggttgaggaacaagaatcactggaacccgggaggtagagactgcagtgagccgagattgccactgtactctagcctgagcaacagaatgagactctgtctcaaaaaaaaagaagacaaagtagtgaataactcagtattaaaaaaaaaaaaaactcaacagagggaatgggtaaatgcaaaaccaaacagttacctttccactttcatgtaaaatcccttgttttagggttctagccactatgctatgccatccactccagctccttgttagtcacttatgcaccaggattgatctgaaccaggtttgataaattatttcaaatcctttctcaccattaccatccaaatccttctcacttgccacgcaacttccaaatctggatcaattgaattgatccaccaccattgtttctatttccagactgctgcgccctggtggaagaaataacacaatgatataggcaggaatatcttgaaaagcatggtttctgtggaatattatgcagyagttaaatatgtaagatat

SEQ ID NO: 508614 - DNA, 568 bp, Homo sapiens
aggcagctcctctggagtcaagccaacttggagttatctaatgacaagcccaaggacaatgccccaagcagggaccctgacagtatattaatacgtaagaaattccaagataaaagttgggggcaagggcaaattagttagataaaatacaacataaaaaggtcacgtttggaaggatggccataatattatacgacgaagttttcaaaagcttttttggccgggcacggtggttcacgcctgtaatcccagcactttgggaggctgaggtgggaggatcacctgaggtcagcagtttgagaccagcctggccaatatggcaaaaccccatstctactaaaaattaaaaaaattagccgggcatggtggcaggcgtctgtaatcccagctactggggaggctgagacaggacaaatgcttgaaaccaggaggcggagattgcagtgaactgagatcgcaccattgtactctagcctgggcgacagagtaagactctgccttgaaaaaaaaaaaaaagctttttcaagaacaacaacaatgtaaaaataatacaatggtgacacagctc

SEQ ID NO: 508615 - DNA, 554 bp, Homo sapiens
tctcacatcaatgttttatggatgtatgggcctaacactggtatacagatacccttggctatatccctcttactaatgccagagaacgggtgtttcttgccacagtgccactcctggctgtccagcacatgttcacaaggactaggaaaaagggatctctccctggcagtcagcttctcttttcacagtgttgaaaactctgtgagataatttccttaggcgtcctggtaacacctattagaaagtgtttatttaatatttattcccacaaataccaatgagagagagagtctcctactattcaacagttttttgttttttttttttaatcaagaaatagttgaaaaggatgggagtgaaggcactttaagcccacagatgccagcagaggtgggacatgacaagkgaggctggggggctggccccaaacttgtccctcccaagtcagcttggacaccacacagcacttcgtgcgccctcggctggcttagcacatggacaaggcattgccgctggagtcccaccttcttagagactcctgaaaaggagctcca

SEQ ID NO: 508616 - DNA, 554 bp, Homo sapiens
tctcacatcaatgttttatggatgtatgggcctaacactggtatacagatacccttggctatatccctcttactaatgccagagaacgggtgtttcttgccacagtgccactcctggctgtccagcacatgttcacaaggactaggaaaaagggatctctccctggcagtcagcttctcttttcacagtgttgaaaactctgtgagataatttccttaggcgtcctggtaacacctattagaaagtgtttatttaatatttattcccacaaataccaatgagagagagagtctcctactattcaacagttttttgttttttttttttaatcaagaaatagttgaaaaggatgggagtgaaggcactttaagcccacagatgccagcagaggtgggacatgacaagggaggctggggggctggccccaaactkgtccctcccaagtcagcttggacaccacacagcacttcgtgcgccctcggctggcttagcacatggacaaggcattgccgctggagtcccaccttcttagagactcctgaaaaggagctcca

SEQ ID NO: 508617 - DNA, 622 bp, Homo sapiens
gctctggctttaaattttggattttccaagtactgtttgaaataccaatggaaaaatgtagacggtacaaaaaagaatgactactagaataacattatttcttgaaatttrtatttttttcaattatgcattaagatgatggacaatcaatttagaaaacaaaatgaaagatatctagaaacatttgactttataaacttccaaaggtacaaaaagatgtgtatatgtgtaaaaatggtaaagttgtaacaattttaaacaaaaggattacaataacgtaatttaaagtttatatattagtaggatcattctgaaggacacaagtgtgaaaatattatctataccaaaagatgttggctcttcttgaaccatgaagagttgtacaacctaaaacttccttcaataggattttttttaaaagcagtgtttgtttaaagaaaatagtgtattgtacttccacacaatgtaaaaccacacagccaatagaagtggtattgtgggtacactttaattggcataaaacatttccacatttacttgcttataagtgaaattgcaaagcattaaataagttaaaagataaagaagtattttcaatatgatacaatttatacaatggcac

SEQ ID NO: 508618 - DNA, 608 bp, Homo sapiens
tctggctttaaattttggattttccaagtactgtttgaaataccaatggaaaaatgtagacggtacaaaaaagaatgactactagaataacattatttcttgaaatttatatttttttcaattatgcattaagatgatggacaatcaatttagaaaacaaaatgaaagatatctagaaacatttgactttataaacttccaaaggtacaaaaagatgtgtatatgtgtaaaaatggtaaasttgtaacaattttaaacaaaaggattacaataacgtaatttaaagtttatatattagtaggatcattctgaaggacacaagtgtgaaaatattatctataccaaaagatgttggctcttcttgaaccatgaagagttgtacaacctaaaacttccttcaataggattttttttaaaagcagtgtttgtttaaagaaaatagtgtattgtacttccacacaatgtaaaaccacacagccaatagaagtggtattgtgggtacactttaattggcataaaacatttccacatttacttgcttataagtgaaattgcaaagcattaaataagttaaaagataaagaagtattttcaatatgatacaattt

SEQ ID NO: 508619 - DNA, 644 bp, Homo sapiens
gctgttccaacctgtggcctgactacccccttggcatccacccaggggtggtccttggtgtgcttggggtgcacttgggtactcagggtgtactggygatactcagggtgcagttgagtactccgggtgcacttggctgcctccaaagatgggactcactgcgtcctttgacagcccaatctttttccaatggatgtgaccagcaaagttcttgctttacctgaaccaaaatcagccgcatcaagcccacacctctgccatctagggccacaacacttattccctcccagtaacaacattttggatatctgaagaaggcccacaaattctgcgatgacctctgtcaaagcccagtgtccccagtcccttcagtggtccctcctggagcctgtttggggccatcacccctgaacatgctccagtttgcaaacttcccctcaagtggccctgaggggtaagcgtgtgcccaggaaccagcctgatcagggagatgggaatagcgtgggctctgaattcacttggacgggaggcagattctggctctgccctgcaccagctccatgactttgactgtgttaggctattcttgtgttgccataaagcaatacctgagtctgggtaatttatttaaaaagggggtttaa

SEQ ID NO: 508620 - DNA, 644 bp, Homo sapiens
gctgttccaacctgtggcctgactacccccttggcatccacccaggggtggtccttggtgtgcttggggtgcacttgggtactcagggtgtactggcgatactcagggtgcagttgagtactccgggtgcacttggctgcctccaaagatgggactcactgcgtcctttgacagcccaatctttttccaatggatgtgaccagcaaagttcttgytttacctgaaccaaaatcagccgcatcaagcccacacctctgccatctagggccacaacacttattccctcccagtaacaacattttggatatctgaagaaggcccacaaattctgcgatgacctctgtcaaagcccagtgtccccagtcccttcagtggtccctcctggagcctgtttggggccatcacccctgaacatgctccagtttgcaaacttcccctcaagtggccctgaggggtaagcgtgtgcccaggaaccagcctgatcagggagatgggaatagcgtgggctctgaattcacttggacgggaggcagattctggctctgccctgcaccagctccatgactttgactgtgttaggctattcttgtgttgccataaagcaatacctgagtctgggtaatttatttaaaaagggggtttaa

SEQ ID NO: 508621 - DNA, 496 bp, Homo sapiens
ggcaaattgctattggaaacgttggctgtccttgactcartgattcagccagctagtcccttgccaaactagtatgttgggcaaattccaccttgagaatttatctgctcctgtcaaagccagattctccctgcctgaggggaggctggacttgaccttctgactcaggatatgctgacttgggtccctaggtccaagggcggccctcttgggcccactgtgggctggacctcttccatgatggggtggtggagggcaggccccacctgattcacacttgacctcatccaggcaggtgaagttccctgcaggagtcacctgagcccagcccctcagaccaggatccatcatgtttaggaggatttggggctatctcatgttctttggctagaaaggggtcccactcttaggggtctgccctctgtggggcacagatggcttgctggggcccatggacggggctgggtgaatgggaatctggtcacagcagcagcag

SEQ ID NO: 508622 - DNA, 496 bp, Homo sapiens
ggcaaattgctattggaaacgttggctgtccttgactcagtgaytcagccagctagtcccttgccaaactagtatgttgggcaaattccaccttgagaatttatctgctcctgtcaaagccagattctccctgcctgaggggaggctggacttgaccttctgactcaggatatgctgacttgggtccctaggtccaagggcggccctcttgggcccactgtgggctggacctcttccatgatggggtggtggagggcaggccccacctgattcacacttgacctcatccaggcaggtgaagttccctgcaggagtcacctgagcccagcccctcagaccaggatccatcatgtttaggaggatttggggctatctcatgttctttggctagaaaggggtcccactcttaggggtctgccctctgtggggcacagatggcttgctggggcccatggacggggctgggtgaatgggaatctggtcacagcagcagcag

SEQ ID NO: 508623 - DNA, 608 bp, Homo sapiens
agtacacagatatgtacatgagataattacaaagtttactaataaaaaggatgtatagtacataatttgcaaataaaatatacaagtctttattgtaaattccattctataatgtcaatgtgacttgctatttcttaaaaattccaatgtcgttaataattttatcatccatgattgtgtcccaaaataatactctgaataagcttaattataatttgatcagcagagaagttgctcatatcattgacaaatgtgtgtggttcaaacatgaatgttggttgatatttcatttttattcataattaaaatggaaatgagacaacaaatatgtatgttggaacttcacttgtctatcaatgacatgagcaacttctttgctgaattagatgatagtttttgaatactggaagaatatttcctgaagtttttgtgctcatcacaatgtaacagactcagacataacactcatgttaattcttcttcttattattttctccatcactttcttaagtctagaccaagagtcagcaaaccatggcccttgagccraatctagcctgctatctggctttgccaataaagcctggaacatagccacgttcatgact

SEQ ID NO: 508624 - DNA, 575 bp, Homo sapiens
aatttctccatccaagtcggctgcctgccgagggaagtgagaatgtcttgagatttttaggaagtagaaccaatgcctagatgagcaaatttccgtaagtgattttctgcactgactttacttttaatagtatacacactgacaagtgaggacaccgtctatcctactactgcatgacccaggcccctcactgggtgcaatcacaccaccatctgtccctgtatccagccaaagatagtccacgccagtggtcctcaaacatgctgctgttgaaatcccttcacactcttaaaaactggtggccctagaagagcttctgttaggtggatttcatctattgatggtatttactatgttagaaattaaaatgtaaatattttaaaaattttaatttaaaaatatttaaatatattttaaaatatattataaaatatattttatayatttaaatatatatgaaaatatatattaatataaatgtaaaatttaaatatatttgttcatttgagaataaaataaattcattttaaaataaaaatctgatttaacaatcagtgataagagtcacattgctt

SEQ ID NO: 508625 - DNA, 500 bp, Homo sapiens
ctgccacaggggcaggcggcccatctggtgttggccctgtggcaggtggtggtgccttgttccacagtgccagcatactcacccactgacgatctccttggtctccgcccggatgaaatgctccttctcaggcgtcagaatacacagggagaacttctggcccgtgcggccctccccatccaccacatctgtgcactggttcatgttgatggtgccctgaggaagggtcgtgggctggaagaaggcrgcagagagtcacccagaggccagccaatggggccacagatgtcgtacagccccaggccattcctgaccctcccagcctgtggggcctctaggagtgctctccctcactccagccccagctcctcttcctttgtgcccatcccagggaggacagggacaggcctggccttctccagaggacacccagctaaacatccctcctacgtggagagcgacatcccacttgcactggaggggatatgcaggggaggaca

SEQ ID NO: 508626 - DNA, 416 bp, Homo sapiens
tggtgcggtctgaaccattcggaacttcccagaggggggcaccggaataggggcggtggaaaagggtaattgtcgggcagcggcccctgcttcccagtcagacctcggagttgtaggactcggactgtgttcctgggcttgcgagagctagggaggcccggctctcctcgcggtgcaggacgcgctcggacggctcccgcacccccaccgcagtgttgggtggtggtacggctcagggagtcacgcgcctgggtstcggcggggctgcgggaccgcgagtgagtgtggtcgctcctggttctgccagctcccctgagagcctgaacccgggcttgagagcctcgccaccccgggtgacatccctgccgtgggcttgggggctctgggtgtgattccgccggtccgggtcccgcagc

SEQ ID NO: 508627 - DNA, 504 bp, Homo sapiens
ctgatggccagcttaggcaggcagggcagccatgtgaggttgtgtgagttgtgcactgcacaaaagcacctagcagaaggtgcaaatggaggctgaatccaggccaggctgtctttccagcagaagccctgtaggcaggatgcaggccttccacttccccaccaccgctgacaatccctgctactttactcacctactccattcatttacgttacctatctgagcttggtaagcacttggtgttttcattcctagtatacaatcagggyactatttcgtcttctctatgtgagaaatgcctcttcaaccttcaaggctcagctcaactcatagaagctccctggtggtaccctcctctgtattttctcaacagcaacccacactgctattatagcactcggcacacccttgtgctctaatttgttagcggatcctgtttcctgcagactttgagccccttgaagatagatcctaccatttctacttttcctctgcctggcacat

SEQ ID NO: 508628 - DNA, 575 bp, Homo sapiens
ctcgccttccacacgccttcctcacagaggaggcagccttgattcctgggtgggaaatgccaaaaatgayggaatcaaagccttttctggaagcgggcagagatttctaggggtggggaagagagaatatagaacttaagagaactgagctcttgatggaaagtgggggtggggaacacagaggggaggcccagagactgagaggtctaggagaacgggttaaaaccgaggccagagccccggaaaaggagcccagaggccccagctctttccctacttacttactgtatctgtgtgaccttaagcgagtcccttggtctctctgagatgcagtattttcccaagtgaacgggcattgccacacttcacctcctcagggcgttgtggggaccttcaaagccgtaaagccctttgtaaatggtaacgcctaacacaaataggagagcacgctgccctctctgggtaggcccctcatctgggtcctggttccagtctggtactgagcctctggaggacaagggtcacatttattccaatttctcttctgcatgccccagtgcccactgagcacagtg

SEQ ID NO: 508629 - DNA, 330 bp, Homo sapiens
gtagtgacaaaggtctttatggagccactgagcctgagccaggtcctgcagattcctggtaattctatccatgacccactatattttcaataaatcccccttctgcttaagttagctggaactaagaccctgactgatacctgtgggtttcatatgatgattgaaataactgagagctaaaggtgcaactcttgacctaytaaatgacaacaaataccatacgggtaagaatatctagccatacaaatgctacagataggtagatatttcctttggtacccacacattttttgttagtttgaacaatataatcctgttttcagagtccta

SEQ ID NO: 508630 - DNA, 570 bp, Homo sapiens
ctgattacttacccctatgactcacaaaccaaccaaaatattttgtctttcagaagagacatgttagtccaaaattaactcaggcctcacagcatcttcccaactaacaacttcactaatccatggtcttccagragacattttacaattactctgaacctttgtgagaaacttaggaagctttagtgcatcaatgagcagttaacatctgtggatccctactgagatctgaggtttaaaccaattagtggcaaccaggagctttgcaatgtgctttcatacagaacaagcatatgcttatgttttaaatttaaaaacatactctcctgtagagaatgtccacacggcattctccttctttggctcatgtaattattattacattttgtgctccaagagtgattatgggactcacagaaaccctgagtcccaaaagaaaaatatttctacataagaaaccatactctttgaatcccattattttgtggacttctattcatgtagttctttgtatctgtttatttgcaagcctccagagtttgttcttcattctccactcccagatcccag

SEQ ID NO: 508631 - DNA, 565 bp, Homo sapiens
tgggattacaggcgcccaccactacacccggctaatttttgtagaaacggggtttaatcctgttggtcaggctggtctcgaactcccacctcaagtgaccrcccgcctcggcctcccaaagtgctaagattagaggcgtgagccacagcacccggccggttcagaagattaacatgagatcccaatgccatgggttgatctaataactttcttttcaaagatgtgaaaatacgttaccagaatttaataccttatccttgttatattctggtgcagtgaataccatgaccttggttgtgacaaaccaccagtaccaccaccagtaccaatgcctgataatcctccacttctaaccaagtactttctagtataccaagctcctggacaaagccaccaaaggacctgagtgccaggtggctccaaatctaaaccataagcaggacggactatggacaagtcagctttaccattaggaagcaagtgccatgagggcaggaatttttgtttgttttgttcactgcagtgtcctcactgcctgaaacactaactggcacatagaagatgc

SEQ ID NO: 508632 - DNA, 505 bp, Homo sapiens
taaaattcctctctttgtactcattctctttatttctcagaccggctgacaattagggaaaatagaaaggacctacactgaaatactgggggctggttccccctgatagaaaagtagctccctacttttcattttttctgtctctggggttttcattcaacttaaaatttttataccaaaaattctttaaaaaatatatctaaggataatgacttccagctccatttatgtccctgcaaaggacatgatctcattctatcctcagcaaactaacgtaggaacagaaaatcaaacactgcatcttctcacttataagtgggaactgaatgaacacacgaacacagggaggggaacaacacacactggggcctgtccaggggtgtggtgggggaagggagaggattaggaaaaatagctaatggatgctgtgcttaatacccaggtgacaggttgataggtgsagcaaaccaccatggcacatgtttacatatgtaacaaatctgca

SEQ ID NO: 508633 - DNA, 590 bp, Homo sapiens
attttgtctagccatttatcatttgggttgtttccattttttagccattataaataacaccaccataaacattcgtgtgagtcaaagaggatggtagagggattttgttgttattatcaagagtcatcttttgtgcccaaatgaagtattattattattttttgtttcctactcactccttacctgtaaactttctttcctcccttcctttttaagtttctaccttctcttccttcactaaatatttttgagcctctactcagttcccagaactatgctagagactaaagatacagaggtggacaaggcacagatccaatccctgctcttatgaagttttcattctagtaagtgttaaactaaataaatatacatttcccatatggtaggcgctatgggaatatatttaggagtatttggaggctccatggaagcatagatggggatggcataacccagagaataatgttggaaaatgcattctsggaaaagtagcctcaaagttaaggttttaacaataagtagtaattaatcaagctaagaaagggaaaggatgtcaaggcagagtgaacagcattcaaagaggccca

SEQ ID NO: 508634 - DNA, 590 bp, Homo sapiens
attttgtctagccatttatcatttgggttgtttccattttttagccattataaataacaccaccataaacattcgtgtgagtcaaagaggatggtagagggattttgttgttattatcaagagtcatcttttgtgcccaaatgaagtattattattattttttgtttcctactcactccttacctgtaaactttctttcctcccttcctttttaagtttctaccttctcttccttcactaaatatttttgagcctctactcagttcccagaactatgctagagactaaagatacagaggtggacaaggcacagatccaatccctgctcttatgaagttttcattctagtaagtgttaaactaaataaatatacatttcccatatggtaggcgctatgggaatatatttaggagtatttggaggctccatggaagcatagatggggatggcataacccagagaataatgttggaaaatgcattctgggaaaagtagcctcaaagktaaggttttaacaataagtagtaattaatcaagctaagaaagggaaaggatgtcaaggcagagtgaacagcattcaaagaggccca

SEQ ID NO: 508635 - DNA, 599 bp, Homo sapiens
gtcattcacagtcttagcattgtcagaaatatttgagagacaggcaatgtagagatgtgacaaactggaagtccatgaattatttctgaccaagccatagagatgttttcttttacctgattgcattttactttttgtatttgacttagaagtcagcatcataaaaatctgtattcccagcttttcagaaggagaggtggggaagcaagaacaacaacaaaagaagatgtgacaatcctgggcaccactccagcatgctgcaatcctgccccctttagaggagacagtcttccttttgtcgccgttgcttcctggtgatcttcattgctttgtttgtgtttcctacctcacccctgaaggaatttgaggggtattcatattttaggtttttacataactatatatatatatatwtttttttttttcctccccagttgcactacttttctgtctcatttcctgccattccccacatataacctgtgcattcttgcaatgccttgcacggtattcttggaacacaccatcttctttcttccctccaacttggcactgacccctattcctagaacacactccatcctctgctggaaagagtc

SEQ ID NO: 508636 - DNA, 549 bp, Homo sapiens
actgacacctggtttttttgtttgttttttgtttagttttgagaagaagccttgctctgtcgccaggccggagtgcagtggcatgatcttggctcacttggttctccaccccccaggttcaagagattctcctgcctcaggctcccaagaagctgggactacaggcacatgccaccacgcccagctaatttttatatttttagtagagatgggstttcaccatgttggccaggatggtctcggtctcctgacctcgtgatctgcctgcctcagcctcccaaagtgctgggattacaggcatgcgccaccgtacctggatgacacctggttttctaagaaccccaatagctgttactaattgattttaaagtaagtagcattctcctaacttctagtttgcaagttaaaactaacaaatgtaggacttacagacctgcagtgagattttgctgctcctgctgggtcacaattttggcaatctgagctctgagagcagcaagttcattttcgagagcgcaaatcttctgcagtgcttcctcatttgccagc

SEQ ID NO: 508637 - DNA, 587 bp, Homo sapiens
ccttggaaaactccactgtatccttgagagagaataaaagcaaaaaaggcaaataacatcttagtattacgatgaaaatagttttaacctcacagaccgcactttaagtactgctggattaatttatgttttctacattcagttctgataaactgtaatttttaagaaaattttctggatcatacaagtgttcaaatatatttttggggtcaagcaaaatagtccatttygattcttatattttctctttatctgtggtgttttcccctcttagtttttgagtatgcacgttagctccattcaatctttaagttagctagcaacttatctcttttattgcaaacaaccagctcttagttacagagttctacttttattttagtttactagttcattgattgctgttttttatctttaacaactactttatcttttcttagtgtattttgatattatttttctaatttcttgagttggactacttagttgacttatttcattctttctcatttatgaatataagtattttttaaggctatgaattttcctgcaagcactgcattagctgaatttcatagattttccca

SEQ ID NO: 508638 - DNA, 587 bp, Homo sapiens
ccttggaaaactccactgtatccttgagagagaataaaagcaaaaaaggcaaataacatcttagtattacgatgaaaatagttttaacctcacagaccgcactttaagtactgctggattaatttatgttttctacattcagttctgataaactgtaatttttaagaaaattttctggatcatacaagtgttcaaatatatttttggggtcaagcaaaatagtccatttcgattcttatattttctctttatctgtggtgttttcccctcttaktttttgagtatgcacgttagctccattcaatctttaagttagctagcaacttatctcttttattgcaaacaaccagctcttagttacagagttctacttttattttagtttactagttcattgattgctgttttttatctttaacaactactttatcttttcttagtgtattttgatattatttttctaatttcttgagttggactacttagttgacttatttcattctttctcatttatgaatataagtattttttaaggctatgaattttcctgcaagcactgcattagctgaatttcatagattttccca

SEQ ID NO: 508639 - DNA, 516 bp, Homo sapiens
gtattaacagttacctaaagccataagaggaaataaagaacactggtaaaggttactacacaagtaaatatataaaccagtgttatatttttggtttataacacctcttttacttatatgatttaaaaggcaaatgcatgtaacaataattatgtctgtggtaatgggcacacacatataaagrtgtaacttgtgataataacaataggaaggaggaggattggagatgcatacgagcagtgtttgtatactattgaaattaaattggtattattcaaactaggtctttataagtttaaggtgttaattgtaaaccccaaagtaaccactaagtaaatttaaaaatacacaaaacaggaaaggagggaatcaaaatgatgcacaaacaaaacaaaacaaaacaaaaacctaaattttaaaaaggcaataatgggccgggcatgatggctcatgcctgtaatcccagcactttgggaggctgaggcgggtggatcccctgagttcaggagttcaaga

SEQ ID NO: 508640 - DNA, 270 bp, Homo sapiens
acaaaataataagggttatctttttttcatcttatcagaataattttctcaccttcatttacagattatgcacgtttttctagcatcacrtaatagtttcttctctgctgtttccagtcatcactatctccatttccaaagaaaacaccacttccaagcacaacatgtttctcaattatctattgctgtataacacactacttcctaaatgtcagtggcttgagacaataattatgtatgtggttcctaattctgtgggtttgttggaaa

SEQ ID NO: 508641 - DNA, 270 bp, Homo sapiens
acaaaataataagggttatctttttttcatcttatcagaataattttctcaccttcatttacagattatgcacgtttttctagcatcacataatagtttcttctctgctgtttccagtyatcactatctccatttccaaagaaaacaccacttccaagcacaacatgtttctcaattatctattgctgtataacacactacttcctaaatgtcagtggcttgagacaataattatgtatgtggttcctaattctgtgggtttgttggaaa

SEQ ID NO: 508642 - DNA, 596 bp, Homo sapiens
tccctgacattagaagggaagttcaagccagatgtagtgactcaatcccataaactcagcactttgggaggggaaggtggaaggatcacttgaggccaggagtttgagaccagcctgggcaacatagtgagaccctgtttctacaaaaataaaaaaaaattaaattagctgagcatgggagcatgcgcctgtagtcccagstactcaagaggctgaaatggaaggatcacttgagcccaggagttcgaggttatagtgagctatgattgtgccactgtacttcagcctgggcaacagagtgagaccctgtctccctctctctctctctctaaaaaacggaatctccatttccgaagtctgcctgcacccactacccccaaccaccaacctcaaacccagattctttgttcttgaaactttagctgttctctaaatagggaaatacacacaaggtacattcctggaaagagaaggtgtcagaagccttggtagagaaaggaacggggagaaaaatatggcacaaatagtgaatggggagaacaagcaatgcacgcacaggaggggcaggtggtgccacagaacaaattaagatggga

SEQ ID NO: 508643 - DNA, 596 bp, Homo sapiens
tccctgacattagaagggaagttcaagccagatgtagtgactcaatcccataaactcagcactttgggaggggaaggtggaaggatcacttgaggccaggagtttgagaccagcctgggcaacatagtgagaccctgtttctacaaaaataaaaaaaaattaaattagctgagcatgggagcatgcgcctgtagtcccagctactcaagaggctgaaatggaaggatcacttgagcccaggagttcgaggttatagtgagctatgattgtgccactgyacttcagcctgggcaacagagtgagaccctgtctccctctctctctctctctaaaaaacggaatctccatttccgaagtctgcctgcacccactacccccaaccaccaacctcaaacccagattctttgttcttgaaactttagctgttctctaaatagggaaatacacacaaggtacattcctggaaagagaaggtgtcagaagccttggtagagaaaggaacggggagaaaaatatggcacaaatagtgaatggggagaacaagcaatgcacgcacaggaggggcaggtggtgccacagaacaaattaagatggga

SEQ ID NO: 508644 - DNA, 642 bp, Homo sapiens
atttatagcaagtctcaggggagactggtaagggaataggggaagcagagcaaggatgaagggcagggaaagagacgggaagtaaatataaagattcaagcagtggccccaaggactgatattacagggggttctggggagttaattacacctcagagttgtgctgacctgggggctgggctctcctactcctgtacctcagtcattggctaagggtatgcctgagggacatcaatttccaagcattttcagttttttacacccaagaaaatccttcaaagaagaaaggcacatttgtgcattggagaaaaaagcacatgtaacctcgaagaggaatgcatagatgcggtcaagggggtcggaggactctgggtgggtcatcartagtgtccacttcagaatgctagaataacgtacatctacgggtggggggcagttgtcacaggggccagccttctgagtagcactcagccttcccccaagccatgctgctcagatagtaacattggaaagccttagcatgcagcagtgaagagtcacagacttcaagcgtggaaacttcaaaaactaatggcttcttagacttctgggggaaaaatgggtagcgtggagtccagcatttccaagttgaatcatgaattt

SEQ ID NO: 508645 - DNA, 604 bp, Homo sapiens
  misc_feature (1)...(604): n = A,T,C or G
gatgctttttgaatgaagaaagcattttaggaagtcaggaatggcaccgtcaaatgaaagagggggatgaaagaggtgtgttctgtggttacagaacaaagccatactgcaacaatatatactataaggaaccaatgatgacctataggtttttgaacatagtatggtggtgctattgggatgggcagtggggagaaagtaggtaagtatggaaaagacataggttttaggagaaggataactttaaatttttggtgagatattggtatggagatatgcctcaagatgttggacaygtagggacagaacaagtgcacaaaatcagagcttgagaagtggatttgaaaaggacctacctggaggtgaaggtgggacccatgagaacagagtacattaataagggaaggaggagagagagggtaggtaaacattaaagaaaagagcctttatggaatatgtaattttacatggtgggaaaaagcaaaggaatcccatgaaggagagagatttttttttaaggcaagctcccaatgcagatagtgttcatattgagaaatcaaaggaggaaaannnnnnnnnnnnnnnnnnnnnnnnnnnnnnnnnn

SEQ ID NO: 508646 - DNA, 285 bp, Homo sapiens
aggatacagagaagagaggaagtgattccgctccaccggcagtgtgagcatctgtgaatggaaggtacacagagccacagagtgaggagagcagccactgaaggctcctgtttgtgtgcagagctgggagggycagagggaggagacccagaggtgacagcaagactagaggtttgtgtatgaaagaagcagctggaaagagagggagatgcaaaggaggaagtgaccaagggggctgtgtgtgtgtgtgtgtttgagagagccctgtccatgtgagctgtggat

SEQ ID NO: 508647 - DNA, 596 bp, Homo sapiens
tgcatcctgggtgtcatggcacttaaaaagaacaattttaaatcactttgatttcaaagcaattggaatcagggtgaacattagaacacagttttatcattttaaaaatcatatcatggtgtagcccctgagtttagcagtagcagcaggaaaagacacatctttgtaaagatagtgaggcagactaggaattaagagtgaagtcttaagatctctagatatggatcttagcaaggtgcttcctgtccagggtttagtttccccatcaataaactgaagacagtgaaaatgacaacctctcagacagattaaacaaaataacactcttgaaaaattagtagattctatagcacatattacttactcaaattattattattattagcatgagttargagctaggcatcttgagtagtttgaatcccattttgctcaacagctatttattatgtagccttcagcataacttcactttgcctcagtttccacatctataacattgggtagaatgtcttcataagactagtgcaagtatgaaatgagaggatatctaagcaaaatatttggcaaggtggctggtgtgtagtaagcactca

SEQ ID NO: 508648 - DNA, 608 bp, Homo sapiens
cattataaaataatgagctagtttaaagtctggctgcagtacataccatctcaacacatcattgagagtgtttatgtatatatatctatatgtatgtgtgtatatatatagagatatgtgtgtatatatgtgtgtgtgtatatatatatacataaatctaaattggttatgcagaaaattttcaggggcagggtctatgggtgcatagaggacatcaaaacaatagattattcaatgatatgtgccacttcacaaggtaccgtcaaagtccattccrtttgctatctaaacagtcattgactctgtgccacattgttgcatcaccaaatgttatttcttgtacttctacataaaatgctcttttacatatacataatgtcttggaaatgtttgtctttgggggagaaaggacaaaagtgaaaaagagagttcgcattaagaagcaaactactaaaccagaccagtacatgtttctgccctaatacaacaattaatatgatagtttctagaaggccatcaggtttcctggcatcctcagctacaatgaagttcgctgctttatttttttaattcacggctctccctctgtggaaggttgcaggtgtgaa

SEQ ID NO: 508649 - DNA, 589 bp, Homo sapiens
gcagtccagatgggacaatgtcacagccattgtgaacagagatcactgtggataaggtaaggcaatggatgtcttcaaagatgcctataagggcaaaagatattgaagaccagatttgcctaccgccacctctgcccatgcagagtcaaccatatgcaaaatctgaacattaaataatttataaagacagacggtgtatctgttaagctctataaaaaactgacatgtataagtaatcaaaacctattatccagatgaataatgttcaagtgactgtttctaatgcataaacttttctttcatattgatgatcacaaatttctgtgagtgatctctttcaaaaatgaagctgatcaaaattttacaactgacaaatatgatcaatagccaacacaaacyttagagtaataaaatctgaaacagttgcacttcagcctcttaaaaacaaagacatgactgaaatatttgcaagccaacaggcaccaatggcatggcttcaaacacggttcagtaatagtgccattttcctcactcccacagcaatgagtgggtggcttaagaccagagcagagtaaatctctgggctatt

SEQ ID NO: 508650 - DNA, 625 bp, Homo sapiens
ggtttcaagctttggggtttaaggtagataggttttaatggtgtgattacccacgacacagttcattaccactaatggagttacccatgcacccaaagggagaaaagtgatcctgcacaatagtgaactaataggcaataaattattacacctgagaaaggcaatcatacgtaagagcagtaaatggccagtgcccaaaagaaaggtacctatttttattttgcctgaagtgtgtgtctctttttcagaaggacaaagtttattttgaaagaaaaargaaaaaagaagttccactttttcttttgatcagtgtagacatggcaagagacacaaaataatcaaggcaaaaattgaatttactctttataatactgctttgcataacccatttccatgtttgggcttctcttaaattgagaattatatatgaatctttacattcaaggtttcaggaacatagattgcaaatttatattatgaggggataaaagttcactagcttgttccacaaagggaaaaacatactgtaactagcaaacattgttcatgcgttttttgatatttaattacaacggcaaaacctcttaaacctgaggcctacaatgctcatatggcactttggaga

SEQ ID NO: 508651 - DNA, 597 bp, Homo sapiens
ggaagggctgtaactctcacctcaccctctcgccacctaatataagggcctgactccacaatgggtgagactccccctcacrctggtctcttcagccgtgcagggccatccactccatgctgcgagttcccacactgagctgaactgtgttctggctctgggctgggttctcctgtgccctttccctgaatcctctctgggtctgagagactgattctctctactccctggcttaagtcttgacatcctgggaggggttctcagaagtgaggggctcctgctgctctctgggtctgttggtactcacaggtgtgggtgttggcttgcactgagaagtccaacccttccagtgcccttcaggggtccttccagagcaggagtggtagggcgtgggggagtgccttagagggatcttgccctcatcctctgccctgtctatgagatgtgtccagtaaaccgaaggtcagcacctcaggaatgaaatgtcttttgcagaaacttgaatgaagctggaggccattattctaagtgaaataactcaggaatggaaaatcaaataccattatttctcacttataagtgggagctaagctatgc

SEQ ID NO: 508652 - DNA, 585 bp, Homo sapiens
cacacgggactgcggctgcaaatcctgagaaaggaagggctcaaggccttctacaacggcattgtcccccacctgggccgggtctgcctggatgtgaccacagtgtttatcctctgccatgaggtaggaaagctgctcaacagtgtggaagacggagtaagcccggaagggccttgaggggaccgccccaggcacctccagagcggccaccacccttgtctcacaggattccagtgcagaaatgccaagcggcccctgyccaggtccctcgagctctgtgacctgccttgtgcattatgacgtcaagtctgtgtgtcccctagggccatgtcgccccgtggtctgtatgtgacagcggccctgtgtccacttgtctggcccggtgttggctggatgtccatctggcctgtgagtctgtgcccccttgtccatgtgcttactgtgagccctgggcctgtgattcatgttctgcgtcatgtgacactgcgccccacctcccagggtgcccgtgtggcctgggtcctcgagcctgtcgccctggcccagtcccagtccactgccttccaccctgccctgggctaccac

SEQ ID NO: 508653 - DNA, 532 bp, Homo sapiens
tgacattgcaaagcctgtgctttcccaactctacaagaaggacattttttgaggactcactgggataattctcttcatataggctattaatgtaggtgggtgctgttgctccacagatgacaaagtatcatgaagatgccttgaaggtgttaatggcttaattattctccacccccacataaaactttgttgtctttgtttgtttttcagacagagtttcactcttgtcacccaggctggagtgcaatggtgcgatcttggctcatggcaacctccacctcctgggttcaagcaattctcctgcctcagcctcctcagtagctgagattacaggcacctgccaccaggcctggctaatttttagtattattactagagatggggtttctccatgttgaccaggctggtcttgatctcctgacctcaggtgacccactcaccttggcctcccaaagtgccggaattacaggcatgagctactgcgcctggcccatataaaacttttgaagcytagaaccttcttcaccatgga

SEQ ID NO: 508654 - DNA, 419 bp, Homo sapiens
gcacaagactgggagtcaggagacctgacttgctgtgtgatcttgggcaagtcacttcccctttctagacctcagtttcccaatctgtaaaatagaggtgctcagcctcacctgccttcctccctgcaaccctgggaggatcacaagaaggttgtgagtgaaggggtttccttccatgcagaggctgttgctgtggttgtttttgttgctgcctcaggacccgcctctgtgtttctgtgggttttggggtctctgtgtgtctctgtcctggcctctctttgtctgcatctttgtctcccccacctgggtcccggctcggtatctytgagcctcgccagccctgcaggagcacctcattgccctctccccctcagtgctggtcatgccgctagcggacaaggaggctggggccgtggcag

SEQ ID NO: 508655 - DNA, 487 bp, Homo sapiens
aggcagggcgagggggtgaccgcggatccgggtcaccccactccccacctgctcccctctccggggctcttcaggcgggtggaggagagaggaaggaaggacatcgtaattggaactgagatggagggctcaaggggaagttggtccccggagggagacaggacggggaggtggccggcaggggcgcagggactcacgtattggagcactttgagctgcagggaagaggcatccaggtcgtagagttcccctgcaagggccaggcgccggtcagagagagggcccctccgcacctccgtgtccgggtccctcaggcgccgctcagctccgcgccgggcccgccgccggctcccgggatcgcctaacccgcccacctcccctccaagttctgcccggccccgccctcgtgacctgtccaggccgggccctcaccgcacagttggaggatcttgcggtcgcggtcgrtgtacgccgccccgcccttctg

SEQ ID NO: 508656 - DNA, 374 bp, Homo sapiens
aatagcatgcccagatttgcattgaggatgagttttctggaccttttctagtaacgtatgtagttattattgactttgtgatggtcagaaaaacaaaaacaaaaatactttaatctaaaataattatcatctcaaaattatattaacaagtttaattaatgaacagagrcatagccaccattgtgcattacatataattttatggataataaatggatagagtatttctctgcgtcacctccatgatgaggactatctgaaatctgccttattcactgttgccaagacctgaatcttaagaaacattcatatatttgttgaatgtgaaaacaatgaacaaatgaaagtttggaatggttttagtggcaaattat

SEQ ID NO: 508657 - DNA, 635 bp, Homo sapiens
aaagaagaaaaggggaaacagagactcttagagaagcaagaaagtgtgcttcctgcgcatgggcttccggcctcacagattgaattccagattccacccaggaagagaaggggccaggttcctccaggctgagaacagagtgaacttctgtggctccaccccagtgtgcactcctgtcaatgcacaggtcatttggaggctctgccagggaccccttcccacctgactgtctcagtaagtcaagagattatcttcaagatcactaagcaatcaaatttcattctctsttttttttttactagcttgcactcccaatagtgtacgagaatttcctttgctatgaaaatttaattattgcaaatttggtgtatcttattgtggttttattttacttcctttgggacagatattctttgaagctaatgaagtttgagtttccatgctcaatggaaatgcttcatgttgatgaccatcactgttatgtatggattaggtgattgctagcagtctatgtgtaagaaatgactttcaggaatattttgtactgatttacctaccccatgccacatcatgtagacgctgggtcatcatgaggacactgggtcaaaggttttaccacgtgcatgtactaaaca

SEQ ID NO: 508658 - DNA, 624 bp, Homo sapiens
ttataatcatataattatttcttttctttgatgtattatttgacattgataaagtattaattttgggatacacactttcaaagaaaaatatattgaaagattaactcaaagaaaatataccagctagaatacaacaatgctacagatggttaacattcatgcttcctcttctgtgacatgaagttgccccctgggaagaagattctcagtcacaagattaattttccatctctccccttgcatacaggtttgaccctgtaactaggtctcatcaaagaaatagctcaagttatgtatatagtataaccttgaaattgacccaatagtcccatagacagtttttttggataaacatagaaattgacccttctggtcttgaagcttgaaacttacatttgttttaycttagtttcttcctcaggaaaacgaccttgtggcttctcaatagaaaagtataaaataactgaaactgaccagatcaccacatgccagatccctcattcatcatgattgcttctttaccccttcctagttccttttttcttacacattgttacaattattctctgctatataaactcttaattttagttggtcagggagatggatttgagacttatcacc

SEQ ID NO: 508659 - DNA, 390 bp, Homo sapiens
cctgtaaactcagttccaatgtcacctgccacattccagatgggaccaggtwgtatgttctcgaacttctttgttctctagtctctaaccctctgaatctcccaagggacactgtgtggtctcaccacttcattgccccttctatgagcattgtggggtagagcagagagtggtcatcctcaggggccatcccaatgctagtttcttgagatgccagattccaggctgtgaggtcaactagatgcctgtagaatactggagtgacatggagcagctgctgctgttggggaaagcggattcctacctcatggtccactcccacacaccccagcaaagcagtggccacatgcagagggtgtcctgatcgattgttagttcacagacatccat

SEQ ID NO: 508660 - DNA, 516 bp, Homo sapiens
ctttctgcataactcttaacctcttgggaactcagttagtccattcaaactccaaacttcatatctggacaacatcatctcttacttgtcctccccttccattgttctccccagaaaggggtttagatctagggagaatacgtaatacgtgtgtgggtgcccatctaatatctgcattggcatgtcatctttgctggcccttctctaagctggagcttgtcccacctcatcttgggaggtctctgtcttgactatgttggctgctgaagcacctaaggctgatgtggccatagactattctcttgcaccctcagttcatggtctcccccttttccccactccccaacccttgttctttcccttstctcatactggggctctaatctgctgaaaatttaccatattatcaaatcaccgtgcaatctcacaatagcatccactctcttcctgaaaacaaggaccttctggaaggcacagaggctctcaattctcagaccttcttcgcacctccaaata

SEQ ID NO: 508661 - DNA, 606 bp, Homo sapiens
tgcttagtggaacacagaccataggtggcgagagacagagagagagagagagagagagagagggaggtggactagctgggggtgggggatggaggcagacagtgaagggcttgctgagggctgagaatgaaagaggcagtcagcactgcaccatccacctacttattcacaggctgctcacaaaacacaagggcaaataaaagacaagcagaagattaaaaaatcaacagaatcaaaactgcagaggcagcagatattgatatcagcctaatacgcctagaaggagataatgcaaagaacatggaaaacaatattcaaaatgagtggcctaaaatgttacagaattgttagtgacacaaatccacrtacttactaacctcaaatgaatccaaataggaaaaatacaaccaaatttatatttatacatattatagtgaaaccataggtcatgacaacaaataaaatacttaaaaagaaacagaaagaaaaaacagattgccatgaaaaattactattagatagctgattcctcagcaataaggaaatccagataagcaaaacttcaaagtgctaagagataataactatcaacaatgaattctatac

SEQ ID NO: 508662 - DNA, 553 bp, Homo sapiens
tgtctccacaagatcaaaccagccccaaatgggagttgctaggtatttgccaacacttgaaatcaaaatccaataggcctgatggctgtggttctggtcttttcctcccttttgtatttcaagatggcaatttcatttgctcattgatgctgctttttcattcaataagcattctgattcatctatgaacttcaaactctgcttctaatctaaatcagaacacaaaagtacacaaccccttcacttcttctaggccatctgggctcattctaaacaaaaacacgagcacagtctcagaatgagtgcttaatcaccccgggtctgtactttgttgtaaaggcaggcctccaatagtctagctcaggacggtcacactgtgagcagttcgatcacacgcaggttccccaactctctctttccccgtccagccctcgaggggtgccagggcctcttacggggccggtgactataactcccatattaggtttgggcacaggcctgaacaggatrccagatttagcctttcttaggtgagaagccaatagaaagaagt

SEQ ID NO: 508663 - DNA, 606 bp, Homo sapiens
tgcttagtggaacacagaccataggtggcgagagacagagagagagagagagagagagagagggaggtggactagctgggggtgggggatggaggcagacagtgaagggcttgctgagggctgagaatgaaagaggcagtcagcactgcaccatccacctacttattcacaggctgctcacaaaacacaagggcaaataaaagacaagcagaagattaaaaaatcaacagaatcaaaaytgcagaggcagcagatattgatatcagcctaatacgcctagaaggagataatgcaaagaacatggaaaacaatattcaaaatgagtggcctaaaatgttacagaattgttagtgacacaaatccacgtacttactaacctcaaatgaatccaaataggaaaaatacaaccaaatttatatttatacatattatagtgaaaccataggtcatgacaacaaataaaatacttaaaaagaaacagaaagaaaaaacagattgccatgaaaaattactattagatagctgattcctcagcaataaggaaatccagataagcaaaacttcaaagtgctaagagataataactatcaacaatgaattctatac

SEQ ID NO: 508664 - DNA, 566 bp, Homo sapiens
aggcagcaaggagagaagtgattggtcagtgatagatccaggtctcatggtcctctccactcggctaaggaggtcctggggctggtcttggctcaggtcttcytagcacagcaggagtcaagcccaggcggatctgcttatatatcacactttttcacccccacctctctgtacaccgtgcctgtgctcagggctttggccccactgttctctgaatggatgccccttgactggccactttagcacacagagttaaagaagccctcagcgtggcagtggtggcctggctgttgcaagggaaactccagtctactatacagaattgcctcctgggctgttccacttgctcctccctaaagcacctcaacatcagtacatccagagctaatcccccacctcccgccctgacactctccagaggagacttcatccaggagctccaaggccatttgtccttcctgaatagatggctcaaagacagcccctgttatagtagagcagaaaaatcaagtttaatatctggaagtgccctttccctagagtgaaatgcaggcagtaaccatgcc

SEQ ID NO: 508665 - DNA, 425 bp, Homo sapiens
tgctttattgggccaacggcatctgcaacccagggtggctaatagtaataataacagcagcagcagcagcagcaacaacagcaatgggagatcttatttattgagcacttactgtatatcagactctgtgctaaatgtttaacctggatgatctcttttaaccctcacacagcccagggaggcgggctctcactctcccattttgcagacagagaaataggcagagagcagtgaagtgattggcccagggtgatagtgccaggactggtgatagtgcctgactcccaagtccgtgctcataactacaatgccaggcgagtaccgggaatgcacttgaatagaagagggtgtggggctctgaggtgcagcaagggcccccccagcaagcctcctggctmcagcatagtctggggcctggatccccc

SEQ ID NO: 508666 - DNA, 541 bp, Homo sapiens
cacagccacctttttctgtgtgtcaaaaatgacaagstctttactttcaaacatagccaccattagatgctgttgtgttcttcaagcagtgttccgccttctgaaatagattcccactcagcacgggcaagtgccagctcctgggcctttgccagtctgctccctcccttagcagttaacctggaggtgctcagcctaccaggggcatgggatggctcccactacttgcggttgtaattcttcacctcactgtcatggtgcctagcttcctgggagctcaggacattattccctccctaagccctttgggaaggttgctcagggatctaaccaagggtgagttcaggcccccttaccactgcctattccctaaagtggttttggggcctgggtccttaggcgtccttttactagttcatcttgggtggaagtggaagtttccatcctttctaatactgagctgtgctgctcatcccttctgctccaccctggtcttacagatcctattcccttcaccccaccccagaggaggaatgcaatt

SEQ ID NO: 508667 - DNA, 541 bp, Homo sapiens
cacagccacctttttctgtgtgtcaaaaatgacaagctctttactttcaaacatagccaccattagatgctgttgtgttcttcaagcagtgttccgccttctgaaatagattcccactcagcacgggcaagtgccagctcctgggcctttgccagtctgctccctcccttagcagttaacctggaggtgctcagcctaccaggggcatgggatggctcccactacttgcggttgtaattcttcacctcactgtcatggtgcctagcttcctgggagctcaggacattattccctccctaagccctttgggaaggttgctcagggatctaaccaagggtgagttcaggcccccttaccactgcctattccctaaagtggttttggggcctgggtccttaggcgtccttttactagttcatcttgggtggaagtggaagttyccatcctttctaatactgagctgtgctgctcatcccttctgctccaccctggtcttacagatcctattcccttcaccccaccccagaggaggaatgcaatt

SEQ ID NO: 508668 - DNA, 632 bp, Homo sapiens
agaaaagtagacgtatcaacactcacaacgttattttaagtttaaatattttatttttacccagaccagaatttattataatttcatgttcctggctttagtagaagcaagtgcatcagtcatattttcaaaatctagttttgggaaagggcagactttgagtctagcttcactatgggttcacatggtgctgatgcaatcgtgtcctctttacatggggtaccacttctcctgtctaggtggtgtagggtgctggtgaagaasaagatcttaaaactggaccaggcagggcacggtggctcacacctataaccccaacacttggggggttgaggtgggcagatcatttgaggccaggagtttgagaccagactgggcaatgtagtaaaacactgtctctacaaaaaatacaaaaattagctgggtgtggtggtgtgcacctgtagctccagctactcaggaggctgagatgggagaatcatctgagtctggaaggtggaggctgcagtgagccataatcatacaactgcaccccagcctgggtgacagagcaagaccctgtctcaaaacatacacacaaacaacaaatgacaaacaaaaccgggctacctcggttctaatcctggtaccat

SEQ ID NO: 508669 - DNA, 511 bp, Homo sapiens
tttatttcagttattaggtgcagacaaatacttcctagtggactcttctagcactatgagatttcctccttctctctagtaatrtttcctgcctgaagagtacgtctgttattaatacaggcatgctactttcttttggttagtgttgcatggatagtcttcttttagtcctttacttacaatatttggtacccatatattttagatgtatctcttataagtggaatatagttttttaatctaatctgataatttttaataaaaatatatcaaagactgttaatttaaaatgattgctgatgtttgagttcaaatctgcatgtttagtatttaatctgcatgttctagtttcctttttcctcttttcctgccatatttggtttaatctactattctttattcttctatattcctttctagtattctatttattcccaggtacacattcttttattaagccttttagtgatttatcctatagataatatgccttcctgactgagcaaaaact

SEQ ID NO: 508670 - DNA, 638 bp, Homo sapiens
caaatattaattaagagcaacacatgtctgagctccccaaggcagccttagtttttacttgggctcacaactcctgttttcctctcgtgaggtgccatatgtgctcaaaaacctttgagagattttgcttagtgatctacaccagcttcttttctttgttctctttaatactcagcaagattaaaatatcagcccagtactccatagaacctgtagagtgcaggttacttccaaccacagtgtttggactaattccagtataacatcattgcaaagcgcatgcttgctgactatgtaaaccaagaagggagtgtatagtgtttgttttgacaagtttggccccacagkgtttgagaatatgctactcttgctgtctcaaccttggaaattggaactatcattaaaataatagtaaaaaatcatctccccttgcaaagagcttcggtggcttttccttgcctacaggatcaagtctatcttacctagcctttaagggctcccgtccattagctctaatcacctatcctcttggccacagtgtttgttacaacgtgtctataagctttttctcacagagttctataacaaaattaaaattgaggtccaattagatcgagaaacatattctaagcttctct

SEQ ID NO: 508671 - DNA, 651 bp, Homo sapiens
ccctgaaagaacactcacagagcagtttcagaaaagaggctagaaataaacataaagatactgggcacctattgggaaagaagtgatgcattggcagcagtgaggggactaagtctccaaagacaaggtagtctgcctccaagcctggtccctccactaacctagccctaatataggtgctttctagagacagtgtcttaccccacagtagtggtattcagaggggacaggcacatggtgagccattcagaaagatatttattcaggcatctctacaattgagcacatagctagtttggaactcctggttttcataccctgctttattttgtccattgttttcctccccttctaatacactatatgatttacaygtctataatgttcaacttttcctatcttcccagataactctccccatcgggcaggctgtaagctccaagaaggcaggtgtttctaccggttttattcgttgacacatgctaagtcatttgtacatagctgaagcttaataatatctgtaaaatgggcaaatgtctacatagcagatagagcattcctccaaaattcctgcaaatgtgtaactaaagacttaagtttacaacttatacacaatgggattatatgcttatgtcatttagaaaagggaca

SEQ ID NO: 508672 - DNA, 626 bp, Homo sapiens
tccttttaatcgtctcctaatgatgaattggccttgagtgrttctgtgttctatccctgtccctttactgactcccttttcccttgttggccattgtttcttcctccagggaccttgttggaatccacagccccagagtagaaacaaagacatgcttcacgattacctgcacaaccttaagccatgcattacttctgtacaaaatttcaactttatcaggtctttatcacacacctcactcagccttcccacttcattttctgtgtttgtcgttgtacttacttatggaactgaagccagctgattttgcttccaagtcataaacccaaatggaccctctagcttcactgtttcctttcccaggcatgcccttggcttgaccacacctcttctgtttctacctcaagatttctccaccctcaccctttgcctttccttgatgacgcagctggcacttcagacactttttaggtgcagcactgtgtcatcaggattcagtcagggaagcaaagaccacaccaggtatttcaacagacataatttaatatcaattacgtaggtgtcggaggactgaaagagcaataaaaagaatgaaatagctcagagatgctaacaccagaagagct

SEQ ID NO: 508673 - DNA, 626 bp, Homo sapiens
tccttttaatcgtctcctaatgatgaattggccttgagtggttctgtgttctatccctgtccctttactgactcccttttcccttgttggccattgtttcttcctccagggaccttgttggaatccacagccccagagyagaaacaaagacatgcttcacgattacctgcacaaccttaagccatgcattacttctgtacaaaatttcaactttatcaggtctttatcacacacctcactcagccttcccacttcattttctgtgtttgtcgttgtacttacttatggaactgaagccagctgattttgcttccaagtcataaacccaaatggaccctctagcttcactgtttcctttcccaggcatgcccttggcttgaccacacctcttctgtttctacctcaagatttctccaccctcaccctttgcctttccttgatgacgcagctggcacttcagacactttttaggtgcagcactgtgtcatcaggattcagtcagggaagcaaagaccacaccaggtatttcaacagacataatttaatatcaattacgtaggtgtcggaggactgaaagagcaataaaaagaatgaaatagctcagagatgctaacaccagaagagct

SEQ ID NO: 508674 - DNA, 586 bp, Homo sapiens
ctgcatttctctacattaagaagaggtacagggctgggtgcrgtggctcatgcctgtaatcccagcactttgggaggccgaggagggcggatcacctgaggtcaggagttcaagaccagcctggccaacatggtgaaaccctgtctctactaaaaatacaaaaaataaaaataaaaaaaaattagccaggcatggtggcgtgtgcctgtagtcccagctacttgggaggctgaggcaggagaattgcttgaacctgggaggtagaggttgcagtgagctgagatcatgccactgcactccagcctgagcgacagagcaagacttcatctcaaaagagaaacaaaaaaagaagaggtatgggacatgcaataatgaatgaatgaaaataagaagcagcttttttttctcccttgtaataagtctatcacagggaaatcactatttccacaagagtccagtttaggagagtgtgtttacttctttctccatcctgctcccctaccatttctctctcttttgtcccaaccttaccaaagtacaggaaagcaaaatataaagcctgaggtagagatggaaatgaatggaa

SEQ ID NO: 508675 - DNA, 586 bp, Homo sapiens
ctgcatttctctacattaagaagaggtacagggctgggtgcagtggctcatgcctgtaatcccagcactttgggaggccgaggagggcggatcacctgaggtcaggagttcaagaccagcctggccaacatggtgaaaccctgtctctactaaaaatacaaaaaataaaaataaaaaaaaattagccaggcatggtggcgtgtgcctgtagtcccagctacttgggaggctgaggcaggagaattgcttgaacctgggaggtagaggttgcagtgagctgagatcatgccactgcactccagcctgagcgacagagcaagacttcatctcaaaagagaaacaaaaaaagaagaggtatgggacatgcaataatgaatgaatgaaaataagaagcagcttttttttctcccttgtaataagtctatcacagggaaakcactatttccacaagagtccagtttaggagagtgtgtttacttctttctccatcctgctcccctaccatttctctctcttttgtcccaaccttaccaaagtacaggaaagcaaaatataaagcctgaggtagagatggaaatgaatggaa

SEQ ID NO: 508676 - DNA, 601 bp, Homo sapiens
cctctccagatgccagtgccatactcttggactctgcagcctccagaaccatatgccaaataaacttttgttctttataaattacccaatctgtggaattctgttaaagcagcaagaaatagataagacaacttgcttgtttcttcctttctgggcttattctccacttactctttagtcttctgtctgctttttcatgccctttcctcctataaactattctcctatgaccccaagatttcttattttgagtctttagaaatatctaagacaggtggtaatagctgacaatgcaacattgagtcagccaattagcaaacaaacatcatctggacaggtatgctaggcactagctgagtgctgaggaaacaaggcatactatttttgagaaatgtgtgtactagtggcaaatatagattcaagaatcagagttataatactctgtcatgaacagcatggtaaagttaagttgtactgcatttcagatatacaggaggaactgccaggaaasgtaccacctggaaggtggtcatttggactacggagatgaggtttggtggagaaggagagattatcaggtaggaggagggggagtacaagt

SEQ ID NO: 508677 - DNA, 617 bp, Homo sapiens
cgttagcattagtgtattttatgtgtggcccaggagcattcttcttccaatatgaccccgagaagccaaaagactggacacctgtgcactagatcaaaaggctactccttctggaagcaattataaagaatttctgacattatcttgacatgaaaaccaatggatagtgggacagaatgcaaaatcttcaagaatttttcttggtggtttttttttttttttttttttgagtcaaggtctttctctgtggcccaggctggagtacactggtgagatcacagctcagtgcakactcaagtgctcctcccacctcagccacagtagtagctgggactacagatgcgcacaaccacccctggctaatattttattttttgtagagatggggtctcactatatagtccaggttggtctcaaactccttgactcaagggatccaggacaggataacaggtgtgaggagccaccacacctggccatgtgcatgaacttttaagacaaacacaaggccccacaaaagttaaggttttcccacctaatttccaggggatcttttggtgcaaagctgagaagcccttaaaagtacacagacaactccaaagattcaagagagttca

SEQ ID NO: 508678 - DNA, 623 bp, Homo sapiens
tccaggtctgactcccaactcagttctcctttaataaccacactttgttaattctccttaacaggagttcctgacaagtcagttctccctcagaccttcagtggcctcacctagaagatgagagggctggatcagatggaaattcggggagtaagggaatgtcggcacgcagcccacctcccccaaggaccctggagcctccatcccagttcccaccatgcacccgccccacaaatcctgcccaaggtgrgggctggtcccgggtcctccgggtgccgcaacagcgagggaaggagggaggggaagcctccaagggcgcgacgcaggctcaaggatgcaactcggccaggagtgaactggggacccgagggaggtatccgggctgctcctcgagcccagcccgggtccccgaaccccttacctccagggtccgtatctcctgctgggtgaggccgttggacacagcgcacttggtgcgcagcccgtgcaggctgccgatggagatgccgatgagcttctgtagctgcccgcactgctgcagcgtccggctggccgcggcccctgcgccaccccatcacccccgcccccgccctccttcttctctcccatagcctccccgcgca

SEQ ID NO: 508679 - DNA, 623 bp, Homo sapiens
tccaggtctgactcccaactcagttctcctttaataaccacactttgttaattctccttaacaggagttcctgacaagtcagttctccctcagaccttcagtggcctcacctagaagatgagagggctggatcagatggaaattcggggagtaagggaatgtcggcacgcagcccacctcccccaaggaccctggagcctccatcccagttcccaccatgcacccgccccacaaatcctgcccaaggtgagggctggtcccgggtcctccgggtgccgcaacagcgagggaaggagggaggggaagcctccaagggcgcgacgcaggctcaaggatgcaactcggccaggagtgaactggggacccgagggaggtatccgggctgctcctcgagcccagcccgggtccccgaaccccttacctccagggtccgtatctcctgctgggtgaggccgttggacacagcgcacttggtgcgcagcccgtgcaggctgccgatggagatgccgatgagcttctgkagctgcccgcactgctgcagcgtccggctggccgcggcccctgcgccaccccatcacccccgcccccgccctccttcttctctcccatagcctccccgcgca

SEQ ID NO: 508680 - DNA, 623 bp, Homo sapiens
tccaggtctgactcccaactcagttctcctttaataaccacactttgttaattctccttaacaggagttcctgacaagtcagttctccctcagaccttcagtggcctcacctagaagatgagagggctggatcagatggaaattcggggagtaagggaatgtcggcacgcagcccacctcccccaaggaccctggagcctccatcccagttcccaccatgcacccgccccacaaatcctgcccaaggtgagggctggtcccgggtcctccgggtgccgcaacagcgagggaaggagggaggggaagcctccaagggcgcgacgcaggctcaaggatgcaactcggccaggagtgaactggggacccgagggaggtatccgggctgctcctcgagcccagcccgggtccccgaaccccttacctccagggtccgtatctcctgctgggtgaggccgttggacacagcgcacttggtgcgcagcccgtgcaggctgccgatggagatgccgatgagcttctgtagctgcccgcactgctgcagcgyccggctggccgcggcccctgcgccaccccatcacccccgcccccgccctccttcttctctcccatagcctccccgcgca

SEQ ID NO: 508681 - DNA, 435 bp, Homo sapiens
aacacgttcaccatcaaatcataatgagtgatggaactggaattcaaatccggttctctctgatgccaaaaattgtgcaatttaacgaggaccaagttacacctagaacatggggggatcaaracatgtggattcccttttctgccccctcatgtgggaatttcaatagctttcactgcctcagagcaatactaaactccctcccaggttgccttgcaatggcccccttattcgtggggatgattaggaatctgcatttttggaccacaagcatctataaagagtggtgttgatcaagaaataaaatttactaggccataggttgctgtgaatagtctagcttctctgacaaaaaataaaggggctattccatgtaaaaaaaatcacaggatccactgaatctgtgcagaaagacatagaaatatactgcaggag

SEQ ID NO: 508682 - DNA, 435 bp, Homo sapiens
aacacgttcaccatcaaatcataatgagtgatggaactggaattcaaatccggttctctctgatgccaaaaattgtgcaatttaacgaggaccaagttacacctagaacatggggggatcaaaacatgtggattcccttttctgccccctcatgtgggaatttcaatagctttcactgcctcagagcaatactaaactccctcccaggttgccttgcaatggcccccttattcgtggggatgattaggaatctgcatttttggaccacaagcatctataaagagtggtgttgatcaagaaataaaatttactaggccataggttgctgtgaatwgtctagcttctctgacaaaaaataaaggggctattccatgtaaaaaaaatcacaggatccactgaatctgtgcagaaagacatagaaatatactgcaggag

SEQ ID NO: 508683 - DNA, 435 bp, Homo sapiens
aacacgttcaccatcaaatcataatgagtgatggaactggaattcaaatccggttctctctgatgccaaaaattgtgcaatttaacgaggaccaagttacacctagaacatggggggatcaaaacatgtggattcccttttctgccccctcatgtgggaatttcaatagctttcactgcctcagagcaatactaaactccctcccaggttgccttgcaatggcccccttattcgtggggatgattaggaatctgcatttttggaccacaagcatctataaagagtggtgttgatcaagaaataaaatttactaggccataggttgctgtgaatagtctagcttctctgmcaaaaaataaaggggctattccatgtaaaaaaaatcacaggatccactgaatctgtgcagaaagacatagaaatatactgcaggag

SEQ ID NO: 508684 - DNA, 321 bp, Homo sapiens
ttagaatacttaaccctaacctggtgttctaggtctttcctttttgtaattattattattatttggagtcakggtcatgctccatcactcaggctggagtgcagtggcacaatcacaatgccctgcagccttgagcttctgggctcaagtgattctggcacctctgcctttgcctcccaagtatttgtaccacaggtacgtgggcccagctaatttttttttttttttttttctcatagagacagggtctcaggctggtctggaactcctgggctcaagcaatcctcccacctctgccttcacttcccaaatagctgagac

SEQ ID NO: 508685 - DNA, 321 bp, Homo sapiens
ttagaatacttaaccctaacctggtgttctaggtctttcctttttgtaattattattattatttggagtcagggtcatgctccatcactcaggctggagtgcagtggcacaatcacartgccctgcagccttgagcttctgggctcaagtgattctggcacctctgcctttgcctcccaagtatttgtaccacaggtacgtgggcccagctaatttttttttttttttttttctcatagagacagggtctcaggctggtctggaactcctgggctcaagcaatcctcccacctctgccttcacttcccaaatagctgagac

SEQ ID NO: 508686 - DNA, 321 bp, Homo sapiens
ttagaatacttaaccctaacctggtgttctaggtctttcctttttgtaattattattattatttggagtcagggtcatgctccatcactcaggctggagtgcagtggcacaatcacaatgccctgcagccttgagcttctgggctcaagtgattctggcacctctgcctttgcctcccaagtatttgtaccacaggtacgtgggcccagctaatttttttttttttttttttctcatagagacagggtctcaggctggtctggaactcctggrctcaagcaatcctcccacctctgccttcacttcccaaatagctgagac

SEQ ID NO: 508687 - DNA, 535 bp, Homo sapiens
cattttatacttagctttttaaacttttagccattctagtaggtttagtgataatttttagacaaacaaggaaaatgtacaggttcattaatctaggaaacatttatgcataaarccagtgcctggctttagctttgggttgatacactttgccagaagtttgattttatttactgtgtcaggaatatcagcatgttgagaacacacaacacagtttcttgtctctagaccctctcagacagatgagaaagacatgggaaagaaaacaggcgcaagagtatacttatggcactttaggagttcatgtgggaaggttttaacctctccttgggaagaagggaaaggttgccagaagttgtcttctgagtcaagtccatattcctctaaattgatgattagctttgtaaattaacatgtcaatgttggctcttgagtgttttaaatgccatggaagacaataagggcttctgcttcccaagccagaaggtaataaatctttttttttttttttcgagacgtggtcttgctgtgtcac

SEQ ID NO: 508688 - DNA, 135 bp, Homo sapiens
caatgtcccctggttttcaatcttccaaggtctcttcaaccagaaagctatttctatcagccttatttccattgctgcatacatggttttgggcattgacccaaacctyggacaatgaactggagtaaaacaggg

SEQ ID NO: 508689 - DNA, 470 bp, Homo sapiens
ctgggctccatactggctggagttctgtatctgccatctgtctaagcctctccctgccggctcaattgtccatgggagtcatggggtctcctgttgccaggattccagaggtccatggtgagagctggtcattctttgtctgctcaactcagccatccccaggagtcgttcaggggcaggaatgagtcccagtgcagagtagcctcatgcagggttcccaactttctccctcttcagcccagcatctgtgtcttctctccatctgctctcagtgccttccctgtgaagatctgctcagagtatgccagtctttccaatgycatggtctctcctagccacatctagtcagccatcttccaaaaaactggattgattttttctattcttccttaaaaaaaaaaaaaaagtttctgctcttaccatgatagtctcctttttctttgagttttttcttttgttttgtctctaac

SEQ ID NO: 508690 - DNA, 343 bp, Homo sapiens
ctctgtgatggggctgccttggggatgccgaagagcagtttctgagcagggacacgacatttctgttgctttgtggctgacctggtcggcacctcagggtctgagatacagattccagtcacaagctggtgggccatttatacaatctggtggggtatagcgcagcattatacaccaagcccctaaacctgggtgaagcagatcatatgtgaaatgcactgcagaggaacccaggtgagttttttttagagggcaggcgggaagaaggggagrgagcaaagactgacttgtgcaaagacagctctacaacaagcctcaagggataaagccttccaaggactat

SEQ ID NO: 508691 - DNA, 611 bp, Homo sapiens
gctggggaagaggggtgcctgagaagaggtgaggtagggtggggagaaggtgagactgggtatggaaaggagacacctcattcatccacatggattcatgaaaaaatccccatatctttgaggaaattttggacagagatgtgtatatgtgtatacacacatatccatacatagatgtgtatatgtgtatatatgtacactcacaygtatatgtacagatatgtgtgcatctatatccacacacataacacacgtatgtagatataatctcatcagttaacattttcataaaaaataaatcatttaaagctgtatacgcctacaaattctctttattccggtgcactgcactggataaccaagtaccttagagattttattttgctaggaatacatattgtgtgtatgttatgtatatgtacgcatgtgcatctttatacacatgcatgcatatacatacacatacatacacacgcacaccatatacttatatttaaattctatctgttgtgttggtgatgacaaagggcaaaagcagagccagcttccccatgatggtgggaaggagaaattgctatgtaattgagagaagacacaaagctggagtggct

SEQ ID NO: 508692 - DNA, 586 bp, Homo sapiens
caaattaattgatatcctaatgagctttcagcatgaagattattagttagatggagtcagaactgaagatcatctttaaggaaatgctaaggacactgcagtcggggagaaagatgttatctgtcaatgctcagttagaaatcgctcttgctcaatgagaacttttcaaagagggagccaagtgggacagcataccttatgtatctgtctctgcctgtcctagcctggccaggttcggagactggagcctagtcctgttcctgagttgatggaaacccacaggtataggaagttccaccccaagccagcctctgggggtctcgtaataccaccactgtgctgcagattccttccttggtctctagaatagaagccctgtgagggcagagccttcctcaattttgtttgcrtttgtgtcaccaatgctaacctagctgcctgatttacagcaataataatataagagcaagtaatgatgtagagtttactatgtgttctgggtattgttctgagcactatccttaaaataattcgcttaagcttcataacaacagtgtgaagtaggcacactactatctccagctta

SEQ ID NO: 508693 - DNA, 633 bp, Homo sapiens
cagtgtcagggatacttctctaaagtaaaatgcgaaccatctgtcccctcccccacctgtttcttagaccaagattgatggacaaatgtyagacaatcaccgcaagcacgggaggaaagcctgaagcaatgtcctaataagccccggcaggagcttctgcttttccctccaccatttgctccaggaggccaataaggggctggagccttaaaaagctaccttccctgtcttgttataacctagttagtggtgggcaaagcggcaattcttcagttccctttcccagaggaattacgtcctttcagtgtcattctgggccccccagtcttgcaatatagatatccttttggctgctgcgtcttgaatctttggagtgttcttacctaatttttcaaagtgaaaatgaggcagtacagatgctttatattgcctagattggcctttactgaaccaatctttccttcacaagttgggagaagagcacagcagaaactaataaaggtaaatgattctctgggtgatccgaagcaggttgtttccacctgtctcacagaaagtttcccttctgaaaaaatagtagcccattccttaaaggttatcctgtcaggttggagagaattgagattgacaact

SEQ ID NO: 508694 - DNA, 568 bp, Homo sapiens
cagctgtcttccttcgccaccccctgagaggcaagccccgcctgtccacacgtagacaagtgtgtgtacacacattgacacacacctctagtctatgcaacttgcacatgcttactgtaaatacaacagcccacacaaaatcacatggtggatgtacccgctagacactccaggatatcgactctgccaagctcyttctagacatccatgcaagctgtgtacacgtgcattgctcagcatccacaaatgcggacatggaatttgcatgcacatgggatctccatatatgcactcccgccttgttcacaacctgtacacaccccagcccaccactgatccacctccgtgtggattagactgaggaccaggcaaggcctaaccacaactctcactttacatcttctgatgcagcgagtggatttttgacagcggcagtggaggtttcatggaggaggggggactgggaggagttttggggggtaaaggggaggttctggcagaagaagggaactaggccttccctgaagtccaccaggaaggcacccagacacatgcccttccccccagc

SEQ ID NO: 508695 - DNA, 588 bp, Homo sapiens
tgcctgcacatgccatgcaaagtttcggggtactcttctccctggctgcagtcacctgctttgagaccctgccttacataccaacccacccaactggagcctctacactggtctgtgggacttacttctcaagggagaccacacctgatgccaacatctttagggcactccttccagttcactcccaagaaacaccagccttcgaccccagtctccaaggctcatgagtgggggtcaaggcccyaatttccccgtaaatgcctgaagcgtttgttccaccccagaattcaccccggtggtggctggaaggatggggaggtcttacctcgagttttgttttccttgggaaggagagagatgacttttccttcctgaagatagacaaagaactggtagcgatggaagccactgtgtgccggtggggagggagcctggtaggctataggtagaagcaggagagaggtgagcatcaacatcccatactaccgagggcagagctctctgccttcccatggtcctgctgacctccctggggccccagatcagcactcggccctgcaaaacattaggatttgtatttggcgggat

SEQ ID NO: 508696 - DNA, 128 bp, Homo sapiens
aagtccttaggctccacttgctcttctcccctccccagcattcttctgtactaggttgcacatgatgagggtgrtctgaggggagaacaaggagggggtgtgactcagagttcacccggctgtcagca

SEQ ID NO: 508697 - DNA, 128 bp, Homo sapiens
aagtccttaggctccacttgctcttctcccctccccagcattcttctgtactaggttgcacatgatgagggtggtctgrggggagaacaaggagggggtgtgactcagagttcacccggctgtcagca

SEQ ID NO: 508698 - DNA, 588 bp, Homo sapiens
ctgctcagggtcaagtccttaggctccacttgctcttctcccctccccagcattcttctgtactaggttgcacatgatgagggtggtctgaggggagaacaaggagggggtgtgactcagagttcacccggctgtcagcagccctgagtcagagggagggtggggaggtgggtggaacagcttttggtagtcttggggttccctataagcaagagcatcccagaaaaatagaagagagccccccagaagctacgaggctcccacrtgcagggtaggccttttctcggccaccactacacaccccaggagaacaggagaggcctccacgagtcctggatgatttaggtgcggacttgcctgggggaagggtgttggcccagaggaccccttgggtacctctgaactctgggattctgcagagaggcctcaccacatcaatgctttttgctctgtgtacccagatgggtctgtggagaatttggggggttccactgctgggactggggagatgacaatctggggtcaggggactgaggtgggtgtgggatgtgggaacaggaggggtgtcccatagcaccagtggagctt

SEQ ID NO: 508699 - DNA, 568 bp, Homo sapiens
acttcattctttcctcttcaccacgaaaaccgcacatcctcgaccccatatggatggggctcttgtctttggcgcaactgctggggtgctccgaatctcctcgccactgcgctcagcctagrgtcagcgccgggtcaggggcccagggaggggcaggggcggcgaatcagagtgaagttggcacaaaagttcttgggatattggaccaaggaattctgacaagttgaaacacccccccaaccctgcgcgcacccctccttccccccacaaagggaagcactccctttctcttaatctcggataggatcccgaacgctggagccgctgaggtagcaggggcgcaacgcacgccttccgggttccccagcagttcccgggctgcaaagggatttcgccagatgttttcaactctctttctaactgctggggtgttggagaccacttgcaaacaaccccaccccaccgcccacctctccccaatgcgctctcctaacgcaaacctcaaataaacacacacaatgagttactggtgtttcgactccacgctacgcgctttgcgctttgcatg

SEQ ID NO: 508700 - DNA, 504 bp, Homo sapiens
ggcagcaccagcagaggggccctcccctggggtcttcttcaaccagaaacaagtcaggcagcggtgggcttcagaggttgaaggcctgtggcggggggcctcatgaaagaactatcctcagggcagggaggcctgggttgctgcccccttcatttctttctttctttcttttgtttttctttttatccttttgagacagagtcttgctctttgcccaggctagagtgcagtggcgtgatcgtagcttactgcagcttcgacctcctggcctcaagygatcctccccgctcggactcccaaagtgctgggattacagggaagctcagtttctcaagcaagtgctgggattacagggaagctcagtttctcaagcaagctgtgccctgtaggcccttgggtggcataagaggcaggcttctttgggagtctctctgactgcccccaaccctgaagctggatccttttgaggttgcttctcagcgagcagcatgaaggcccggaaca

SEQ ID NO: 508701 - DNA, 502 bp, Homo sapiens
gggcgtgatggtgggtgcctgtaataatcccagctactcaggaggctgaggtgggagaattgcttgaacttgggaggcggaggttgcagtgagccacgatcacgccgttgcactcccgtctgggcaaaagagcaaaactccatctcaaaaaaaaaaaaaaaagggattactgggccaggtagagaagaggcctggaaaaaagaagggaggaggcttttgctttagtccagatgagggaatgttggtagcttagagatagagagaaatagatgtttccaaggagtatttaataggtaaaaatatataaaacttcctaagtgtataactaagagaattgaaaacatgtcaacattgaaactaaaaacatcatacacagycgggcgcggtggctcacgcctgtaatcctagcattttgacaggccaagttgggcagattgcctgacctcaggagttccagactgggcaacacggtgaaacccatctctactaaaatacaaaaaat

SEQ ID NO: 508702 - DNA, 598 bp, Homo sapiens
cctgcaggccgccctgcctgagccctgtctgccacaaccctcatcaggggctctcacaggatggtgcatcttccctgcagagcaccaggtcacagggacacaccggctggcatgtgagccgtggtcattcttgctttctcagggacagaggcatggtggggcaggggtcacagccatgcctgccttccatgaagtccccagggccagcatggctggacttgcccaggactaaggagtttctgggatgtagactttcactgctaaaatcaggataatcctagacaaaccaggattcattggtcaccctatcaatccataactatgaaatgaaatgaaattgccttttactctaagaacctatagtcacaggatgtatcagtcagggtccccccaggagaagggagacccatctgggagtttcagagagagcatttaataccaagaatcagttacactgaccagggaagagttggagarttaaacaggaccatcagaggaggaaggacagcagcagacagaagcccctaggactggagaggcgggatggggcgcagagccggccactgtcagaactgcctgtcaggaggggctgccaggg

SEQ ID NO: 508703 - DNA, 443 bp, Homo sapiens
gtaagttaccctcaatgcaagaggcatccgtggagcacccacccctggtgaggaggcascccaggctcaagccttggctctgacactcatgggcagggaggccctgggcaaaccactgggtcccccgcaaccttccatttcatcctctgaaaaacggtgacaataagcgtaccaacatcatcagatcatcatgagtactgaatgacagcatcgcagtgttcgtacgttaggtggggcctagtgcccaagggatcatacgtgcttcacgtctggagacgcttccacagaacaccttcccccacgcccacagcatccctgccacccagtactggcaccctcatccacacaaattacaggggggtaccaacacccgcagggctcttttgagtcctagagagcccagagggctttacgctatgttccctgtggctacaggggaggag

SEQ ID NO: 508704 - DNA, 443 bp, Homo sapiens
gtaagttaccctcaatgcaagaggcatccgtggagcacccacccctggtgaggaggcagcccaggctcaagccttggctctgacactcatgggcagggaggccctgggcaaaccactgggtcccccgcaaccttccatttcatcctctgaaaaacggtgacaataagcgtaccaacatcatcagatcatcrtgagtactgaatgacagcatcgcagtgttcgtacgttaggtggggcctagtgcccaagggatcatacgtgcttcacgtctggagacgcttccacagaacaccttcccccacgcccacagcatccctgccacccagtactggcaccctcatccacacaaattacaggggggtaccaacacccgcagggctcttttgagtcctagagagcccagagggctttacgctatgttccctgtggctacaggggaggag

SEQ ID NO: 508705 - DNA, 443 bp, Homo sapiens
gtaagttaccctcaatgcaagaggcatccgtggagcacccacccctggtgaggaggcagcccaggctcaagccttggctctgacactcatgggcagggaggccctgggcaaaccactgggtcccccgcaaccttccatttcatcctctgaaaaacggtgacaataagcgtaccaacatcatcagatcatcatgagtactgaatgacagcatcgcagtgttcgtacgttaggtggggcctagtgcccaagggatcatacgtgcttcacgtctggagacgcttccacagaacaccttcccccaygcccacagcatccctgccacccagtactggcaccctcatccacacaaattacaggggggtaccaacacccgcagggctcttttgagtcctagagagcccagagggctttacgctatgttccctgtggctacaggggaggag

SEQ ID NO: 508706 - DNA, 443 bp, Homo sapiens
gtaagttaccctcaatgcaagaggcatccgtggagcacccacccctggtgaggaggcagcccaggctcaagccttggctctgacactcatgggcagggaggccctgggcaaaccactgggtcccccgcaaccttccatttcatcctctgaaaaacggtgacaataagcgtaccaacatcatcagatcatcatgagtactgaatgacagcatcgcagtgttcgtacgttaggtggggcctagtgcccaagggatcatacgtgcttcacgtctggagacgcttccacagaacaccttcccccacgcccacagcatccctgccacccagtacyggcaccctcatccacacaaattacaggggggtaccaacacccgcagggctcttttgagtcctagagagcccagagggctttacgctatgttccctgtggctacaggggaggag

SEQ ID NO: 508707 - DNA, 576 bp, Homo sapiens
gtgggcatatcttagggagagctgcttccatcccgtttgcttggctagtcttcagtttggtctgatgtctgagcctcacctctggagtcaagttccacctcctgcctcaataggggtggagggagtttatgtgagaccccaggcatgaccacaatcattcctctcctcccagccctgaggtctgaccaggggtctgcckcattgctgcctggaggagaaaggcagccatgtcctgcttagagcagagagaggagctgctggaatttttggacgtgtggaatcctgtgtccttggagtatgggaatgatggaggcagcatcgccagggccctggaggctcctgaccatctctagggccagcgtgctctcagcttgaccgaccatgctgggtgaggagttcagagcctcagaggagctgtcacctcccaggtcccctacccttcagggcagggtttctaaacctcagcactgttgacatgtcgggggaccattctctcatgtggaggccgttccttgcattgtaggatgagcagcatccctggttccgctcgccatgtgccagcatcacccccagcca

SEQ ID NO: 508708 - DNA, 493 bp, Homo sapiens
aaaacaaaataaacatctaatttatatactgaaaatccttgttatctgaacatattattccatgtttaataaggtttgctgaatttgataatatattacaaaatattttcaacatggagatttttattttccatttcaaaaaaagttttggaagaaatgtctatcaaattttgttgctcaaactccagcttcgttttcaaattgtgcacaaaatttaatccaagggactggcccttttattacaaaatattaagaggataaaaatgataattaaaatggaaatacgtatggtctatcatcagtaatattcttcagcagtaacttatttttcttcaatactccaatctagttaagtgttaataaaacttacctaataacatctgtaagtggctggtttggatgagagaccagyattccattgctgtatttgacacttctaaaaaatctactaaataaatgagatatttctttccagaatccatggaaacatgtc

SEQ ID NO: 508709 - DNA, 632 bp, Homo sapiens
tgtgggaagaagtctccttattaccactctgcaatagtccttcctctacataaaactgcctttggtaaagggtaagttagatcaccttgctccccagcttataactctataatcatccctttttatgttaagaaaaataaacaacaacaaaaaatcaccaagtcaacctgttaagcccctgctcatctcctctgggaatacttgtctgaacatcatcaagagaactcaattaagtcccaccccgattccccagtctgtgctcccacgatgtgccatgcacatcacaccctttgcactttccacaatgtactgcaatgatctgtgcatgttcctaaaaggctgagagctccttgtgtgtctaacatgctgggagatttatgagggcagatgtcaggttattcctttatattcctagtaccagcataatttatgaaacctatgatggttattatttctgcacctatatgtttgtgaaagttttaacttgtctctagctagtcatgacttccttgaataaamctcaacagctccctgaatctctgtaaaaacatgggagtaaaatttttcatctgacaagaagttattatgatggctgattttatgtgtcaacttcactgggccataggatgccc

SEQ ID NO: 508710 - DNA, 572 bp, Homo sapiens
tgattctcaggccttcagacatggactggaatctaccccattggctatgcagctttcagggttttgaactacrccaccagctttcctgagtgtacagcttgcaaatggcagatattcagccaccataatgcaattttcagcctccataattatgatgtgacccaatgcctaataactgattcatattgttataaaaagatcttttccactgtctaagtgctcattctttaccctttttgcttgtgtgtctccactttagaagaagaaaaacctaaatgtcctgcctctcttgcagctaagagcagccatcacacacaagtcttgtcaaaatgaaagtggtagtctgctgggggtgtgtatgatgtcagtttctattccctaggaagattatatatatatatgcatgaagtaaacagtaatttgatgagtactgattctgagttcaaagtgctctgtaaattatttgaaggaagatgctgtggcagattaaactagaaaaatactgatcaaagtgccaggatataagctgggctatgagggatatgtcagaagataggaggatggcaggcatt

SEQ ID NO: 508711 - DNA, 529 bp, Homo sapiens
cctgcaatctctgtctccgttgtcacatggcaatctttttacagtatgattctctcctcttcttctaaggacaccaaacatatcagagtaggctcaccccattctagtatgacttcctcttaactaattacattggcaatgaccctatttccaaataaggctacattctgaggtactaggggtaggacttcagcatatcttttggggagggataaaatgcaattaataacattgatcaattcatatgttatgtttctttcagtctatgaaaatacttcaacctaaaatgctagtaatactttcaaacaaaatgtagtcccatgttctgtaawaccctttcaggagatctataaggccaaaactatttttgtagtattattatttgacctttttattctcagttttgggcaactatacagaaatccttagtaatccttttcaaattctttataatatgtaataatgtcgtcactctgatggctaatggaatgtgcatttgtatattatattatctagaattttctgatgt

SEQ ID NO: 508712 - DNA, 573 bp, Homo sapiens
gagaccgacctctcccactattaattctcctagttagtcctccccacttcagtgttgcacatgtgcaccaggcctggccagtgtgcatatatccatttccctggccacagcgtaataacctgaccaatgcagagccaaaatcttccctgagaattttgtgcaatgatctggaaaggacgtggttgtaacctctgagattacacagaaatgatggaacgagaaagcctgaaactgccagagccatttttaatacaacaaaaagatcgcctgcctgmgattgaaaacaacacaatggaaagtggacacaacagataaagagaaaagagttttcccacagatagctttaacccttaaatagctttgagtcacatgagctagttcatttttttgagtaagttggcagatttgtgttttttaaaacccaaagaatcatgaataaatgcatctttcttctgtgtttacatctctaacccacagaaccacaggacattgaaatatgcctcaagaattctcccataatcttggttcttgaccacctgtagctccactcatcacacccagactcagttttac

SEQ ID NO: 508713 - DNA, 510 bp, Homo sapiens
ggcctggccagtgtgcatatatccatttccctggccacagcgtaataacctgaccaatgcagagccaaaatcttccctgagaattttgtgcaatgatctggaaaggacgtggttgtaacctctgagattacacagaaatgatggaacgagaaagcctgaaactgccagagccatttttaatacaacaaaaagatcgcctgcctgcgattgaaaacaacacaatggaaagtggacacaacagataaagagaaaagagttttcccacagatagctttaacccttaaatagctttgagtcacatgagctagttcatttttttgagtaagttggcagatttgtgttttttaaaacccaaagaatcatgaataaatgcatctttcttctgtgtttacatctctaacccacagaaccacaggacattgaaatatgcctcaagaattctcccataatcttggttcttgrccacctgtagctccactcatcacacccagactcagttttactttcctg

SEQ ID NO: 508714 - DNA, 639 bp, Homo sapiens
gaagatggtgctgaaatcgcacaccaagcccccacctctactaactgaagttttgtagtaactttggggctactattgagcatattttttaaataattactttagggtcctagacaaatgctagttatattttattatatttttgtttttgttgtatttatattttttcaccactcttctcctttattattactttttattgtttcttgagccatgtgaggtagaatcacttattgttttcagtttttaaatgtgtagaggctaaaatccagggtggttaaataacttcctgatatcctgtggcctagcatttcttaaaatgatctatagggggataattttttttaattttcaattttcatgaactgatgcatttgtgaaacacagtaaacatgaattactagacaaagaaggcctataaaaaataagcctaattttttattagcttcaacagacagaaaataattctaytgaatttctataaaggtttctataagtctattctcattgcatatggttaaactgtatgcgacccatgctttgggtagcactgcaaaaaaaaacaaaaacaaaaacaaaaacaaaaacaaaaacaaaacgtgatatgccagtgctcaaatacatgttttgtgtttgggt

SEQ ID NO: 508715 - DNA, 639 bp, Homo sapiens
gaagatggtgctgaaatcgcacaccaagcccccacctctactaactgaagttttgtagtaactttggggctactattgagcatattttttaaataattactttagggtcctagacaaatgctagttatattttattatatttttgtttttgttgtatttatattttttcaccactcttctcctttattattactttttattgtttcttgagccatgtgaggtagaatcacttattgttttcagtttttaaatgtgtagaggctaaaatccagggtggttaaataacttcctgatatcctgtggcctagcatttcttaaaatgatctatagggggataattttttttaattttcaattttcatgaactgatgcatttgtgaaacacagtaaacatgaattactagacaaagaaggcctataaaaaataagcctaattttttattagcttcaacagacagaaaataattctactgaatttctataaaggtttctataagtctattctcattgcatatggttaaactgtatgcgacccatgctttgggtagcactgcaaaaaaaaacaaaaacaaaaacaaaaacaaaaacaaaaamaaaacgtgatatgccagtgctcaaatacatgttttgtgtttgggt

SEQ ID NO: 508716 - DNA, 571 bp, Homo sapiens
  misc_feature (1)...(571): n = A,T,C or G
nnnnnnnnnnnnnnnnnnnnnnctgtggtatacaaagctgcatatgcatgaaatggcgggggtggggaagtaacaaaaaatgctcaggtgtttactagcagtttgtgcatgggagggctgtggtttgcaaagggagatgakgtttcctggataaccatgtgtgccttggactaatgagagaagatatgctcaaaaatcacagaccagcttgttatcaaagagcacagagggaggctggggtttcccacccccaatccgggcacagtggctcacgtctgtaatcccagcactttgggaatccaaggcaggtggattatttgaggtcaggagttcaagatcagtctggcaaacatggcgaaaccccgcttctactaaaaatacaaaaattaaccagacattggtggcttgcacctgtagtcccaactacatgggaggctgaggcacaaaaatcacttgaacctgggaggcggaggtattgcctagtatatgagaccattcatgtcattttgataacattaattctataattcttgcttggtatatttacttttaatattttattttctttaat

SEQ ID NO: 508717 - DNA, 637 bp, Homo sapiens
taattttaaattaaatgaattattttatgaaaccactgtggaattatgtacatacagtttagctattatataataatatttaataacagagttgctaaagatagattawtaagtaaaaagggaggtaataaaacaagatttgaaattttgtttattttaaaattaatttgtgtatgtacaccaaaatgttaatagtggtatttctccaggggaagaatataggtggtttttactatcatctcatacttgcctatacattttatttttgcattatattttttgcgttacagtctatgtgtctgttttttatgccagttttgtgctgttgtgattactatagctttgtagtatattttgaagttaaacagtatgatgcctttagatttgttctttttgctcaagattgttttggctgtctggggtcttttgttgttccacatgaattttagaattgtgttctctatttctgttaaaaatgtcattggaattatgatagggattacactgaatctgttgatcactttgggtagtatgaacatcttaacaacagtgaattcttcaatccattgacacaggatgttttgtcacttatttatgtcttcttcaatttcttttattaatgttttatagttttcag

SEQ ID NO: 508718 - DNA, 548 bp, Homo sapiens
ctgtggataatcaaaaagcagaatgtccaccttcttttagtagaaacagcctggctacccccaggatgctcccatgtcatcacaaattactgtagaatgaacracacaaatataaagagagtgagagtgaaaattctcagtgggagtttccaattgaccaactgtatgtcaaaggccagcattgtagctgtcagagcagggagaatatacttggcccccttacttctgccagaactattatgatgggtattccttcaaaaaatggaaagggggattgaatactggcagcagcagatggggaaagaaagatgtctactataggctccacaaatataagatcttcttatcatatacttttttctacatatataaacaaagtggtataatagtgaaaattggctggacacagtggttcatgcctgtaatcccagcatttttggaggccaaggtaggcagatcacttgaggtcaggagttcaagaccagcctgagcaacatgatgaaaccctgcctctactaaaaatacaaaaaaaaaaaaaaaaaattgcc

SEQ ID NO: 508719 - DNA, 559 bp, Homo sapiens
taaatccttcagaggtctccagtccactccaggacaaggactgtatcaggacctgagtgggtaggagggtatgaggcagggtgtacagaggctgcagggtcctgcgacttggggcggatccagggcagcgaggactaaggggaagagggcactaggagcgctagtcctggcagccaccatctggcagagctatcccagaaggaagccccccaagaggaatktttggcactcttggtggttattaccctgtaagtctctccctgtcactctccactctagtctttagcctccgacgtcctcctggcgcccgccccttaccctgggtccgctccttctgcttctgggtctctggggaagcgttcaatccacggtcgcggctccggtgctcctcaaacggcggcgtttaccggttgcttggcaaccccggcctggctccggacgcgcggggcgacgcggaaggaccccggagcacgtgactcctttcctgccacgtcggaagcgcaggccatccctcttctttttggaggtctcctgagttaggagaagaattaaccaatag

SEQ ID NO: 508720 - DNA, 559 bp, Homo sapiens
taaatccttcagaggtctccagtccactccaggacaaggactgtatcaggacctgagtgggtaggagggtatgaggcagggtgtacagaggctgcagggtcctgcgacttggggcggatccagggcagcgaggactaaggggaagagggcactaggagcgctagtcctggcagccaccatctggcagagctatcccagaaggaagccccccaagaggaatgtttggcactcttggtggttattaccctgtaagtctctccctgtcactctccactctagtctttagcctccgacgtcctcctggcgcccgccccttaccctgggtccgctccttctgcttctgggtctctggggaagcgtycaatccacggtcgcggctccggtgctcctcaaacggcggcgtttaccggttgcttggcaaccccggcctggctccggacgcgcggggcgacgcggaaggaccccggagcacgtgactcctttcctgccacgtcggaagcgcaggccatccctcttctttttggaggtctcctgagttaggagaagaattaaccaatag

SEQ ID NO: 508721 - DNA, 491 bp, Homo sapiens
tctgcaaggacaggaagaaggagatgagtgccatatacacacacacacatatatatatatagagagagagagagagagagagagagattaataattttatttgggctgggcttggtggctcacacctgtaatcccagcactttgggaggcagaggcaggcagatcactcgagctcaggagtttgagaccagcctggccaacatagcaaaaccccatctctactaaaaatacaaaaattagccaggtgtggtggcacatgcctgtagtcccagctacttaggaggccgaggcagragaattgcttgaacccgagagacggaagctgcagtgagtccagatcgcacccctgcactctaacctgggcagcagagcaagactgtgtctcaaaataataataataataataataataataataataataataattttgtttgtctagcatggtgttcttcaaccttttcttcattattggccttcatgttttttct

SEQ ID NO: 508722 - DNA, 443 bp, Homo sapiens
caaaaacggtgatgaagccggcccctcgacttcctccagcatcagtgcacagcttcrgaaccagttacattgtttgtttagaaagcggattcctgggcccctttctgaactgttgaatcggaatctctagccgacgagcctccaagcctgtttcacatccacatcacccaaatgtggttagtgattgatatggtttggctgtgtccctacccaaatctcatcttgaattcccaggtgttgctggagggaactggagggaggtaattgaatcataggggcaggtttttcctgtgctgttctcatgatagtgagtaagtctcatgagatctgatggctttataagtcagagtttccctgcacaagctctctctctttgcctgctcccatccatgtaaggtgtgacttgctcctccttgccttccaccatgattgtgaggtctccc

SEQ ID NO: 508723 - DNA, 561 bp, Homo sapiens
tccatgtaaggtgtgacttgctcctccttgccttccaccatgattgtgaggtctccccagccrtgtggaactctaagtccattaaacttctttcttttgtaaattgcccagtctcggatatgtctttatcagcagcatgaaaacggactaatgcagtgatgcacactggccttgggaaccagggaggcaagtttaagaattgtggatgttaactatgaggaatgaaaggagaaacagccacaatacaaacagtgtggatgccccatgaaggattcaggttggctgcttcttggagaaacagggatcagcgtagggtagggccaaggtgaggtggcacagaggggtccacaatgaaaccttctagaaaattagagccttggccgggtgtggtggctcacgcctgtaatcccagcactttgggaggccaaggagggtgaatcacctgaggtcaggagttagagaccagcctgaccaacatggagaaaccccatctctgctaaaaatacaaattaggcgggtatggtggcacatgcctgtaatcccagctactcaggaggctga

SEQ ID NO: 508724 - DNA, 491 bp, Homo sapiens
cactgctacctttggccccttttctttctttcagaagaattttttwaaaaaaatatgtaatttatttttatggaaaagagagaaaggaaggagagagagaaaaagcaaaacgagacagaaaaaatcttcttgtccctcatctgcttggtaccaggggattcccacccccacatccggccccctttccccccatgcccccggccaactcccccaatggtccactttaacatctgctatggtgccttttgtctctttccagatttcctatgcaaatacagtcaattgtgaatacacagggggagggggagctactaaaacctcccccgttaagtctgcaattggattcttctgaaaattctgctttgcatggcagggtggcacgcagtgggggttggggccaacagtgccctgccccagccctctcaccaccttcctggctctgatgaccgctcccaaatgggcctggtgaagggacagggcgggatcctccc

SEQ ID NO: 508725 - DNA, 610 bp, Homo sapiens
ttctaaataagttccagcaatttcagacatgaggttatgaaaactattttttggccatattttggtatataaacacgttaacattcattttttcctagttcaacatgatatattatcattgaaaatttgaaaagaaatgcttttctttatataatttaatagtatttttaaaagcaagtgttctatttgtaaataagaagaggttaccaactattttaatagtataaattatattaaataaactttataatacaatcataatgtattatataattttttaaaagtactaagtagcatattttattatcaactacataaaaaacattaaaatgattttaaaagtttaggtattataaaaaaattatttaaagtttaggtattattstcataatatacagtttgaaccatatgaaattgatgcttttgtaggttggaatggttaaatagcaataattttatagaattcatattattactattaaagtaaatactaaatactaaaaatactattaaaggtagttcacaagtcagaaaaaattgcaaaatagaaacatctgttctttaaaagggaagggtgttgcgggaagtcagggaacccaaatggagggac

SEQ ID NO: 508726 - DNA, 551 bp, Homo sapiens
cgcctcgcacggtggcagcggctcctcttcctcctcctcttcgtctttcgcctttggcccaacagccgccaccaccgttaccggctctgcagccgcttcgacagccgccatcttcccggaaacaccrccgcacgtcagccgcgcccccctgctgccatggcaacggcgcggtggcctggaaccccaggggagtggtgggcggggcctgaagtacccaagtccccgagggcgcgccttccccgggaatttaattcaggacaataatgttttattgagcgcctattgtgaatcagacactgagcagtaagcgtcggagaaacaggtgaatgataccggggaaaagtcattccctgtgtgtagcgtctagggcagcctttgccctggttccagcagatgggttgtctcttcatagtctatgcatttctgaagaccccacggtgaagggctgcaaggatgaagctgtcccagagtatctccagagtgcagatcccttggctgccaggtcatgttctctcttcctctcaactgctctcccgaccatataaggagag

SEQ ID NO: 508727 - DNA, 437 bp, Homo sapiens
ctctctccacggagctgttctggggcagtggctccccagaaaagctgcgcacctggatgcggtagccccgggggtgaccccacttgttgctgtggttgctggccaggtacaggtagcgaggggtggcgcctcccatggggaaggtggcttgctcctctgtctccagcagcttccgggtcacctgcagcctctgcatctggtgctcagggctccagggcacagccatggggacaaaggccatatcctcggcccagacccagttctcyagtcctgctcagggtgggatcggggagggccagtcatgcaattgccctggcccctctggactctgcccccacctggcttcagagtgggggcagagtgggggccaaagagcagcccagaactgagtgtgcccctgcttctcttccctctccccaagatagtcccagtccagg

SEQ ID NO: 508728 - DNA, 437 bp, Homo sapiens
ctctctccacggagctgttctggggcagtggctccccagaaaagctgcgcacctggatgcggtagccccgggggtgaccccacttgttgctgtggttgctggccaggtacaggtagcgaggggtggcgcctcccatggggaaggtggcttgctcctctgtctccagcagcttccgggtcacctgcagcctctgcatctggtgctcagggctccagggcacagccatggggacaaaggccatatcctcggcccagacccagttctccagtcckgctcagggtgggatcggggagggccagtcatgcaattgccctggcccctctggactctgcccccacctggcttcagagtgggggcagagtgggggccaaagagcagcccagaactgagtgtgcccctgcttctcttccctctccccaagatagtcccagtccagg

SEQ ID NO: 508729 - DNA, 617 bp, Homo sapiens
cctgcccagacgcccgcccaggcggggtgggggaggctgcaccggcgctcaggtcgccgcagcggcccggcagccgccgcagtgatgtcaaccgcatccgccgcagtccccggcagccataaaacgcgccgcggcccgcggaaaccccagcccggctcctcccgccagggccgaggaggagaggacgcgcgggtccccggagtcccccactccgtctgcctaagccgtggagaccgggagtggacgcacggcggtgcctggacccccggggaggwggaagaagaggagagggaagggagctgtggagtcaggtgtcgatttgacgcccgcggccgccgaggggactctgcccggcactggtgccgcctggggggcgttcagggagcgtggggcgccgaccgctgcagatgcggcggcgcgcgtgggctcgggcaggcgcccccttttcccgggatagaaacggataaacggaagcgcgtgtgagtgtgggggtgcgaatcgccacctccggccttggctttcccgctcttccgagctctcccacttctcactttccccaaatccgcattttccttggcacagctctccccgagcacgaaggagagggaggtacccgg

SEQ ID NO: 508730 - DNA, 550 bp, Homo sapiens
atgaagacttataaagataagattccaagacttcaccttagcctgccccttctcctcaactgtatccatatctccagcgtgatctccagctactctgatgcccctgcgtgactgtctgaaggcacagacatgtgcccctatcacattgggtagggaaaaagcagatkacatacaaagcatgtctggcatatcctcatttatgtaaaattgaagacacctattttatataatattaattttttttagagatggggtcttactttgctgcccaggctggaacacagtgactattctgagaacccatagtttaatctgtatacatgcacagaactttcaggaaggaaatgctcaaaacgttcaccgtggttacctctgggtggtatcattgtgagcaactttaaaaatacatggtttgaaatttttacaggggtaaaatgtcatttttataaaattgatctgtgactcttggattgtttgactcattctctgtttaagagctctgataggaaagagcaaatgaaatatgatctcaggccgggcgcagtggttc

SEQ ID NO: 508731 - DNA, 532 bp, Homo sapiens
catgggagcgtgtgcctgtagttctasttactcaggagactgaggattgcttaagctcagaagtttgaggctagtgagctaagatttctccactgctctccagcctgggtgacagagcaagaccttgtctctgaaataaacaagaagtaaatgcattgttgataaagtcagagaataatgagggaaatgttttgtagagaaaacaaagctggagtgaaggcctaagaagaagccgaacatgtttgattgcagagttacggggctaaagccaaagctacgttgtgtgtgagatgcagagacgcattccgggaagagaagggcgtctgaggctttcaaagaaaaatccaaaagaaggaataaaggggattggaaaagaaatgagtgagaagggaagaactagggctggcagtgaccgtttcctcttcctagaacgcctcttcaaagagaaagcatttattgatgagctgcaattcattccttcacttgacatctggagacggtttgagaaatcctgccgtagagtagccggagc

SEQ ID NO: 508732 - DNA, 532 bp, Homo sapiens
catgggagcgtgtgcctgtagttctagttactcaggagactgaggattgcttaagctcagaagtttgaggctagtgagctawgatttctccactgctctccagcctgggtgacagagcaagaccttgtctctgaaataaacaagaagtaaatgcattgttgataaagtcagagaataatgagggaaatgttttgtagagaaaacaaagctggagtgaaggcctaagaagaagccgaacatgtttgattgcagagttacggggctaaagccaaagctacgttgtgtgtgagatgcagagacgcattccgggaagagaagggcgtctgaggctttcaaagaaaaatccaaaagaaggaataaaggggattggaaaagaaatgagtgagaagggaagaactagggctggcagtgaccgtttcctcttcctagaacgcctcttcaaagagaaagcatttattgatgagctgcaattcattccttcacttgacatctggagacggtttgagaaatcctgccgtagagtagccggagc

SEQ ID NO: 508733 - DNA, 532 bp, Homo sapiens
catgggagcgtgtgcctgtagttctagttactcaggagactgaggattgcttaagctcagaagtttgaggctagtgagctaagatttctccactgctctccagcctgggtgacagagcaagaccttgtctctgaaataaacaagaagtaaatgcattgttgataaagtcagagaataatgagggaaatgttttgtagagaaaacaaagctggagtgaaggcctaagaagaagccgaacatgtttgattgcagagttacggggytaaagccaaagctacgttgtgtgtgagatgcagagacgcattccgggaagagaagggcgtctgaggctttcaaagaaaaatccaaaagaaggaataaaggggattggaaaagaaatgagtgagaagggaagaactagggctggcagtgaccgtttcctcttcctagaacgcctcttcaaagagaaagcatttattgatgagctgcaattcattccttcacttgacatctggagacggtttgagaaatcctgccgtagagtagccggagc

SEQ ID NO: 508734 - DNA, 532 bp, Homo sapiens
catgggagcgtgtgcctgtagttctagttactcaggagactgaggattgcttaagctcagaagtttgaggctagtgagctaagatttctccactgctctccagcctgggtgacagagcaagaccttgtctctgaaataaacaagaagtaaatgcattgttgataaagtcagagaataatgagggaaatgttttgtagagaaaacaaagctggagtgaaggcctaagaagaagccgaacatgtttgattgcagagttacggggctaaagccaaagctacgttgtgtgtgagatgcagagacgcattccgggaagagaagggcgtctgaggctttyaaagaaaaatccaaaagaaggaataaaggggattggaaaagaaatgagtgagaagggaagaactagggctggcagtgaccgtttcctcttcctagaacgcctcttcaaagagaaagcatttattgatgagctgcaattcattccttcacttgacatctggagacggtttgagaaatcctgccgtagagtagccggagc

SEQ ID NO: 508735 - DNA, 392 bp, Homo sapiens
gttctccctaggacagatggagcctccctttcctcatctactctgtgggtggtttcagggcccacgagtcaacatgaggagttgtgctggtggtatgtgtgttggaggctgggctggctgattcacagtgacgaggatgtcaataataacaagaatgagaatgatggtacctaataaagactttttttcccaagtcccatctacaattytttcattgggtgttttgccaagtctttctcaatttcatctcagctttttttttttttttaaagaaaatgtattcaatacttaattgcatcacaaatgtagacatagaagaaaggacttcaaacggaatttatgggaggcaatgtgtgcggctttttgccttataaagctgtgtaaaaggtttg

SEQ ID NO: 508736 - DNA, 460 bp, Homo sapiens
gttcccctgcccgaggccccctcaccgaggctgagcttgccctcttcgaccccttctccaaggaaggtaatgagctgggacagccgggaaggagccagggcaggacgtccttgggacagggaggagggcagagcccyactagcctgctcagtgcctgcgcagatcagggagagacgtctcctcagcagtgctgccctgtgggccaatagcagcttcaatgagaattagaagccctgtgccagggcacgtggtgtggtgtgctggatgcacctgtgcaacaagtagccacgaggaaggaaaggaggcacttcccatgttggggccatctcactgagaaggctttggaaagagccgggtcacactgctctgggacattttagttccttccctgcaagctcttggtgggatttcctgactggccagggtctggctgcagatcctgaaggcaagaggcctgctg

SEQ ID NO: 508737 - DNA, 486 bp, Homo sapiens
acggcaaatgtgagacaggcrggacggtggtaactggcccaggaaataagagagagctgaagcctcagttgctgcagagggaagatcgatgacaagcaaatgttagctccgccgtgccccaggaagtttcaggaattagggacacccggtaacgttgagggtggtggctcagaccaaggctgaagaaaggcattggtgtctcccaggtctcgtccttcatccccagcagttaggggcctcgcttgccctccctgcaaggtagaagcaattgattagggaattggaccaggagagctcctgactcagggatacgggcatgtcagagggccagtgtgaggaacactgcatcctaaaggctaagttctccagctccatctgcttgcttgtttgccaaccaaacacatatctccaaacaggatactggattattcgtttctggtaaaataaaagacccatgagaaaacccctaccagatgctgaagttga

SEQ ID NO: 508738 - DNA, 621 bp, Homo sapiens
gtgctcacagtaaaaacatccagcccctggctcatgcatcaggcacacgtcgtctgcgtttattatctcatttaatcctcataatcctcataatcaccatatgagggaggtgcagggaaagggcctgaaggttatctaatttaggtagcgtctataagaaaaataaaacaaagttatgaatataaaattactcacagggccttaaaaaggagaggaggaggtactgctattatgatcatcatctccatcttacagttgaggaaaccgagggatgggggatacagagaggttaaggatcatggcggggctgasggtcttggaggctggtgagtcccagctgggctggggctgcctctgaggctgggaagggagctgtagctggatgctccctgctccccacaggcatcgtgaaggcctactacgtgcgtgcccgggctcacgcagaggtgtggaatgaggccgaggccaaggcggacctccagaaagtgctggagctggagccgtccatgcagaaggcggtgcgcagggagctgaggctgctggagaaccgcatggcggagaagcaggaggaggagcggctgcgctgccggaacatgctgagccagggtgccacgcagcctc

SEQ ID NO: 508739 - DNA, 672 bp, Homo sapiens
aagcagacgggtccccagggtaggagatggccgctttgggctccggatgtggcggttctccatcagccctgaccatccctgacgctgcaggtcacaaggtcaggcaagctgatgacaggaaaggaggcatttagaactatggaatgaggctgccagcaaactaggtccttggaggcaactcagtcccaaccccttgtacagatggggaaactgaggcttagagaggggcagtagctccaggattagcatcaggtttccaggagtctgggctggggctttcttttcttttcttttcttttcttttcttttcttttcttttcttttcttttttttcttttcttttcttttctatactgtgctgcctccttcactggatgcttcgtatgtgggtatgatgcattttttttwaaaaaaggagagaatgtgaaacttctatcaggcagcaacctgcggcaatgccaatagcctttgtttgggagcagttggaagggtcagcacgaaacgaccttgtgtgggttttgaagccccctttggcctggcacgtcctcaggaatcattactagttaaccaaaccaaggcatttgctcccaggcaggagccaccatactgacctctggagttgacagacaccctgagaccagggagtcctttgggtcagcagtaaggggctga

SEQ ID NO: 508740 - DNA, 407 bp, Homo sapiens
gccaggcgctggctctggaaaagcccatgagacgaccagcatggctttgggtcacatgtgtcaggtggctgttgtcatccacacaggcagggtccaacttcaagggccacaatagacaggtcttcctgctgtagaatctgccccccaacccatcctgcatgggggtggggcagagggaggctcctctcaactcgcactttcccagcmtgtgcactgcggagccctgcccctcgtggagctgctgagactggaagggagaggcatggagcgggtgaggcagccgcaggtctcctgggagaatgtcatgcctcctcccaccggacgttcctggatgggggcgtgggcagaggaaggggagttactgcccctttgagacaacagctctaccctttgcctcttctatggtg

SEQ ID NO: 508741 - DNA, 625 bp, Homo sapiens
ccatggccccctcaccttaccctggaggaggtgtgggccccaaagcccccaggctgtgcttactgtccaggttcaggtcaccctcctcatcctcaccttaacagcctcctctgtggtctctgctttcccctcctctccccctcgcccactccccacaatggcaagtcaacttctgtgaatacaggtctgaccaggccactctccagctaaaagcctgccctggtttcccattgctctcaagaaagcaaccagaatcctcatgatgccacctcggcctttgcagccacgagcctccttgccacaagcatcctgccctttgcttccgtcacttccaatcaatccatttcccagagaggccatcccagtgctcaggctggggcgggcccattccatgctcccccagtgccctgggccttccgcagagccctcatcacacctgcgatggtgggaacaatggtggctgtggctttcttcaacacaccaagacgatgattaatgaccctcagacaaagaccatcaggaccacacctctggttgaacccactgggctcatgggcccttgcacacacatcatggcaactgygggtgtcccagtaagagagtgctagaaagaacctatcatagg

SEQ ID NO: 508742 - DNA, 626 bp, Homo sapiens
tcagaatatttcagctccactttttaattatatagcttagcaagccaacataatcaggagctgtacttaaatattcaacctgaaatggactgagtattaaattaaagtaagctactaactaaagtaactttacttgatrtatctgccataagaagtgacaattcatctaattagtttgcaacacacgagtcgttctgaattatttccctctgctgtggattttttcatagtaatggtgcatgtagcatccactgatacacatggtttctatgaaaggataacttctaccagccaacattttaacaagtattttttttctgttcctaatgatatgcataaagtattgtattgagtctgtggatgacccagtacatcaaaatgatatatttggggacatgatgacatacctcgaatacctaacaccacgcagcagttagtcatcagtgacctctgagttccataagacaggcttcaagaaaggtgcaattaaggttgtgcagccccaccctttcctatcattcttaaaaatatatcagcatgccagtgagagaataagatgattaaggataaccttgagtccaccccaattatcattttagaaaagcaaatcattggcaaattttgga

SEQ ID NO: 508743 - DNA, 505 bp, Homo sapiens
caaagagttaatgacatggaatactgaaaatacaaattttcagtatgtattttatctgaaatycccataatagttgaagaatatacctttattcacaggcatgttaaatacgtcagctttacctacatggctaacatttctggagtaggaagacagtctgggtatagtctcattttcacctttgcaaatcaccttatagctcaggagctgtgtaataaaagacatcagtataaacatatgaagaatgcaaaatatttgcattcttgatctaaatcagctaattattgatcaattagatcaataacatctattattgatcaattagatcataatcatctattattcatctaagtgtactcatatttaatggcagaatttctgaaatgttccatatcttttacaaatgctaatgttgaagttagttctttctagcctttatagctattctcttgaacaaacattttctgctataaactattcatttcacaactctgtattttctaca

SEQ ID NO: 508744 - DNA, 631 bp, Homo sapiens
aggaaaaagtgacaacaaatcaactccatctatctatatctaatatatatatataacaatataatatacaattttatgtatatataaaaatctatttaattagtcacactacagaaaaatggggttagagcagtggtcataattaatgatggggaatgaatggagacacatggagttatcccaccacctaccgagttagacagggtacagtgcctgttctgtcttctcctctgcagccctattgccaggataggaaatacaggttacatgagctttttgatcagctatatatccttcttgaatgctttgatgaactgttataattggttttgcaagtttctatttctctccactgttatgctaaggaattaaattcaaaatgctacagataatctttgaataaatatgatttcaatgaaaaggggtccataaccctgtctaattaaacctttctattctctgacatcgtttcaataaaatatctgatcttctgcaatgactccaataattggttacagttgttcactgaaattcaaattcccttcccactatcagaggagaagcagagcctgcatctgccccaggacacaccagggcaaacacawtagctagacagagagaggattgttgt

SEQ ID NO: 508745 - DNA, 636 bp, Homo sapiens
cattaaaccctttatgggatagaagtacatatttctacatgttgtgaacagaatggatgcaagaaactgaatgaggcctcccattctcaatgtccatcttgttatcttgcctaatcacacatttgggaacctgtaagtttgggattcttccatgagcctttatctgcaaacatttcaaggtcatgttcagaggaataaatgaaacatgattatccactacaacatgattatcaactgaggaataaatgtaacatgattatcaaccagcattgattatcaactgaaactgaaatacctagactttaacaagatgttaagtatgtatcaaaacaaagattaaggccaggtgcagtgactcccacttgtaacaccagcaatttgagaggcccaggcaggcacatagcttgagctcaggagtttgagaccagcctgggcaatagagggagacccccgtctcttcaaaaattacaaaaattagccgggcatggtggcatgtgcctgtagtcccagctactcaggaggctgaggtgggaagatggcttgagcccaggtgatggagatggcagtgagccgagatcatgccactgcmctccagcctgggcaacagagtgagaccccatctcaaaaaaaaaaaag

SEQ ID NO: 508746 - DNA, 323 bp, Homo sapiens
tttggggcttggtttcctcaccaggaaggtagaccaggttgttggtctagatttttgagttgggcttctcaaactggcattggattcttttttaaagtctgatcctggttcagtagggctgtggtggggccggagggtcttgcaggtccaaggagcttctggggctgctgatcctgccggtccatggacctcactgtccacgcttttaacatctggaatgtttcayttgctatgaatctatttaaaaaaaaaaaaaaacacacacaccaaaatttgacctctgagtctctgagagaatgagatactgtatttttcttcgaatg

SEQ ID NO: 508747 - DNA, 624 bp, Homo sapiens
atacttaagtgttttgacttggtcaaacgctaacaccgggtttgctacagtgtaaaattaatctagaatgtaatcattgattccattttctttttattcttaaaaaaaaaaagggtggttggggaagaaatcactgcttttccattgcgcaggtactttgtgctagagagcatgtgtcatttctagggtctcagaaaaagaacagatgtatctatgtgtaaacacaaacagtaagttacaagttgccccttagtactgaaggcaagaatcagcatcagtactcaaaaaagtgttttaaaaagagtgtaacttactcttactgacccaggctaaacgggctctgtctggtgcttctttgtctgcacatggccacccacagcctgtcttctaattaaaccaatgctctagcagcagaacaagcaaacaagttgcctcccatctgcatacagctcttmaggatacatttcccttgttcagaaggtggaaattcttgggagaggtgattttctctgcctcttcacaagaagaacatggatacttggctggatgcaactccatgaagcgtaactgtgtgtgtacacctcaaaaaataaaaaatgcagagaaacataaagactccataaa

SEQ ID NO: 508748 - DNA, 638 bp, Homo sapiens
aaactttaccttttataagtctttcaagagagtccaactgtgtagtaagcagtatttctttgttttttaatatctcaaatttaacttcatatagttctaactgaatttcataaaattgtattkctaattcatctacaacatttatatttttttcttgttctggaagatcttccatcttattttcatagaaaaaagaaaaataagttaaaacaaatagtatattaaaaacaaactttagaagcattctagctattttctattccttgttccgtactaaatataaaagagcaaataggaaagaaacactttttcatttcatctagtgatgctaatactttatcccatccttgaaacagagaaaaacatttaggttttgagaaacataaatggcaatgaggtattattatgtattgcatatcggtgtccccccaaaattcatatgttgacactgtaactcccaatgtgatgttatttggaggtgggtcctttggaagtaattaggttcagattatgtcaaaaggatagcacccccatcatgggattagtgcccttattagaagagaaagacagggatcactttctttctctccaaacatacacacagaagaaaggctatatgagcactcagttaagaaggc

SEQ ID NO: 508749 - DNA, 599 bp, Homo sapiens
tgtgtagtaagcagtatttctttgttttttaatatctcaaatttaacttcatatagttctaactgaatttcataaaattgtatttctaattcatctacaacatttatatttttttcttgttctggaagatcttccatcttattttcatagaaaaaagaaaaataagttaaaacaaatagtatattaaaaacaaactttagaagcattctagctattttctattccttgttccgtactaaatataaaagagcaaataggaaagaaacactttttcatttcatctagtgatgctaatactttatcccatccttgaaacagagaaaaacatttaggttttgagaaacataaatggcaatgaggtattattatgtattgcatatcggtgtccccccaaaattcatatgttgacactgtaactcccaatgtgatgttatttggaggtgggtcctttggaagtaattaggttcagattatgtcaaaaggatagcacccccatcatgggattagtgcccttattagaagagaaagacagggatcactttctttctctccaaacatacacacagaagaaaggctatrtgagcactcagttaagaagg

SEQ ID NO: 508750 - DNA, 616 bp, Homo sapiens
tatcagttgagaggattatcgtgaaaaatatttttctggttgagaatactccttagggaatcaagtaagacatgatgacgaaacaatgatgagtttgagggaggagatgatagttaaaggcgacatttccaggttgactgggttgtggcccttgtattcaggckctcataccagggcacgcaccctttcatgcctttccttgtgaaaattgcccaggtgtttaccaaaagtcctagccgtgttttctgtatattctcatgcttaattgtggacctgagcttttgatcatgctttgtagattttaatttctcttggtaatgtcagattggtcctaatgtagtcaaggaaggtgaaagaatatggtgagcacctagttctattgaatcttacatggggatgtgtgatgccctcctaatatgactgatacatttcatgccagctctaccagtcattagccatgtgtccatgggtgtggcacagtctgtccttgactcagtttccctatttatgaggataataattcccacttcacagagttgtgaagattaactgagttcatatatgactaatacaggacagtctcttagaacagtgtgtggtacgtagtaagcaccca

SEQ ID NO: 508751 - DNA, 616 bp, Homo sapiens
tatcagttgagaggattatcgtgaaaaatatttttctggttgagaatactccttagggaatcaagtaagacatgatgacgaaacaatgatgagtttgagggaggagatgatagttaaaggcgacatttccaggttgactgggttgtggcccttgtattcaggcgctcataccagggcacgcaccctttcatgcctttccttgtgaaaattgcccaggtgtttaccaaaagtcctagcygtgttttctgtatattctcatgcttaattgtggacctgagcttttgatcatgctttgtagattttaatttctcttggtaatgtcagattggtcctaatgtagtcaaggaaggtgaaagaatatggtgagcacctagttctattgaatcttacatggggatgtgtgatgccctcctaatatgactgatacatttcatgccagctctaccagtcattagccatgtgtccatgggtgtggcacagtctgtccttgactcagtttccctatttatgaggataataattcccacttcacagagttgtgaagattaactgagttcatatatgactaatacaggacagtctcttagaacagtgtgtggtacgtagtaagcaccca

SEQ ID NO: 508752 - DNA, 616 bp, Homo sapiens
tatcagttgagaggattatcgtgaaaaatatttttctggttgagaatactccttagggaatcaagtaagacatgatgacgaaacaatgatgagtttgagggaggagatgatagttaaaggcgacatttccaggttgactgggttgtggcccttgtattcaggcgctcataccagggcacgcaccctttcatgcctttccttgtgaaaattgcccaggtgtttaccaaaagtcctagccgtgttttctgtatattctcatgcttaattgtggacctgagcttttgatcatgctttgtagattttaatttctcttggtaatgtcagattggtcctaatgtagtcaaggaaggtgaaagwatatggtgagcacctagttctattgaatcttacatggggatgtgtgatgccctcctaatatgactgatacatttcatgccagctctaccagtcattagccatgtgtccatgggtgtggcacagtctgtccttgactcagtttccctatttatgaggataataattcccacttcacagagttgtgaagattaactgagttcatatatgactaatacaggacagtctcttagaacagtgtgtggtacgtagtaagcaccca

SEQ ID NO: 508753 - DNA, 616 bp, Homo sapiens
tatcagttgagaggattatcgtgaaaaatatttttctggttgagaatactccttagggaatcaagtaagacatgatgacgaaacaatgatgagtttgagggaggagatgatagttaaaggcgacatttccaggttgactgggttgtggcccttgtattcaggcgctcataccagggcacgcaccctttcatgcctttccttgtgaaaattgcccaggtgtttaccaaaagtcctagccgtgttttctgtatattctcatgcttaattgtggacctgagcttttgatcatgctttgtagattttaatttctcttggtaatgtcagattggtcctaatgtagtcaaggaaggtgaaagaatatggtgrgcacctagttctattgaatcttacatggggatgtgtgatgccctcctaatatgactgatacatttcatgccagctctaccagtcattagccatgtgtccatgggtgtggcacagtctgtccttgactcagtttccctatttatgaggataataattcccacttcacagagttgtgaagattaactgagttcatatatgactaatacaggacagtctcttagaacagtgtgtggtacgtagtaagcaccca

SEQ ID NO: 508754 - DNA, 528 bp, Homo sapiens
gccccctggaatgaagaacgcccaggagcgcccaggcttaggcagcacctcctgcatcccattcttctacggaggagayaagaaaaagatcaagatcatcagtatctaaaaagaacggtcaacaaggcctacagaagtgtaagccgccatgtgaccttgtgaatacagtctgagaacaaacttgaaaaaaagaaaatttattttaaattgtggcaaaatactggccgggcacggtggcctgcacctgtaatcacaccactttgggaggcctaggcgggtggatcaccaatcccagctacgtgggaggttgaggttgcagtgagctgagatcacaccactgcactccaggctgggtgacagagtgaaactcccatttcaaaaaaaaaaaaaaaaattctacctgaggactctaatatctatgtatgtttctattgttttttttgtttgttttctccttttgtcttgcgttgtcttgtcttatggcatgcctagtaaagttttatctgcctccagagagtactgactttg

SEQ ID NO: 508755 - DNA, 528 bp, Homo sapiens
gccccctggaatgaagaacgcccaggagcgcccaggcttaggcagcacctcctgcatcccattcttctacggaggagacaagaaaaagatcaagatcatcagtatctaaaaagaacggtcaacaaggcctacagaagtgtaagccgccatgtgaccttgtgaatayagtctgagaacaaacttgaaaaaaagaaaatttattttaaattgtggcaaaatactggccgggcacggtggcctgcacctgtaatcacaccactttgggaggcctaggcgggtggatcaccaatcccagctacgtgggaggttgaggttgcagtgagctgagatcacaccactgcactccaggctgggtgacagagtgaaactcccatttcaaaaaaaaaaaaaaaaattctacctgaggactctaatatctatgtatgtttctattgttttttttgtttgttttctccttttgtcttgcgttgtcttgtcttatggcatgcctagtaaagttttatctgcctccagagagtactgactttg

SEQ ID NO: 508756 - DNA, 588 bp, Homo sapiens
tctcttcttcattgacaattcttgtttatttcatgaccataaaaaattagttgaaacttaggaaattgtcatgccagattttatattgaggaagtgttggaataatgatttctaacctgtcttccagttgcttgcttctgtgattcaaatgttcctcctttaggaaccaaaagaagtccatgttggactcaggctgtctctagccagtcctcattgctgagagaatgactgggtctacttccccagccagcctggtttgaacacccgcttctctactaagatcyatggattcaagaagactcctggtgggctgtctggtgtcatgtcaggcaccattctccagagaacagcaagcagggatggggagaagagacagattgtttacgatgagggaaaatagagatcctcagcaggattgcctagggcaggaacaaaagaaaatgagaacgaatcagaataccttaacccttcaacaaagatgagaagtgtgggagtgaagatttcacagcagggtagcatcataaaaactcttttgtgaaagtctaaaggaaagatttagtaattcccaggtttaggacaagcccctgc

SEQ ID NO: 508757 - DNA, 631 bp, Homo sapiens
aggtggttgcagggaactgggctccagcccaggcctcacgtcctccctctctgcctctcttctctcaccggcagtctctcatctgtaggtggaggggttcaccaggtgatttctgaggtccctcccaaccccagtatttcttaatttctgagcttccttaagaggtacactgcagcccttgcattcctttgactggaggcgacacaactcttcaaagctacaaccgtgttcttgtaaatcaacctgcagcctctctagagtacatatggacacataggtatcctttaaattcctgtgaacattttacatgtattttcttagaattggcattggccctcacatgaggccatgccctcactatgaacccagccctttaatctctttctttgtccttgcagcccagcctaagggctgtctctccatttccaggtactgctgccaccgtttatgtatccaagtcactgcagagccagttgctgttgaccagctaatccagtacagcttgattcagcatatatccaacacctgtatgtgtaattcactggtttagggctcrgagttatcaaagagagctgtgcatggtcccagcccttgaggaacccacagcctggtaaggattggacagtgacag

SEQ ID NO: 508758 - DNA, 590 bp, Homo sapiens
caagggatcaggtgtaagacagggagatggactcagcataggtgcaagggcaggggcagggaagctggatttcagacagttatgaagaagaggctgttgtgatggtggctttctaaaattggttacccgcagagttgcatgtattaggttggccyagtttagaagcacaaagtagagggttggtaatatgcaaaatactagagaggttgaaaacttacttagatagtattggattacatgactgagctctccccagtggctctttagtacctggagctagaggtaagtcagatgtggcccctgcctgtgttcaccatctgcacaaggagacaggaatgtaaataaaaatattacaacactcccaggattgctgggacgtaatagtctcattctaccaagaaggtagtaataatggctgacatttatttaaaactcactgtataccaccaggcactatgttaattgctttacctttatttctcactgtataccaccaggtactatgttaatttctttaccacattaaattcttacaaccatatgaggaagagctattatttatattttatagattaagcaaatggaggcta

SEQ ID NO: 508759 - DNA, 618 bp, Homo sapiens
gggcatttaaaaattaaatagctttttttttttactgacgaactagttagaacttttaatgtgttagtatactccatttatttctatttgggaaatattttaatggtattttaaaagatactattgagggcttattgttttttgggatgaataaaataaatagggacctaagtatcatggatttatagactaatggggaagacagatatgaaataaacacacaaactatatgtacaagtagacaaacatgtgtagaagtaaaagacacatagagagaagataagatatttctcaccaataaggctacatcactatttttttcacagcatctcarggcactggtattattagggccagatttgggaaaattttgattatgaatttcctaaccttgtcatttgtctttatgtgatatatttgcttttgcaactaataagtaacaccttcttaaatgtttccttttgcttgaggcagtaatttctgtgttctgattactctcatattctatagttcccattaaataattgtaacaataaacctaagaacttcgaaatgaaaagtatttttactttttggcttctagtcatcatacaatggcatgttactaaatttatgatg

SEQ ID NO: 508760 - DNA, 597 bp, Homo sapiens
aacagaaaaccaaatatcacgtgttctcacttgtaagtgggagttaagtgatgagaactcatggacacaaaaaaaggaacaacatacattggggcctagttgagggtggagggtaagaggagggagaggagcagaaaaaatagttattcagtactaggcttagtacctgggtgatgaaatattctgtaaatgaacccctgttacacgagtttatatatataacaaacctgcacatgtacccctgaacttaaaataaaagttaaaaaaacaaaaataataaaatgtaaaatgtggttcaaaaagaagaggtcataaagactgaagaaaggtttgttcattgtcaattggttaatttgttcataatccactgcttatgccagttcctgtactaggggctgaaggacacagacaaattgtacttgctgtgccaggggctgacattcttttcagctgggtgagtaggagatgtggaacaaggtatacttgaggaggatttcacagaaaaggygagatctgaattaagtctcagaaaataagtggaccccagtaggtagagaagaagtgaggaggtggaaagatagtgagcagcatgggcaa

SEQ ID NO: 508761 - DNA, 563 bp, Homo sapiens
cataatttctaatcttgtagctattctgttagtcctacaaaggcagtctagtccctaggtaggcagggggtttgttttggcaaagggcagttatcatctttgtttcaaagttaaactgtaaactaagttccttccaaagtcaatttggcccatatgcaggaatgaatgaggatagcatggaggttagaaggaagatrgagtcagttaggtcagatttctttcactgcaataattttctccgttataatttttgcaatgagagtttcaatcctgagggcacagcatagaatccttccccatccaattacccttttctgctttagacagtaccatttttatgttgctttatcaataaagggaaatattttaattcagaaaagatacaagactaaaatctcagttgtttatcgaaagctgaagataatacatgtattcatcaaaactagtataatgaagattcattgagataaaacaagtaaagtatttaccacagtatcaatgtcagctgcaattattattattactgtctatattgcaggcttttgaaatacatttctctagaa

SEQ ID NO: 508762 - DNA, 423 bp, Homo sapiens
ggtggcagaggttgaaatgagccgaaatcgcgccactgcactccagcctgggcgacagcgtgagactgtctcaaaaaaaaaaaaaaattcaaacaaacattttaaattacaaacaatggtaagactgtcagaaaattctaggaaaatgtcaaaaacaaggaggccactttgccgcatgtgtgttaagagatgggtataaatcaaaatagtttcagttcactaaggaaatttaatgcctaaaacaatcctaagatacaggaggatcactcaggtaaacacacactccttactcatataaaaytgaacacccataagttgcatttccttagagtacacctataaaactaagtacagaatttttaaaaacccagtatgttttagtaaagttgctgttctaaaaatcccacctgtcaccaggataac

SEQ ID NO: 508763 - DNA, 640 bp, Homo sapiens
agcaagttattgtatgaaacttataggtaacagatgtcattagctgcaaaaaccaaaatagtatgactacattcagtaactatctagccatgcaaatgrtagaccaattagattaagatcctaactggtgcatgtagaaagcatttatgcacaatgttttgaccctcccccaaacatctttttctgtctccttacagagataccaaattttcctgaatacctcaaggtgaatactgggaactgagaggctcagtgttcagagttgactactgggaacagagttaacacatttcttctatattataaagaaattttatgaatcttgctctgcctcagaaaggcttttagtaaaagattgttcatgtgtaacactctatttggattcatgaaaattttcaatattccatttaagtcagacacactgaaatgtcaaccaaatttcataaaacatatttgaatgagatcaagcctttcttagctaagaattttatttcagcagtaaatttagaggaaaataagaaatgtgtgtactttgggccaaataacagtgttggccacttgggaacaattcagacaagtgctcttcatcattactcttaaagtagcaatagcaccacatccatttcctggcaccagccgg

SEQ ID NO: 508764 - DNA, 640 bp, Homo sapiens
agcaagttattgtatgaaacttataggtaacagatgtcattagctgcaaaaaccaaaatagtatgactacattcagtaactatctagccatgcaaatgatagaccaattagattaagatcctaactggtgcatgtagaaagcatttatgcacaatgttttgaccctcccccaaacatctttttctgtctccttacagagataccaaattttcctgaatacctcarggtgaatactgggaactgagaggctcagtgttcagagttgactactgggaacagagttaacacatttcttctatattataaagaaattttatgaatcttgctctgcctcagaaaggcttttagtaaaagattgttcatgtgtaacactctatttggattcatgaaaattttcaatattccatttaagtcagacacactgaaatgtcaaccaaatttcataaaacatatttgaatgagatcaagcctttcttagctaagaattttatttcagcagtaaatttagaggaaaataagaaatgtgtgtactttgggccaaataacagtgttggccacttgggaacaattcagacaagtgctcttcatcattactcttaaagtagcaatagcaccacatccatttcctggcaccagccgg

SEQ ID NO: 508765 - DNA, 320 bp, Homo sapiens
ctgccctgtctacctttatctttgcaactgagttctacaattcaaatgaactatcaactgggaaattatttttcatattgatgatattctggtctttataacaaaatccttaattctagaaatgatgtactttatacatgaaagaggaaagagaaattttgttattttcaagatttaaaatcttatttaaggctgagcatgtggctcacacctgtaatctcagtagtttgggaagccgaagcaggaggaatgcttgaggctatgatttcgaaactagcctgggaaayagagcgagacccggtttctacaaaatttaaaag

SEQ ID NO: 508766 - DNA, 485 bp, Homo sapiens
caaatttctagaatacttctagtgttcctctgagttttcttacataacagtaaaaaatttagaaataggaaatccatttttgccttcaagtcatcacccttatgtcattttgttggaaaaaattcaagctgtctacccattggtatttctctttttttttttttttttagaaaaacttctttaagtctaatgttttaaaatttawtattttcattttattgaatagtaacaaattataattttaatattcttggagtacaaagtgatgcatgatatatgtataaatgtggaataattgaattaggctaattagcatgcccatcacctcaaatacctatcatttattcctcttttctaactaaaatattgtaccctttgatgaacatcttcccatttctcccacccccagccgctggtaattgccactctactctctgcttccgtgagtgtgattgttttcaattccacatatacatgagaacatg

SEQ ID NO: 508767 - DNA, 536 bp, Homo sapiens
ataatagtttagcctgggtcctaaatccaatgagaatgattttataagagacagtaaaggacacacagagacacaaggaagaagaccatgtgatgacaaaagtagagattgcaaacmaaggaatgccttcagccaccagaagctgcaaatgacaaggatttcctgcaagagccttcagtgggagcattaaatctcggagtccaaaaatcttgattctggacttcgtggctgcagatctttaagaaaataaatgttgttgtaagccaccaaccttatcataatttattatggcagcctgtggaatctaatgcaacatgtttataccatttttacatttcccagtcttacatgcagggcaccaattatccataactctaaggacaaagatttgtggaaatcattgaatctgattttgaaaagtaaatgagtttgtttctcaccattaaacaaaacttatcagatgaaatatataatattatataatttacatactctaattatttcaaaagcagtttttagcaagaaaacgtgatcaa

SEQ ID NO: 508768 - DNA, 640 bp, Homo sapiens
ctgaaaatactttagctcaggttcagaaatcttctcagtgagctgctattcagactcagaaagtagcttggagaatactccrgacgttaggctttgcgagtttttgtttgtttacatagaaaagtctcttttaaatttccttattcttacactgcaaagagacctaaccttgatgggtcccatctgcaatgctcctcctgaaaagagacagagctgtttaactgaactgacctatttggaggacgaatagactgattgaaaaaggtatgtggtaatgtattcaaatttgagatgttgtttccctgctttttcctatatatgctttctcctctcttgtctcaaaacttttaacccaaatctctacatagctaccaattcttctctattacgtgaaactttctgaaaattaaatttcaaatggggaaccgaaggaaaccagcacattttacttgaaaatatacttctgtatatatttctgtataaatccaaagatttattttcctatttcctttcctaaaccagaagggaaagtcaagctgggcactgcatcaggcaaacctgcctcctattttattcttatataagttagctacaaattaaaaacaactacacatctccctcacgatttgtccacaggaat

SEQ ID NO: 508769 - DNA, 598 bp, Homo sapiens
  misc_feature (1)...(598): n = A,T,C or G
gctggcagttggtgattctggaacacaaattgtcctcgtgaccttgaaagggctgtatntccttatcagctgtatagccacctacaaccattaatacatgtaattcctaagtttaagaattttgcaggttattaaaaagaccttatattactaagctatgctcaggccaaaagaatgagcaccgtattcaggaatatactttctctggtgcatcttattgcaaccttaattttttaattattcttaccacttcaatgtgattattgactgaattatgtcattatgtcaaaggccaatccttaccatattccagtgggaaagaagacttaatatttagttaattacatttgtcctagtaagcctgaaattcctattgactctccaagttctcaatttctattgctcataggtgagtttattgacggatcttactgaacactgcagtcctcactacagtgcacactgtaattcaattgcctctaatataaaaaattcttaagttcagctctgtagaattacaggggtcaaaagttacaaacatgttcctgctgcttctgcctgtctrtaatttagtttgtaacctatgtctcagaaaatg

SEQ ID NO: 508770 - DNA, 471 bp, Homo sapiens
aagcaaatcaatagacaaaaagtcaagaaatacatacatacacacaaacacattcttgcacacatataaaatktaacaaagaaaatataactacaaagacgtgattctcagccatggttgtacattgtttttcacctagggagctttcaaaaggcctgttgccttgatcccaatgccagagattctaatgtaattgctctaaggtgtagcttgggcagtgatattttttgtaagctcccaaagtaattataagattccaccaaagttgagaaatattgcttgaggaaattcattccattatttacaatcacacaccaaaatttgaaatttgacaatagactttccatgtgtgttaaataaactgaatcatatattttaattcttttttattattttcttcatgtctttgtctttcttcaattactattgacattgtcaattataacttctaatcacaactgagataaatga

SEQ ID NO: 508771 - DNA, 608 bp, Homo sapiens
gttgaattgtggtcttccaaaaagtaggataaccaagaatctacaactgtgaccttattttgtagaaaagatctttccaaatataattaataatttcaagatgaggacaccctaatgatgaggtcatttagggtggcccaaagtacagtggaaggcatcagagaaaggaaaaaggagatttgagacacagacaggcagagaagaagccatgagaagacaaaggcagagattggaattctgcaatcacagcacaagaaacccctagagacactggaaactggaataggcaaggaaggattctcrcttagagccttcagagggaggtaggtactgctggcaccttcattcatacttcgggccctcagaactatgaacaaataaatttccatgttttaagctaccaagattgtagtaatttgttatggaaggcctaggaatttaatacagagtgacatgccctggctttgatttccatttttttaaagattatgaaaagattagtatggaattgtgaagaccaggtggtggatattttcattactcaatgagaaatagttccagtttggactaatgtttgagttgatctggaagccacggatgcagagtag

SEQ ID NO: 508772 - DNA, 415 bp, Homo sapiens
ccactgaggtgtccataggaccagctccaagcagggtggagaagacggagggggatgtggagagcaaacggaaaccagccaaatgaaaccaaagaagtgcgggtctggccgggcgyggtggctcacacctgtaatcccagcactttgggaggctgaggcaggtggatcatgaggtcaggagttcaagactagcctggccaagatggtgaaaccccatctctactaaaaatacaaaaattagctgggcatggtggtgggcacctgtaatcccagctactcaggaggctgaggcagagaatcgcttgaacccaggaggcagaggttgcagtgagccgagatcatgccactgcattccagcctgggcaacagagcaagactctgctcaaaaaaaaaaaaaaaaaaaaagaagtgcagg

SEQ ID NO: 508773 - DNA, 415 bp, Homo sapiens
ccactgaggtgtccataggaccagctccaagcagggtggagaagacggagggggatgtggagagcaaacggaaaccagccaaatgaaaccaaagaagtgcgggtctggccgggcgtggtggctcacacctgtaatcccagcactttgggaggctgaggcaggtggatcatgaggtcaggagttcaagactagcctggccaagatggtgaaaccccatctctactaaaaatacaaaaattagctgggcatggtggtgggcacctgtaatccyagctactcaggaggctgaggcagagaatcgcttgaacccaggaggcagaggttgcagtgagccgagatcatgccactgcattccagcctgggcaacagagcaagactctgctcaaaaaaaaaaaaaaaaaaaaagaagtgcagg

SEQ ID NO: 508774 - DNA, 517 bp, Homo sapiens
acgcgggcatttctcgccccccggcccttcagcgccgtagcagctaccaccgccgccatgttcagatcccacccccgcttcaccgcgctccccgccgggaattgtagtttgcgtaaggggcctcccccgctccttccgtcctgcctacagaccagaaactacatctcccagaagcccgcagagcggacccaggagaactactcttcccaggagaccccggaggcgcgcgcgctcgcttgtttccctccagttgggggcggagtcaggtggggcggagtttgggttctctccgccacgccccggcyccatcttccaatgccgctctgtgattggtgaggcggccagccaaccttcgtagctattggccgaacggccgtcgctcttcctgctggggagtcgcctacgcctacttcctgccgggaggaggggctcgagttccgcgtcgtcgcgcagagctgactctgggaggcgtttgggcccagagaagtggatccgccgcttgcgccgcatggagtcc

SEQ ID NO: 508775 - DNA, 517 bp, Homo sapiens
acgcgggcatttctcgccccccggcccttcagcgccgtagcagctaccaccgccgccatgttcagatcccacccccgcttcaccgcgctccccgccgggaattgtagtttgcgtaaggggcctcccccgctccttccgtcctgcctacagaccagaaactacatctcccagaagcccgcagagcggacccaggagaactactcttcccaggagaccccggaggcgcgcgcgctcgcttgtttccctccagttgggggcggagtcaggtggggcggagtttgggttctctccgccacgccccggccccatcttccaatgccgctctgtgattggtgaggcggccagccaaccttcgtagctattggccgaacggccgtcgctcttcctgcyggggagtcgcctacgcctacttcctgccgggaggaggggctcgagttccgcgtcgtcgcgcagagctgactctgggaggcgtttgggcccagagaagtggatccgccgcttgcgccgcatggagtcc

SEQ ID NO: 508776 - DNA, 637 bp, Homo sapiens
actgctctaagctctggcatgtgcagttrtatgtcttctggctgctctgtctcaatttccacccacagagccaaggaagcctccagccaattccagggagcatctttctgggccctgggtttagagacctgtgattctctttattccctctgctccagattctccaaatcagctcactttgggctctcttggccctgtgtctttcctgtcactggtttgtcaactgcctccactcagtgcctccccttagcccttcctgtccttacggtttctaaatgcaattctaatagcttcacaaatgtgctcctccactttcctaggcaccaaggaaaccttgacccacaggctttaattttacccttgcagtgaattcttattgactttcactgaccactggaacccacctacttgccctgagaacactcccattatctttcaattaaaataagacccttgatttatactttaatatacatatatccaggctgggcacagtggctcacccctgtaattccagcactttaggaggtcgaggcaggaggatcgtttaagcccaggcattcaagaccagcctgggcaacacagtggaacctcatacctctacaaagcaattttcaaaattagccaggtgtggtgg

SEQ ID NO: 508777 - DNA, 665 bp, Homo sapiens
acaaattggggtgcctgtgtttcaacaaaactttatttacaaaacaagagatgggctggatttggctcacatgctatggtttgcagattcctgctttaagataaggttgttcataattagaacacatggacacaggaaggggaacatcacacaccggggactgtgtgtggggagggatagcattaggagatatatctaatgctaaatgacgagttaatgggtgcagcacaccaacatggcacatgtatacatatggaacaaacctgcacgttgtgcacatgtaccctaaaacttaaagtataataataataaaatttaaaaaaaaagataaggttgttcattaatgcactatccataagaaggaaacattggcaccaatgctagggaaataaacagcattcaataatcatgccagcacagtaggtaacattttaaaagctataatatggccatcttataaaataatgtagagccattgaaacaaaggttatggagtatatagagctgcattgagcgtttactacctaccagcaccgttctaagcatttaatatgaaataactyatttaatcctcccaactacatctatgaggtaggtgctgttatttagtcttatttttaaaaatgcttttctatgcttgcatagctcctgtaatgtgtacacag

SEQ ID NO: 508778 - DNA, 344 bp, Homo sapiens
cgtggactcctgtccccttagaaaaaactccttaatgaaaatgctatctccaaattctaataatttccaaaagctgaaggattcatagctttccaaagctaagttgccatttttactgtttctgtttgactagaaaaacatgtgaagcctgaactgctctctaattgagtagacttcccagagaaagactggatgtggcacatgagcatttattcttagtctgtctccatttttcatcatcaatagcctctctgcattgccgagaaggagaatacagtcattaagacyatgttctattctgacactagcactgtctggatgggtgactttgagtctctcattca

SEQ ID NO: 508779 - DNA, 592 bp, Homo sapiens
atcatcgtggaaagctggagggctccagggagaggggctccagtggagtgcctctctcggccccaaaacagactatatggacgcggtgactsacggctcaaaatgtagtgagagataacgccagggtctgcttggctactgcagatgatcttggaaactatgaagcctgaagatagatcacatttctgggctttcaaaagaactctgaaaccctctaaatttagattgggctctctcctgggatcggtcatcttagagagatgtcatttcattaggaaaacctgaattgaaatcatcatagctcatcatgctgtgaattcatatgcccctggcccatggagctcagccagcaaggcctccagttcacttgcagagttattttccagaccaagctctaatcatcctcaaactgcttaaaaggtgctaataattttcaagtgcctctcatgtcctctgtaggctttctgttcagtctcttggttaaccctctctacaccatcactaggtagacactattgttcccactttgcaatgagtttaaaaagactctcattgtttaagtgacttgcccaagacctcacaggggcagaac

SEQ ID NO: 508780 - DNA, 592 bp, Homo sapiens
atcatcgtggaaagctggagggctccagggagaggggctccagtggagtgcctctctcggccccaaaacagactatatggacgcggtgactcacggctcaaaatgtagtgagagataacgccagggtctgcttggctactgcagatgatcttggaaactatgaagcctgaagatagatcacatttctgggctttcaaaagaactctgaaaccctctaaatttagattgggctctctcctgggatcggtcatcttagagagatgtcatttcattaggaaaacctgaattgaaatcatcatagctcatcatgctgtgaattcatatgcccctggcccatggagctcagccagcaaggcctscagttcacttgcagagttattttccagaccaagctctaatcatcctcaaactgcttaaaaggtgctaataattttcaagtgcctctcatgtcctctgtaggctttctgttcagtctcttggttaaccctctctacaccatcactaggtagacactattgttcccactttgcaatgagtttaaaaagactctcattgtttaagtgacttgcccaagacctcacaggggcagaac

SEQ ID NO: 508781 - DNA, 502 bp, Homo sapiens
attcctggcatgatgtttagtagtmttatcactgtgtatagtcatgacttatcttcaattttaagcaatctttaattgatacggagaatctatgaacactccaaatgcctaggactgtcctgtgcatattgccgtagcatagtgtgaaatttcctgaacttttcaggcaaagaaccatgcccgagagaaatagaagaataaaaaagtactcaagggctcatgtttctcaaacttggaaagacttatgtgggggaggaatggtggcttgtcagtgctatatacagagttagagaataaagacagcatgtttttacagaatatcacatttactaggaaaatgtaagtaacataacattaggtaatattgaatcatccagaaatatcatagaataaaggtaaagttgacataattcttagataatccattggtcttggaaggactcttatagagatctgtttcaggctttacctttaggaccttcaggaacacttgatcactttt

SEQ ID NO: 508782 - DNA, 622 bp, Homo sapiens
gggcagcttcttccactgcagcttcattcaatagccacaaaggggatagaataggctttttgtgattgtttttcacayagttggaaacatttcaaagcatcagatcttttttttttaagcaaactctgctttatttgcattccatctatttccagtgcataaggagcattgtaaatgtatgctttcaaagttaaaagtgtaaaataaaaagacatatcttctattttttaaaagactcaggatttgcaaagaatttacatatcactgacaatactgatgggacacattcaaaaggagaattgaggaagtaattctggtaaaacaggaagtttttctaggctgataatgaagtgtaacactttctccttgactgttggaaaaacacaacttaggcctaatcaattagtcaataaatccttgagcaaacaaacaagaaagaactcaaaacgtatagaagaatattgctaagtgacagatactggagaaggagcaggttaggggacagtatgatgaattcactctggagtatattgatttcaaattcctttgagagaggccatattggagtttggatacacaaaagtaaaactaaaaagtgatgagtagatctgagatacaaaga

SEQ ID NO: 508783 - DNA, 529 bp, Homo sapiens
gctttcattccagaacctaatagaacatagttcaaatgacacagttacagtccccaataactgaccaacaagaaatatgtgatcaagactgaagaaaaaaataaaattgctccatttttagctattcagagacaaaacaaaaacacagtaaaacttaaaaacaagatcaaggaggctgatggtcaacaatgtaagtgcatatgttcagagacacagaataggtrgctcacatctgtagtctcaactattcaggaggctgaggcaggaggaacacttgagctcaggagttctatgttgcagtgagctatgactgcaccactgcactccagcctgggtgacacagcaacactctgtctcaaagaaaaagaaaaaaaagaaaagaaagaaaaagaaagtgggagaaggtgtcacactgttgtttctagaatatatccaaatacgaaccaattggcctggattattttctttttatcaatttcaatgtcaattgagacatgttagatggcagaccacttcatttttatctgct

SEQ ID NO: 508784 - DNA, 529 bp, Homo sapiens
gctttcattccagaacctaatagaacatagttcaaatgacacagttacagtccccaataactgaccaacaagaaatatgtgatcaagactgaagaaaaaaataaaattgctccatttttagctattcagagacaaaacaaaaacacagtaaaacttaaaaacaagatcaaggaggctgatggtcaacaatgtaagtgcatatgttcagagacacagaataggtagctcacatctgtagtctcaactattcaggaggctgaggcaggaggaacacttgagctcaggagttctatgttgcagtgagctatgactgcaccactgcactccagcctgggtgacacagcaacactctgtctcaaagaaaaagaaaaaaaagaaaagaaagaaaaagaaagtgggagaaggtgtcacactgttgtttctagaatatatccaaatacgaaccamttggcctggattattttctttttatcaatttcaatgtcaattgagacatgttagatggcagaccacttcatttttatctgct

SEQ ID NO: 508785 - DNA, 595 bp, Homo sapiens
cccctgatactgagatgcaagttatcaacttcagcagaaaaaccgctcttccagtttttctcctgaatttttgatgttattgttgttgtttgtgtgtgtgcgcacctatgttaacgattccatgatcccccactatccygcaacaggcatgattctaatggactagaagcaaccttaatcaaaattccatatctcaggattagggtctacaacatgcctccatatatccactatgaatactttcaaagctaataagtaaacagacaaacctgtatgtttaaaataggtttgttttaatatagcatccaaactaacacactgttgttcaaatcatcagttttgagttaaacttaaccaggattgatttcttttcaacttattacagaaacatggttttctatattactattagtgacagaggcaaggaatttcctatttcaattttaaaatatatgaaaaggaactatttatttcacatccaaattataacaggatcagactctggttgccatagcatttttaaagggagagctggaatctttacatgattaagatgctcttagggagctggggtaggttgtttgagaaaactaga

SEQ ID NO: 508786 - DNA, 573 bp, Homo sapiens
  misc_feature (1)...(573): n = A,T,C or G
tgccgtgtgccacacccacccatcactggagtttgtcagagacgccaggccgacaagtgcccctgggttgtcactcctcccacgtccttgggatgctggctgggaaagccctgctctgctgacccctcactcctaaggggctcgcggaagaggccgagggtctgagagctggctccttggcccaaggcagggctgtccaaatcctaaggtccctctgctcccataggaaggcttccagaagcctctctctggggccaggggcatctgggaagatgtcccggccctaactatgattgggaaatggggcaagatggagaaaaatggcgtttgtgaaagggctcccggggatatagtctgtatcacaggcagacaggggcctgcaggactgggctaggggggctggctggggsaaggcagcaggtggggcagccacacctccactgggctgctcccccagagctggtctgaagacaggcaaggggtatggctgtgaccaaccctctcntggcaccccacccccagcaacccatgatattggggtcacagctcagcctcttccacttactcacgcat

SEQ ID NO: 508787 - DNA, 504 bp, Homo sapiens
cgccgcgagggcccgcgccgcccgcggaggctgggcttgagcccacgggaaatgaatacggatcctataagattcgagctttcatcactgggtcaccagacggttctgggcgcgtgtccggggttcatcctgaatatgcgctgatggggccgctgggcacggtggcggtgtggccgcaaggccccgcggggccgcgcccacccggagggtcccataccagcccctcctccgcgcccaggccctggctctccccgctgcacccccgctgcccgcagccctgagcgcgccccgcttccgctggcgggacagcagcgtcctgccarggtcgcggcgccgcacagcccgaatacttcctcacgaaactccagagaccccttctgtacccgctgtgtcccccggcctgccagtagctcatggttacctcagggtcccagacgcttaaatgggttctggaattttctctgcctcctcttgccttccgggagcaaatgcgatggtggctgc

SEQ ID NO: 508788 - DNA, 283 bp, Homo sapiens
tcctccgcgcccaggccctggctctccccgctgcacccccgctgcccgcagccctgagcgcgccccgcttccgctggcgggacagcagcgtcctgccagggtcgcggcgccgcacagcccgaatacttcctcacgaaactccagagaccccttctgtacccgctgtgtcccccggcctgccagtagctcatggttacctcagggtcccagacgyttaaatgggttctggaattttctctgcctcctcttgccttccgggagcaaatgcgatggtggctgccag

SEQ ID NO: 508789 - DNA, 589 bp, Homo sapiens
tgtccataccattgtaaaccacatcgaaactctgaaaagcagttttgactgcccaaatcatccacttcctgaaaagacaactttactattctagttttctccactgtcaaaatcaaaggagtatattaaaattttaacgtaggccaggcgcggtggctcacgcctgtaatcccagcacttttggaggcctaggcggacggatcacgaggtcaagagactgagaccatcctggccaacatggtgaaaccccgtctctactaaaaatacaaaaattagctgggcgtggtggcgcgcgcctgtagtcccagctactcgggaggctgaggtaggagaattgcttgaacctgggaggcggagattgcagtgactggagatcgcgccactgtactccagcctggcgacagagcgagactccgtctcaaaaaaaaaaggtatcatcrcgggcctttgtccattcaaggctccaaagtttacaaactcactttcatacaattcacaccctctgcctgaaatgccctcctctctctggtgcctgttgaactcctactcatccactccaagcttgttttcactaggcgcctctactcat

SEQ ID NO: 508790 - DNA, 270 bp, Homo sapiens
ggctgggcctcacacgcaggcatcagtctggctctgaggacagggctgggggctggcatctctcccaggaggctgggctggtggcaggcactctggcagggagggcaggctggacaggagtggcccctcccaggctctgggccatctctgcatcccaggccaggcctggctgcctcacgccttgccctgggtgggatggggaatattttctcctttaccgaatgaaggggaaaggagsagcctggggctggagggggagcagtggaggtt

SEQ ID NO: 508791 - DNA, 535 bp, Homo sapiens
gctgacttggcaggactgtgcaattgtcagaaggccgtggggagtgggggccagtgcctgcagcctgccctgcctctctcacaggcccttagagcatcgccaggtgcagagctccacagctctctttcccaaggagtaatcagagggtgagaacgtggagcctggtggacaggtgaaagcactgggatctttctgcccagaaaggggaaagttgcacatttatatcctagagggaagcgacagcagtgcttctccctgtgctgaggtacaggtaaggagggtggtttgtaaagttcactggggagggtgatccctctttattgttctaatattatgctcgcagcctccttgacaacatcatgcaaaatgtgtcttactagyttctagtgcataaaatattggtggagctcttcgctgtgctgggccagtcaccagtgctgggcactgtgggtcaaggcagtgcccaggacgggcacagccctgccttcccaagctatggtttattgtggtaggatctgcctgcccagtgaagtgt

SEQ ID NO: 508792 - DNA, 630 bp, Homo sapiens
gctgctgtcttaagaagtcctaaagttcctctagcctcgaggactcgtgttgggaaagtcactcctgcagaagccactggcggatctagagtacaggcagaggagagggagaaaggcacacaaaggcaggaagaggaaaacaccgggataaacaamcagggaagaagggaacatccaagtattcacgatggtccatccacgagccacagacaacacctcactcccactgctcacagaatgtcagagctgggacctcagagatgggtccatctgctatacttggaaaccaagcctcagaggtttaataacttgccccaaagttaaggttaaggagctggtcagggcagaattgaatcccaaacccaatatcctgactctcagatgccacttctctttttactttgccacagaggagaaagtaaagggggtggtctagggtagggacggggagggagtcaggagtcccagggcctcctcagggacctctgggtcccctagctctgcgctttcacacacacatacccctcctgggtaccatcagtctaactgcaaggcccagcatttccaaagcaaacactgctccaggctgggttgttgacctttccttcctgaggctcctggcgcccctgg

SEQ ID NO: 508793 - DNA, 630 bp, Homo sapiens
gctgctgtcttaagaagtcctaaagttcctctagcctcgaggactcgtgttgggaaagtcactcctgcagaagccactggcggatctagagtacaggcagaggagagggagaaaggcacacaaaggcaggaagaggaaaacaccgggataaacaaacagggaagaagggaacatccaagtattcacgatggtccatccacgagccacagacaacacctcactcccactgctcacagaatgtcagagctgggacctcagagatgggtccatctgctatacttggaaaccaagcctcagaggtttaataacttgccccaaagttaaggttaaggagctggtcagggcagaattgaatcccaaacccaatatcctgactctcagatgccacttctctttttactttgccacagaggagaaagtaaagggggtggtctagggtagggacggggagggagtcaggagtcccagggcctcctcagggacctctgggtcccctagctctgygctttcacacacacatacccctcctgggtaccatcagtctaactgcaaggcccagcatttccaaagcaaacactgctccaggctgggttgttgacctttccttcctgaggctcctggcgcccctgg

SEQ ID NO: 508794 - DNA, 591 bp, Homo sapiens
ctgctggtaagtggacctagagtcttgttccttgctgcaaccaaacaactgacaggaaccagaatggctcrggcaacgccagggctctaagggccaatccagtctgcagggatgagcatccgggcccgtgctcagagggtcccggggcctcatgagatcctgagctggtggtccccagttgtgaaaccagatttcccactgttctggggggaccttcctaggcaagggagcctaggagcatttagttccaacggggttttgtccaataaggaaggagcctcatcctctccctcatccctgctgttcacagaattagagtttagagttgaaaggaatatccaggctaccttctcccccaatttttttttcttttgagacagagtttcattcttgttgcccaggctggagtacaatggcgcagtctcggctcacggcaacctctcccaatttttgagctgaaaaaaaaccgaggctcagaggtgtcaacttcccgaagctcacaaagttaatgatcaatgtccatataaagtcaggtcttgcaattcacaaagttcttggcacactcaaattatttacagcctagttttgatc

SEQ ID NO: 508795 - DNA, 615 bp, Homo sapiens
tctgccctgtttggaagcctctgtaactacatgaatgtccttgcacccacaggtgtttgattataagagcggttttcaaaaattcttggtccaggaccyctttacacttttaaaaattgagaattctaaaagcttttgcttgtgtgtattatatctgtcattatttctcatattctatatttcaacagagaacttttaagtacttaattcttttttaaaataacaatgacaaattcatgcaatgcagatagcatatttttatttttaaaaaacttcatattttccaaaacaaaaaaaattactaagaatggcattaagattttccaaatctctttaatatatggcttaataagaaaggaactagattctccatctcctactgcacttacttcattaaaatattatgtatcatgcagcctctggaaattttcattgaacagttgtaagcgagagaaagtaaaaaaaaaaaaaccaaaaaaggcaaataacaccatagaattattatgaaaatacttttgactctgtgaatcctctaaaagggtctcagacatttgttagacatttgtcaagcgaaagtgataaaacatttttccctaaagttggtaacttctttaa

SEQ ID NO: 508796 - DNA, 564 bp, Homo sapiens
caccgcccactccaagggttgctgtttgcagtgactgcaatgggaacagtatcccttggggttacacacttcagatgcccaggttattacttccctatgtagggtcccttgctagtcatgtctatgaactataggtatggcagattgtaactaggcctacctaaacaatggcttactctgaatatttaccaaaatttgcattttttgtatagaacaccaccttaaaatgtctatgttaattttactgacatccctgccactttggatttctttgaggaggggctggggtaaggctgaattaaatactaccccacagtgcactgtagcatgtctttttgcttatctttttccaattccttttcccaagagtaagacgaaaatccttctttaagtgtaatctttttgaaaagagaagtaccttgtcaggaattgatagtaatctttyagtaagtttaggcaaaatacacagaaccccatctagcttttaatttaaaagtatatttggtttttggaaatgcaaagattggtcatgttatgataatgacatttactaagctcttatga

SEQ ID NO: 508797 - DNA, 556 bp, Homo sapiens
caaaaaggtctctgatgagacttgctttttagttctcatacccttgtgtaatcacgttgagtatgagatggacttagtgactttcttctaataaatatggtagacataatggactgtcattgtcaagattaggctataaaataattgtggtttccatcttaagttggtttgctcactctctctcgctcgctctctctcgtcatttgccctctggaaagaaaattgcccgtggagaggcccacatgctgaggaaccaaagcctgccaataactaggtaagtaagcatggaagtagattgccccccttcagtttgagatgagaccactgtcccaaccaacaacttgaatgcagcctcatgaaagaccttgtgccagaagtactcagctaaacttctcccgtgttcctgatccacataaagtgaaagacactaaatgtttgttattttaagttgcygagtttggagttaatctgtactgtatcaataaataactaatacagactttgttgaaagcaatacaaaacaaatatatatttacctcagatccttgattacctg

SEQ ID NO: 508798 - DNA, 475 bp, Homo sapiens
caggcttgcaggcaggaacaggcccgggacaccccagagacaatattgatgctgtttctgcccaaacaaatgccagctactaattccggtctctgttggaaacacagaaatcaatgctcacagaacagggaggctggccctcgaggagcagtgtggtgttgggtccccaggcagtgattacgacaggacaggcaggcaggagaacagagctctcgaccttagacacgtcccatgckgccctcacctggcgacctggactcggcagcacgttgggggtcagaacagtgggttctcagggacctggcctcggggggcacccgtcatccctcagcaccctcccctgcaaaagggaagcagggcctggacatgacccccaaccctggctcctgccacattcccctgactttatttaccacccgagagactcataaataatagttgaggggtcagtgagcgaatgaactagccaaaaaac

SEQ ID NO: 508799 - DNA, 588 bp, Homo sapiens
aatatcactagatattctgagagatacttttattggacgtgtctcacctagtatgcaagcattcatgaagcttctgcttgcatcatgctttctaatgtcccactggtccagtccagagttggtgtgggagggcacgaccatgggtgtgatcaccagtaggcatgattccttggggacaccaagataatatgccacattaccatataggagtgactcattaatatttttattgaatgggatacttgttttcaatgtagtatagttcacaagtcttcactttgataaagctactttttttttttttttttttttttagagacagagtcttaccctgtcacccaggctggagtacaatggtgcgatctcggctcactgcaacctctgcctcctgggttcaagtgattcttytgcctcagcctcctgagtagctgggactacaggtgcgcaccaccacacctggctaatttttgtgtttttagtagagatggggttacattatgttggccaggctggtctcaaactcctgacctcaggggatctgcccaccacggcctcccaaagtgctggcattacaggtgtgagccactg

SEQ ID NO: 508800 - DNA, 639 bp, Homo sapiens
tattgcctgtgacacagcttatgtggagtcagtgttttatagattgatgaacatcagctcatttttccagggagagtaatagccggtctcttccttggaaatatttaaggaacatttagtttataagaaagctctgatagatgattgaaatcacagaacagaagactgatcacacttaaacacagtgcatctgcatttacttaaggtactgaagtgcagtgcttctcaaactttaccctgcatggagaaccctggggcatcttgttaaaagattctgatttagtggctctgggatggagccctgaggctctgcatttcccagaagctcctacacagtgggagtgctgttcgcttaccagcaagtctttagtataggtaaccctgctgaagtctttgtcctaggcaagaagcccacaagaatcccstcacccattgggatgttgtggcctttcacttttggcattcacctctagcagtacaagaaggaatccttttaggatcttttcacacatgctcaagtcattcatctcaaaactagaaaatatatcttaatttaaaaccatttttggggggatgtggcattaagttcatttgtataaatctgacatttgttaatagctgtaatttgaaaatgaaaaa

SEQ ID NO: 508801 - DNA, 639 bp, Homo sapiens
tattgcctgtgacacagcttatgtggagtcagtgttttatagattgatgaacatcagctcatttttccagggagagtaatagccggtctcttccttggaaatatttaaggaacatttagtttataagaaagctctgatagatgattgaaatcacagaacagaagactgatcacacttaaacacagtgcatctgcatttacttaaggtactgaagtgcagtgcttctcaaactttaccctgcatggagaaccctggggcatcttgttaaaagattctgatttagtggctctgggatggagccctgaggctctgcatttcccagaagctcctacacagtgggagtgctgttcgcttaccagcaagtctttagtataggtaaccctgctgaagtctttgtcctaggcaagaagcccacaagaatcccgtcacycattgggatgttgtggcctttcacttttggcattcacctctagcagtacaagaaggaatccttttaggatcttttcacacatgctcaagtcattcatctcaaaactagaaaatatatcttaatttaaaaccatttttggggggatgtggcattaagttcatttgtataaatctgacatttgttaatagctgtaatttgaaaatgaaaaa

SEQ ID NO: 508802 - DNA, 623 bp, Homo sapiens
gtagggagtatttgtttcaaagctgtaagagaaaccctgtaactgaacttaggaaacagttgctcacattccttatcataaatctagtcatacaggaaacatctaattcttagaataaatatttactctctctcaagtgggatattatcacaaaggactttatggtgccatgaaagcaaggccgtacagatggccctgagccttgcctggcatttaatcgaagcccacgctagggtgtggttttgtattcatgtgcttgcttgaacaactttaggagagcagacgctgcaggcaggtatttctcacagggccgagctggggctacagcttccctcaccaatgtcacacttaggagaagttcacatgtgagcaagcacagagcgggcagagcagcctcctgtgagggctgcgaggttgcccggcctggccgggtttattggcacacatctcattcatgrgcagagatctgcagtgcgtgaaaagtttgcatataaaccatttcaggttgttttcttaaattaaagcttaaaaaatatccaaaacatatttgaacatcagaaacagatgtttgtggtatccttggagcacttccacaggagtcttttaaaaaacagcctgatttt

SEQ ID NO: 508803 - DNA, 602 bp, Homo sapiens
aaattaaaattaatacatagttaattttatttccattgtaaattgaaattcataagcctattcttaaaactataaactccaggacagagcaagcagttaacacttgaatctgtcttggcaaattctcctgtcttctagcacccccccaccacctttttttttttttttttttggagacagagtctcactctgtcacccaggctggagggcagtggcactatcatgactcagctcactgcagcctcaaccacctaggctcgggtgatcctcccagctcagcctccgaagtagctggggttacagatatgcatcaccatgcctgactaatttctttgtatttttttgtagagacagggttttgccatgtwgtgcagactggtctcaaactcctggactcaaaccatccgcctgccttggcctctcttaagtgctgggcttacaggtgtgagctagcacgtgcccttcaccctccttttaaagtgaaatttgtgtaagacttagataaaggatatttggaggagaagataaagtcacaaaataattaaccatttaaatttggagaagggaggaaggttagaggacatctaccttaagattttcaa

SEQ ID NO: 508804 - DNA, 521 bp, Homo sapiens
cgctaatggcagccagcaagcctccgctgcaggaaatgctgcgggatggggaargtctgagcttgcttctttactggccaaatcccatgtgacattgaggggcagaccttagtaggtatgagtgattgttaattgtttatctcccctatgaaggacaggaccaaggtaattatctttcattttcaaggcatggcacaaggtagactctaggtaaatttgttgaatgactacatgcagtgtatctccatccaggtttattatccccacaataattttcttagtaagtttattagtgctaccgtctgccatagttcccaaatttgaactattttttttgcctaggcttctttttttttttcaaatcctacctaattgatttgcacagttgtttcaaatcaaatgctacatcccatatcttgcagtgacgcagttattcactgctaacgtctaaatcggagaagtgaaaaggacaattgtttcgtgctttcttaagtccctgaccaagatcagtagggaaatcc

SEQ ID NO: 508805 - DNA, 521 bp, Homo sapiens
cgctaatggcagccagcaagcctccgctgcaggaaatgctgcgggatggggaaggtctgagcttgcttctttactggccaaatcccatgtgacattgaggggcagaccttagtaggtatgagtgattgttaattgtttatctcccctatgaaggacaggaccaaggtaattatctttcattttcaaggcatggcacaaggtagactctargtaaatttgttgaatgactacatgcagtgtatctccatccaggtttattatccccacaataattttcttagtaagtttattagtgctaccgtctgccatagttcccaaatttgaactattttttttgcctaggcttctttttttttttcaaatcctacctaattgatttgcacagttgtttcaaatcaaatgctacatcccatatcttgcagtgacgcagttattcactgctaacgtctaaatcggagaagtgaaaaggacaattgtttcgtgctttcttaagtccctgaccaagatcagtagggaaatcc

SEQ ID NO: 508806 - DNA, 627 bp, Homo sapiens
tgttacggtcaagggctaggaaacctgcataatttcacccagtagtcacaaacggaagtgctcactccactctcccacgaggctcagtcattaaacggaagtgaaaggtggaggaagcgaacagccactcagactgggacaagagaggcaaggacactttggaggtcatgctgtgtcccaggagagcagtacggggtaaggcatggggagcccagaggatacaagagagccagcaggggtgggaaaagaagctgaatagaggaaggaagcctgtaaatgagaaatgcacacacatttctttaagttttaaaaactaaaattgttagccaggcatggtggcaggtgcctggaatcccagctactccagaggctgaggcaagagaatcrcttaaacccaggaggcggaggttgcagtgagctgagatcacaccattgcactccagcctgggcgacaagaacaaaattcaaaacaaacaaacaataacagcaacactaaaattgtaaaatctgtgtagttgagattaatttagaaagtatgggtagaatgtcccttatctgaaatgcttgggatcagaagtgtctcggatttcaagctttttcaaactttgagatatctgcattacataa

SEQ ID NO: 508807 - DNA, 627 bp, Homo sapiens
tgttacggtcaagggctaggaaacctgcataatttcacccagtagtcacaaacggaagtgctcactccactctcccacgaggctcagtcattaaacggaagtgaaaggtggaggaagcgaacagccactcagactgggacaagagaggcaaggacactttggaggtcatgctgtgtcccaggagagcagtacggggtaaggcatggggagcccagaggatacaagagagccagcaggggtgggaaaagaagctgaatagaggaaggaagcctgtaaatgagaaatgcacacacatttctttaagttttaaaaactaaaattgttagccaggcatggtggcaggtgcctggaatcccagctactccagaggctgaggcaagagaatcgcttaaacccaggaggcggaggttgcagtgagctgagatcacaccattgcactccagcctgggcgacaagaacaaaattcaaaacaaacaaacaataacagcaacactaaaattgtaaaatctgtgtagttgagattaatttagaaagtatgggtagaatgtcccttatctgaaatgcttgggatcagaagtgtctyggatttcaagctttttcaaactttgagatatctgcattacataa

SEQ ID NO: 508808 - DNA, 559 bp, Homo sapiens
aaaccccacctccccatctcctatcagacacttggggagttgaccctagtagaagaagttggtctttatctccgcttgtttgcatttcgcttatttctgatcaccattctaccaggatgaggttgtttttcaaatcttgatttggatctgacatattacagtaactgcattttctagcttgacatcaaccatcaatgaaatcagcatacwatttcacccaagtcttcatcaatgaaaacactgaagaggtgcgaggggagacagagccttggactcactaccaaatctattcataaagactggtatttaaatccaagcatcagcgttctggaagcagatccgtacagaaacctttccactggttcccaggaaacctcccattccttcactactcttgctatgcaagtacaataccatatttgcctttaggtgaccacctcttgaccacttcaaattcctacatcttttctaatatataaaataaatccaaagtttagaaacataatttggggaaaaggttataacggagcaggcagggggtttcaagtcagacaaacct

SEQ ID NO: 508809 - DNA, 558 bp, Homo sapiens
tttttcaatagctacaaaacagtaagattgctacttcattaaatccaccgagccaacacacaggcattacataattcacttatccaaataattgaataagtaaattaacagtttaaatagaactataaacatatgcttacctactgaataaaataagccaggatttttcttgtttactgtatttaagaatgtattaaatctgaaagaaattcttcattacataggagtcttaactgccaactcaggtcattatgaactatgggtatttgacaatattaaactacattctcttgttgtttaatcgtctcatctagactgaatctcctctccaattataactatatccaatcccagatgaaggtctcackgcacagttataggagtgcttccgtgctggaccctgggaaggggatgctttagaagggccaggacagtatctgcgaggggctgaaggtactcttgcagatttcctgtcggctctcgtaggagacgtaggaccatgaactgtgctcctccccgggatgcacctgcctccgcccgaacactgccatgcacaga

SEQ ID NO: 508810 - DNA, 467 bp, Homo sapiens
gctcttctctggcttggtccctggcctcaatctttaaggagtgctcatgctgcagctctcgatccagagggcgtgcgatgttaacaacacccgtcacgctgtcaattgaaaatgtgtctgtgtctgtaasaattgagtacgtcacgtgtccgttgggccccaggtctttatctgtggcttcaacctggatgatttcactatgtacctccttgtcttcactcacttccacaaaatagctctcctgtaaaaactcgggtggattatcattggcatcgacaaccacgacatgtagaagacgccacgcagccttctggggtatcccaaggtcatagacggtaatattcagggtgtatttgtctgttgtttcacggtcaagaggagataaaattttcagcattcctgtttccatatcaatcatgaagcaactatcctcatttcctccagaaacagcatagaccagttttcca

SEQ ID NO: 508811 - DNA, 646 bp, Homo sapiens
tgcagcgcctgcaaacaaaagcatcacagctttgtggtgtgtcaaggacagagaagaaagggagtcccaaacaaaagagactagtgtgagcttctcatgactcattattcacgaacaacctcgggaaatcgacaccacccttgcaaagagtctttttagttaaagttattgctttgaacttgggggagttgatatgcaacttacaattggcatttattaataattttgaagtgttacttttagacatgtgtgtcctttagaagagaccatggtcttgctctcttatctgtatgtttgatatttttcacgtttttgctacaaaccaagtattgatctttatttttaaaaagcttttttgaggtgtaattcacttacagcaaattgcacatatttaaagtctacaatttgataagctttcacatagcttttacacctgagaaaacatcaccactatcaggcagtgaccacacccatcattcccaaaggtctcctcacacttctctgtattcyccctcccaaccctcccacctccatctctagtcaaatgctggtgtgctttctagcactaaataatagtttgcatttcctggaattttatcttggtgaactcacatggcatatactctttttggtaaggcttcttata

SEQ ID NO: 508812 - DNA, 570 bp, Homo sapiens
cttttatagttccataactgtatagggcaaacatgtgtcatctggcgttcattcacttttattctgatcacctcaaggtaccctcaatattaacattaattcttattcctcaratgattttgagtttcaggaaaggaaaaaaaatagtcttaaagacaagcctgatattcttcactgtggactaatttttgaagtggtgttaagcagaccatggattattataagtaaaaaactgaagggcaaacctacattcaaattatttttattgcatatcatggtcctgcttcaatcttacccttccctgattagttgagataaaagaagagatggaggtcagtgaaattagtgcgcttaaaaaccttctttaaagatggtaaagataacttttttctgcgtatgagcccattggttaaaagacagatacttgagataatattctttttatctcactaattaaacataaagctaggctgggagtgctttggagacatgtcctcatcagcagggcctggcccccgtggcagtgttttaattcaagaagcctaatttaattagcaccctggcactggg

SEQ ID NO: 508813 - DNA, 533 bp, Homo sapiens
ctggattctagcacagtgttggacagaattactcctgactgctttgtaagtaagaaggggagatctgttccagatgacgagtggttagattcaattgtgactgactgaatatcracaactgacacagtcttcaaatggtgaaggtatttcatatagatgacattcccacagagttaagttgaaccttagacatcaacaataattaaaacaaaatgctgcatttcctaagattagaactgtccaaaaatagattgaattgttctagtaggggatactgttccatccctggaagtctgtaagctaaggactgaagcacctcttggctccaggtgctgtagagggatccaggaacctacctggaggtcacaagatgtgacaagtgacgtcccagattcctccatttcttacattctgtgattctttttttgtttgtttgatttgagacacggtccctctcagtcacccaggctggattgcagtgatgcaatctcggctcactgcaatcttcacctcccacactcaaacaattcttg

SEQ ID NO: 508814 - DNA, 533 bp, Homo sapiens
ctggattctagcacagtgttggacagaattactcctgactgctttgtaagtaagaaggggagatctgttccagatgacgagtggttagattcaattgtgactgactgaatatcgacaactgacacagtcttcaaatggtgaaggtatttcatatagatgacattcccacagagttaagttgaaccttagacatcaacaataattaaaacaaaatgctgcatttcctaagattagaactgtccaaaaatagattgaattgttctagtaggggatactgttccatccctggaagtctgtaagctaaggactgaagcacctcttggctccaggtgctgtagagggatccaggaacctacctggaggtcacaagatgtgacaagtgacgtcccagattcctccatttcttacattctgtgattctttttttgtttgtttgatttgagacacggtccctctcagtcacccaggctggattgcagtgrtgcaatctcggctcactgcaatcttcacctcccacactcaaacaattcttg

SEQ ID NO: 508815 - DNA, 628 bp, Homo sapiens
tagcactttctctcctagaatttaggcataatatattactacatggtggctaggcaattttatttccctgtttccctgaatgttctttaattaatccataaatttagaaaccagattagaaaaacagaagactttctttaaatgtttttataactgactttttagtatactttcatgcaggaatttgaatagcaacagatacactattaaagagacttgacayacgttattgtttcctattgtttcaatttaattttgtttcaaatacggtaataatctgtaatgaaataaaatggaccatattctctcaggtgaattggctatatgttctgtgaacaaatatttgattctacattttgctttggaagcttttaggtaaaagttaggaaataactgctgtgataagcagaggatgacctgtaaagtcaacctcagccctattgatagacctgaaatttttattttactcctttgaaaggagacatcacaaattaccttccaaacacattttaagggaaatgtaatatcagctattattgctttacctcaaaatgctttatcataatagctggcaagagactgaggaaatgcaacaaacgataaccgtgttttgtgttagaagcggtaa

SEQ ID NO: 508816 - DNA, 628 bp, Homo sapiens
tagcactttctctcctagaatttaggcataatatattactacatggtggctaggcaattttatttccctgtttccctgaatgttctttaattaatccataaatttagaaaccagattagaaaaacagaagactttctttaaatgtttttataactgactttttagtatactttcatgcaggaatttgaatagcaacagatacactattaaagagacttgacacacrttattgtttcctattgtttcaatttaattttgtttcaaatacggtaataatctgtaatgaaataaaatggaccatattctctcaggtgaattggctatatgttctgtgaacaaatatttgattctacattttgctttggaagcttttaggtaaaagttaggaaataactgctgtgataagcagaggatgacctgtaaagtcaacctcagccctattgatagacctgaaatttttattttactcctttgaaaggagacatcacaaattaccttccaaacacattttaagggaaatgtaatatcagctattattgctttacctcaaaatgctttatcataatagctggcaagagactgaggaaatgcaacaaacgataaccgtgttttgtgttagaagcggtaa

SEQ ID NO: 508817 - DNA, 628 bp, Homo sapiens
tagcactttctctcctagaatttaggcataatatattactacatggtggctaggcaattttatttccctgtttccctgaatgttctttaattaatccataaatttagaaaccagattagaaaaacagaagactttctttaaatgtttttataactgactttttagtatactttcatgcaggaatttgaatagcaacagatacactattaaagagacttgacacacgttattgtttcctattgtttcaatttaattttgtttcaaatacggtaataatctgtaatgaaataaaatggaccatattctctcaggtgaattggctatatgttctgtgaacaaatatttgattctacattttgctttggaagcttttaggtaaaagttaggaaataactgctgtgataagcagaggatgacctgtaaagtcaacctcagccctattgatagacctgaaatttttattttactcctttgaaaggagacatcacaaattaccttccaaacacattttaagggaaatgtaatatcagctattattgctttacctcaaaatgctttatcataatagctggcaagagactgaggaaatgcwacaaacgataaccgtgttttgtgttagaagcggtaa

SEQ ID NO: 508818 - DNA, 360 bp, Homo sapiens
tatttattttgaaacacacacttragtgctgtataagtttgactagacacatcaaactatgcacctgatattttcagggaattagagtagcccaaacttaaaatattcccaaatgaactcatggtccccacttttgctagtattgcttagctcagcaaatggtactatcttcacctgactgcttcaccttcttttcctaagaaaactaggtatcacccatgagtcactccctgttcctcaccccttataaccaattcgtcatcatatactgtcagtttcttccaaaatattctcagatccattaatttcagagcaatgtctccaatttcactcttagtagctgcatccaagcaatcttta

SEQ ID NO: 508819 - DNA, 562 bp, Homo sapiens
cctgtcaatggtagctggtattaaatgattaacaagactggtgtagtccctgccctcatggagcttgtgaatgccaacytaaaggttatgtgatgtctgatgagagtcctaaaaatactcagagggttagcaagtgagagtggaaaggacttcagtggcagtcaggtgtggattcaaattctgactacatgcttacaagcctgactctgggcatatttctgagactcatttgctcaattgtagaaagagataaaagtctttccctcctaatgttactgcgaggcttaaagcacctggggtagcaccaggctcctattgtgcttactagagagtgtgttctttctggggattttgagtaccctgcttgggcaaaccaaagggcagccacactcaagagagtgctggccgatgctttctaaatttataacatgtatacctccattgagagcttgtttatgttggcaatttcccctagaatctcttcagattgcacgtgttctttgcagacaaccagacacagactaaacattcatcctccgcctctgtgcacctttgcttgggc

SEQ ID NO: 508820 - DNA, 506 bp, Homo sapiens
gaggctaatcctgccgggaaatatatgcctcaggtttccctcaggtatgtttattcaccattcatcattgcttggggaaagtggaaaggagaaagaagtccttagtactctgcctgcccagcatgcaggctgagtgggctccagcattcagataatgcccttggttgaagagttggaagttgggctggcttgtagcaaaagggcactttctgagggcatccaggtgtggcccaacagtacctgctacatgacctgcctctggataagtaccttcctagtccagctctacctctgagytccccctctgatgtagtttggctctgtgttcccacccaaatctcatcttgaattgcactcccataattcctaggtgttgtgggagggaccctgtgggagataatttgaatcatgggggcagtttcccccatactgttcttatggtagtgaataagtctcaggagatctgatggttttatcggggtttccgcttttgcatcttcctcatt

SEQ ID NO: 508821 - DNA, 591 bp, Homo sapiens
aacaaagttcttatgcaagaacatctcatgcaaacactcatttcattgtggaggaagataaaaaagaggcaccatggrgctcacagattccaacttggtttttagagatgatgaggaataactgaatgggcaatttttaaataagcataacagcaattgtgtccgtttcacacctagatcagtaattgcagcccgccttcccaggtaccaagttaatataccaagttgacataaaggcaaacaaaactataatgtgtgtttcaccaaaatgtctattactacccttcacatattttcatcctgctgatcttcattgatctctacagttctcccaatcttggaaccatattcaatttcccaagtatatatgtataaagagacttcttttacttattctactcaacttcctgctcaaatctcgtctacatgcaccaagctgccaagttgtccaactttgtgtgagaaattccctgtaataccaggcctaccaaccagatcaactctagtcctttaggtaagatggggcatttagaccatttgatggcattccaatagaatgcacagatcacaaggcatctgctgtgcagataa

SEQ ID NO: 508822 - DNA, 495 bp, Homo sapiens
tgaaaaagtagtgtgtagtctcaagacctgccttctgaacaactgagcactcaactcctccttcctttcttccatgttgccagagagaggagagtacattctgaaactgttgggttgatggcagagttcagatatcccttctgaatctcccrttgagatataatccccagtgttggaggtagggcctggtgggaggtatattggtcatgagagaggatccctcatggcttggtgctgtcctagcgatggtgagtgaactctcacaagacttggttgtttccaagtatgtgacaccttcccatgtctcttgctcccactctcaccatgtgagatacctgctccccctttgccttccacaatgattgtaagcttcctgaggcctcatcagaagcagagcagatgccaacaccatgcttcctgtaaagcctgcaaaactataagccagtcacacctcttttctttgtaaattactcagcatcaggtatttctttatag

SEQ ID NO: 508823 - DNA, 649 bp, Homo sapiens
aatttaggattgaaacaccttggtgtctccccttcagttacatttcctcctctcacctcctcatacccccaagaatcaattcaactcctagctgaaaaggccatcagatggacgtccaggcagacattttttgggcagcttccctgcaactgaattttatactaccatcacaaggattttgcagtggatttgacatgatttttcattattccctaaatgtcccactgatattgcaactggaacaataagcccaatagatatattccagcgttcccaagaatgacctaagttgtatgtcattctgaaaagtttctctaaattaagrttctcaatcttaggacttctttgtctacacctttctgttccataaagcattaatataaaagaaagtgaaaatgctaagtattttattttcttactatattttcctgctaaatggcttcagggtagaaattgcaaattgcagagctcccagataggaaatgccagtcgccccatctgttaatacaacaagcataaagtccttgtgctaggctttgaggatgctgttgctttgcagcgtaaggacaactagtccatctggccttaacagtcgtgttgctagagcctcaatttgaacagatggattcttggattaataaattgaaaa

SEQ ID NO: 508824 - DNA, 444 bp, Homo sapiens
atgctgtatataggaatgcttttctgtgggaactcataacaagatcactcagtttatattaagkatgtatcagtcagggttctctaaaggaacagaactattaggataggtgaatacctgaaggggagattattaggagaactgactcacacgatcacaaggtgaagtcccaccataggacatctgcaagctgaggagccaggaagccagtccgagtcccaaaacctcaaaagtagggaaattgacagtgtagccttcagtctgtggctgaaggcccaacagaccctggcaaatcactggtgtaaggttaagagcccaaaagctgaagaatttggagtctgatgttcgaggacaggaagcatccatcacgggagaaagatggaggccggaagactcaggcagtctagtccttccacgttcctttgcctgcttttgtcctagcct

SEQ ID NO: 508825 - DNA, 610 bp, Homo sapiens
ttgtgaaaggtaattgcttcttctgacaacttctcctagtctgagttcctgaggtctgagttgctctgggcagaagcctgggtcacagaagacatggcttcctacatttcctctaagatggaaatcctgtatccaaagaaagcaaacctaaggtaaaatgtgcatagactcgttcatcaaatgtttgaaattaaactgtcaaagtgaagaaactgaaaaggaaaaaaaaatatcttgagagaatctggcaatacaaaagtcaacacccaattcaacaagccaagaccagaaacagacagaagcacagcatgaagacacatgtatcctctgtgggagcctgggatttgaagccaggaataaatgtgcaaatctgaattctgtctcttcttagatctgtttccctgaaaaggatactgtactctgtaaccctcacttccacccctgtaattcaattttctagcatcaagtgagtacttaatcttgaaatcactcttcaaagtattttacatgtgttttcttatttaaagtttataacmaatctacttaatcattattactttatctcaaatttgcatataagacatttgaaaacagagataccaagtttatt

SEQ ID NO: 508826 - DNA, 598 bp, Homo sapiens
agccaccttgaaattgtccatgggacagtacagagaaaaaggaaatagaaaactattagatactgaattaatatgaataaattacatagaattaattcattaaaattattgattaaaaattatatgcttaacatattgacagttttgaatagaggtctttggttgtcagtctccaaaatgcccccatgtgcctggattcctggtacccaggtctttgtgcagttctccctgggtagagaagacygacctgcatgaccgacagtatgtggaggaaattgcaactgtgacttctgatgctaagacccaaaagaccttgtggcttccactttcctgtctcttgaattgcttgctctggcagaaccagctaccatgtcataaatatgctaatgcatccctatggtctggtccttttggcaagagactgggatctcctgtaaatgaccagcacccatttccgggcatgttcatgtatcgcctagaaagtggcttccctgctcagagaagcccacggttgactgtatccctggcaaccacttgagaccttaagatcaaaccacccagcaaacttattaccagattttgaaccagagatgtcagg

SEQ ID NO: 508827 - DNA, 598 bp, Homo sapiens
agccaccttgaaattgtccatgggacagtacagagaaaaaggaaatagaaaactattagatactgaattaatatgaataaattacatagaattaattcattaaaattattgattaaaaattatatgcttaacatattgacagttttgaatagaggtctttggttgtcagtctccaaaatgcccccatgtgcctggattcctggtacccaggtctttgtgcagttctccctgggtagagaagaccgacctgcatgaccgacagtatgtggaggaaattgcaactgtgacttctgatgctaagacccaaaagaccttgtggcttccactttcctgtctcttgaattgcttgctctggcagaaccagctaccaygtcataaatatgctaatgcatccctatggtctggtccttttggcaagagactgggatctcctgtaaatgaccagcacccatttccgggcatgttcatgtatcgcctagaaagtggcttccctgctcagagaagcccacggttgactgtatccctggcaaccacttgagaccttaagatcaaaccacccagcaaacttattaccagattttgaaccagagatgtcagg

SEQ ID NO: 508828 - DNA, 650 bp, Homo sapiens
agctgcaaatattatgcaaatttatcttggcacagaaatggagaaagcgagtttaagtgcggagataatgccggaaaattgaatgttcatctgggcatgggaaacggcccagtaggctccattggtctgtttcatctagggaagcaccgtttttatgctcctatcagatcatccgcacttcactggttggggctgagaaattaatattacttataattgatacttgaaattcttggagcgatgtgtcatacagagacggaagasaggaatcggggaaaagggagagggaaggggagaaaagaagagagcggaagaagagggaagtcacacattattgaatatagaattgcaatctgaagtctgaagtccactgtgctgaggccagaacgaactggaagacaaaggaaaaaatatcccagaaaatctgggatattttctgggtctccctctaccaccacctaaaacctgaaatatctttctgatcaagattcaagctttaaaaaaaaaataaatcgataattatttggctgcctacttagcttgagagtgtaggacagggtcaggagttgagatttgaactcaactcatgagttacttaaatgagaaacctaggttaccccaggggaggaaaactgcgtggctgacgggtg

SEQ ID NO: 508829 - DNA, 628 bp, Homo sapiens
gtgaccagcagtgggtgttcgtgtctgtgtgtggctgtgagtgggtccgtgcctgggctgggactctaggcatgcacctcactcaaaaacttttcaatgaaaagattccctcccagaaagtcctaaaacctcggagcaaagccacccctgtcccctcaggcatgttaggttagggcgggttctgagcaactgggctccgttgctccttagtgtgtaagctatagacagttgtccctgtatacagaatgtcatttactctctcttctcttctcgccctctgtcacccccaagtatatttacatgcacagaaaccggagccatgaatcagtgagccagagtggtagcttttaaaattcaggaagcgaattggggcttcattaaagcagtatctttgccgtgtgcctggccygatgtccactcctcagagataaatcttcagccctactgcccaggaagtccgaccaagctactgacgggaggatttttctcactttgcttccttctcagaataaattatctccttcctcccccacttcctccccatcctcaaacctgccccaactctcctggaatacctcggcctgatcagcaggatttccacccctaagcccatcaagacagcaagaaa

SEQ ID NO: 508830 - DNA, 588 bp, Homo sapiens
ccccgtaaagccttaagtccctggcccaagaagccgcagggcttagaaaatgcggagcggctgcaatccacgggcccatcctccactctgcacaagagatctctgccagccccagcactggggctattctgtccccaccaaaagcaaggagatctggcaagctgcatttttctttatttgacatttrcaccctgccttcttgcagaagataaacgaggtggggacagtcaggggcgcaaagaagggatgggagtgggaagccctgagcattgtttggtaggggttttctgttgggttgtccagttgccctgggtcacacacagtgcctggggaaccggcaggtaggtgggagccaggtggctgaaaacccctcttctggaggttaaagcagtttgcgtcctggaaccataggaggtggcagggaattacggatcctgataaggagtgtggggcatatcccaaaaccacctctgtcctctagcattcggctatttttaactatttctaggctgcactgaagtgatgtctcattcttggtgcctaagccattttacacataaatgtgcattcttctcctggtatatcttt

SEQ ID NO: 508831 - DNA, 554 bp, Homo sapiens
actgcccggctgccttttcttcccgtttaggtcttgctccccgctctccgcatttcagctcgcaagggaaagaaaacgggggcccgagtggcagagacagagataatatgtatttaacctgcgcggtcccgggcgccctgccgcagcgggctccccgcggtgtggcccgcgcagccggggccagcggcggcgcctggagccgtgtccccggcataaccctcccgcccggcagccggcgagctgtttatacagctttacctgtgctatagtcctatccagtagaaaccctygcgcggccagggtaacctaatccaggggccgaggcggaggagggggcggtgaggctggctgggttggagacggaggtgtgcgcgctccaatacccgggatctctcctttgcccctcctcccaccatagggaaggaaatacggacatggttcgggtgacagaaatggggacccggggctaaggaggaaggaggccagttttcacggcccggtcctccggcttctctcctttgaacaggcgctggggacctccgcggcggccacag

SEQ ID NO: 508832 - DNA, 554 bp, Homo sapiens
actgcccggctgccttttcttcccgtttaggtcttgctccccgctctccgcatttcagctcgcaagggaaagaaaacgggggcccgagtggcagagacagagataatatgtatttaacctgcgcggtcccgggcgccctgccgcagcgggctccccgcggtgtggcccgcgcagccggggccagcggcggcgcctggagccgtgtccccggcataaccctcccgcccggcagccggcgagctgtttatacagctttacctgtgctatagtcctatccagtagaaaccctcgcgcggccagggtaacctaatccaggggccgaggcggaggagggggcggtgaggctggctgggttggagacggaggtgtgcgcgctccaatacccgggatctctcctttgcccctcctcccaccatagggaaggaaatayggacatggttcgggtgacagaaatggggacccggggctaaggaggaaggaggccagttttcacggcccggtcctccggcttctctcctttgaacaggcgctggggacctccgcggcggccacag

SEQ ID NO: 508833 - DNA, 605 bp, Homo sapiens
acgcgcgccgcgaaaggcgcggcggtcccgcgggcgcccggcgtgggctagagaggccggccctggcctggctcaggtcgccctcgccccgctttcatcttgccccagtcgccctttacaattcccacaccgaaggcaaagcaagcaaggaaagaagccggcgcctccccaagcggaccctcccttccgcgcagcctcggccactcttccagagcgccccggtgcgtamtgcggcgggcgcagggaatcgaattaaacgcctctgggcggttattgtctttctctaattgctccaacaatggcctctattaaaatggagacacccaattaaaggccccgccgggccgctctcggctgccggcaaagctctggcccccggcctgcgacgtgcagaccgcggggccgcggacccggctggtgcggggtactggcgccggcctcgacacctttggcctccacttcctccccagactcacagcgacagcggccgcttcacaccgtttttattgaccgatcgcagcccagcaagattgatcgagctggaatgggaagggacttctcctcccccaggcccagctcgccagggcctcgggccgtgctgcagt

SEQ ID NO: 508834 - DNA, 670 bp, Homo sapiens
ggtgggatagcctgcgggggaacccactccctctcctggcagcattgccctgggggcgagcagagagtggatttggagtcttcttttcccgcctgacccctgctcgcccgagcagcattttcgggccagcggctgcagccacccgggcgccgctaggggatgcagtggctcaaaggaccgagcgggcggtgcaggttggaacccgcggggcggaccaatcgcggctcggccacagcctcgcccgctgattggtccctccaggccccgcccccgctcgccccgcccctctcgctggggcgcctcggagccgcgtgccctccgccccggggtgcccattgcgcagagcgtggcctggagacccgcgagccggggaaggtcgccgtggagtcccgaccagaggccggggttggggtcggtgcagaccgagggctggtttccttgactgtgggagaaacgccgggagccggagtaagtagggctccgggcggggcgaaaggaaaakttgggtccctagagtgaagaccgagttctttctgtccgtctacactgagcgtactcggggaatgagttagagccagtctcttcctcccctccccccttctcatccctcactgttgccactcaagtcaaaagcacacattgattacaaatattaggtctggaaagggca

SEQ ID NO: 508835 - DNA, 658 bp, Homo sapiens
ccagctacttgggaggctgaggtgggaggatcacttgaaccctggaggtgggkgttgtagtaagccgagaacacaccactgcactccagcctgggtgacagagtgagtctctgcctcagaaaaaataaatgctgcttgccttctgcccactcctctggtttttgaacaccactttttcctcctctctgtccctcaccaagcctctcctgtctcactctatagctgtacatgcctggagaacgcaaattcacttcaatattaacataatttggaaggcaaacccagcaccaaagcatatgtactttataagcatgaacaacttttgaattttcttctgtttgaaattttctccatcaacgttcctctctacttatacaggtaaataatggttgatgtggataagtgtgtgcatacacatgtgtgtgcatgaagacaaattgcattgtttaagacggctgtactgggaaagtaacatttaatactagagtaaacatttaaacctatttactaaaactagatgtgaaaacatatcttccaacggaggttactctcttttcccaaccattctacccaaaaagatgtcccagagatattgtcaaaaacatgatcagatgaatcaataattgtccacatgaatggttgaatatattctgtagca

SEQ ID NO: 508836 - DNA, 658 bp, Homo sapiens
ccagctacttgggaggctgaggtgggaggatcacttgaaccctggaggtgggtgttgtagtaagccgagaacacaccactgcactccagcctgggtgacagagtgagtctctgcctcagaaaaaataaatgctgcttgccttctgcccactcctctggtttttgaacaccactttttcctcctctctgtccctcaccaagcctctcctgtctcactctatagctgtacatgcctggagaacgcaaattcacttcaatattaacataatttggaaggcaaacccagcaccaaagcatatgtactttataagcatgaacaacttttgaattttcttctgtttgaaattttctccatcaacgttcctctctacttatacaggtaaataatggttgatgtggataagtgtgtgcatacacatgtgtgtgcatgaagacaaattgcattgtttaagacggctgtactgggaaagtaacatttaatactagagtaaacatttaaacctatttastaaaactagatgtgaaaacatatcttccaacggaggttactctcttttcccaaccattctacccaaaaagatgtcccagagatattgtcaaaaacatgatcagatgaatcaataattgtccacatgaatggttgaatatattctgtagca

SEQ ID NO: 508837 - DNA, 505 bp, Homo sapiens
ctggtttttgaacaccactttttcctcctctctgtccctcaccaagcctctcctgtctcactctatagctgtacatgcctggagaacgcaaattcacttcaatattaacataatttggaaggcaaacccagcaccaaagcatatgtactttataagcatgaacaacttttgaattttcttctgtttgaaattttctccatcaacgttcctctctacttatacaggtaaataatggttgatgtggataagtgtgtgcatacacatgtgtgtgcatgaagacaaattgcattgtttaagacggctgtactgggaaagtaacatttaatactagagtaaacatttaaacctatttactaaaactagatgtgaaaacatatcttccaacggaggttactctcttttcccaaccrttctacccaaaaagatgtcccagagatattgtcaaaaacatgatcagatgaatcaataattgtccacatgaatggttgaatatattctgtagcag

SEQ ID NO: 508838 - DNA, 640 bp, Homo sapiens
tgtatacagcagccaaaagcaggcattttcatatgtttattacaaggaagtatagcyagttgaattccctctgacttatgcagccatgaatcctccactgtaggatttcctcaaccttccagctccatagaatcatgcaatgctggccgggtgtggtggctcatgcctgtaatcccagcactttgggaggccaaggtgggtggatcacgaggtcaggagttcaagaccagcctggccagcatggtgaaaccctatatctattaaaaatacaaaaattagctgggcatggtggtgcacacctgtaatcccagctattcgggaggctgaggcaggagaattgcttgacctgggaggtgggaggtttgcagtgagccaagatcgtgccactgcactccagcctgggtgacagagcgagattccatctcaaaaaacaaacaaaacaaaagaaacaaacaaacaaacaaaaaaataaagaatcctgcaatgctaaaatccacgaattctactcattccaactacattcttgccatacaatttaagtctatgctacaaagagtaagcatgatataaggcaactaaactggtcagttgcaaaacttccttttgtctgtcctgtgggttttctgtcaactgagttatt

SEQ ID NO: 508839 - DNA, 640 bp, Homo sapiens
tgtatacagcagccaaaagcaggcattttcatatgtttattacaaggaagtatagccagttgaattccctctgacttatgcagccatgaatcctccactgtaggatttcctcaaccttccagctccatagaatcatgcaatgctggccgggtgtggtggctcatgcctgtaatcccagcactttgggaggccaaggtgggtggatcacgaggtcaggagttcaagaccagcctggccagcatggtgaaaccctatatctattaaaaatacaaaaattagctgggcatggtggtgcacacctgtaatcccagctattcgggaggctgaggcaggagaattgcttgacctgggaggtgggaggtttgcagtgagccaagatcgtgccactgcactccagcctgggtgacagagcgagattccatctcaaaaaacaaacaaaacaaaagaaacaaacaaacaaacaaaaaaataaagaatcctgcaatgctaraatccacgaattctactcattccaactacattcttgccatacaatttaagtctatgctacaaagagtaagcatgatataaggcaactaaactggtcagttgcaaaacttccttttgtctgtcctgtgggttttctgtcaactgagttatt

SEQ ID NO: 508840 - DNA, 623 bp, Homo sapiens
atacagcagccaaaagcaggcattttcatatgtttattacaaggaagtatagccagttgaattccctctgacttatgcagccatgaatcctccactgtaggatttcctcaaccttccagctccatagaatcatgcaatgctggccgggtgtggtggctcatgcctgtaatcccagcactttgggaggccaaggtgggtggatcacgaggtcaggagttcaagaccagcctggccagcatggtgaaaccctatatctattaaaaatacaaaaattagctgggcatggtggtgcacacctgtaatcccagctattcgggaggctgaggcaggagaattgcttgacctgggaggtgggaggtttgcagtgagccaagatcgtgccactgcactccagcctgggtgacagagcgagattccatctcaaaaaacaaacaaaacaaaagaaacaaacaaacaaacaaaaaaataaagaatcctgcaatgctaaaatccaygaattctactcattccaactacattcttgccatacaatttaagtctatgctacaaagagtaagcatgatataaggcaactaaactggtcagttgcaaaacttccttttgtctgtcctgtgggttttctg

SEQ ID NO: 508841 - DNA, 541 bp, Homo sapiens
cttcatttgcacccccacagaacattttctaaatttaaaaaatagcactatttgaaaactgagaaatggcgcccgatattcaggatacacagcaatgcctggaacagttacgatgagtaattgtttaaatttaacaaacactgatatagtacttatattcaaggttctgttgtaagtgttttacaaagatcaactcatttaatcttcatggaaactcatgaaataagtactattagtattcccacctaatagaggaagaaaacttagttgtagagagtttcagtaacttgcttaaggtttcacacaggccaggacttgaagctagacagygcagctcttgaatccatggccttgccaacttcagcactctgctatgcccctgaaataaatgacagtcatcagggcacacgcatcagtagaatttcagactaatgaaaatgcttcaaaggagttagtaggatatcagccttctaaggtttattcttcattaaaccatatagccacagaatgtggtaaccagaagtttcctttgaaccacaat

SEQ ID NO: 508842 - DNA, 524 bp, Homo sapiens
tgtgtaacgaagcatatactcccttgctaatccatcccacacgctaatcagaagaatctaccaaaaatgcaaatctgattattccattctcttcttacacttacatggcccttgggataagatgggagcacagacttccgttcgtatacccacctagcaccacttcagccccatttattatcacttctcacccttctcatctaccttccatctattctcaactttcattcggcacatacttttttttttttggccttcaggtctattattctgttacttcctcccattctgctttgcttaactctctcccactcaccctccatgtcctgaatttgacttcagaatacctttcattattctgtaattttaatgggtcagattctcctattatggttctataaccttgtatttccctcaacattgtattggtcatatgttatgatattgctgatctaatyatttgtgaatacagaatacatgtatctctagcttatcattacagctatagtaacattgtgcctggc

SEQ ID NO: 508843 - DNA, 506 bp, Homo sapiens
acgaaaataattactgttgtaagttgaatgcctgttattcatttatgtatgtatatatgcatatgtgtgtgtacatgtacacacaccccccaacacatcttttcttttaggaggccacaagatgcaacaatttgttatgtacaaaagggagagaagtaatgttctggattgattcagacaactggactgataaatcagttctctgagtatttgtgggtttaccatccatcaaatggaacatgtgttttaccaaggccacttaccacttcatgctaattagatttaattggtgtgtcattgtcaatacaattggctagtgcgatgttctacaaaatgtcaagatggtgaaggtcattgaggatggtatyacagagaatggaatcaccatgggaattgagaaaaacatatttaccaaattggaagctggataccaagtgtttattgtgctaaaagaaaaactgttgataaattaaatgtaacagagtttaactgagcaaaatacagct

SEQ ID NO: 508844 - DNA, 466 bp, Homo sapiens
tgaatggcttaactggaagtaaattattattattattattattattattattattattatttgagatggagtctcgctgtatcgcccaggctgcagtgcagtggcgcgatctccgctcastgcaagctccgcctcccgggttcatgccactctcctgcctcagcctcccgagtagctgggactacaggagcccgccacgacgcccggctaattttttatatttttagtagtgacggggtttcaccgtgttagccaggatggtctcgatctcctgacctcgtgatccgcccgcctcagcctcccaaagtgctgggattacaggtgtgacccactgtgcccggcctgtgaattatttttctaaaagaaatggacaccaaatttatctgaaaacaaaataatcattctgttccattaacatgtatgtctattacagtgttactaccaccaagtcctaattatgcaactt

SEQ ID NO: 508845 - DNA, 466 bp, Homo sapiens
tgaatggcttaactggaagtaaattattattattattattattattattattattattatttgagatggagtctcgctgtatcgcccaggctgcagtgcagtggcgcgatctccgctcagtgcaagctccgcctcccgggttcaygccactctcctgcctcagcctcccgagtagctgggactacaggagcccgccacgacgcccggctaattttttatatttttagtagtgacggggtttcaccgtgttagccaggatggtctcgatctcctgacctcgtgatccgcccgcctcagcctcccaaagtgctgggattacaggtgtgacccactgtgcccggcctgtgaattatttttctaaaagaaatggacaccaaatttatctgaaaacaaaataatcattctgttccattaacatgtatgtctattacagtgttactaccaccaagtcctaattatgcaactt

SEQ ID NO: 508846 - DNA, 466 bp, Homo sapiens
tgaatggcttaactggaagtaaattattattattattattattattattattattattatttgagatggagtctcgctgtatcgcccaggctgcagtgcagtggcgcgatctccgctcagtgcaagctccgcctcccgggttcatgccactctcctgcctcagcctcccgagtagctgggactacaggagcccgccacgaygcccggctaattttttatatttttagtagtgacggggtttcaccgtgttagccaggatggtctcgatctcctgacctcgtgatccgcccgcctcagcctcccaaagtgctgggattacaggtgtgacccactgtgcccggcctgtgaattatttttctaaaagaaatggacaccaaatttatctgaaaacaaaataatcattctgttccattaacatgtatgtctattacagtgttactaccaccaagtcctaattatgcaactt

SEQ ID NO: 508847 - DNA, 466 bp, Homo sapiens
tgaatggcttaactggaagtaaattattattattattattattattattattattattatttgagatggagtctcgctgtatcgcccaggctgcagtgcagtggcgcgatctccgctcagtgcaagctccgcctcccgggttcatgccactctcctgcctcagcctcccgagtagctgggactacaggagcccgccacgacgcccggctaattttttatatttttagtagwgacggggtttcaccgtgttagccaggatggtctcgatctcctgacctcgtgatccgcccgcctcagcctcccaaagtgctgggattacaggtgtgacccactgtgcccggcctgtgaattatttttctaaaagaaatggacaccaaatttatctgaaaacaaaataatcattctgttccattaacatgtatgtctattacagtgttactaccaccaagtcctaattatgcaactt

SEQ ID NO: 508848 - DNA, 572 bp, Homo sapiens
ctctttggatggatgcaaagtttctgcatcatggtaaggactggaaaggcaatatgcttgcttccagtttcacccycaagatatagcagctggaatctcacactcatctttacaacaacaacaaaaatgctgaacaaacaaccaaggaatgatttccttaacccatcagagaactgagaactcaggccaagccactaaactaaaatgtacagagacacaggctaccagggggagaaacaggaccctcacatttatttaccaggggcagacaataacagataccataagagtcattagggtactactgtaggcatgtgagatgcctgggggctgcggacacacggtagttgctaccctctgttaggtcccccctcaacacccaacaaggaagcccaccaagtactcatggggatgactggggaggttcctgggaaagctttcctcatcctcataatactgacgaaggaatgagagggctgcaactgataaaattctacctacaaatatctcgtctatctcccctatgatacaaaagccagtctgcaagggaaacagcaagaaaaattgtagct

SEQ ID NO: 508849 - DNA, 442 bp, Homo sapiens
tgacagcccaactacaaccccatgggagaccctgagctagagggttccagccaagccacatgtggatcctgacccagaggaagtatgtaagataataaatggttgttttaagctgctgaattttggggtaatttgttacaccaagatagataactatactatgtatttgcatgtattatctcctatattatggtttagtctctttaaaatgatgactcaaatatatgatgttgcctctagtacagtggctgaaatctgatagatcttccagaaatgttaattgcatccatgaataactgaatgaatttgtgatcaacttcagggctgattttattcatcaaacacttattcagaacctaattgaagtcaggcattgacctaggtgctggggacctgtctgagttggggaccgstgggagcccattctgggacgaggctctga

SEQ ID NO: 508850 - DNA, 322 bp, Homo sapiens
ttcgagaacactgatttcaagaacaatgcaacgtataaggcttaagggatttaaaaaatcagaccacagtgtaatacrtgtatatttatatacatattttttttcctcccaacaggtcagcatgtgattccttgagacataatcccaggaaagacccatgatgacaagatggaaaactggctgatcagcctggctcctttagggagaataaatgccaggtgaacagaggcaggtgggtttcctgagcttaggacctggatccgggcaacaccactgatttttgtttcccctgtgaaatccagatccaatttgcccaatgcca

SEQ ID NO: 508851 - DNA, 481 bp, Homo sapiens
cctgcaaagtcttctaatcacytgtacccatgctccattcaggcagaataacaagaccagaccttcagctagctcatagggtttgcaaatgatttttgctgatttatttgatgactaaagtacccacacatccttactcttcccctgcttgaattctggggctattctgggaaagggtctaggagtggatcccaaatttgtgggtatgcaagttacaatcatctgctgatcttcagaaactccccaaaccctggccacatccagacaagttaaaccacaatctctggggaatggaactccaacatgggcattttttaagcccttcagatgattgcaatgggaagaaaagtttgagaacaatgggcttatcctgttattcctgaaaagcagtgatttcatatatgaatcacgtaagggaggtttttaaaaagcactgaatcccaggcccagaacaatggggttagaatctctaggaggctgg

SEQ ID NO: 508852 - DNA, 554 bp, Homo sapiens
ctgcctgcaaagtcttctaatcacttgtacccatgctccattcaggcagaataacaagaccagaccttcagctagctcatagggtttgcaaatgatttttgctgatttatttgatgactaaagtacccacacatccttactcttcccctgcttgaattctggggctattctgggaragggtctaggagtggatcccaaatttgtgggtatgcaagttacaatcatctgctgatcttcagaaactccccaaaccctggccacatccagacaagttaaaccacaatctctggggaatggaactccaacatgggcattttttaagcccttcagatgattgcaatgggaagaaaagtttgagaacaatgggcttatcctgttattcctgaaaagcagtgatttcatatatgaatcacgtaagggaggtttttaaaaagcactgaatcccaggcccagaacaatggggttagaatctctaggaggctgggcatgggtgattaacaaaagctcctcatgctgatcggtgaaatttctggaaggtcaaggcaggagctcct

SEQ ID NO: 508853 - DNA, 554 bp, Homo sapiens
ctgcctgcaaagtcttctaatcacttgtacccatgctccattcaggcagaataacaagaccagaccttcagctagctcatagggtttgcaaatgatttttgctgatttatttgatgactaaagtacccacacatccttactcttcccctgcttgaattctggggctattctgggaaagggtctaggagtggatcccaaatttgtgggtatgcaagttacaatcatctgctgatcttcagaaactccccaaaccctggccacatccagacaagttaaaccacaatctctggggaatggaactccaacatrggcattttttaagcccttcagatgattgcaatgggaagaaaagtttgagaacaatgggcttatcctgttattcctgaaaagcagtgatttcatatatgaatcacgtaagggaggtttttaaaaagcactgaatcccaggcccagaacaatggggttagaatctctaggaggctgggcatgggtgattaacaaaagctcctcatgctgatcggtgaaatttctggaaggtcaaggcaggagctcct

SEQ ID NO: 508854 - DNA, 423 bp, Homo sapiens
catatcactctggtgtttggttccttcttcatttctagcacctggaacttctcctactttctagtgaattcaacaacgtatttaaaagaatcttataatattttaagtattatttttagatgttttgcagaaagagkgttttcaaattacctagtctgacatattgcttttaacagtattgtcattaaatcctttcaacaatataaggcagagtatttttttatagatgaggaaactgaagttcagaaaagttaaagattcactattaatcaagttcatagtcgtaattacattattcatataaatatttaactgttcatctttttctctagattttcaactccataaaaaaataaatcaatgtttgttttcattattctcaagaactagcaaagtgcctaactcatattaggcagtcaataa

SEQ ID NO: 508855 - DNA, 488 bp, Homo sapiens
ttacatgaattgtatatttcctttgcacatttcttagcctggaacccagaaggctttgtgatcttgccaagtctccaagccggctttacaatgaattacttcatattgtaattgaggttacctttacttgacttaagtgtattaatttagaaaggaattttatgtcaatcactaccatgcacagtaagcycgattccacagcctgacaaaggctccaagcctatggcctgctatccctttgtacaagcctatggcctgctacattccttttgtatccctttgttcaaaaatccctttgtacagctctctctctgttcgagagctgttaaagacacatcgagtcattgccctggccatcgtcagaagccagaagaacagtaggaaagggagctctttcgcttgagagctggtgttggcgagtgtcactgcaggctgctgcctcaaatcatggcgcccggcttgctttagggaccaaggacaatgctgcc

SEQ ID NO: 508856 - DNA, 590 bp, Homo sapiens
cagctactagaagaaaggctaatggatgccgagccacctctgtggcccttgtcactcaaatactaacaagttgcagaagtaggtaccattacatgttgcatatgaggacagatgaggcacagggagggtaagggacctgcccagtggcacacagttgatcaattgataagaagactccaacccaactacaaggttctttgtaatgacctcaaaaagaatttttgctgttgtttctctgctttcctctgtttgtgattccctcacaccagcacagtgcaagacacacagtaggcctgaaaacactgctcatttgagtccatggatgcctctttctggtgtttgtgtgattgtttactcctcagggtttccaatgactacagagtacggccaacagcaaaacacaccaatttttactgcaaattagtttttgaataaatgatatataagtttatgcatcctaattaaccaaaaattatttattacagcaattaaaataaagttgtgtaaatgactgcaattttaagttcttgacaaagcaataaagtccattactrtttcttgccctgccgaggctcctggaaatcctgcca

SEQ ID NO: 508857 - DNA, 550 bp, Homo sapiens
tgtgtgactttgggcaagttgcttcacctctgtaggcctctgtttgcctgtctgtaataaacagatcccccatctctgggacttcaaaagaggagaggacggtcagcaggggtggcctgctcagaagggccatacttcatccccaatgtccctcaacaactccaagggcaatgccaccccagacctcactgccaggccttccagagtccaacaaactcgtgtcccatgaccacagctygttcccttgatctatgtgcacctggggatgctggtggctgggaggtgagttcatgaggcctcagatccgcccttgaagtcagtactgtcattcacccattcttcagacgaggacacagaggcctgggaagagtcagcaaggacagaagctgggttcacagcccctcaggccagctccagaggcctcaatcttcaccagcaatgtgcctctgggcttgagaagattggacaggaagaacacaggaagctccaagaaaaaagaactgaaactgcaccaagagtcaatgatctgctgcctcctcagacgtgcagc

SEQ ID NO: 508858 - DNA, 550 bp, Homo sapiens
tgtgtgactttgggcaagttgcttcacctctgtaggcctctgtttgcctgtctgtaataaacagatcccccatctctgggacttcaaaagaggagaggacggtcagcaggggtggcctgctcagaagggccatacttcatccccaatgtccctcaacaactccaagggcaatgccaccccagacctcactgccaggccttccagagtccaacaaactcgtgtcccatgaccacagcttrttcccttgatctatgtgcacctggggatgctggtggctgggaggtgagttcatgaggcctcagatccgcccttgaagtcagtactgtcattcacccattcttcagacgaggacacagaggcctgggaagagtcagcaaggacagaagctgggttcacagcccctcaggccagctccagaggcctcaatcttcaccagcaatgtgcctctgggcttgagaagattggacaggaagaacacaggaagctccaagaaaaaagaactgaaactgcaccaagagtcaatgatctgctgcctcctcagacgtgcagc

SEQ ID NO: 508859 - DNA, 616 bp, Homo sapiens
tgttggaggcgatgtctaagaagcgccagaagactgaatctgagagcaagctaatagtcctctgtgcatactggtggaagaaacctttacttagcacttacttttaagawcctggataataaaacaccgtgtctgacaactgtggtatctacggccaactttttaatctcacttcgccaggttactcactcttgaaatgtgtgttctttatacccaggagagtattttctattttccaaacttcaagaaagctgcttgaatagaaaagcagggatttttgagccaggccatcaataactttttaaaattaaagtagaagcagcagcagcagcaaggggaaaggggattagaacgtttcctaaggctacctctggatttgctcgtgcctcatgattacctgggggctgctgaagatgctcacacaatctttttccatattagttcttggtttccaatgacgcatatcaatgaggaatgtatgcatcctgccatgtgctctccatcaattaatttattcagtgtgaattgaagagcgtcatgttcattacaggcagccactctatccagggcgatgaaatgattttcctaagacctccatctccactatcaacactgg

SEQ ID NO: 508860 - DNA, 557 bp, Homo sapiens
taagttgtatctcctgagaacacagcccagtatactatcttcctgcaactccccatcttagagcttaatctaagactcagggaagtcaaagagaggattcttccatttgtgggaattccagttccgatgtgttgatttcaagtgaggaagcacaggaagcatttgcaaaactggaaagggccccagcaattgtcactgatgtttattattcccctcgatgcccaggggctctgatagcagcactggtaagatgtctcacttagtgatggtgttgtaattgttccacctatagacttattaggagcttggttacatttccctcttgttggttttgtgtttgcagtggatgactgcgggccggggcattctgcacgctgagatgccttgctcagaggagccagcccatggcctacaactgtgggttaatttgaggagctcagagaagatggtggagcytcagtaccaggaactgaaaagtgaagaaatccctaaacccagtaaggatggtgtgacagttgctgtcatttctggagaagccctgggaataaaggtaagcc

SEQ ID NO: 508861 - DNA, 542 bp, Homo sapiens
tgaaattccccttttaagacattctataactgtattttaatggatagatagggggagaaagtaaaggaaatatccgcatgaatcagagagcttcctggtctctttttgacaccgggcaagggaggaagcagagcattttagggagaaagaattctgcaaaatactgtagaaaaaaaggagttgaggatttccccatcttyatctccttgcttctatgcaccaaggtccaacccaggtcccctctctttggtgcagccttctcagctgtcctggccgacaagcatctcaacttctgcccagattcacacagccattctgtcttcataactcatgagatttttgggcggacggcatttaatttacatgtcccatttccccttaattcctattaggcacctgctgtgtgtacatcatgcagttccctggagatacaatgtgaataagatacaaccactgtcctcaaaaatgctcacagtctagcttgggagagaaaccggcaaacagcagaagtataatgtgacacaggaaatacgaaaacagca

SEQ ID NO: 508862 - DNA, 617 bp, Homo sapiens
gcagaaaactactgttttgattccattccaaagcttattcattatcatcaacacaattcagcaggtaacttattttagtttttcttttatgggcccttgttgtaaaacagcaattttcctggatactactgatcctcctaatattcttaattatatagggaaccaygaaagtaggaaaaaatcctctcaagtcttttgcctatcataatttttagcttacattcccaggaatataacatgattctctccttaatgccagaaagaatgaaattgagtaaactgggtgacttagaaagagaaattctctttataaaaatattcgtagggtttttctgtgtatagaagcaagaggattataaatttaaaatattatagaaatatatacatatcgttggatcatggaccagttgtctattatgacagggttttttgcatgctgccactagcacttactaatcattacatatataaatagaaattatatattatgtatatacattacatttttacagagatgagatcattctacacatattgctcagcttgctttctttactcaacatgtcttagaagtctttccacgcaaacacaaagagcttactttggtctatttaaca

SEQ ID NO: 508863 - DNA, 617 bp, Homo sapiens
gcagaaaactactgttttgattccattccaaagcttattcattatcatcaacacaattcagcaggtaacttattttagtttttcttttatgggcccttgttgtaaaacagcaattttcctggatactactgatcctcctaatattcttaattatatagggaaccatgaaagtaggaaaaaatcctctcaagtcttttgcctatcataatttttagcttacattcccaggaatataacatgattctctccttaatgccagaaagaatgaaattgagtaaactgggtgacttagaaagagaaattytctttataaaaatattcgtagggtttttctgtgtatagaagcaagaggattataaatttaaaatattatagaaatatatacatatcgttggatcatggaccagttgtctattatgacagggttttttgcatgctgccactagcacttactaatcattacatatataaatagaaattatatattatgtatatacattacatttttacagagatgagatcattctacacatattgctcagcttgctttctttactcaacatgtcttagaagtctttccacgcaaacacaaagagcttactttggtctatttaaca

SEQ ID NO: 508864 - DNA, 514 bp, Homo sapiens
ccaaatgatttctgatcaaacaataccaactctatagraacagaaagtacaagcttttttgttttgtcctatttggcataaactgtttccttagttttattttattttcccatcctaattttctcttacactaatttcctcaactactgattttatcctagtagattatttacatttttgttactcactgccagtaattcttttttggaataagaaggaatataaacactcattctcattttatagatgtcaaagaaattaaataatttacatttttgttacagggaatatggcagactagatttctggagaaaattttatgataaagcacatttcaaaattatgaataagcaagaacatcatcaactaatgacttaaaatttatgacagaattgtcaaggaaaataaggaaaatcttaaatgctaaagccaaaagagaaaaaatacaaagacataaaataataaataagagttttaaaacatggagaagaaaattaaaactcttaatatatgc

SEQ ID NO: 508865 - DNA, 514 bp, Homo sapiens
ccaaatgatttctgatcaaacaataccaactctatagaaacagaaagtacaagcttttttgttttgtcctatttggcataaactgtttccttagttttattttattttcccatcctaattttctcttacactaatttcctcaactactgattttatcctagtagattatttacatttttgttastcactgccagtaattcttttttggaataagaaggaatataaacactcattctcattttatagatgtcaaagaaattaaataatttacatttttgttacagggaatatggcagactagatttctggagaaaattttatgataaagcacatttcaaaattatgaataagcaagaacatcatcaactaatgacttaaaatttatgacagaattgtcaaggaaaataaggaaaatcttaaatgctaaagccaaaagagaaaaaatacaaagacataaaataataaataagagttttaaaacatggagaagaaaattaaaactcttaatatatgc

SEQ ID NO: 508866 - DNA, 632 bp, Homo sapiens
gtctacaagcctggaagagcagcctcaccagaaattgagtatgctgtaccctgatttcagacttctagcccccaaaactgtgagaaaataaatttctgttgtttaagccactcaatttgtggtattttgttatagcaggccaagccaactaatacaacctgataaatggtatctataaaatgaagcaaatatcataataataaaatgttaaaaaccattccctttaaactcatagcaaggtaaggatgccaactagcwctatgtttattcaacactgcacatatggatctacctatcccaagaagacaaataaagacaattaaatgtctaagaattataaaggaaaaatactaaatcatcagttttctcagatattacaatttgcagaaaaaaacaatttataatactttttatatttacaatatgtatcttctgtttttgaaatgaatagaaattcattaaacaatattatatttttaacttcagcccaaatattctattttaatgatttgggggcctcaaaaatatacttaggcaatattctcatcaccccttaatagtttcatgctccctgtgcatgcttggccatgtacaatgatgatgttcaactgtgtcaccaaacacatcaagat

SEQ ID NO: 508867 - DNA, 584 bp, Homo sapiens
tggttatcctgactcaaatggtttttcatcagttattagaaaagtcacaagttcttggtaaattcatttctgaaatcggaaagcttaagtttccattttttctcagatatactctatttgaatatattatcccatatttcaagagcatatttttagccacaacttagccaatggcaacatcagcaaaaagagataatgtatttgtacttttatacacagtgtaataacttctgatttctaattgtaggcaaatctgaatttgaatacttttcatattttgagttctaagaccgttagacaaaagcaagttgactgaaggatatcaccagtctgtttcattttgtaatgtacataatgatgttatatttttcctttttaatatttatgtagaaataatgtatttactaatatcatrgacttgattttcaaacttttattaggttattatttagtaagatatgaaagtgtctttttgaaaatgcagttaaagggaaagaactatgtacttatttttcctttgtgaattatatttcaagataacaaaagaaaagttgatacaactcttccttattgaataattctag

SEQ ID NO: 508868 - DNA, 498 bp, Homo sapiens
ccattttattaagttgatagcattgtttgcactgtcacttaatagaacaaaaacactcaaacttagatcattgaagcaagattccatttatctacaatccaagaaaataggtagctaaatgtactaaacattttattttttatttattaactttttcttgacagggtcttactctgtctgtcaccaaggctggagtggcttactgcagcctcgacctcctgggctcaggtgatcctcccacctcagcctcctgagtagctaggaatacaggcacccrtcaccacacccagctaatttttgtattttttgtagagacaggtatttgccatgttgcccaggctggtctcaaactccaggactcaagtgatcaacctgtcttggcctcccaaaatgctaggattacaggcatgagccaccatgtccagcctaaactttttaaaaggttgatttagcaatccccacaatatccaagctgaaactaactcaattctaaaaata

SEQ ID NO: 508869 - DNA, 498 bp, Homo sapiens
ccattttattaagttgatagcattgtttgcactgtcacttaatagaacaaaaacactcaaacttagatcattgaagcaagattccatttatctacaatccaagaaaataggtagctaaatgtactaaacattttattttttatttattaactttttcttgacagggtcttactctgtctgtcaccaaggctggagtggcttactgcagcctcgacctcctgggctcaggtgatcctcccacctcagcctcctgagtagctaggaatacaggcacccatcaccacacccagctaatttttgtattttttgtagagacaggtatttgccatgttgcccaggctggtctcaaactccaggactcaagtgatcaacctgtcttggcctcccaaaatgctaggattacaggcatgagccaccatgtccagcctaaactttttaaaaggttgatttagcartccccacaatatccaagctgaaactaactcaattctaaaaata

SEQ ID NO: 508870 - DNA, 573 bp, Homo sapiens
tgctttaaacattctcaaaagatgaatggagcatatttatgcaatagcaacatgttaaattgtatgttacrtagtcttgaaaataaactcaacatttataattcaaatatagctaacaatcacaaaatgagtatgttacaacgactatgcagtatgctttttgatgaaactagcaactgacagccatatgtttactcaattgattactagggttttttttttattgagtaaatacaattgattgaattgtatatttttgaaggattgcttttgacattttaaagttcatcttgtccttaaaaagctcagtgtatacagacaaaatcattatctgatcatggagctgctaggagggaataaggttttcttaattcctttctgtctgcctttctttctctcattctgtctctatttatttttattgatttagacacaagtgcaggtttcttacatgtatataatgcatagtggtgaagtccacacttttaaagtacttatcacctatgaagtacaatgtgcactatttaggtattttttcaacccttacccacctcccaccttttacagtgcccc

SEQ ID NO: 508871 - DNA, 573 bp, Homo sapiens
tgctttaaacattctcaaaagatgaatggagcatatttatgcaatagcaacatgttaaattgtatgttacgtagtcttgaaaataaactcaacatttataattcaaatatagctaacaatcacaaaatgagtatgttacaacgactatgcagtatgctttttgatgaaactagcaactgacagccatatgtttactcaattgattactagggktttttttttattgagtaaatacaattgattgaattgtatatttttgaaggattgcttttgacattttaaagttcatcttgtccttaaaaagctcagtgtatacagacaaaatcattatctgatcatggagctgctaggagggaataaggttttcttaattcctttctgtctgcctttctttctctcattctgtctctatttatttttattgatttagacacaagtgcaggtttcttacatgtatataatgcatagtggtgaagtccacacttttaaagtacttatcacctatgaagtacaatgtgcactatttaggtattttttcaacccttacccacctcccaccttttacagtgcccc

SEQ ID NO: 508872 - DNA, 145 bp, Homo sapiens
atcatttctcctcctttagtccacacattcgatcaatcactaagtcttacaaactgtgcttcctttcaaatmtatttcatatatcaactttgagttccctaaatcaagcttttattgtgcctaggtccctgcaatagtcccatag

SEQ ID NO: 508873 - DNA, 634 bp, Homo sapiens
tccttctctctgtggtgttttctccccactgctggctgccctcctgaaggatccctgtgaggccaggcaggaatggcttgcctggggacccagcaggctcccagggcctttcccgctgcyttctctgcccttgtatttcactcaactctctaaagtgactcagctccaggtaaggttggagttttctcccgcaaactaaaccttcattttccccagttggggtgtgtgttcggtgcggggcagtggtggggaggaactccctttcccacttctgcagtttgagcactcatagtatttggggtgcctcctgggtcctgcaggagcagttcacttccttcagagggtctgtgggtcctcttgggattcctgactgattcctgcagtctttctgaagctaaaattcatgatgcgagcctccgcatgctgctctgtcccagggaagagaattttaagaggcagatagtagccagccatgtcacacgtgatagtccaagtgaaatttttatttccttatttctgcttcttaattttactttgtcatgtagcctctttttcttgtttcatgagagttgaaaaaaaatcttctctctcagattattaatgctctttttaagtaaaatcaacactcttcttc

SEQ ID NO: 508874 - DNA, 634 bp, Homo sapiens
tccttctctctgtggtgttttctccccactgctggctgccctcctgaaggatccctgtgaggccaggcaggaatggcttgcctggggacccagcaggctcccagggcctttcccgctgccttctctgcccttgtatttcactcaactctctaaagtgactcagctccaggtaaggttggagttttctccygcaaactaaaccttcattttccccagttggggtgtgtgttcggtgcggggcagtggtggggaggaactccctttcccacttctgcagtttgagcactcatagtatttggggtgcctcctgggtcctgcaggagcagttcacttccttcagagggtctgtgggtcctcttgggattcctgactgattcctgcagtctttctgaagctaaaattcatgatgcgagcctccgcatgctgctctgtcccagggaagagaattttaagaggcagatagtagccagccatgtcacacgtgatagtccaagtgaaatttttatttccttatttctgcttcttaattttactttgtcatgtagcctctttttcttgtttcatgagagttgaaaaaaaatcttctctctcagattattaatgctctttttaagtaaaatcaacactcttcttc

SEQ ID NO: 508875 - DNA, 625 bp, Homo sapiens
tgctcagtagcccaagaacatcagcggagagggtagatcattacattccgcaaggtttgaggtttcttcctgggcaggtgctttcctttctctgccacattatattgtcttcaagacgttggttcagttccatatttgtcaatgtctaccatgtacaaggcacccataagttcccgtgaaaatagaaaaatatttttgtggcttctagaatggctcagatgaatccagagggtctcccagtgggtatatggcttcatagcattaaatggtcttcaattatgagattgaaagtgttcagatgtctctaaagacttaacagctaatgagagacatagattttcaaagtggaaaaaaaaatcacaggaaaaataaaataagttcctgtgggctacttttgaacttctttgggttaaaamcaatgggaatatggtcattagatgctccaggtgtccttaaaaagcaagcaaacaaacacaatgaaacaacccagagatgatgagcacattcattcatttaatctaccctccaccactgagtgtctagcatgaacaaaggacaagttcacgtcctttgaactgcagacctgctggagaaacattaatgctgacagcaaaattcaggattt

SEQ ID NO: 508876 - DNA, 513 bp, Homo sapiens
caagaggggagcctggcctctcctcatccggtgtggcaacctgggtattcaatctgagatggggcctgttaacaggaacctctctctctttgctgagtttttttcctttccaccaaaaaaaccctgccctcctcaaattgtctgcaagcctaattttttgtgttcatgtgacaaggaccctgtctttagctgaactaaggaaaaattcctacaacagcgccatccccaaattcctgggtttggctggtgataagaggacatcagaaaggacatcagaaacataagtgatagcaatataactttctggaataaaacactttccagtacaataagtaggctttcccaagtctttgttataccacagtggcctataaggtttcttgttgttgccctcagctcctggaagaacagaatcattcktgtcagctttgcttgtaattctttctcattatgtcagttagaaagacaggtgctgttttagtcagttgctggatgtggctggatgtggctgag

SEQ ID NO: 508877 - DNA, 489 bp, Homo sapiens
tgccagtgacttgtctgactcctccattagacagagggctctrtgagggtaggaatgctttctgattcacactgggactcccacagcctggccagggcaatgtgcacagtaggtggttaatagatttttggcttttggtctcagattcccataatgtcagtgttgggagggaccttagcaggatcacagtatgttctcgccattgcttgcatcaggtccactctgcgctgaaaaaaaattcactctgttctctgcagaagccacctctagtgacagtcaattgtctgagcctcagatactataatgcttggggtgggaatacccctgattgttgtatcagtccagagatgagatttgcgaaggttctgtaaaactcaaagtttccctttccctcttcagactggcatttcgctaccttacggtgcagcctgcttttagtttaaggcagcagaaaaatgttagaatgctgttcttcagaaacaaactgca

SEQ ID NO: 508878 - DNA, 489 bp, Homo sapiens
tgccagtgacttgtctgactcctccattagacagagggctctgtgagggtaggaatgctttctgattcacactgggactcccacagcctggccagggcaatgtgcacagtaggtggttaatagatttttggcttttggtctcagattcccataatgtcagtgttgggagggaccttagcaggatcacagtatgttctcgccattgcttgcatcaggtccactctgcgctkaaaaaaaattcactctgttctctgcagaagccacctctagtgacagtcaattgtctgagcctcagatactataatgcttggggtgggaatacccctgattgttgtatcagtccagagatgagatttgcgaaggttctgtaaaactcaaagtttccctttccctcttcagactggcatttcgctaccttacggtgcagcctgcttttagtttaaggcagcagaaaaatgttagaatgctgttcttcagaaacaaactgca

SEQ ID NO: 508879 - DNA, 489 bp, Homo sapiens
tgccagtgacttgtctgactcctccattagacagagggctctgtgagggtaggaatgctttctgattcacactgggactcccacagcctggccagggcaatgtgcacagtaggtggttaatagatttttggcttttggtctcagattcccataatgtcagtgttgggagggaccttagcaggatcacagtatgttctcgccattgcttgcatcaggtccactctgcgctgaaaaaaaattcactctgttctctgcagaagccacctctagtgacagtcaattgtctgagcctcagatactataatgcttggggtgggaatacccctgattgttgtatcagtccagagatgaratttgcgaaggttctgtaaaactcaaagtttccctttccctcttcagactggcatttcgctaccttacggtgcagcctgcttttagtttaaggcagcagaaaaatgttagaatgctgttcttcagaaacaaactgca

SEQ ID NO: 508880 - DNA, 440 bp, Homo sapiens
ttgtagtgattgagagtgatttgtgctatgagggggaaaaaaaacaataacaacatcaaagcaaaggaaatcggtagrggcagtggagggtgttgcaaaccaacagtttgtccatcacgggtaagggagggttcttgtctgcccctcagtatcagctttgcagtgaagcccccgccactgccttccactagctccccacaaaagacagcaccgtcgcgagcaagacatctccaggatcccaaattctccacctggaagagcaccaattcccccttgtcctagtaagtgagacagagggcttctgccccagtcatcacaagaaagtttcctagaaaatattctcaaacagcagagatggcatctagaaacggacggagggccaatgcagaacacattccggagccagcatgagagtcctgaggccccagaggttaagacac

SEQ ID NO: 508881 - DNA, 505 bp, Homo sapiens
  misc_feature (1)...(505): n = A,T,C or G
nnnnnnnnnnnnnnnnnntgggtacaaactggcacatgttttctagggtgccgctgggcaatttctattcaatgtggactgctttcgctaatagcttcactctgaaaatctatcctaaggaaataatccacaaagatgggcctggcaagagactggttaaataaatcatagtatatccaaaccatgggggcctcagagatgttcatcatacctgctgtagggaaagtgggtcacaaacaayatgatcccatttttcatggagaaaagcccacatcagacactcacggacgtcacaaccctaatgatcaggattaaagcaagaaggtgatttccttttgggagtaagggaatcaggctgtttgaagaaaagagagttcttagaaagagaaggtggaatgctcctaacgaggacagggaaagtaaaaaagaactgaggaaacaggagagggtaagttcaggccaagaaaacagagaagaaattaggtcagagagaaaaacatcaagg

SEQ ID NO: 508882 - DNA, 505 bp, Homo sapiens
  misc_feature (1)...(505): n = A,T,C or G
nnnnnnnnnnnnnnnnnntgggtacaaactggcacatgttttctagggtgccgctgggcaatttctattcaatgtggactgctttcgctaatagcttcactctgaaaatctatcctaaggaaataatccacaaagatgggcctggcaagagactggttaaataaatcatagtatatccaaaccatgggggcctcagagatgttcatcatacctgctgtagggaaagtgggtcacaaacaacatgatcccatttttcatggagaaaarcccacatcagacactcacggacgtcacaaccctaatgatcaggattaaagcaagaaggtgatttccttttgggagtaagggaatcaggctgtttgaagaaaagagagttcttagaaagagaaggtggaatgctcctaacgaggacagggaaagtaaaaaagaactgaggaaacaggagagggtaagttcaggccaagaaaacagagaagaaattaggtcagagagaaaaacatcaagg

SEQ ID NO: 508883 - DNA, 597 bp, Homo sapiens
tcagaaccatgttctcgaactccaaactcgacactacacttttgttatctctgattcaagtcacagttaccgctwttctgtcccacaatgtaagtgagccataaagggcattgcattttaattattctttccggttccacggagagagctttcactacctctgaaatattcaaagccagacaaaaacctgacatcctggtcttgggtgcttttgatcaagggaaccagattgcgtttctccaagctgcctaaggaagcgtgggcctggcttttcccatggaatggttgactcacaccatttgtcaaatgatgatgagaatgaacgcttcttattgcattttttgttgcaaaatggggaagtgatctgtaaagcttcccccatccttatggagttttccaaaggtggtatagaaataggttgagcatccctaatccaaagtcccaaatgctccaaaatctgaaactctgtgagtgccaacatgaagtcacaagtggaaaattgcacacccaacctcctgtgacagatcgcagtcaaaatgcaggtgtacaacgcagtgtatttagcatacccaaggggaaaaaagatccccctagccc

SEQ ID NO: 508884 - DNA, 597 bp, Homo sapiens
tcagaaccatgttctcgaactccaaactcgacactacacttttgttatctctgattcaagtcacagttaccgcttwtctgtcccacaatgtaagtgagccataaagggcattgcattttaattattctttccggttccacggagagagctttcactacctctgaaatattcaaagccagacaaaaacctgacatcctggtcttgggtgcttttgatcaagggaaccagattgcgtttctccaagctgcctaaggaagcgtgggcctggcttttcccatggaatggttgactcacaccatttgtcaaatgatgatgagaatgaacgcttcttattgcattttttgttgcaaaatggggaagtgatctgtaaagcttcccccatccttatggagttttccaaaggtggtatagaaataggttgagcatccctaatccaaagtcccaaatgctccaaaatctgaaactctgtgagtgccaacatgaagtcacaagtggaaaattgcacacccaacctcctgtgacagatcgcagtcaaaatgcaggtgtacaacgcagtgtatttagcatacccaaggggaaaaaagatccccctagccc

SEQ ID NO: 508885 - DNA, 598 bp, Homo sapiens
tcagaaccatgttctcgaactccaaactcgacactacacttttgttatctctgattcaagtcacagttaccgcttttctgtcccacaatgtaagtgagccataaagggcattgcattttaattattctttccggttccacggagagagctttcactacctctgaaatattcaaagccagacaaaaacctgacatcctggtcttgggtgcttttgatcaagggaaccagattgygtttctccaagctgcctaaggaagcgtgggcctggcttttcccatggaatggttgactcacaccatttgtcaaatgatgatgagaatgaacgcttcttattgcattttttgttgcaaaatggggaagtgatctgtaaagcttcccccatccttatggagttttccaaaggtggtatagaaataggttgagcatccctaatccaaagtcccaaatgctccaaaatctgaaactctgtgagtgccaacatgaagtcacaagtggaaaattgcacacccaacctcctgtgacagatcgcagtcaaaatgcaggtgtacaacgcagtgtatttagcatacccaaggggaaaaaagatccccctagcccc

SEQ ID NO: 508886 - DNA, 476 bp, Homo sapiens
ggtggttactgtctccaagcctctagcacctcacctataaaatgggggtattcccatatctgccgagagttagaattaaacaagcaagtgagctaaagcatgtagcagcttatagtttctgtaataggatacttgtaaaatgtgttcttctgttataggaaaaatgtatatgtaagagaagtaaaatgggggaaraaatactctgtgtatttgcacaagagacggtttgagcttaatttaaaatgtgccagggatccagtatcacaaaggctccgtttccatttcagtgccaaacaaaaatctccccccattcaggtatctcattgtgtggatggttttcacccaaaatggtccacttaggagaaggagtgaaaaaatcaaacgttcatttctcctattcacccacaccctgtctgataaatgtcactccttaagcaaacctgttgcccatggcaacacattcagaagatgggctg

SEQ ID NO: 508887 - DNA, 476 bp, Homo sapiens
ggtggttactgtctccaagcctctagcacctcacctataaaatgggggtattcccatatctgccgagagttagaattaaacaagcaagtgagctaaagcatgtagcagcttatagtttctgtaataggatacttgtaaaatgtgttcttctgttataggaaaaatgtatatgtaagagaagtaaaatgggggaaaaaawactctgtgtatttgcacaagagacggtttgagcttaatttaaaatgtgccagggatccagtatcacaaaggctccgtttccatttcagtgccaaacaaaaatctccccccattcaggtatctcattgtgtggatggttttcacccaaaatggtccacttaggagaaggagtgaaaaaatcaaacgttcatttctcctattcacccacaccctgtctgataaatgtcactccttaagcaaacctgttgcccatggcaacacattcagaagatgggctg

SEQ ID NO: 508888 - DNA, 316 bp, Homo sapiens
gtggtgtgtgcagaaatgtttaataaaagtgggaggggagagaggacccctgatgtgtagcatttgcagacttctgtagtgtaaacactcccaccatggccaatttcaaggtaataacatgatgtcaacatgctccccaaatttctgaacatttaacacttggctcataaaagtgcaagctggctccactacaccactggtccatttcctcatcccaccaagatcagtaaaccctacttyctacctaaaataaacccaagaagcaaagtccttcattattttcggctttcttcttatccatagatatttaagagac

SEQ ID NO: 508889 - DNA, 590 bp, Homo sapiens
tttaaaattttttcagcttcgtttttttttctattagaaacaatgctgtgtccattaggaacaatacccatcagcataagtttccctgggttattgcctaggaatgggtctatgaatattcactgttaaacaatagtgccaaattgctttcccaaatgactatatcaacctacactcccaccagcagtgcaccccaccattttttaaaactgatraatcatttcagaatcaagaaagagatctatttgtgctgaagttggtgttacaggctcaaattcctttttttcctttttttttttttatttattttttttttgagacggagtctcattctgtcgccaggctggagtgcagtggcacgatctcggctcactacagcctccacctcctgggttcaagtgattctcctgcctcagcctcccgagtagctgggactacaggtgcgcaccaccacccccacctaatttttgtatttttagaagagacgaggtttcactatgttggccaggacggtctggatctcttgacctcgtgatccgcctgcctcggcctcccaaagtgctgggattacaggcgtgagccaccgtgcc

SEQ ID NO: 508890 - DNA, 590 bp, Homo sapiens
tttaaaattttttcagcttcgtttttttttctattagaaacaatgctgtgtccattaggaacaatacccatcagcataagtttccctgggttattgcctaggaatgggtctatgaatattcactgttaaacaatagtgccaaattgctttcccaaatgactatatcaacctacactcccaccagcagtgcaccccaccattttttaaaactgatgaatcatttcagaatcaagaaagagatctatttgtgctgaagttggtgttacaggctcaaattcctttttttcctttttttttttttatttatttwttttttgagacggagtctcattctgtcgccaggctggagtgcagtggcacgatctcggctcactacagcctccacctcctgggttcaagtgattctcctgcctcagcctcccgagtagctgggactacaggtgcgcaccaccacccccacctaatttttgtatttttagaagagacgaggtttcactatgttggccaggacggtctggatctcttgacctcgtgatccgcctgcctcggcctcccaaagtgctgggattacaggcgtgagccaccgtgcc

SEQ ID NO: 508891 - DNA, 590 bp, Homo sapiens
tttaaaattttttcagcttcgtttttttttctattagaaacaatgctgtgtccattaggaacaatacccatcagcataagtttccctgggttattgcctaggaatgggtctatgaatattcactgttaaacaatagtgccaaattgctttcccaaatgactatatcaacctacactcccaccagcagtgcaccccaccattttttaaaactgatgaatcatttcagaatcaagaaagagatctatttgtgctgaagttggtgttacaggctcaaattcctttttttcctttttttttttttatttattttttttttgagacggagtctcattctgtcgccaggctggagtgcagtggcacgatctcggctcactacagcctccacctcctgggttcaagtgattctcctgcctcagcctcccgagtakctgggactacaggtgcgcaccaccacccccacctaatttttgtatttttagaagagacgaggtttcactatgttggccaggacggtctggatctcttgacctcgtgatccgcctgcctcggcctcccaaagtgctgggattacaggcgtgagccaccgtgcc

SEQ ID NO: 508892 - DNA, 619 bp, Homo sapiens
cgaagttggggagagaggactgagacatcctgagacatcccttctagctgctgctggaaccttcttacttttcttactttcaacaaacacgttctcagctctcctttatttagtcatgaatttactcatttattcaagaaacatgcgttgagcatctttgttactgccattagttccaataatatcttctatttctaatctgcttcattttgtcctattctgcctgctattaaaacccacctcttctgtgagaatcccatagattattgttattcttctaacataccgttcattctttaaacccagaagagtgcaactttcatgatggtatttggagcacggaggcaggcaggtagggtttagagggtaagagggagacaagcagagctgaagggttttgaaactgccttcaaagccaacgcatacaccaccacttattcattctaagataggtctttgtgattaaaatttagtgatgttcaatttrtatttattgcttttcattgttttattaaatatttcattcgacaagtacttattgagcatttatgataagccagacattgattagatgctgtacatacagcatctaaattcttgccctggtagtgcttgagat

SEQ ID NO: 508893 - DNA, 619 bp, Homo sapiens
cgaagttggggagagaggactgagacatcctgagacatcccttctagctgctgctggaaccttcttacttttcttactttcaacaaacacgttctcagctctcctttatttagtcatgaatttactcatttattcaagaaacatgcgttgagcatctttgttactgccattagttccaataatatcttctatttctaatctgcttcattttgtcctattctgcctgctattaaaacccacctcttctgtgagaatcccatagattattgttattcttctaacataccgttcattctttaaacccagaagagtgcaactttcatgatggtatttggagcacggaggcaggcaggtagggtttagagggtaagagggagacaagcagagctgaagggttttgaaactgccttcaaagccaacgcatacaccaccacttattcattctaagataggtctttgtgattaaaatttagtgatgttcaatttatatttattgcttttcattgttttattaaatatttcattygacaagtacttattgagcatttatgataagccagacattgattagatgctgtacatacagcatctaaattcttgccctggtagtgcttgagat

SEQ ID NO: 508894 - DNA, 511 bp, Homo sapiens
tgggaaaatacttgaatttcttgcttccttgacaaaagttctgacatcaatgaatataatctgatctaatctgccaatgagcccctacaacaaggaactaacgataaacttgttaatgagtgtcagcaattcaaagagagtttaagattagttcctgggcaacaaaacttgaaaaacctagtattcttattgcttgcatgtgagagaaatttggaattccccaaaaaatgtgcatgatataaccaacaacaagtcatgaagctgaaagtaactttttcaaacttcagtactaaaagagaaatttagatcaactatgctgctggaaagactggattatctttctgcttttttctttataaaatgatagtcatagtttcgtattcttttttcaaagagcacccccaattgtgcaagcctcaagcctgaggaatttgcactcatcaagtacctgtgcctgatgcgttctttccagaactgaagtctcrttgataggtgaggtaatgcgatccca

SEQ ID NO: 508895 - DNA, 302 bp, Homo sapiens
agcaccacctgtgtaatttatggatctcmaagttgttgggctcaaagcggatttcacctccctgcccctcactcagggctcccctgagctgtctgtgtcaggggatacactgctgtccacccagcacataatccacaaacccagccgttcccgtgtgttcttctccctcacgcctcccacctggccaaccaccacccatcatcaacttcaccctggaggaatctgtccaatgggcaactacttcatcatcactgccctggctaatgcaggccctggccatctgccaccaggaaaacgtacca

SEQ ID NO: 508896 - DNA, 542 bp, Homo sapiens
tagaatgctggcaagaagagcaggcgaaaagggaagagctgtttataaacagggaaaggagacatcacctcgtatccttggcttctcattacgtcatcgattacaatcacaagtctcatttyctacaagcctgaaagcgggttcttctctgcatgtaggaaaaagccccgcttactaactctgccctcaaagagatcacaagctggtcctgaacgccctgtgccctgggaatgcttactgtcgaagctctgcaaattttctcattgaaggcactcagggcattctgctaattaaattaggaaaatgtgtacagctctacttgaaaaaatccaggtttatgctctgtattctattaccaaagaatttatcacttttcaaataacattcaattattttaaactgagtgtgcagtgagagcatttataatataatctcatttccagagtgttccatcccaactcctctctggtataagtagcttagaaggttagattttttttttccagaggattaaacattcgagaagagtggctaagaggcag

SEQ ID NO: 508897 - DNA, 510 bp, Homo sapiens
agagcaaatggggcagtcacgcacgcatttgtctcgggtgagggagaratgacgtccagtcctgcctttgtcctgtgcctgtgaagataagctgtgaattcacattgtcagggtgaaattcaacagaacattgttttagggtaaagatcttggggcccacagggaggtaccttgtgagaaaactgagggaggccgcctagggaggtatgtggccttctatctatctacttaggaacaaagcaggaggcagttaacccaaggttaacttttcccaatggcttagtgagtttggggccccaagattttgattttctgtttacatgttctcaaagaaccagctattggccttattgatttgactatctccgttgcatcttgtgttctattttgtgtttattagctctttccctctactttctttgagctcattcttttgagtttcatgcatagctcatgttcagtctcttttcctctctaacacaggcacttaaagtctacatttaccttgaa

SEQ ID NO: 508898 - DNA, 560 bp, Homo sapiens
gtgtgatttataaagagtcacagacaatttcagcaaaaactttttagttccaagttatcaagactatgatgagaaagcagaactagaaacccttaaacttgttgtggtatttcccttttatacacacaaacaaatcaaatacatggaaatgcttttaaagtataaaggaaatcaattacttggtttttacacagtctaggattaaatccatggcccagaaatgtctttgtttaacagtacattaattttgttaaatattacgcatagaattccccgcgctctgcctttcctcytggtcttcactcatggactcattcacatggctaaacatgcattccctccttcttcaccatgctcccttgactcaccctccagatttaatcaggaaacctctgatagccagactcaaccaccaccaggactgagtggagtttggatcctataagacactgccttcacctctatcttgacaccatcatctaattgctggtttatcagtctgtatccccctttacctcacaagttctgtgagggtagggaccaggtttttctatcattgc

SEQ ID NO: 508899 - DNA, 557 bp, Homo sapiens
ttcagaggtcttgaaaaaccatggcaacaaatgcctttgaagggtaagcaaaggttccaaatgtttttaatcgctggtgttttttctgctaccacttcaagcatttttcttcattttttgttcatctgatcaaaattaaatttccaatttccctactaagtggttctgtcctggtcatgccattgactatttccattaaagtagtagagtttgtgcccacatatggttgttaagctcatcaacaattccattagaaagctttgtttatcagtggcaataatttcccataaaaattatagataggttttaatgggcacattttcaaaaggcatcaactcgtcctcaaaattatgtgctgacactgttcttacaaccatggttcgtggcctaattccaccaaatttctctcttyttcatagagaactgttgtcagtagctttatatccttttaaagagaatggtctgtatctctgatactcattcagagaaatgagtattttagacgtaggttgctaattttaagctatatactacactatgtcagcactatataggtt

SEQ ID NO: 508900 - DNA, 543 bp, Homo sapiens
ggatctgatgggcacaattactgtaaggaagatgaagggcttctgggtatctcctgtgacaactaggacacaagatgttgttgagtttctctgagtgctttagaagcttctgaaatgttctctagggcaaagtggcttgaatcagcccagtgcagtattcagtaaactagacagatatatttctttcacagatattaatatctgttaaattttgtgctgcctttgattttatgtggcaaaagcaaataaaaatttaggcacttaaggttatgaaatcattacattaatatggaagagactttattctgattagaacttattagcaaatatcacttaaagtgcaacctataacatgatacaaaatttcttagatatcaaacaataacaaactaagtagcaaagtgatattttcaagaagttaaataaataaatgctgctctatggtctattttatgaaagaaaattatggaagagktattttaaaatagaatttgtctgataggtaaaacaggtatgacccataaaaaaaagaaaactcattaa

SEQ ID NO: 508901 - DNA, 558 bp, Homo sapiens
tacttcccaagtgcattacccccagatcttactgaaatgtagacactaatgaacagatctatgctagaagctccccttgtgcatttctaataagctcccaggtgctgctgctgctctgcagagcagatgtcaagcagcaaagcattacactatgctatctgtgtatgttaggcatgggtagaacaaatgtgmaataagaaaggacccttttctgtcatgaaggctttccatggcatcgtgctcctcggtgcgatctatgtataatctgttaacactatttggaaaacaaataaacacaaatttgccttcaaaacaaaaacaaaaactaaacaagcagatggtttgaggtgcctggcatttaggcaagatacatctgtcctcattgcacttggtatattagcacgttgtcctataattagttcattttaatttttgaggaaaaagagtactctcaatatggactaaaggcatagtctatgtccatgtaggcttttgaaagtttttgttaggcaaattattggaagaatttaatgttattataagacaaccttcaaagcc

SEQ ID NO: 508902 - DNA, 558 bp, Homo sapiens
tacttcccaagtgcattacccccagatcttactgaaatgtagacactaatgaacagatctatgctagaagctccccttgtgcatttctaataagctcccaggtgctgctgctgctctgcagagcagatgtcaagcagcaaagcattacactatgctatctgtgtatgttaggcatgggtagaacaaatgtgaaataagaaaggacccttttctgtcatgaaggctttccatggcatcgtgctcctcggtgcgatctatgtataatctgttaacactatttggaaaacaaataaacacaaatttgccttcaaaacaaaaacaaaaactaaayaagcagatggtttgaggtgcctggcatttaggcaagatacatctgtcctcattgcacttggtatattagcacgttgtcctataattagttcattttaatttttgaggaaaaagagtactctcaatatggactaaaggcatagtctatgtccatgtaggcttttgaaagtttttgttaggcaaattattggaagaatttaatgttattataagacaaccttcaaagcc

SEQ ID NO: 508903 - DNA, 585 bp, Homo sapiens
tttattggtttttaatttttttattcagtggtaaagtaaatgaatcacagtatatgaggatagaaagtgttgtcaaaggtaaaatagtacctctctgggagaaagcccaaagacctttgaataaaaagcaaagggataattaaaaggagaaagcactttatatttcatacttaattccttctcttataatagaggcaattctatctttatctacagcactgcttccgaaatccccaaggaagacatctctgagcttgtgtggatattgaaccttatcattggcatgcaaaggcactasgctttggcagaaagggagggatgagaatgaaatcttcaaaatagcttcaattatagcagaaggattagtatgtagcatttctctctgagttctcacatgcatttaagatccattgcttttttaattttttttcacgaagttttaaagtctctctctctctcacctgaagagaacagcattatccttaattaaaactcctgagagagctttagaggtctgtagttcagattgtattgtttgagtcttttcatttaagaatttaagcccatcttgccaagtttctgatt

SEQ ID NO: 508904 - DNA, 643 bp, Homo sapiens
tgtttattggtttttaatttttttattcagtggtaaagtaaatgaatcacagtatatgaggatagaaagtgttgtcaaaggtaaaatagtacctctctgggagaaagcccaaagacctttgaataaaaagcaaagggataattaaaaggagaaagcactttatatttcatacttaattccttctcttataatagaggcaattctatctttatctacagcactgcttccgaaatccccaaggaagacatctctgagcttgtgtggatattgaaccttatcattggcatgcaaaggcactacsctttggcagaaagggagggatgagaatgaaatcttcaaaatagcttcaattatagcagaaggattagtatgtagcatttctctctgagttctcacatgcatttaagatccattgcttttttaattttttttcacgaagttttaaagtctctctctctctcacctgaagagaacagcattatccttaattaaaactcctgagagagctttagaggtctgtagttcagattgtattgtttgagtcttttcatttaagaatttaagcccatcttgccaagtttctgattttgtttcaagatcagtgatttgaggggcaaaggaatcaatttagttccaagtgatt

SEQ ID NO: 508905 - DNA, 622 bp, Homo sapiens
cctgcctgattccagcttcaaatttcaagctgtagctgttccgcatatgaccatattctgggcattggtgctactgccactgtgtgtgcacccacacactggtgacaagagtgatcctctggactgccatttaacctttttgggaaaaaaaagagaatgaaaggacattcgtccccttcagtagcatggcatcaaaggtccccagtgtcttgtaatgccacagcagatacttacagccttggtgaccaaagacctcccacaatcttcaccgatactgacctcagcagacagagcagcttaaaatctacactattggaccaccattgcctcatcagggtcgaggcattactgtgcctgtctctcacagamgtagagcaaccacaccaaagcagatagcacccttgcactcacccatatgaaaagatttctttccaccaaagctagtatttaaagtatgcaaaaggtgtgtgctttatctaatatggagacctttatacaaagttacaaggttatgaaaaataaggaaaattcacaccaataaatgaatacagtaatcttctaataactggcactctaaaaattgagatctgtgaattgcctgacaaatagttcaaattaatta

SEQ ID NO: 508906 - DNA, 600 bp, Homo sapiens
atgttaatatttttgcttcacatattaacacccacgcaaagcatccattcactgtggagaaggcactagacaaccttctagtggagaaggcagtagacaaaatgactgagtcagttgacattattaaccctttatcattgagtgctccaaaaccgatataatgggtatatgagtatatgagcatagtggctacagtggcagagatggcgcctagcattagcttaatagcatggcctccaacttaccaaggttgatacaacttcacagaaacagagaaatatgctcttctaatggagaccaaccagctrattaagccacctttattgtactccttccgttctggaaaggccaccagtttttcctaaggatagacacctattccgggtattgatttgcctttcctactgagcttcagccatcactgctatgtaggtacttatagaatgtatgatacagaagcatatcataccatctaaccaggagacagactttgcagtgaaagacatgcatgagacagacaataaccataagatccactagctgtgttgtatatctccctatgctgaagcagtctgtctcacacaattctaggaaagcctt

SEQ ID NO: 508907 - DNA, 423 bp, Homo sapiens
gaccccaagcatccctatggaagcaggctatttttatcactaacccttatctcatgaccaaaagcatgtattccaatttgtattgagtgccttccatgttctacatctgctagagaaattactaaacagaaccagcaaaaatcctcacctcttggagtttttattttattggggaatgacatacaacaaacaagtaaaatattgtgtgttcaatgataatagagatgggagagaaataaagcaagcaagggggataggrtgcatggcggaggaaagttgcaattttaaatagagatcagagaatacctcacctagaagatgacatctgaataaagacctgtaggagctgaaagagtgagccaaatggatattgagtagggtgttgtaagcaatgcacatgaccgtgaggtgggaacatgtttt

SEQ ID NO: 508908 - DNA, 600 bp, Homo sapiens
ccttgttaagttttccatgtaccttctatcgcttcatcactgcacttttggaaagagcttctaaaactcctttcttatagagggcagacccataaggcaacctacatgttccattgytttttcttagagaagatttcaggtagagcttctgacaacctgctccaattgggactagctgctcactaattctgcctcaatcatccgtttcctgaatctcatgtctttttttttttctgcatttttcccgttttcatagagcacatcttccagaagcttcatgagaaatgatgtgtaaggaaatactatttttgagaccttgcatatttgaaaatatctttattctccactcatagtaaatagtttgggtagagaattttaggttggaaataatttttcataaaaaactttgaaggcatttttattttcctctagctttcgatgttgctgttgagaagtctgatgccattctgatttctgatctttgtatatgacctatttttttttccctctctatggaagcttttaggattgtctctgtgtttctgacatttcacaacagaagtgaattgttaaattcactacacacttggtgagcacttt

SEQ ID NO: 508909 - DNA, 597 bp, Homo sapiens
tggaaggacattaagaaagtaccctgtagaggaattcttatagtcttctctttcttttccatttcaacaggatattctcagagccctctagcaactgtgactgtgatttcaaggcaagaagtaaacagacagtagggaattatgttaggagtatatrttcctttacttttcctctcaaagagagagaaaataggctttttttttttcctgataagaaagtgtatgagtaagcctagattcagggcccaataagatcatgctcagattttcaaattacagttttagaaattttgggggaaattcttgatgccaaaaggcattgtgaaatagtatcaatacaattgcaggtttagcattttctttatgcaataaacagtacagggctctggggctttacaaagatgagcaagcaacagtcccttttcccaaggagcttacagtgtctcacaggagataataaaatgacacaagtgattaatagaggagagagcttcagaatgtctagccagctacacatgtctagccacctgcctacatggagacccagtccccttttcccacccacaaggtgaatctgggaagccacaaacaggaacc

SEQ ID NO: 508910 - DNA, 597 bp, Homo sapiens
agtaatattggctttttgtctcaaatgggaaatggctctaagaccggtttttctatttgtgtttctttgtttattttggtagaaagcaaagagggcaatacrttaaacggcatcttccttggatggtctcaggatcacagccttctctaaagaagtattcctctccaaagagctgcaggccttcaacagccttattaggtaatattattatacctgtttacttgaggaaactgacctcagtggtagtaacaagcccaaggtcacagaactatggtgggagggagggacgaagacaagacctgtggattcagatcctggtgccagaggctttgcttacatccagttattcaatccgcactgcagtcttctggggtcagaatcagacgacaggtcctgtgaagtttacatatcttgcccaaggtcacagaggcaaacaaggttgggatttgctgattcgaaagcccgtgctattttcacttcaggtcaacttacctctctatgcttgcacttcctaatctgtgaaatgggaataataatagtacatgcctctgggtttgttgtgggagttaaatggaatgacacacctggcccgtagtg

SEQ ID NO: 508911 - DNA, 574 bp, Homo sapiens
gctcggaacctcaaccgcatgtacaaactctatccctctgagtacaacatcttcccccgcacctggtgcctccccgcagagtgagtgggtctggcttcccatgctgagataccagggggaggaaaagggtcgctctcagagctctggtcttgtgacctaggaatgtctcagagggatggaagtggaatgagaaagtttcagctggtcaaagaaaagagggtctgagactgagtgctccaggaagrgcatggactagatagcaggaagagctccatgcggccccgggaaagccttgatgcacagaaaccttttgaccaggccctctctgcacatagctatggggacttccagtcctacggtcgtcagcgaaaagcccgcacatatatctgcaagccagacagtggctgtcagggacgtggcatcttcattacccgaaatccccgggagatcaagccaggagagcatatgatctgccagcaatacatctccaaggtgaaggatgcctcaggaccatcagccttccctagtccccagcactgggctgcctcatctctcccaaaagccagggaggaag

SEQ ID NO: 508912 - DNA, 601 bp, Homo sapiens
ttggtaataataaccaagtattctagctgctcctcgggaagcaggtcccctcgattcccctcgctgctctccagttttgccttctagctaccctgtgattgtcccatccagttccagagttggacatgaaacctaccgtcttttgacatggtcccatgagctggcccagctttcccaaggccataagtggagtccattggagcatctgcccccatctcaccctgccttctcccaaaaatgagagggtctgagggcaaagggagttgtggccacaacagaagtagcaagacagcaggcctggggctggttacacctgttcatcctgacttcacaagctgaagcacccaagggctacagtcaaactaacacccaaccttgttctaaacccaggcagaatcaccccagatctgggcaagatgtacagaagtaaactctgagctgagtaacactcattcagcggttcccgtaccaggccctgtcctaacgacttttcaaacacgagctgatttaatsctcactaccttgaggtaggttctgttattatacctgttttacagatgaagaaatcaagacccagaaactttaagtagcctgctcaagg

SEQ ID NO: 508913 - DNA, 622 bp, Homo sapiens
agctgcattggtaataataaccaagtattctagctgctcctcgggaagcaggtcccctcgattcccctcgctgctctccagttttgccttctagctaccctgtgattgtcccatccagttccagagttggacatgaaacctaccgtcttttgacatggtcccatgagctggcccagctttcccaaggccataagtggagtccattggagcatctgcccccatctcaccctgccttctcccaaaaatgagagggtctgagggcaaagggagttgtggccacaacagaagtagcaagacagcaggcctggggctggttacacctgttcatcctgacttcacaagctgaagcacccaagggctacagtcaaactaacacccaaccttgttctaaacccaggcagaatcaccccagatctgggcaagatgtacagaagtaaactctgagctgagtaacactcattcagcggttcccgtaccaggccctgtcctaacgacttttcaaacacgagctgatttaatcctcactaccttgaggtaggttctgttwttatacctgttttacagatgaagaaatcaagacccagaaactttaagtagcctgctcaaggtcacatggttacta

SEQ ID NO: 508914 - DNA, 539 bp, Homo sapiens
ttggacagcaatgttgtgtatttttcttatatcaacagtactggctagtggctcacagtaatcccagtactttgggatgccgaagcaggaagattgcttaagcccaggagttcgagaccagcctgggcaacaaagtgagacgtcactcatctctaccaaaaatgaaaaaaaaaaaaaaattagctgggtgtggtgatgtgtgcctgtggtcccagctacatgggaggctgaagtggcaaggtcactcgagcctaggaggttgaggctgcagtgagccgtgttcatgccactccagcctgtgaaacasagcaagatcctgtctcagaaaaaaaaaattactggcacataatatttactatctatgtattgattaaattactactataatcggattttttaaatctgataatacttgagctggaagggaccacttagacttctagtgtttctaccaaggtcacctggtgggattttggaaatgtgtggaggtgtttttggctttcacaatgaattgcgggacagttctggtatttggaggg

SEQ ID NO: 508915 - DNA, 495 bp, Homo sapiens
gttggtgttcagtgtggaaatctaggagggggaacacccttgcaaaggtgccctctggaatggtgagtggagtccagtgttgagaggtggcaagaccaagacagactcagccacctgcctgccgtcctacctttccattgattcttcccagaattccacatggagataatgagttctcatttcatgtttagaaagagttggaggaggcagaggagaactgcatgcgtgtgggcatgggcsggggggacctctgatatagaaaaatgaaagatgattttgttttttctgatcaggaccaaagaccaagctattagatatttccttaagtgcttttttagtgtggatttggagaaataacttggagggatgattgctctctgcccccacttgtacagttcttaaaatgctggagttggtttttgctattgaaaaaggcaggcagcagcccccagaaacctcctgagggtgcagatgaggcaggggccccagcagacc

SEQ ID NO: 508916 - DNA, 516 bp, Homo sapiens
ctgaagaagtatgtatggccaagcccttcctgcascagatccaactgggcacaaccaacttcaagtctctctgtgccagccaagctcagacattgcccattctaacaacatcaaatgcagaacaacccaagaagcagagaaaatcttgcctaggggagcatccttgttgatatttgggatcccagttaaagtcctcagtgaagctcctcataagcagcatattactcctgccatgtgccgtgtgggaaaatcaggaggcagcagctcagatgccagagtcctgattactggagggcctctagtgtagctcattcatcattcattctttcaacaaatgttaatttattacctaccatggtctccaaataaaatcaaatttgtatttgatcatccatccattcagcaaatttttatcctaacctctatgtacagggtgttgttgggctagggtaaaggatggcaacatgtcaccatgtttctgcacatgccagtccctggtatttaaaatctccttat

SEQ ID NO: 508917 - DNA, 516 bp, Homo sapiens
ctgaagaagtatgtatggccaagcccttcctgcagcagatccaactgggcacaaccaacttcaagtctctctgtgccagccaagctcagacattgcccattctaacaacatcaaatgcagaacaacccaagaagcagagaaaatcttgcctaggggagcatccttgttgatatttgggatcccagttaaagtcctcagtgaagctcctcataagcagcatattactcctgccatgtgccgtgtgggaaaatcaggaggcagcagctcagatgccrgagtcctgattactggagggcctctagtgtagctcattcatcattcattctttcaacaaatgttaatttattacctaccatggtctccaaataaaatcaaatttgtatttgatcatccatccattcagcaaatttttatcctaacctctatgtacagggtgttgttgggctagggtaaaggatggcaacatgtcaccatgtttctgcacatgccagtccctggtatttaaaatctccttat

SEQ ID NO: 508918 - DNA, 479 bp, Homo sapiens
taagtcctagagttgggatgggaagccaggcctgtctgactcgaagccccttaagtcctaagaactcttcttaaaggaatgctttttcttttgaatcccaaagactttgaaaggaagtacttcctattcatatgaatgaatacattgtcattcattcccagcgctcaagctaggacacagtttgataaacctaggttagagttccycatggttgtgtctaaaagatcttaaattctgcctgattcatagtctctgcttaagtgctgtagtatatcatgcctctttacaaatgttgaaaatgctcaggttgatttaaaatacctgctatggactgaattgtgtctcctacaaaattaatacgttgaagccctaactcccagtgtagttgtatttggaataaggagcaattaaggttaaatgaaggcatatgggtagagccctttcttacaggagtagtgtttttgtaggcaaagacatca

SEQ ID NO: 508919 - DNA, 603 bp, Homo sapiens
actaatacaggccctcagacatgggccctcaaagcccggggccctgcatgattgtacagatctgccatccaagaagctggccctacaatgaacagcacaaacaagcaaaatgctgccctctgcagaaggttccaaccaccctccaactttgcaagccaagacctctggaatcccagtctcctgatggggagcctcccagacagcctccctttgggatgtacaccttcctagatccacgcccagacccgtaccactgggtctggcggagtaatgcccggcaacccccagactcagccaggaagcctgtgctttgcctgggcttcctgkattgaggcattctccacttccaccactttgaaacctgccaccagcttctcccacaaagtaccctcagaatcccatgtggtcaaagctgtggggagcagttctctcctaccttgggtggctcagctctgctgacctgacgctaagggctggggaggctgtggcattagccggctgggggataaaggtagatttcttaggcagcagggggcactagaacctccaaacaggacgcagggtatacacacctcatcaatttcaggagcagggctgcccata

SEQ ID NO: 508920 - DNA, 603 bp, Homo sapiens
actaatacaggccctcagacatgggccctcaaagcccggggccctgcatgattgtacagatctgccatccaagaagctggccctacaatgaacagcacaaacaagcaaaatgctgccctctgcagaaggttccaaccaccctccaactttgcaagccaagacctctggaatcccagtctcctgatggggagcctcccagacagcctccctttgggatgtacaccttcctagatccacgcccagacccgtaccactgggtctggcggagtaatgcccggcaacccccagactcagccaggaagcctgtgctttgcctgggcttcctgtattgargcattctccacttccaccactttgaaacctgccaccagcttctcccacaaagtaccctcagaatcccatgtggtcaaagctgtggggagcagttctctcctaccttgggtggctcagctctgctgacctgacgctaagggctggggaggctgtggcattagccggctgggggataaaggtagatttcttaggcagcagggggcactagaacctccaaacaggacgcagggtatacacacctcatcaatttcaggagcagggctgcccata

SEQ ID NO: 508921 - DNA, 640 bp, Homo sapiens
acccttgatgacccaggacccaccccttttataattttatcactcttccattcatatcattcattcaacagatatatattggctttggttgcaaaagtggaaaggaaagcatcctttgtatcaatcagaaaggaacatgtcaatggatttcccgtaactgctgacttcactcccarcatttcccatggtggcctctggagtctctccccagttgttgaccctcccttcaactctccacctcccaacccgaagggaaaccagactctagcttgaggacctcatttaccctgcagctcttttgagaggagggagcttctttctctgcattcaacaacacagcttagagcaggtatattccccatgctcctcattgggatttttagttccactggggctctgccatttccacaataccctgcccccttgcactcttgttgtccttgtcatttgctgacctcctggtaattcccacatgcatccatgggcaccgcaggcacctggctcactgtttttttctccattctggatgcattaccccccaggccctgctccctctcttggttgtcactgctcaggccctgctccctttcttggtatgctctaacataccttctcctccttccttagacctccaacacct

SEQ ID NO: 508922 - DNA, 640 bp, Homo sapiens
acccttgatgacccaggacccaccccttttataattttatcactcttccattcatatcattcattcaacagatatatattggctttggttgcaaaagtggaaaggaaagcatcctttgtatcaatcagaaaggaacatgtcaatggatttcccgtaactgctgacttcactcccagcatttcccatggtggcctctggagtctctccccagttgttgaccctcccttcaactctccacctcccaacccgaagggaaaccagactctagcttgaggacctcatttaccctgcagctcttttgagaggagggagcttctttctctgcattcaacaacmcagcttagagcaggtatattccccatgctcctcattgggatttttagttccactggggctctgccatttccacaataccctgcccccttgcactcttgttgtccttgtcatttgctgacctcctggtaattcccacatgcatccatgggcaccgcaggcacctggctcactgtttttttctccattctggatgcattaccccccaggccctgctccctctcttggttgtcactgctcaggccctgctccctttcttggtatgctctaacataccttctcctccttccttagacctccaacacct

SEQ ID NO: 508923 - DNA, 640 bp, Homo sapiens
acccttgatgacccaggacccaccccttttataattttatcactcttccattcatatcattcattcaacagatatatattggctttggttgcaaaagtggaaaggaaagcatcctttgtatcaatcagaaaggaacatgtcaatggatttcccgtaactgctgacttcactcccagcatttcccatggtggcctctggagtctctccccagttgttgaccctcccttcaactctccacctcccaacccgaagggaaaccagactctagcttgaggacctcatttaccctgcagctcttttgagaggagggagcttctttctctgcattcaacaacacagcttagagcaggtatawtccccatgctcctcattgggatttttagttccactggggctctgccatttccacaataccctgcccccttgcactcttgttgtccttgtcatttgctgacctcctggtaattcccacatgcatccatgggcaccgcaggcacctggctcactgtttttttctccattctggatgcattaccccccaggccctgctccctctcttggttgtcactgctcaggccctgctccctttcttggtatgctctaacataccttctcctccttccttagacctccaacacct

SEQ ID NO: 508924 - DNA, 603 bp, Homo sapiens
agaggttgcagtgaatcaagatcatgccactgcacyccagcctgggtaacagaatgaaaccctgtctcaagaaaaaaaaaaaaaagaaagatattgaagtcctaactccccactgcctgtaaatgtgatctaatttgaaatagggtcttgccgatgattaagatgaggtcactaaagggggtcctaatctaatatgactagtgccctcataaaggggggaaattcagatactgagacagataagacagtcaagatagagggaagatgctacgaagccacagggaaaaggaatgtcatctacaaagagtgtctgaggttaccagaaactgggagaaaggcctggaacagattctccttcacagtcttcagaaggaaccaaccctgctaacaccttgattttgaactttttagcctccagaactgagacgatgcatttctgttgtttaagccacccagttggttgtcctttgtcatagcagtcctagcaaacgaatataggatctaagcagtgtcaaaaggtgagggtttcaaggaagcagcttttagtttaataaaggctaggagtggggtgggcacaagaggataggggaggaatccacagca

SEQ ID NO: 508925 - DNA, 539 bp, Homo sapiens
ttcttttggtgttgagatcgtctgccacgagtgtcgcctggatccctgtttgaaaaggggaggaaaagatacttgggaaattggactgagagcttgcttactcctccgttcaataactgtgaccaagctgaaactcgttagcaacctttccagaaacgttttatttaccatgtgtgtttgttgtgtatgcaagagaggaaaaaataagccaaagtgattaaccaatctctggttttcmctattttcttcaaagctccattttgagatctataagcaagggttgactctcgagttcattggagaagttacctcggctcactacaacttctgcctccttggttcaagccattttcctgcctcagcctcccgagtagctgggattacaggcgcctgccaccacacctggctaatttttctatttttagtagtgacaggattttgccatgttggtcaggctggtctcaaactcttaacctcaggtgatccacctgccttggcctcccaaagtactgggattacaggcatgagccaccacaccc

SEQ ID NO: 508926 - DNA, 420 bp, Homo sapiens
gatcctcatggcccccagcccacccttaagcctcttgtcactagaaacctctctttggggwtgatgctgagccaccctctaaccatacgtagggccgaagtatatagtactggctgaaaagcccctttttactaattttttttagagacaagttcttgctctgtcacgcaggctgcagtgtgcagtggcacgatcatagctcactgaggcctagaactcctgagatcaagggatcttacagcctcagcctcccaagtagctgggactacagatgcacaccaccacacctggctaatttttttccccattttctgtagagatgggggtcttgctatgttgcccaggctggtcttgaactcctggcctaaagcaatcctcccgcctcagcctcccaaggcactgggattgcaggcatgagcc

SEQ ID NO: 508927 - DNA, 533 bp, Homo sapiens
attgaccaatagactatagctttagaatcacaaaattgattcatttatctttttaataaagcatgcgtgactagtcccatgctttgtggggacagctatcaatcaacacggcagaccaggctccttctgtgcccactaactcactcatggagccaccacagaggaacagccactctgctcagatgccgtsgggggctgcaacttctcagatctagtccttgtggtttctttggggagccgcctatgaacttggtctaagtcaacaaacaattgtgtattaatacaatttggtgctctctgcacttcatgtgccatttgagcattcgtgccagttccatttagatcctcgttcacaggagaccttctgtgggccaggaattgtgctgggcatgggggatggtcagacagataacacagtattcctgcctttaagggtggacctttacagtttgttataattgtgacaagagttactacacagaaaaacacaggagctgtggaagtagagacgggggccccccaaggcccacagg

SEQ ID NO: 508928 - DNA, 403 bp, Homo sapiens
ctagcagttgagctgcccagagagaggctcagggtccacatggccgcaggccgggggcctctccaggagcacagagatgtgtgcaggccctgccaggctggctgcagcctgggtctcctctgaagtcagccctgctttggggtcgcatggaatttttagtgcaaagcaagaatccatcctctttccatagtagacctgacrgggatgtggcttatctgcccaaaagagagggaagaaccaagagcttgcaatgaccttgctccttctcagggacagccaagaggacaagattctttatgaatctgttgaagcaaacagaccatctcctggcccccaaaggggaatggaagtcccggtgaccttctgcaggtaagctggtgtcccctccctgcaggcacgttgg

SEQ ID NO: 508929 - DNA, 708 bp, Homo sapiens
gtttttcttttgtcaccacttaccagtgactttgtaataaaaaaaaaaaaccttgtagaagctggaaacaaatgctttgccttcttccttgtggttatttgttaccaacctgcagaggtatattcatattgcagaaatcacgtgtagctgtgaatacactgtggtcttattctttgggtccagcagaaaattcctggtctttcaggatatgtaggctgtattggaactcttcattctctctgtaaaataacctttttgagagtaactctgcagtattagttattaaactaagaatgattccattaaggacrttgtagaaaatgttgcaatctgtctagaatcatgacttaattttctggcagtggatgagggcagcctggtcacaacatctgctacccttttgattgccagggttgattcaaccaattttttagtttctttaactcttaaatgtatctggtctggaattagtttaaggtgtgggtgtcatggtgatcagtgaaagtaaaattaacttttcatatacaatgtctctttggaggcagaccttatttggagaagaacataaataacttaaagccagatatggaaagtctctgttgttcatttttaaattagccatatcccttctctacattgcaaggttgggtaatgtttgctcattaactctgtatctgcttgcagagcttgtcagtcaatttcatgtag

SEQ ID NO: 508930 - DNA, 664 bp, Homo sapiens
ggcagggctccctgccagccacaacagagtcccatttaccctcaatgcagcagacctatggtactccactgcaggtactctgggaactgacagtggactgacagcaaatgtctggcatggtagaagtagagtgggcacttacagagtctgggcttgagagggaaaagatggtttagaaaaaaaaaaaaaaggcccaaacacctcaagagggatttttcaagtgagccttacagcaatttcattgttgcttgcatcatcaattaattcactaaataaatatttttcatgtggctcctatgtgttagcatattgggaagtgtcatgtttgaaaactcaccctttttcggcttcattttaaattaagagcccaacttttctataatgctctttgtctrtgattaaaatgtataatccatcttcaaaacattcatgggtttaagtctgggattccgcttgaagcattaattttccagctatgtttccactctcttagtctcgattttcttcttccaactgacatatggacgattgtgaatctcaactccaaattctcattacttgcaataagctggagataaattcagtgagtggaggagaggtctttaaaaattatgatgatgatagataagggagaaaagccaaatgattaagtttgtatttaaca

SEQ ID NO: 508931 - DNA, 664 bp, Homo sapiens
ggcagggctccctgccagccacaacagagtcccatttaccctcaatgcagcagacctatggtactccactgcaggtactctgggaactgacagtggactgacagcaaatgtctggcatggtagaagtagagtgggcacttacagagtctgggcttgagagggaaaagatggtttagaaaaaaaaaaaaaaggcccaaacacctcaagagggatttttcaagtgagccttacagcaatttcattgttgcttgcatcatcaattaattcactaaataaatatttttcatgtggctcctatgtgttagcatattgggaagtgtcatgtttgaaaactcaccctttttcggcttcattttaaattaagagcccaacttttctataatgctctttgtctatgattaaaatgtataatccatcttcaaaacattcatgggtttaagtctgggattccgcttgaagcattaaytttccagctatgtttccactctcttagtctcgattttcttcttccaactgacatatggacgattgtgaatctcaactccaaattctcattacttgcaataagctggagataaattcagtgagtggaggagaggtctttaaaaattatgatgatgatagataagggagaaaagccaaatgattaagtttgtatttaaca

SEQ ID NO: 508932 - DNA, 659 bp, Homo sapiens
gacaatgatgatgctggcagcaaccccaaggacacatcctaggtcctggctggctggcagtccagacttgcttcttagaatggttgctgactgcacagggttaaagtgtacacttgtgccaggcgcatatttctagcccagagctgggctctggtgggcttgatgctggtgagacatataacctgcctctgaatatggatagctaaggcctcaccttcggctccgctctctggggtgctagagaaatggaccacaaaaacgctcctccacggctctggtgtccaccacaaccctctttcttaagggcctgacccgcccactgtgcttggcagtaaacttgcggccggccaggcagctccgagcctgcagagctgctgctgttgggggaggagcaaatgggagaggggagaggctgtctacccagatcaggttacctggtgagtcctgatgggggtcctcagcygtgctgactccacattttcccaggaaccttccctgggggctgggccaccctcccacccattcctcaggagtccttccttgtaaccggcccagcacacactggtctgcatgaagacccatcatctgatgggcttctgttctgctccctgtgaccgacacccccatttctcttcatcaaggaaatggcgtggtgggtc

SEQ ID NO: 508933 - DNA, 512 bp, Homo sapiens
gctcatccaaccaatttcaccagggttgtcctggactgggcctacccagagctctaggtgatgaatcccactctgctgagtgatctggggcaagttccttagtctttctcatctctgaagtggtgctaatrataattactcggagagttataatgaggatttaaaaagttcacattggtaaagtacttagaacagtgcctgcaacaaagtaattactagatgagtgccttaaataaaataaataaatgcaaaaagctgcagagaattacaggcaagtcagagtaaaatcttgagaagatgcaaatatttgaaggaaaaggctgtgatactgtgactgcaaatgctccaggagagatgggaagggcacagtaactgcagcaaaagctccaatgatgtaaaatctgcgcccccgacacagcttcatcatccgggctcaggccccaactacgaacccgtgagggcttcatgctagctcaccacggggttacgtcttcatcatcctcatcacggca

SEQ ID NO: 508934 - DNA, 651 bp, Homo sapiens
ctccaggagagatgggaagggcacagtaactgcagcaaaagctccaatgatgtaaaatctgcgcccccgacacagcttcatcatccgggctcaggccccaactacgaacccgtgagggcttcatgctagctcaccacggggttacgtcttcatcatcctcatcacggcacccacagaaattactgtttttgggccgggcgcggtggctcacgcctgtaatcccagcactttgggaggccgaggcgggcggakcacgaggtcaggagatcgagaccatggtgaaaccccgtctctactaaaaatataaaaaattagccaggcgcggaggcgggtgcctgtagtcccagctactcaggaggctgaggcagaagaatggtgtgaacccgggaagcagagcttgcagtgagctgagatcgtgccactgcactccagcctgggtgacagagcgagactccgtctcaaaaaaaaaaaaaaaaaaagaaatcactgtttttggaggctgctccactatcttctctcaggtagtaggtaagttgagatgatgtcaaaggattcatcttccctaacccaacaatagtggctaaataaattaataaatattcatatatattaatccattcattctgtcctcaaacacatattgagagcctc

SEQ ID NO: 508935 - DNA, 521 bp, Homo sapiens
gatctctgacatttgtctctttaagcacaaatattaatttttaaaaattctaataattttttttgcttgagcacacttctggaacgtattaaaacttatctggcccctgaacacagtatacgaagcataaccttctcttcccttgatgacctgggattgctctcaagaatacccattactggcctgagctgtcactgcctcctcccgagctcccagtaggatgtccagacactgcctctggtcagccctgtcttggccctcagggactctggctggcttggagagtgcttttgtgtggcgttcccagcccagtgggttcatctgggctggaaccagaggctcctagtggaggagggaaggatgcaggcacagcagaagcattctatcatttgaatgcctggggtctgcctccgcctctctttaaacaaagacggcaatgtgtgcaggactgtgtggactagaggyctggcgtgctgtgctctgagacctcctgtctgtgtttccttcctccttcgctggca

SEQ ID NO: 508936 - DNA, 614 bp, Homo sapiens
tgttccgatggctatctccatcttccagattaggaaacggaggcacagaaagctcaagcaattggcccaaagtctcccagctagaaagtggcagaggaggattcacgcccaggcagcgcagccccggagacctgctctcaggcaccacagtctccacctgccagctcggttcaatgctgtatcttggcccaggcaatacccggcctctggtagggctccgtaaataacgagtgaatgaagcacgctgcaatcccacatcaccgtggttctcgtgcccgtcttctctccccacagacgggcaagatcctggactcaggcctgttcttccctccttccctgccccacccaccagactgcccctatctgatgggggcagcatcagtcaggttatgtcaaagaaatgaattattcccctgggtcttaaagcggttgcttttgccagcggccatggggaaggggcagttcaggccagttgcacaaatgtctcctactctccctgtccagcaagccccgacccagagccctggrgagtccacctggtggacctgggagatgacatcaccagcccggggtgggcaggcttgccagttcccccagccccaagcatcctattc

SEQ ID NO: 508937 - DNA, 560 bp, Homo sapiens
aggtgaacaaatccttttatagttrtagctaaaatgggataaaatggcccatccaaagctcagttcctgacactgcacaaaactctcctttgggaaacagtgagggatattgggaagcagattagaacagcgagaaactaaacaggggaggcagaatcctggaaccactactttgttgctgtataaccttggacctcagtttccttatctgtaaaataagatgataacactactgacatcatagggttgatgtgagaattttaaaaaaggctgcatgttaagtgtttaacattgtcactggtacatgctaggcattcaataagtattaattaaatataaatagaaggaaagagttcaggacaatgttctgttcacattgccacattaattgtgtaataaccagccaatgttgtgactgaatttttcaacatttgacgaaagtactcctttaatggaagtaattctgggtcataaagataaaaatttgtgttatgctcaataatagtatcttatcaccaaaaccttgcacaattatattgcccatgccttgttattaaagg

SEQ ID NO: 508938 - DNA, 560 bp, Homo sapiens
aggtgaacaaatccttttatagttatagctaaaatgggataaaatggcccatccaaagctcagttcctgacactgcacaaaactctcctttgggaaacagtgrgggatattgggaagcagattagaacagcgagaaactaaacaggggaggcagaatcctggaaccactactttgttgctgtataaccttggacctcagtttccttatctgtaaaataagatgataacactactgacatcatagggttgatgtgagaattttaaaaaaggctgcatgttaagtgtttaacattgtcactggtacatgctaggcattcaataagtattaattaaatataaatagaaggaaagagttcaggacaatgttctgttcacattgccacattaattgtgtaataaccagccaatgttgtgactgaatttttcaacatttgacgaaagtactcctttaatggaagtaattctgggtcataaagataaaaatttgtgttatgctcaataatagtatcttatcaccaaaaccttgcacaattatattgcccatgccttgttattaaagg

SEQ ID NO: 508939 - DNA, 528 bp, Homo sapiens
gttccacaggtacctaaacgcccaaagttgctaaattagcgcaatgttccttcgcccaaacacccatcctcaggaattccctctctcagagaaagccgcctctatctcctcatctccattcccctgttcgacagccaggtcttagattcctctgcctcagttgctgtcaaatctaccccsttctccatctgcagccacgaccttccatcactgtctcccagtgtctccttatttcagttcgcctgcctgcctgcctgcccgcccccagtcttgcccttctcagccattctctacccaactgcccacaggagttttgcaaagggcaaatatgatcatgacactttactttcctgctttaaatcctgtccatcaatataaggttccaactcttcgtggtggcccagaagaggatctgggcgggctcccttttctagcatcccctctcattcatcccgtcctaccccagagaccatggcccatcattccaaatgccttatggtttctgaagcctcatgtcccctttcagct

SEQ ID NO: 508940 - DNA, 609 bp, Homo sapiens
agactttgcacaacaatgtacacaaaaatgtgaatgtatttaacactactaaactgtatacttaaaaatgggttagataggccaagcatggtggcttacgcctataatcccagcactttgaaagactgaggcaggtggatcacttgaggtcaggagttcaagatcagcctggccaacatagtgaaaccccatctctactgaaaatacaaaaaaaaaaaaaaaaaattagctggtgtggtggcacgctcccataatcccacctactcaggaggctgaggcagaaatattgcttgaacccrggaggcggaggttgcagtgagtcgagatcatgctactgcactccagcctggggacagagcgagtctctgtctcaaaaaaaaaaaaaaaaaaaaagttttgatagtaaatttaatgttatgtgtcttttactacaattaaaaacttaaaaaaactcaacattataattatcccctttgattcaagattaataaatattatttatcaatgaacaactcaaaagtgatagtgaatctcctgagtgggggagaaacagggtctaagaaataattccctgaagactcttgtttgcattattcctgcaaaagcagc

SEQ ID NO: 508941 - DNA, 634 bp, Homo sapiens
atctgttgagaggtggtagcaaaggtgagttgttttacgccaagaccagctcggtcggggagaccstaacccagcagtgctagaggaattaaagacacacacacagaaatatagaggtgtgaagtgggaaatcagggatcttacagccttcagagctgagagcctcaaacagagatttacccacatatttattaacagcaaaccagtcattagcattgtttctatagatattaaattaactaaaagcctcccttaagggaaaggaagggatgggccgaattaattggataggttgggctagttaactgcagcaggaacacgcccttaagacacagatccctcaggcttttgtttgtagcttaagaatgcctttaagcggttttccaccctgggcgggccaggtgttccttgccctcattcccgtaaacccacaaccttccagcttgggcgttatggccattatggacctgacattgctgcagagattttatttatagccagttttggggccagtttatggccagactttggggagcttgctcccaacagttttagcatcttgctgatcatcttctaggggggatgactgaaatgaaaaagagaaatattaatataaaaggttataataaagtta

SEQ ID NO: 508942 - DNA, 634 bp, Homo sapiens
atctgttgagaggtggtagcaaaggtgagttgttttacgccaagaccagctcggtcggggagaccctaacccagcagtgctagaggaattaaagacacacacacagaaatatagaggtgtgaagtgggaaatcagggatcttacagccttcagagctgagagcctcaaacagagatttacccacatatttattaacagcaaaccagtcattagcattgtttctatagatattaaattaactaaaagcmtcccttaagggaaaggaagggatgggccgaattaattggataggttgggctagttaactgcagcaggaacacgcccttaagacacagatccctcaggcttttgtttgtagcttaagaatgcctttaagcggttttccaccctgggcgggccaggtgttccttgccctcattcccgtaaacccacaaccttccagcttgggcgttatggccattatggacctgacattgctgcagagattttatttatagccagttttggggccagtttatggccagactttggggagcttgctcccaacagttttagcatcttgctgatcatcttctaggggggatgactgaaatgaaaaagagaaatattaatataaaaggttataataaagtta

SEQ ID NO: 508943 - DNA, 613 bp, Homo sapiens
gctggattttagttgtaacttggtgaaaatattagccaaggaatttcccaggacctctggattcaagtcttaaccttcgtcctgccttagcctcarttttctactggtggagatagctgttcttatttcaggtcaaatttgaagaaaattatttaaacaaagtgctctgaaaacaagtaagtaaagattaagctgcatgtgtattttataaaattttaatatcttttaaaggctatgtgtccacatggtgcctctaaaattgaaacggttggtctagaacattttttgtgtttatgtagaactcttaagtaaatctgagaggtccttgttttaacatgtaggctatttaaattaaaaacttgtggaaatgcaattctgtcactaatatataattcagctcaaacttttaaacattgtctttagaaaaacaagaagtcagtgcatggtaaattatggtttgtgtctgatgcatatgttgacatgagggattgaattcctgttccttaaagttttctgtccagtatcatccctggtttcatattgcattgagtgctattgagctgaatatatttagatctttttccaaaggtcttattttctgatactctactga

SEQ ID NO: 508944 - DNA, 613 bp, Homo sapiens
gctggattttagttgtaacttggtgaaaatattagccaaggaatttcccaggacctctggattcaagtcttaaccttcgtcctgccttagcctcagttttctactggtggagatagctgttcttatttcaggtcaaatttgaagaaaattatttaaacaaagtgctytgaaaacaagtaagtaaagattaagctgcatgtgtattttataaaattttaatatcttttaaaggctatgtgtccacatggtgcctctaaaattgaaacggttggtctagaacattttttgtgtttatgtagaactcttaagtaaatctgagaggtccttgttttaacatgtaggctatttaaattaaaaacttgtggaaatgcaattctgtcactaatatataattcagctcaaacttttaaacattgtctttagaaaaacaagaagtcagtgcatggtaaattatggtttgtgtctgatgcatatgttgacatgagggattgaattcctgttccttaaagttttctgtccagtatcatccctggtttcatattgcattgagtgctattgagctgaatatatttagatctttttccaaaggtcttattttctgatactctactga

SEQ ID NO: 508945 - DNA, 585 bp, Homo sapiens
ttcctgttgcctttgctcccttccccaaaattatctttccctaataacccccatttgagcattgtctataaacatctccttaaagattcatagatagacttttcacttgaaatataaaaggaggtcaacagtagcacatttttatttgaatctcaatcactaccggattgtctggtgctgaagcactttaagagcctagaatcctgtgactttatcttgggaaaaaaatggttgaktccaggttgattttgccttgatctagttatctgtgaggtgagtcaaaaatctaaatcatgctgggttccatgaccttcctacagttacatttatgacactttaaggctataaaccatgggcgaggaggtggactgaaaccctcacatgctgctgttgcagatgaaaaggctgaagccactttggaaaaaagtttgaggggtggaaatggggaatgactgttaaagggtgcagggcttctttgtgggatgatgaaaacattttaaaattagattgtggtgcaggtagcacaactctatgaacatgctaaaaatcactgagctgcacatattaaatggatcagttttatca

SEQ ID NO: 508946 - DNA, 585 bp, Homo sapiens
ttcctgttgcctttgctcccttccccaaaattatctttccctaataacccccatttgagcattgtctataaacatctccttaaagattcatagatagacttttcacttgaaatataaaaggaggtcaacagtagcacatttttatttgaatctcaatcactaccggattgtctggtgctgaagcactttaagagcctagaatcctgtgactttatcttgggaaaaaaatggttgattccaggttgattttgccttgatctagttatctgtgaggtgartcaaaaatctaaatcatgctgggttccatgaccttcctacagttacatttatgacactttaaggctataaaccatgggcgaggaggtggactgaaaccctcacatgctgctgttgcagatgaaaaggctgaagccactttggaaaaaagtttgaggggtggaaatggggaatgactgttaaagggtgcagggcttctttgtgggatgatgaaaacattttaaaattagattgtggtgcaggtagcacaactctatgaacatgctaaaaatcactgagctgcacatattaaatggatcagttttatca

SEQ ID NO: 508947 - DNA, 588 bp, Homo sapiens
atgtatgagttatatacctcaataaagctgttaaaataaaacacttcaaaagctactgaaaattatgttttagctctgactccaatgtaggtaacaagttttataaactaaaaagcaaacctgttcagccagaagcagttgtaatactgatatcactctttccctcaaacaatgacttttgtccctccaaacatgtatcatttattctataccacctcagtttgggtgaaggaatcctgggaattgagaaataattaaccaatacctaaaaacaaacaaaaaawtgtaggtaaacaagtcattctttgggtgttttcatgaaatgtaagcaaaaatgtagataactttttgggaattctaaaacaataggtaaacaaatatatttaaaacaaactgaagctcccaattcaaatacaaattaattacatttcatttcatgagacgcataacacaagtgatcttatctctagttcttgagtccgccttctccataccacatgtaatattctacttctacttttgccttcccatttcttaagcaatttcattttatactgttcaaggggtaaaaagtgcatctgcggtcat

SEQ ID NO: 508948 - DNA, 588 bp, Homo sapiens
atgtatgagttatatacctcaataaagctgttaaaataaaacacttcaaaagctactgaaaattatgttttagctctgactccaatgtaggtaacaagttttataaactaaaaagcaaacctgttcagccagaagcagttgtaatactgatatcactctttccctcaaacaatgacttttgtccctccaaacatgtatcatttattctataccacctcagtttgggtgaaggaatcctgggaattgagaaataattaaccaatacctaaaaacaaacaaaaaattgtaggtaaacaagtcattctttgggtgttttcatgaaatgtaagcaaaaatgtagataactttttgggaattctaaaacaataggtaaacaaatatatttaaaacaaactgaagctcccaattcaaatacaaattaattacatttcatttcatgagacrcataacacaagtgatcttatctctagttcttgagtccgccttctccataccacatgtaatattctacttctacttttgccttcccatttcttaagcaatttcattttatactgttcaaggggtaaaaagtgcatctgcggtcat

SEQ ID NO: 508949 - DNA, 579 bp, Homo sapiens
gttttgaacgcctggactcaagcaatccatttgccttgaccttccaaagtgctggaattacagtcatgagccaccacaccgggcctatttttaaagtttttattcttggttatagctatttacctgagaatctgggccttagatccatgggaaataccaggaccctagaatgaaggtgctggggaagttcacatctcacattcaggaaagattctaggtttactatgggatcatgaatttggaggaggtttccccataattatgagttcaaaggcttactcagcagagccaacatggagtcaacagggttgcctgagagataccagartatggctggtgatatggtttggctgtgtccccacccaaacctcaacttgaattgtatctcccagaattcccacatgtcatgggagggacccagggggaggtaattgaatcatggaagccagtctttcccatgctatcctcatgatactgaatacatctcacgagatctgatgggtttatcacgggtttctacttttgcttcttcctcattctctcttggcatcaccatgtaagaagtgccttttgcctccc

SEQ ID NO: 508950 - DNA, 579 bp, Homo sapiens
gttttgaacgcctggactcaagcaatccatttgccttgaccttccaaagtgctggaattacagtcatgagccaccacaccgggcctatttttaaagtttttattcttggttatagctatttacctgagaatctgggccttagatccatgggaaataccaggaccctagaatgaaggtgctggggaagttcacatctcacattcaggaaagattctaggtttactatgggatcatgaatttggaggaggtttccccataattatgagttcaaaggcttactcagcagagccaacatggagtcaacagggttgcctgagagataccagagtatggctggtgatatggtttggctgtgtccccacccaaacctcaacttgaattgtatctcccagaattcccacatgtcatgggagggacccagggggaggtaattgaatcatggaagccagtctttcccatgctatcctcatgatactgaatacrtctcacgagatctgatgggtttatcacgggtttctacttttgcttcttcctcattctctcttggcatcaccatgtaagaagtgccttttgcctccc

SEQ ID NO: 508951 - DNA, 596 bp, Homo sapiens
cttactgtagggtgagcattgggtttagggtcagaagctctggtccaaaactcgagtctccttttccatggctctgtgtctttgagaagccacttgagctctctgacctgcagcgtcctcatttgaaaagtggctagggccaacaggactgtttacagtcaccttcccatctggaacaaattcgtctccagggcagagggcaggggcgggtgaggatgctgcagggacatgggrggctgcgccccagggccaagctgtcccacagtcctggagctgggagtagtcatgctgggagttagagagcccagggctgtctccctcatcagcttgctctcggtgtggcctggagataaaaccctcggctcattaatgtcatatgacctgtgtgaacacatggagcactgtgcccggcacagaggccgttccacaagcttcagctcccgtcattgccggggaccttccctgacactggcgatcagtccccagcttctagcagggcttgtctggcagggtcttccttccttagactgttcttccttggggaacaaggtcattaaaggatggctttcttctctcctggggacagtgagggcagg

SEQ ID NO: 508952 - DNA, 650 bp, Homo sapiens
gctgctgtgtccagagagaaaaatctctcaaagcctgcaaaaatgacaataatgacctgcatttggggtagattcttgtctgtggctactattattctgtcatcagtactctactagttaggatgcacaggaagtgtccccatttgacagaagaccagagaagctgctgtgacagagttgggtctagaaccttgtttcctgctttttactctgcttctcattcactagaccccatgaccagtgagtgcaacctcaccacaaccattgatgctgcaataggaacctgcaaatccaatggcactgccagaatcaactgaatggctctgaggtgactttcattcatccattcatccatccatccacccatccatccatccatccacccgtccatccatccatccatccatccatccatccatccatccatccatccatccatccttccatccatccatccatttacccatccatccagcattctttctcagacatccrttcatcaaccgtaggcttagctaatgccgttagcttactgggccccaatagcttcaaaagtgggcatttgagcccaaaactaaaatggtgtgcagtctcatgcaggtatagcagaaaactgctttgtaagcaggctggggaataagagcctttcc

SEQ ID NO: 508953 - DNA, 651 bp, Homo sapiens
gagcctttccaagtggaagcagatatgggagggagtttggcctctgctttccaaagatgtgctgggttccttagaatgcacacacttctgtcctttcacactgagataggctgactccttgtggtggtctccaagtaccctagagaaacagaacctgtgaactgacggagttcttgatctgcatctttgtgatattattgatctttgtgaygttattgccttggctcagcccagattgtttacaagggtccccaggtgttatcttgaaggaagggaccactaatatagagcctaggacacagtagaggctgagcaaatgcctgtgtgtacttgcctgaagaagaatccacaaatgggtgactaaatgaatcaaagaggtgtggactgtgttttagaaatgaactaattgcaaatgtctactcttttcagaaggcagccctcagaaatctgggaaattctctcctatggatgatcacaggttctgggatgcagagcaaacagggagctaatggaagcactcaggatgatagaattctaacttcatgaaaacatgtttgattgtgggtcccagtaaagatgtcccagttctcggccagaatcttttctgaagactgagctggaggaggtaatgatgggggcggggactggaca

SEQ ID NO: 508954 - DNA, 496 bp, Homo sapiens
ccctcctgtcaagggtttgccagcagctccactctagccctctaatgagcactcttcctccctctgctgcttttgcctgcaacacagttagttctcattttgcctgagcttcctgagggcctttgcagggtgaaggagcaggaagagcagagtggaagtagcagccctgccctgatggttctgggcagtgctgctggktctgggccaatctccacctcagctctgccacattagctcctgtgggcacctctctggtttccttgcccttcagtgagcgggaggccgtgtcctgcctttccactattatacatacagcactgagtacaattttaggcacaaaataggtactcaaaattattttttatgattatatgtctacctcacatgttatatagagtagcagataggtatcagtcagtggggttttttccccaagtacatggtgattgtttccagagggttggttcacctgaagtggtggaagccaaagggagag

SEQ ID NO: 508955 - DNA, 528 bp, Homo sapiens
aaaatccaagagtctcctgttcactagcagaggagagaaggtatgcaacatccttgcagataccttctctctgctcaggagagttaatgaactggactttgagaactcacttccagccaggtagatgcaggacaggactctgctattgggtgcagtacccacctctgagtctgaatcttaccccaccccatccttccctccatgtacaggtctcwtctctccctaactctcccttcagccctgggaattctctctccttggcctcatctcatccctgaggcttatcttataggtaactcactctatctcttattccaagtttattatttacatagcttggaatagaagggagttagagaggaaacaagggtgggagaaaaaaaaagaaaagatagttatgtgaatttaatttaggcattaaggaaatacccctgacaaaaactttactatgccagtggggccacatcaaaatggcctcggcaggggaccctgtgctgcttaagtctgtagatcaacccatgatgctgc

SEQ ID NO: 508956 - DNA, 528 bp, Homo sapiens
aaaatccaagagtctcctgttcactagcagaggagagaaggtatgcaacatccttgcagataccttctctctgctcaggagagttaatgaactggactttgagaactcacttccagccaggtagatgcaggacaggactctgctattgggtgcagtacccacctctgagtctgaatcttaccccaccccatccttccctccatgtacaggtctcttctctccctaactctcccttcagccctgggaattctctctccttggcctcatctcatccctgaggcttatcttataggtaactcactctatctcttattccaagtttattatttacatagcttggaatagaagggagttagagaggaaacaagggtgggagaaaaaaaaagaaaagatagttatgtgaatttaatttaggcattaaggaartacccctgacaaaaactttactatgccagtggggccacatcaaaatggcctcggcaggggaccctgtgctgcttaagtctgtagatcaacccatgatgctgc

SEQ ID NO: 508957 - DNA, 577 bp, Homo sapiens
ctgtgccggttgcccacagcccacccacactgtgagaagaagccctcccagctctgatgaatggtgatgaggaagcagcacggagctggctacagagaactcctccgttaaggagcctctctccaaagggccctttggctccaagcctgcccattaatcacctcaaggtaaagtgagggctggctaggataatgtacttyacctccccagggagtctgggtccctaggcagccccggggccagatggggcacagtgaacttccaccctttctgcgcttctccctggggtcacccgaccttggcagggacccttcctctcagttatagaaggcagagtgtgttgtgtggctcagggtccatcctgaccccctaagctgcccagtaccactagaagcagacccagtgccagaagccatgatcttttgatcatctgtttgaaactggctagatggcctattatcagttcatagaattcttgaaatgtaagagtgggatcaacccacacaagggaagctgatagttatagggagaaagatgtaagtagataagcagatagatgggcgaatagacagacgaa

SEQ ID NO: 508958 - DNA, 577 bp, Homo sapiens
ctgtgccggttgcccacagcccacccacactgtgagaagaagccctcccagctctgatgaatggtgatgaggaagcagcacggagctggctacagagaactcctccgttaaggagcctctctccaaagggccctttggctccaagcctgcccattaatcacctcaaggtaaagtgagggctggctaggataatgtacttcacctccccagggagtctgggtccctaggcagccccggggccagatggggcacagtgaacttccaccctytctgcgcttctccctggggtcacccgaccttggcagggacccttcctctcagttatagaaggcagagtgtgttgtgtggctcagggtccatcctgaccccctaagctgcccagtaccactagaagcagacccagtgccagaagccatgatcttttgatcatctgtttgaaactggctagatggcctattatcagttcatagaattcttgaaatgtaagagtgggatcaacccacacaagggaagctgatagttatagggagaaagatgtaagtagataagcagatagatgggcgaatagacagacgaa

SEQ ID NO: 508959 - DNA, 584 bp, Homo sapiens
cttcataggcatgtgtccccaagtaggtggcaatggaggcaggaactcgttgtttctcagcttctccagtccctgcaggcccaacgcagtgtgaacgccttgccacatggagtgtgagtcaagagtgtgaagacacaggattttcatgtagcattgcccagggacattggccaactgcattctctggttctcaccagagaggcagtgacctctttgccctggagagctgcaggctgctgtagtgcccctgtatcaggggcggctgtatgcagactgcctgargtttgatttttaccgtgtgagctcacttgaaagtctaacctctcgttaagtacttctgctgttgccaaacagcagccgtctctatgtgctggtcaaatgatgcctcccccgaaccctcccccctgcttccacacacatcctcagacccatgctaagaggtacatcatgcccgtgtcttcataaagtgacctctcctttgccatttcagtcatccgcaacactctcctttgtggtaggaatatccctcctattgtgggtggtggggggaggggaatatgtgtgagaagtttgtccaggctcac

SEQ ID NO: 508960 - DNA, 614 bp, Homo sapiens
ccttattccagcacttctgtgggatgcgttcttcccattacgtcaaaacttccacccacatgcctgtaaagtagcaaatggagtgtctgtataaaaattctcaggttcacttcatttggcaattatctggttaatttgatcaaccaagctctaagtgtcttactgggatattatgcatttatagctttgtctgcccctagtattatttacttctctatccttcgcaccagcgtggctctgcacatgtgctgcctggaaagccgttagctgtcaaactgccctctttcccctagcggataataagaattcaacttttatttggagcaaaagttcccaagaggtcacacggcccaataacaaaagattatgctttcttattggtttaatagcatctattttgtaattctggatgtactctgttttaattggatttgttaaaggaacaaaagggaatargcaccttacaattaaaataaaatattaagatgattagtttaacagactagaaatgccttgttcatccaccctatgttcaaaacacacaaaccaacctcaagagaagcaaaagtcaaagaaccaaaggcagacctggcccctttgaagctcatgaggtg

SEQ ID NO: 508961 - DNA, 656 bp, Homo sapiens
gctttggctgtagtgggtgtgcccagccccctgtttaccttccccatgaccctggatggtctcctgaaccccacaagcttcagcctgaactcctgtaaagaggatgtaaaagtggctgcttcccaaggtcaggggagggcaatgcgtggcccttggaggctttggttttgacgtgtgtgtgtgtgtgtgtgtgtgtgtgtgtgtgtgtgtgtgtgttggtgggggttggcacaggaggcagcagcatggatgggaccacacaactgaccaaatggggarcctggactccaggtgccagcccagtagaaaccctattcagaccctgcagcctagcgtccttatggaccgtgacccctgcctccctgagtgcaggctttcagttaatttatcctgggggccaagaggacacattgctcctttgagctgcacaggccccctcgtatcatgctggggcatctcctcacatggaattctttctgcacttcacaccctctagttctggtgagggcccactggcgacagcccagagtccactggagcaccccatctgccgcaggacagctcgcagccctgtggcagctttgctgaccgcctatcacctgggaaggtgtgaaatgactgcaaaggggaatgctgagggtcagctctaaggacac

SEQ ID NO: 508962 - DNA, 460 bp, Homo sapiens
agaaacccagccctgaggctggtaccaggcatggggttgcactgggctggtctcaatagcctctaggctccagcaggaagctattgtgtcctggactccatactccaggccagtgagtgtgggcatcagggggcagtggaaatagcccrgcatgggaggaagttgattgggtgggttagaggctgcctctgccacgtgccccctgaggtccatggccaagccccttgctcctcttctctgcctatacttattgtgctggtctacactcactctcctggtaagcccacctagtctcattgctttgaatacagtctatacactaacgattgcccggtgtttggttcttgcccggaccttgctccccaattctggactcacttagcctactgcctacttagcatttcttcttggatgatgataagcatctcaaaccctgtctgtcccaagcccagctcccagc

SEQ ID NO: 508963 - DNA, 473 bp, Homo sapiens
gataataaagaggagaaacccagccctgaggctggtaccaggcatggggttgcactgggctggtctcaatagcctctaggctccagcaggaagctattgtgtcctggactccatactccaggccagtgagtgtgggcatcagggggcagtggaaatagcccagcatgggaggragttgattgggtgggttagaggctgcctctgccacgtgccccctgaggtccatggccaagccccttgctcctcttctctgcctatacttattgtgctggtctacactcactctcctggtaagcccacctagtctcattgctttgaatacagtctatacactaacgattgcccggtgtttggttcttgcccggaccttgctccccaattctggactcacttagcctactgcctacttagcatttcttcttggatgatgataagcatctcaaaccctgtctgtcccaagcccagctcccagc

SEQ ID NO: 508964 - DNA, 403 bp, Homo sapiens
agcctctaggctccagcaggaagctattgtgtcctggactccatactccaggccagtgagtgtgggcatcagggggcagtggaaatagcccagcatgggaggaagttgattgggtgggttagaggctgcctctgccacgtgccccctgaggtccatggccaagccccttgctcctcttctctgcctatacttattgtgctggtctacactcactctcctggtaagcccacctagtctcattgctttgaatacagtctatacactaaygattgcccggtgtttggttcttgcccggaccttgctccccaattctggactcacttagcctactgcctacttagcatttcttcttggatgatgataagcatctcaaaccctgtctgtcccaagcccagctcccagc

SEQ ID NO: 508965 - DNA, 496 bp, Homo sapiens
ctgcaggcaggagaagaggggagtctgtgctgargggcatggcagaggagggaccatgtggatccaggctctgtggtggaagcagagcagatggaacattcttctagattgtatatgtggaccaggcaacgagaaaacccaagggcaggctggaactgctagaggggcctagcacttcccatatcttttccttccttttgcccagcacaaagtctaagtgcctcatgtgcatcatctcatttaatctagtcactccacttcacagatgaaacacccagggcctagtcaaaggcgcatgcctcgactggagccagcatctctctggtgccctttcccaaggacttagctgccatctggcttttccatacaagcttggctttacaatgtcagatggctctcttggccgccagtggctctcttggccacccaggaagctcctgactcatcatgttctgcagatgctggcaggagctgagctagatcctgtgggaaactt

SEQ ID NO: 508966 - DNA, 496 bp, Homo sapiens
ctgcaggcaggagaagaggggagtctgtgctgaagggcatggcagaggagggaccatgtggatccaggctctgtggtggaagcagagcagatggaacattcttctagattgtatatgtggaccaggcaacgagaaaacccaagggcaggctggaactgctagaggggcctagcacttcccatatcttttccttccttttgcccagcacaaagtctaagtrcctcatgtgcatcatctcatttaatctagtcactccacttcacagatgaaacacccagggcctagtcaaaggcgcatgcctcgactggagccagcatctctctggtgccctttcccaaggacttagctgccatctggcttttccatacaagcttggctttacaatgtcagatggctctcttggccgccagtggctctcttggccacccaggaagctcctgactcatcatgttctgcagatgctggcaggagctgagctagatcctgtgggaaactt

SEQ ID NO: 508967 - DNA, 494 bp, Homo sapiens
tgcagatgctggcaggagctgagctagatcctgtgggaaactttcttcctagtccaggtcaagccccatccttatagctcatccctccctgaaaaagaagcatgcatgtgttattagacccagttctaggggctgagatgagttccattatatgatactagtagggagctcagaaactgaaaaattggcagtgaattgcattggcaatgggctgagagttggcgatggggctggcaacagagtagacatgggcgtggttcaattgcacaccttgtgttctagggtttcaggggcctggaaacatcatctagctttcactctctcatctctccgctgataggaagggagaaagggcctgacatcacccttgatrctgggtaacagtgagagaccattggaggcccaagcagaagctggaggcaccaagcaccaggcactaacaaaccggtctgcagacaaccacagggctcaggggccctgcagggtggacagca

SEQ ID NO: 508968 - DNA, 632 bp, Homo sapiens
cacccagtggctgcattgcagcccctgagctcctgctgcaccgtgtgtcctgctgcccgagtgggccccaccctgggttctgaagatgcccttcttaatggagagctcccgatggagggctccaggactgatgctctccctaaggaagggaggcctcagatttggagagggacaccaacaggaccagaggaggactgaggggcactggcaccaataagtggaagggaacagcgtggtaacaaaaaagagccatgccacttgcatgctggagggagtctttttgtgtcagcctaaagcttaggctggtgtccatgtggaacatgacatctttccagtatccctgatccaggaaactgcagtgagacccaggtgacccagctctgtgtcatttggagcccattaaaaagtgaggcagccacatggcggggacattgaccccactccagaccacactcccatctccatacataggatagaaactgttcatcaggaaggaaaaccaaacagaaattygtggtctaggggaggggtctgcattcagcatggccatgctgggctggagtggctgtggggtgtccagatagatgggcatgtagactagtgctttctcaacctttaatgcatgcacaaat

SEQ ID NO: 508969 - DNA, 538 bp, Homo sapiens
ccaaatcttcttctgtgggtcatacccattaacttgccggcaccatctggttggcgtcaygttaggatccattaaggacaaacaggagcttgtggcagaacctttcattgctatgaccgggcaaagtgacagctttgaaaaatgacgcttagcctcattgacccaaatgaatgagtgattgtctctgccctgagggtggaggtttaccacttggtaagccaggccaattacgcttcagaatgccacctccgtgcccctccggctgagtccaggtgatggcaagcacatgtgagcagaggacctcagatcagagcctctgggacctgcagcctctggagtgctggtgatggaatccacaccattgcctgcagcagttggccagggggtaccagcatgtgtggtgggccactttggccccttggggaagtgtccacagagaagaaggcctccagccagatctggacacacagccatccatgagtcagaccaggccccacacaagccaaacctgaggaccaagaccaaggacgtctaagtg

SEQ ID NO: 508970 - DNA, 438 bp, Homo sapiens
aaggtgctgaacatgtgtgtgctgaacaaatcagtgtttcagtggcatcacctcctctctagggtcagctaaaatagcacgcatatgtgcacgttctgaatgcttcataagttaacaagaactttgtgaactaagtagccctgggtatcttttgacaggtaaggaayagattctaggaaattagttgttatggactgaatcttgttccccaaatttcctgtgttgaagccctaactcctaagacctcagaatgtgactctatttgcagatgggtttttttaaagaggtaattaagttaaaatgaggccattagggtgggctctgatccaatttgactggtgttcttctaagaagatgaggacacacacacagagtcaagaccacatgaagacacaaggagaaggcggcatctgcaagccaagttgagagagagaggcc

SEQ ID NO: 508971 - DNA, 574 bp, Homo sapiens
ctgtgagtgccaagggtcaggttgtttctgcccccaaaccctgtgttccatctgccattctgcagctctctctgaagccacttttcttttgttgccacatttcatgctggggatgtaaggagaaacaaaatgacatgcagaagcagccccacctgaggaagagactgggctgaggtttcaaggtagaagacagaaaaatcctagaggaaagggctccttgcccagggaagctatcatactaggtctgcgtgctcggacttccctgggcacagcctcacttcttccagggaaaaacaaactagatcttaagacagagaggcaacatgaatgaaaaccaaggccaacctgctcaagatggtagagaaaacagaccgaggagcctagtgtctgccgcctcaatgaaccactggattggccctgggtctacccagggtctccaggtttaagtgactgagagttgaaattyaccccatgctcagctctcccaagacattctgtggggcaagagttgttcccaccatgatgggaagctcttctataatatgtctattaagataggtgcctttttgtaatc

SEQ ID NO: 508972 - DNA, 648 bp, Homo sapiens
gcagggccagtgattatggagtctggattacaggtggtgtctggattcagagccagtcagtccttcccagatgctcgtgggcagtcccaggcatcgcaaatgcatgctcagaggcagagtctatgctctgatgtgaatgccttgtatccaggtgagcagacaggcagacagcagtcccttcccaagaagtaggcctgggatgccaacagggaaaatagtgaaaagcccttggcatgaattgtttgaggttttggaacaatcccacaccactcagtaggcagtatgagctccaactaaaggggaagttgggggagaagggaactggccccatcctcatcagaggcaggagccctggcttggtgtggagaaacagaagacttgaggccacagaacccaagacttcccaaagatagaaacatggagctgtccctggtgggagagggtgatggaggggaaagaaagaatctcactggaacacctccagggggccccgcacccctctctacagcctcacccccaggttcccagtgtacctctgggtggcatgggatgcagccacaaggctgcaaggctctgcttgggccaggctgtgtgtggrgtggcagcagacccctgagcagagctgtctgctggataggtgaaaatatg

SEQ ID NO: 508973 - DNA, 604 bp, Homo sapiens
tgcaaccctgccccgtggttgcagagatgaatgcgaaagggcagtgtgagccggtctccagggctgctgcagcacaagggaggctgggtggagaaccgggtgtacgatgtgatcccatgtatgattgaagttttttagaaacaaacaacaaaaaaaactatgtaggcatataggcaggcatatgggtaaaacattttctggaacatacactggaaactggtgactgtggacccttcttgggagacccttaggccatatctcatggccttccacgttgtttgcattttatccacgagcaaaacaaggggtcggggcagggataaagaaggccgagatgtggcaggggaattctgtgtgggttgtgaaggaggcccccaagcctgaggctgcatgtcccctggaattcttgaggcagcagcttgttctggcatcacagcggagggacactgactgcaagaacctaaccttcagcaggccagggtggggcargaagagctggatgacagtctccctgtgctgtccgctgagagttgctctgggatttgggaagtctgcagctttcctgaacaccctggtcccgtgaagcccaggcaagccccacctc

SEQ ID NO: 508974 - DNA, 607 bp, Homo sapiens
tgccctcaggtgttcggacgttgataacagagaccctaagtcagcatgcagagcctctgctaggaggttccgtcacatgaacctgggtacctggrcctaaaggctgctgaagctcagatctcttttttttttttgagatggagtcttacttcatcgcccaggctggagtgcaaaggcgcaatctctgctcaccgcaacttccgcctcctgggttcaagcgattctcctgcctcagtctcctgagtagctgggattacaggagtgcaccaccatgcctggctaattttttttgtattttagtagagagggggtttcaccatgttggccaggctggtctcgaactcctgacctcaaatgattctcccgcctcggcctcccaaagtgctgggattacaggcatgagccactgtgcccggcctcagatctcttaaccccactgtggcctttggtatttggctgcctgggttcctgtcctggatccccctgtggaatgatcaacacaactaacatagttgctaacatgagccccagggggcttcctggcttactctccacagtgaaggcacctgatgccatctaccaagatggtgccatgggtcagcccttg

SEQ ID NO: 508975 - DNA, 611 bp, Homo sapiens
tgtaccacacaaagagtgaactctaatgtaaactgggggtgggataaaggtgacagtatgtgagaactctgtactttctgctcgatctttccataaagctaaaactgctcaaaaaataaagtctattattttgttaaatgaaagaaattaacaatgaccatggcacgctcacacaaaaagattatcaaggacatttctctgtcaggaatgaatatttggtcatytcacaaggcaaaaccctgactagcagaggtgttagctgagggcacatggccatagatgccaatagtgacctgctggccacttgcagaaaggagagcctttacatccaaacacattgtttctcttgtattgtcctgtgcatacttatgtatcttaacaactttccttctttcctctccatttatccctctttttaaaacagggcttattgagggtgattaacttaatttttaaatgatatatggcagaatgtcaagagagtatagtgaagaactttgtagaggaatggacataacccagaattcttagacttagagtacatgctgtgattgagaattttttattgtttcattgttcaagagattgtaggtacatgttcaattattaga

SEQ ID NO: 508976 - DNA, 611 bp, Homo sapiens
tgtaccacacaaagagtgaactctaatgtaaactgggggtgggataaaggtgacagtatgtgagaactctgtactttctgctcgatctttccataaagctaaaactgctcaaaaaataaagtctattattttgttaaatgaaagaaattaacaatgaccatggcacgctcacacaaaaagattatcaaggacatttctctgtcaggaatgaatatttggtcatttcacaaggcaaaaccctgactagcagaggtgttagctgagggcacatggccatagatgccaatagtgacctgctggccacttgcagaaaggagagccttkacatccaaacacattgtttctcttgtattgtcctgtgcatacttatgtatcttaacaactttccttctttcctctccatttatccctctttttaaaacagggcttattgagggtgattaacttaatttttaaatgatatatggcagaatgtcaagagagtatagtgaagaactttgtagaggaatggacataacccagaattcttagacttagagtacatgctgtgattgagaattttttattgtttcattgttcaagagattgtaggtacatgttcaattattaga

SEQ ID NO: 508977 - DNA, 611 bp, Homo sapiens
tgtaccacacaaagagtgaactctaatgtaaactgggggtgggataaaggtgacagtatgtgagaactctgtactttctgctcgatctttccataaagctaaaactgctcaaaaaataaagtctattattttgttaaatgaaagaaattaacaatgaccatggcacgctcacacaaaaagattatcaaggacatttctctgtcaggaatgaatatttggtcatttcacaaggcaaaaccctgactagcagaggtgttagctgagggcacatggccatagatgccaatagtgacctgctggccacttgcagaaaggagagcctttacatccaaacacattgtttctcttgtattgtcctgtgcatacttatgtatcttaacaactttccttctttcctctccatttatccctctttttaaaacagggcttattgagggtgattaacttaatttttaaatgatatatggcagaatgtcaagagagtatagtgaagaacttygtagaggaatggacataacccagaattcttagacttagagtacatgctgtgattgagaattttttattgtttcattgttcaagagattgtaggtacatgttcaattattaga

SEQ ID NO: 508978 - DNA, 375 bp, Homo sapiens
cagctcaagcaagctgaggagctcaggtgaggggaccccgtagggggaggcaggcgggtaggtgtgtagatctctgaagtacagcagctcggcggggagaaataagaacgaagctgggccaggggaagggcagaaattgccatggcaggctcatgacacacaaatatttatcagagaacaaggataataataagttctgtgttgcagttgtttcttagagccttgttttctctttttcaaacaagtaattgttgatgtgaaatttacataacacaaaattcaccaaaggagtgggaaccacccagcagcattcagtataatcaaaatggtgtgctatcrccaccccacttacccttagtgagaatcaccttctga

SEQ ID NO: 508979 - DNA, 416 bp, Homo sapiens
ccgcaccctgtgtctaagctgggttgaatttcacatactgtggccaagggaatgcgggcttttggcccaccatagatgccagagagggtgtgcctcctagacattttcatatgttaccacccattacatgctcctgagtattcagtgttacctgggggcagatgatttctgcactttctcagcctcctcaacttgaacatcttcatcctcatcttcgtcattttctataaatacaaaatgttcattcagatatttcccacttcacattctgcaagcacagtcagcccaacgtgcacagagacatgaacatctatgtatggttcagcattgtactgaaaactctcatgttttatctttcacaaaatgcyctggcatggtttcctgctccatcgggcaatgcatttctgatgtggagg

SEQ ID NO: 508980 - DNA, 619 bp, Homo sapiens
tggggcctttgaaaggtaatcaggattaaaagaggttatgagagtggtgtcctcatgctgagattaatgccattacaagaagasagacactagaaagcttgcttgtccgccttccccctggtgcacgaagaaatggtcacatgggcacacagtgaatctacagccacttacaggccataggaagagaccttagaaaggaatccgctttgctaccacctttatcttggacttcccaacttccagaagtgtgagaaatacatttctatagtttaagccacttggtgtatggtatcttgttatggcaacctgaacagacttatacaacaattaagttgcctttccactgatggacttagacacaatctctttcccaaaaaagagctatatttagctacttttcttttgcatattgttccatttgcagccacactatttgtcttcccccacaccacttctatcaccaggaatccattttccttgttttctttttaatatcgggagcctctgctcactgcactgcatagtccttggggctttttttaaactttatttttaacaatcatttgagcagaaagtagccaattcagttctttaatttcccattttattcttggtttga

SEQ ID NO: 508981 - DNA, 599 bp, Homo sapiens
tctaactgtcatgaaatgaaataaatgggaagaagatgaaacatgaaaagaaatctgcttcttaaggcaggccctgggggaatagccctggctggaggtaatgtaaggtctagatggtgtttttagaatctgaagactgcaacaccaaacacaacaagtataagcctaggcaagctgtcagtgcagggcctaaaattaggtatttcaacaagtggatgaatcaatttggggaattgtattagtaaacagaggaagcccrtccagtaaaagggagagtaagcagggatgcaatttaaaactattgaggaaaaatggctaagaaatagtaaaattaacacatggcctaaaatattaagaaattaagcctgttacagaattacggacctggctagtatataggagcattaacaacacaaaaacagattaggtcgggattagcagtgggggtgaaataatcttcagggctgaactactgagctagaaatatttaaatcctccttgcagatgaaaactatagaggacaatttattggttcagcatgaatttctggtcttctgttaagaaatacgctctttcattgaaagtgaacattgaggcag

SEQ ID NO: 508982 - DNA, 599 bp, Homo sapiens
tctaactgtcatgaaatgaaataaatgggaagaagatgaaacatgaaaagaaatctgcttcttaaggcaggccctgggggaatagccctggctggaggtaatgtaaggtctagatggtgtttttagaatctgaagactgcaacaccaaacacaacaagtataagcctaggcaagctgtcagtgcagggcctaaaattaggtatttcaacaagtggatgaatcaatttggggaattgtattagtaaacagaggaagcccatccagtaaaagggagagtaagcagggatgcaatttaaaactattgaggaaaaatggctaagaaatagtaaaattaacacatggcctaaaatattaagaaattaagcctgttacagaattackgacctggctagtatataggagcattaacaacacaaaaacagattaggtcgggattagcagtgggggtgaaataatcttcagggctgaactactgagctagaaatatttaaatcctccttgcagatgaaaactatagaggacaatttattggttcagcatgaatttctggtcttctgttaagaaatacgctctttcattgaaagtgaacattgaggcag

SEQ ID NO: 508983 - DNA, 599 bp, Homo sapiens
tctaactgtcatgaaatgaaataaatgggaagaagatgaaacatgaaaagaaatctgcttcttaaggcaggccctgggggaatagccctggctggaggtaatgtaaggtctagatggtgtttttagaatctgaagactgcaacaccaaacacaacaagtataagcctaggcaagctgtcagtgcagggcctaaaattaggtatttcaacaagtggatgaatcaatttggggaattgtattagtaaacagaggaagcccatccagtaaaagggagagtaagcagggatgcaatttaaaactattgaggaaaaatggctaagaaatagtaaaattaacacatggcctaaaatattaagaaattaagcctgttacagaattacggacctggctagtatataggagcattaacaacacaaaaacagattaggtcgggattagcagtgggggtgaaataatcttcagggctgaactactgagctagaaatatttaaatcctccttgcagatgaraactatagaggacaatttattggttcagcatgaatttctggtcttctgttaagaaatacgctctttcattgaaagtgaacattgaggcag

SEQ ID NO: 508984 - DNA, 607 bp, Homo sapiens
cataaatccagtaggggacatctagaaagctctggtaagttaaaatattttataaaccagaaaaatatgctaacattaattctaagattgtgataaaatcagagaaaaaacataattaatttaaaccaaaattatcaaaccatatacayttatccaaggatttcccatgattaaaaatattactgaactttacttcagtcaaatttttaaaacgcttcaattttgttctgaagcactgaagtcctttgcgttatgcgattctcttacccgcctgccttcccttgcttctcgccttctgacataacaacaaagtccattaattcacctcagaactaaacctctctatagattttttcttctgagctgcagttcagcaagttacctgtgctagtatacataagccaaggaaaacagaagctccattaaacttaagaaattgtttaacctaattcattaattttctccagagataggaaaatgtacaataatttgttcagaagatatttacatacatacaacaagaagtcattatgaaattcggagccagtgatgattttctccctgctttattgtagactttcatatgctatttatttatagtccttat

SEQ ID NO: 508985 - DNA, 579 bp, Homo sapiens
agtaggggacatctagaaagctctggtaagttaaaatattttataaaccagaaaaatatgctaacattaattctaagattgtgataaaatcagagaaaaaacataattaatttaaaccaaaattatcaaaccatatacatttatccaaggatttcccatgattaaaaatattactgaactttacttcagtcaaatttttaaaacgcttcaattttgttctgaagcactgaagtcctttgcgttatgcgattctcttacccgcctgccttcccttgcttctcgccttctgacatarcaacaaagtccattaattcacctcagaactaaacctctctatagattttttcttctgagctgcagttcagcaagttacctgtgctagtatacataagccaaggaaaacagaagctccattaaacttaagaaattgtttaacctaattcattaattttctccagagataggaaaatgtacaataatttgttcagaagatatttacatacatacaacaagaagtcattatgaaattcggagccagtgatgattttctccctgctttattgtagactttcatatgct

SEQ ID NO: 508986 - DNA, 579 bp, Homo sapiens
agtaggggacatctagaaagctctggtaagttaaaatattttataaaccagaaaaatatgctaacattaattctaagattgtgataaaatcagagaaaaaacataattaatttaaaccaaaattatcaaaccatatacatttatccaaggatttcccatgattaaaaatattactgaactttacttcagtcaaatttttaaaacgcttcaattttgttctgaagcactgaagtcctttgcgttatgcgattctcttacccgcctgccttcccttgcttctcgccttctgacataayaacaaagtccattaattcacctcagaactaaacctctctatagattttttcttctgagctgcagttcagcaagttacctgtgctagtatacataagccaaggaaaacagaagctccattaaacttaagaaattgtttaacctaattcattaattttctccagagataggaaaatgtacaataatttgttcagaagatatttacatacatacaacaagaagtcattatgaaattcggagccagtgatgattttctccctgctttattgtagactttcatatgct

SEQ ID NO: 508987 - DNA, 598 bp, Homo sapiens
cagtaggggacatctagaaagctctggtaagttaaaatattttataaaccagaaaaatatgctaacattaattctaagattgtgataaaatcagagaaaaaacataattaatttaaaccaaaattatcaaaccatatacatttatccaaggatttcccatgattaaaaatattactgaactttacttcagtcaaatttttaaaacgcttcaattttgttctgaagcactgaagtcctttgcgttatgcgattctcttacccgcctgccttcccttgcttctcgccttctgacataacaacaaagtccattaattcacctcagaactaaacctctctatagattttttcttctgagctgcagttcagcaagttacctgtgctagtatacataagccaaggaaaacagaagctccattaaacttaagaaattgtttaacctaattcattaattttctccagagataggaaaatgtacaataatttgttcagaagatatttacatacatacaacaagaagtcattatsaaattcggagccagtgatgattttctccctgctttattgtagactttcatatgctatttatttatagtcctta

SEQ ID NO: 508988 - DNA, 480 bp, Homo sapiens
ctgaagtgatcattgggaaataagcccctctttacctttaagtattgcagtataataaaatattataagaattagtgtatccaaaaaactccacaatttatcattactatttaaaagaaataaaaatttacattccaatcttaacgttttggccaagtcattttgattagctgactattatagtgcatgtgtttctcaaagacttttgaaactccaaatattaatgcttggagaatagaatcaattggtttttccaacatacaaaagattctaattcctgagctgtgtcaatttcctttcactgctctttgcaaataagcaccgtgatgcataaatacatgtctttctgataacattttgccaaacaaagttaaaattatacagmaatatacaccaatatcttattttacatcctcctcccccagagctgcaactcattagatcacctttttaattgtcttaggtgatagattataaata

SEQ ID NO: 508989 - DNA, 522 bp, Homo sapiens
tgtaagcaacctttttatctgaaaataaagagatttgtatttctttatcatctttattctattgtttattttccttatctcaccacactgctgagccatccagttaaaaggtaaatgaaagtaatgagcayttttaatcagcttattttacatacaatacattttaatctcttgtaagtttaatgtaagttttgttggatacctgtcattcagattaaggaagtgtattttgtttctacctttagccataaggcactggaccctccccactgccttaaataatgtaaaaacagggaaatacataaagcaatatttttatacataagacaatatatagcacaaaatagtgatgtgcaaaataagggaaaaaaataagacgagtttctttctaatttgctcgtaggccacagaacagggagagggaacagagtctggcaagcttggtgagttgaagagacatacatcagagttcagaaaaaaacaggaaagctaaaatttgtgaagcaaaatattgaagatgat

SEQ ID NO: 508990 - DNA, 581 bp, Homo sapiens
ataaaatgagtgtgatggatgaaatagaatggcaaaaataaataaaagacatgatgtaaatacactacactattttattatttgagaaatcatcagttaaggtttccataaaattcacagcaccaaaaaaatgagacagaatggcttaaaaattgtttaagtaaaggagttttccttaatctaaattcattttacattcccatctttctgtagtcatagctggcatataatgttttgaaaagaaagcaagcctttaaagatcacaaacaaccaatttcacactacaagcagtcataaatagagctaaattccctttagtaatacactatttatctttgtgcttcactgagttcaaagaaaagcattattcagagtgtaagcaattagcttctcattttttttctattccagaaaggatgttatcaaaaaagcatgggattaggaagctacagagctatcagaattattcttagtgtatgaaatttcaatttagcaaaacatgtaaaaccctaaaggcagttaagayccaatacagggaaaccattttgttttcacagtatatttattttagataatcactg

SEQ ID NO: 508991 - DNA, 527 bp, Homo sapiens
ctggcttcacctctcactactaatagaaatgcataatttgtcagatgcattttcttcaaatattctagaattcataaaagcttaaaaatatacagtagctgctgctacattttttcttgattctttagggaaaaaagttaattacacatttacatggcaaagccatatgtttgatagctgacttttggcatcaaaagaaatccctttgataccaataattgctttgtggaggctggagaaaaatctactcagaagactgacaaaagaaatcaataataarctctacatgacgaaagaatttttctccaattttactttgccaaaagcatctttagctaaggaattgttgcaaagcttctctttttgctaggtgatcaatatatttttataaaaatgctgcttatttcaggttttctttaaatatgaaatctaaatcaaatatattctgcctaattttgactcacttatgcttaaaagttactagtgatcaggattttcatgatataacttttcatggttaaatgcaa

SEQ ID NO: 508992 - DNA, 547 bp, Homo sapiens
cctctgtttccctggggcatataataaggagagtcatcatctctatactagggtatcctgaggattaaacaaggtcatgtatataaagtgcttagcataattccagcagcaaataaaatgctccaaacttattaaagttctaatgtgtctaggggcagggtgcagcagctcacacctgtgatcccaacactttggaaggctgaggcaggaggattgcttgagcccaggaatttgagatcascctggccaatatagtgagacctcatctctttttaataaagaaagaaatttttatataaaaaataatacgtctaggagtgaggatgcatttttatggggcatttttctcccttaaggacttttatccctaggactccccaaaagatcccagaatttgttctcctaaaagatgaagatgtatggaaaataaataccaatcaaatctcccattggcaactaagatcccccttgagcctgcaggcagtgctccatcctaccctgcacctgcctgaacttgatgcagccagattcactgggggggcatgaa

SEQ ID NO: 508993 - DNA, 513 bp, Homo sapiens
ctatactagggtatcctgaggattaaacaaggtcatgtatataaagtgcttagcataattccagcagcaaataaaatgctccaaacttattaaagttctaatgtgtctaggggcagggtgcagcagctcacacctgtgatcccaacactttggaaggctgaggcaggaggattgcttgagcccaggaatttgagatcaccctggccaatatagtgagacctcatctctttttaataaagaaagaaatttttatataaaaaataatacgtctaggagtgaggatgcatttttatggggcatttttctcccttaaggacttttatccctaggactccccaaaagatcccagaatttgttctcctaaaagatgaagatgtatggaaaataaataccaatcaaatctcccattggcaactaagatcccccttgagcctgcaggcagtgctccatcctaccctgcacctgcctgarcttgatgcagccagattcactgggggggcatgaagctctgct

SEQ ID NO: 508994 - DNA, 513 bp, Homo sapiens
ctatactagggtatcctgaggattaaacaaggtcatgtatataaagtgcttagcataattccagcagcaaataaaatgctccaaacttattaaagttctaatgtgtctaggggcagggtgcagcagctcacacctgtgatcccaacactttggaaggctgaggcaggaggattgcttgagcccaggaatttgagatcaccctggccaatatagtgagacctcatctctttttaataaagaaagaaatttttatataaaaaataatacgtctaggagtgaggatgcatttttatggggcatttttctcccttaaggacttttatccctaggactccccaaaagatcccagaatttgttctcctaaaagatgaagatgtatggaaaataaataccaatcaaatctcccattggcaactaagatcccccttgagcctgcaggcagtgctccatcctaccctgcacctgcctgaacytgatgcagccagattcactgggggggcatgaagctctgct

SEQ ID NO: 508995 - DNA, 346 bp, Homo sapiens
ctcagcctcccaagtagctgggactacaggtgagagccaccatacctactaatacatacatactaaaattagtacatacaaaattagtacacacatactaatatgtttattttttgtagagtcgggggatctcactatgttgcccaggctagtcttgaacwcctgggctcaagcaatcctcccacctcaccctcgcagactactgggattacaggtaggagcggctgcacccagccatcagtggtgtagtttgatgggtaaaagcaagcaagcgtgcatttttgacatcaagcaggtgagcgtttgcatctcaattctcccacttctgacctttgatatattgctt

SEQ ID NO: 508996 - DNA, 350 bp, Homo sapiens
ggatctcactatgttgcccaggctagtcttgaactcctgggctcaagcaatcctcccacctcaccctcgcagaytactgggattacaggtaggagcggctgcacccagccatcagtggtgtagtttgatgggtaaaagcaagcaagcgtgcatttttgacatcaagcaggtgagcgtttgcatctcaattctcccacttctgacctttgatatattgcttcacctccctgagcctaaaatgggaataccaataggtacctctcagggttatcaggagagtcgaatgcagcaacaaacaaaatctcccagcacagtgctctgcccacagaaggggctgtgtaaatgatact

SEQ ID NO: 508997 - DNA, 541 bp, Homo sapiens
acctgcacacgctcacacattgtacaaggtgtgggtgaagtggtggctctgtcacttaggaggacttcctgttcccaaggccagaacattctataaaaatcattaaggagttagaggttctctgtttgctcaccctcggcaagttcctcacccagcaagactatgttgtgaagtcctacccttgcgtctgccgaggggacccccccccccaccagcccagcatctggaagaagcctgactctccctttggagtgccagttcctcttgatttctagttccgacatgtccaaaatggaaggtgcttatctccaaaccccatggctcagcctggcgctcacttccctcgcctttcatcagggcttgggcaggctccccaagtaggcaggagggggtgaaacaaaggtcaggtgagggctgaagccaaaacagtgtggagagaaaagggtgcccctgccactgccccacytcagtcagagctggcacatgagttaaacagattaggaaaacttcacgcagagactgatgggtacagaggcatgaa

SEQ ID NO: 508998 - DNA, 683 bp, Homo sapiens
agaaatacagtctcagccctgcctcagatctatggaatacaaatctgcactttaaaaggatccccaattgattcataagcacattcaaagtaaaacaaggtcgaccaggtatggtggctcacgcctataatcccggcactttggggaggctgaggcaggaggaatgcttgagcccaggagctcaagagctgcctgggcaacacagcaaaacctggtctcaagaaaaagaaaaaaaaaaggaaggaaggaagggaggaaggaaggaaggacrgacggaaggaaaacaaagtaatgtctttggtgaaaagaactgtgaagtaaataaaaaagggacagccggacacagtggctcacacctgcaaccctagcactttgggaggctgggggggggggggtagatcaccagaggtcaggagttcgagaccagcctggccaacacggtgaaacttcgtctccactaaaaatacaaaaattagccaggtgtggtggcacacgcctcccagctactcggaaggctgagacaggagaattgctggaacctaggaggcggaggttgcagtgagccaagatcatgtcactgcactccagcctgggcaacagagtgagactccgtctaaaaaaaataaaataaaatacaagaaggtgatattgcagtgattgtgaggaggcactttacatagaac

SEQ ID NO: 508999 - DNA, 683 bp, Homo sapiens
agaaatacagtctcagccctgcctcagatctatggaatacaaatctgcactttaaaaggatccccaattgattcataagcacattcaaagtaaaacaaggtcgaccaggtatggtggctcacgcctataatcccggcactttggggaggctgaggcaggaggaatgcttgagcccaggagctcaagagctgcctgggcaacacagcaaaacctggtctcaagaaaaagaaaaaaaaaaggaaggaaggaagggaggaaggaaggaaggacggacggaaggaaaacaaagtaatgtctttggtgaaaagaactgtgaagtaaataaaaaagggacagcyggacacagtggctcacacctgcaaccctagcactttgggaggctgggggggggggggtagatcaccagaggtcaggagttcgagaccagcctggccaacacggtgaaacttcgtctccactaaaaatacaaaaattagccaggtgtggtggcacacgcctcccagctactcggaaggctgagacaggagaattgctggaacctaggaggcggaggttgcagtgagccaagatcatgtcactgcactccagcctgggcaacagagtgagactccgtctaaaaaaaataaaataaaatacaagaaggtgatattgcagtgattgtgaggaggcactttacatagaac

SEQ ID NO: 509000 - DNA, 568 bp, Homo sapiens
ggtggctcacgcctataatcccggcactttggggaggctgaggcaggaggaatgcttgagcccaggagctcaagagctgcctgggcaacacagcaaaacctggtctcaagaaaaagaaaaaaaaaaggaaggaaggaagggaggaaggaaggaaggacggacggaaggaaaacaaagtaatgtctttggtgaaaagaactgtgaagtaaataaaaaagggacagccggacacagtggctcacacctgcaacccyagcactttgggaggctgggggggggggggtagatcaccagaggtcaggagttcgagaccagcctggccaacacggtgaaacttcgtctccactaaaaatacaaaaattagccaggtgtggtggcacacgcctcccagctactcggaaggctgagacaggagaattgctggaacctaggaggcggaggttgcagtgagccaagatcatgtcactgcactccagcctgggcaacagagtgagactccgtctaaaaaaaataaaataaaatacaagaaggtgatattgcagtgattgtgaggaggcactttacatag

SEQ ID NO: 509001 - DNA, 574 bp, Homo sapiens
ctgcctcttgtaacgatggaaacctctgtttgagcttaaaaattagtggtttcaattagccgggcgtgctgaagcatgcctgtaatcccagctactctggaggctgaggcaggagaatcacttgaacccaggaggtggaggttacagtgagccgagatcatgctattgcactccagccggggcaaaaagagtgaaactctgtctcaaaaaaaaaaaaaaaaaaaaattagtggtttccatttgcaacgtctgctattggaacaaactgcaatttactaatttattaggcagtagtactctagagatttaacaaaaaatgagcatgtccgttactattccaggttggcaactgagctctcttgagagagcttctcactaaaggctcactaagatgatgggctctgagtacacctcatctagagccaggaaatgatctcaagggatatagatggggcaaaggccttcagacttgayctcctgttgtcagatttcttctcaggatttcacttgtttttgcattttctgtttgcttttctaagcctcattagacagttccttaaacattcattcccag

SEQ ID NO: 509002 - DNA, 579 bp, Homo sapiens
tatagttggtgaagtagtagttggtagttggggaaggctgcagctcttaattttctctccacatggcatctcaatgtgatttctccacataggctagtttgaacttccacctagcatagtatctaactttgaccaaagaatgagtgttccagagagaaaaagagaaacagaaagagagagaaagggagggaaggagagagaaagagagagagagaagggagaaagtaggtagaagtcattgccgtttgtgacctagcctgggaaatagtcacattgtcattattaattctattaagcaaagtggttatgaaagtacccctgcttccagtaaatggcacataagctcatctcttgatgaaagagtttcaatgtcacactgtaagaagaacgtgtggaatcaaataaatgttgatgcttctatctttggaaaatactatctaccacaatccattctctgaccacgataatcctmcctcttcatataaaaaaaaaaatactcatttgtctcccccaaaaccttgagtctcatctcaaagatgcatcacttcaaaatccaggttcttagcattcaaatcatgc

SEQ ID NO: 509003 - DNA, 425 bp, Homo sapiens
tttaagcattccaaagaatcttgcttataaactctgttttctaaaacaacgatatctgccaccagggaggcaaagtcatctttcagcatttaccctgaaatatttacagaacagatttgaaggaatggaagggaaaagctatttccagaagcttatttccctcacttatttaatacgactttcccccaaagatatttcccaaccagttaattgctaaagggaccagattttaagaaaaacatattttctacagatgaagttattcccttccttccccagatctttcatgtgtatcaaagcacaatatgttttttgtgttactattgtctcctgctccctccttttctttagggaaaggagattatggccaaatagcaatatgttagaagataaatrtaataatgagatgtatgcctctgcttcat

SEQ ID NO: 509004 - DNA, 584 bp, Homo sapiens
gtaatgagtactgcataattttttgtaggttttactaaagattttgcaggctctaggaagggttgcrtcacacatggcaatccatcattttatttgcactctttccccttctctcttttccatatcttcttccggattctcccttgagtttccaatacttttttctcagttacacggagcaacttctctctttctacaaagttttatcaccacccaatgccaaggtccatgaggcttagctcccatgtgggcttatcaaaacatttttttcaacaaaagcaactcttctcataagcagaattctagctgctacagaataattactttatcgttgctatgacaaaactttagcattagaaggaaatactaaatggtttcatatttcattcatgaccctctccagaaaccagaaaaaaactctgaaatttcagattttttaagcttttagtttgtaaatttattatgtgtattttaaagcttatcttttagtctaagtttttattcaagcccactacaaggaactgagcaacatggtcagtttgaacacttgtatgccggtggcattgaacaatgagtttcatcag

SEQ ID NO: 509005 - DNA, 584 bp, Homo sapiens
gtaatgagtactgcataattttttgtaggttttactaaagattttgcaggctctaggaagggttgcgtcacacatggcaatccatcattttatttgcactctttccccttctctcttttccatatcttcttccggattctcccttgagtttccaatacttttttctcagttacacggagcaacttctctctttctacaaagttttatcaccacccaatgccaaggyccatgaggcttagctcccatgtgggcttatcaaaacatttttttcaacaaaagcaactcttctcataagcagaattctagctgctacagaataattactttatcgttgctatgacaaaactttagcattagaaggaaatactaaatggtttcatatttcattcatgaccctctccagaaaccagaaaaaaactctgaaatttcagattttttaagcttttagtttgtaaatttattatgtgtattttaaagcttatcttttagtctaagtttttattcaagcccactacaaggaactgagcaacatggtcagtttgaacacttgtatgccggtggcattgaacaatgagtttcatcag

SEQ ID NO: 509006 - DNA, 477 bp, Homo sapiens
ctgtctgaacgaattctcttgaaaagattggtcctgagcttayaggcctctgtttgtgtgtacatctaaaaataacctggagaattatactgctaataggaaggaagatgccacacattttcttctgtttttggcctttgcctgcttttctataagatagcttgatttttatatcaattcatcatgtctattttatgttttgtagatatttttgccagtccatcatttgtcttaactttgcttatggtatcatttgctcaatcagaacttaaaaaaaaagcaaaattttaatctagtcaagtttatccatctttatttatagttaagaatgtcttcctcacacatggtgaaacaaactttctctgaaatttctttgaatattttcactatgttttttcatttatgtctttaatcaatctcagatggttttttgcatgagctgacataaataaattttcaaaaacatgaaaagatgcc

SEQ ID NO: 509007 - DNA, 477 bp, Homo sapiens
ctgtctgaacgaattctcttgaaaagattggtcctgagcttacaggcctctgtttgtgtgtacatctaaaaataacctggagaattatactgctaataggaaggaagatgccacacattttcttctgtttttggcctttgcctgcttttctataagatagcttgatttttatatcaattcatcatgtctattttatgttttgtagatatttttgccagtccatcatttgtcttaactttgcttatggtatcatttgctcaatcagaacttaaaaaaaaagcaaaattttaatctagtcaartttatccatctttatttatagttaagaatgtcttcctcacacatggtgaaacaaactttctctgaaatttctttgaatattttcactatgttttttcatttatgtctttaatcaatctcagatggttttttgcatgagctgacataaataaattttcaaaaacatgaaaagatgcc

SEQ ID NO: 509008 - DNA, 552 bp, Homo sapiens
atggtatctttccactactaaaggtcatttatcaatccagtttttttataaaggttttcttttcagtttggtgatggttatttttctcacttctgcccttggcttttctcttatcccaccatgcagaaggagctggtgggcttttattgktctgtcttccaccattattggagaatattactctcaatcccaacattcctgggagtaaattcgtcttccctcacaacctggtcttccttgccttctatatctccacagctcctgctgctgtaggattgtattcagacaagccctggttggttgagttattgttactgttccaacatcatgacacctgcagtcaaaagagggcccaagacatttattaatgtgcacctctgaagaaatagcaccagagtgtttttcaaatgcctataagctttacttgagaattgactgtttattccaaactaaggttctttctttgattcttcaaggtttgagagatcatgttagagctcacgttagattgctccatgacacattgttcttatctaggatatgctgctgctc

SEQ ID NO: 509009 - DNA, 499 bp, Homo sapiens
ttctcacttctgcccttggcttttctcttatcccaccatgcagaaggagctggtgggcttttattgttctgtcttccaccattattggagaatattactctcaatcccaacattcctgggagtaaattcgtcttccctcacaacctggtcttccttgccttctatatctccacagctcctgctgctgtaggattgtattcagasaagccctggttggttgagttattgttactgttccaacatcatgacacctgcagtcaaaagagggcccaagacatttattaatgtgcacctctgaagaaatagcaccagagtgtttttcaaatgcctataagctttacttgagaattgactgtttattccaaactaaggttctttctttgattcttcaaggtttgagagatcatgttagagctcacgttagattgctccatgacacattgttcttatctaggatatgctgctgctcaaccttctatgaaactgagttttgagcagc

SEQ ID NO: 509010 - DNA, 467 bp, Homo sapiens
cagcctgaccagaacccaaaataggatggaatttggatagctgaggagaaagtagaaaattctacaaggaattctttagaaaagaaataaatttaacatgtttgagggtagaagtgatcagacttaccaataaataaataakatgtcatgctatagagtgtatccattcatttgttcaacaaatatttataaatatttacataaatattgagcatatgccttgtgccagttatggttctgggaactggggagacagcagtgaacaaaacagacaaaattcctgccttgatggagctttcattctacttggggggagacaaaacaaaagaaaaatatagaatgtgtcaggtaggaataactggtatggagaaaaataaatcaaggaagggagaaatgcctgtcaggaaaggccttactgtgggtttaaggaatggaaaaactaacttatacatgttctcacagccctg

SEQ ID NO: 509011 - DNA, 467 bp, Homo sapiens
cagcctgaccagaacccaaaataggatggaatttggatagctgaggagaaagtagaaaattctacaaggaattctttagaaaagaaataaatttaacatgtttgagggtagaagtgatcagacttaccaataaataaataatatgtcatgctakagagtgtatccattcatttgttcaacaaatatttataaatatttacataaatattgagcatatgccttgtgccagttatggttctgggaactggggagacagcagtgaacaaaacagacaaaattcctgccttgatggagctttcattctacttggggggagacaaaacaaaagaaaaatatagaatgtgtcaggtaggaataactggtatggagaaaaataaatcaaggaagggagaaatgcctgtcaggaaaggccttactgtgggtttaaggaatggaaaaactaacttatacatgttctcacagccctg

SEQ ID NO: 509012 - DNA, 680 bp, Homo sapiens
ccatatttgtcaaatttcacagtctatgattattttattatatgctagactgcctcccaatacatacagacaaaaattttagcttactagctatccaaatgatttagaatatgttagaaacagtttattaaacaaatgcccattccagagaaattctgatgtagtcatagtgccaactatgcttgtattttccttgggctttggcctgtttacaaaaaacagagttcacatagcagtcccgagacggctttaaaaggcctgcttgcaaggctagccgtggctggtgtctgggaacccagatttccggaaggttcccaccattctcagactaatgagagcagctcaccatgtttaaactgtttatgcacacagtgcagtttatgctgaatccgctttccttctgtgagcctgggattttggtacatgccgggcagagggtgcctccatgaccagtcccagtaaaaacctgcccacggagtctcttacgagcttccctggcagaacacatttcacacatgctgtcataactcactgccacaggaatggactgtcctgtggcagacacacacaggagaggtcttggaagcttgtgcctggtttcctgcagacttcaccccacatgtcttttccttttgctgactttgctstagttcctctcactctagtaaatcttacttgtg

SEQ ID NO: 509013 - DNA, 649 bp, Homo sapiens
gtaaacattgaaatgactcaaacaggacagtaggagttaactcattattgaaaagattgtcaacattgcatttagtttcataatcaattaaccaagttagctgaggacaatgagccctaagaatcacaaatgacacatttaatttataaaacttgggaaattttttcacttttaactttagttaaatgtcagattttttaaatttaaggattaattttactttcagrtcttcgaagaagctttgacattatctgaagcttcctatgaggtgaacttcgaaaagtagattgttgttccagaatctatccttttttttgttcctttggtagttggtcccttgggatatctgcttactcatgaaacaactgaaaactgaaagttcttagttgatatgaaggactaaatataaattttttaccacatgtgtttgtcagagtgatgtgttaaagtattatctgagatgaaaggatactgaagctttacccagagaagtaagaatgttaatccagacattaaaattaacttcaattaaataaatgcagcattggatattaaaaatgtaaacatcaaaaagaaagctttgcaaacaattaattactaatgtataacaacacaaagagatttctaatgaagtacaggacaaatttta

SEQ ID NO: 509014 - DNA, 649 bp, Homo sapiens
gtaaacattgaaatgactcaaacaggacagtaggagttaactcattattgaaaagattgtcaacattgcatttagtttcataatcaattaaccaagttagctgaggacaatgagccctaagaatcacaaatgacacatttaatttataaaacttgggaaattttttcacttttaactttagttaaatgtcagattttttaaatttaaggattaattttactttcagatcttcgaagaagctttgacattatctgaagcttcctatgaggtgaacttcgaaaagtagattgttgttccagaatctatccttttttttgttcctttggtagttggtcccttgggatatctgcttactcatgaaacaactgaaaactgaaagttcttagttgatatgaaggactaaatataaattttttaccacatgtgtttgtcagrgtgatgtgttaaagtattatctgagatgaaaggatactgaagctttacccagagaagtaagaatgttaatccagacattaaaattaacttcaattaaataaatgcagcattggatattaaaaatgtaaacatcaaaaagaaagctttgcaaacaattaattactaatgtataacaacacaaagagatttctaatgaagtacaggacaaatttta

SEQ ID NO: 509015 - DNA, 605 bp, Homo sapiens
gagataacattaggagaaatacctaatgtagatgacgggctgatggatgcagcaaaccactatggcacgtgtatacctacgtaacaaaattgcacrttctgcacatgtaacccagaacttgaagtataatttaaaaaaactaattaaaaaattttaaaaatacattgatgttaatattctgatattgatacaattgttaggctttgtaaagtgttaaccttagcagaaatgggttgagtacaatatttttgttggtctaaaatttgtacagttaattttttcttaaaaaatgctcattgaaaataattaataaaaataggtaatcagttcttcaagaatgaagagaaattgagtgatctgaataagatatcatccttataacaaaggggactattcaaatatattccatttctaactttaatttaacagttaacaagacacttgcctaattagacatcaagtaaatattaaattatgagctagccaagttcgtgattaggaacaaaaatccaatatcctatttaaattaaccacagttaaatccactttatttgttattattcaaaaactagagcttgcagtgccatgtaggcagggcacctcaa

SEQ ID NO: 509016 - DNA, 605 bp, Homo sapiens
gagataacattaggagaaatacctaatgtagatgacgggctgatggatgcagcaaaccactatggcacgtgtatacctacgtaacaaaattgcacattctgcacatgtaacccagaacttgaagtataatttaaaaaaactaattaaaaaattttaaaaatacattgatgttaatattctgatattgatacaattgttaggctttgtaaagtgttaaccttagcagaaatgggttgagtacaatatttttgttggtctaaaatttgtacagttaattttttcttaaaaaatgctcattgaaaataattaataaaaataggtaatcagttcttcaagaatgaagagaaattgagtgatctgaataagatatcatccttataacaaaggggactattcaaatatattccatttctaactttaatttaacagttaacaagacacttgcctaattagacatcaagtaaatattaaattatgagctagccaagttcgtgattaggaacaaaaatccaatatcctayttaaattaaccacagttaaatccactttatttgttattattcaaaaactagagcttgcagtgccatgtaggcagggcacctcaa

SEQ ID NO: 509017 - DNA, 612 bp, Homo sapiens
cttcttgttctcattccacttgccaataatgcctaggagaaggagaaaaaaattatagagatacaaagtacaccttttaatgtatttagcacttttattctaaagtggatataaaataatctagcctcttaatggagcatatcctgatatgataaccttcatttggtgtacagaataagacatatttgagaagatcatgacttatagaggtagagcaagttttctaatcttatttttcttaaagaaaatgccttggtcaattttagctgttagatttctgtagaaattttaggattgtcacagccatttccatgaaacatcatgctgtgtttttgaatgaaaattgactgactctagttagggggtggccatataaccaggcttgcctggaacattcaaaatttrctctattgtcctggtgtaagtatttatagcatcacatttcactttttagaagttacacagaatataataaatcatactgataattcatctaattactacatagtaataaatcaaaataatttatagattattttgacaatagttcacatcttcacaaaattggtgttctaaaacatgacatcatatttctcataactgagtattcag

SEQ ID NO: 509018 - DNA, 414 bp, Homo sapiens
tgtgtaaaactttccatagttgaaaatcactgccttcaagcatacatctgggacaaaacccttaaaaaatgagctggggattgagcttaccaaatccctagggcctaaaacttactggcctcccttaaaccttgggtctaggtttacaggttagatgtttccactgaaatcctttatacttttgactataggggaaattctatcagacctgaactcactatttaggctttgttgttggctatctttaatgggaaaggagacagcattcagatctccttagagttatgtcagaacagcaggttagtaggaactgcccacagggtgggacagaagttgtaagagctacctcctgggaaacaaaaatcatgcaacactctttgccctcctaggakgtcactttgcatttagttcagg

SEQ ID NO: 509019 - DNA, 540 bp, Homo sapiens
caaggtggtttctctcttccacacagtgattcttcctttgttgaatcctgtcatttatacccttcataaccaggaagtgaaagcttccatgaaaaaggtgtttaataaacacatagcctgaaaaagggcaaaaaaaaaaaaaagaataaaaatagactgtagaattttatctgaaattgatttgtttatttccaagtactgcaatcattgaatacctcccatttgtcaggactattctaggaactgaagaaagaaagtattgaggcagataaggtctatctgctctccaagagatacaacctagtaaaaatagaccgcygttaaggtagaaaataaacagcatagtttcaggaagagatactgctctgtaaaaactaaaacgaaaagtgaaatgataaactgtgactctggattgggagtaaccaatttgtgtttaataataaaaaaaggccttgaagagctgacattttggatcatatctggataaactgaagaagccaaacatgcaaacatttgtggctatagtatggtagacagagg

SEQ ID NO: 509020 - DNA, 540 bp, Homo sapiens
caaggtggtttctctcttccacacagtgattcttcctttgttgaatcctgtcatttatacccttcataaccaggaagtgaaagcttccatgaaaaaggtgtttaataaacacatagcctgaaaaagggcaaaaaaaaaaaaaagaataaaaatagactgtagaattttatctgaaattgatttgtttatttccaagtactgcaatcattgaatacctcccatttgtcaggactattctaggaactgaagaaagaaagtattgaggcagataaggtctatctgctctccaagagatacaacctagtaaaaatagaccgccgttaaggtagaaaataaacagcatagtttcaggaagagatactgctctgtaaaaactaaaacgaaaagtgaaatgataaactgtgactctggattgggagtaaccaatttgtgtttaataatmaaaaaaggccttgaagagctgacattttggatcatatctggataaactgaagaagccaaacatgcaaacatttgtggctatagtatggtagacagagg

SEQ ID NO: 509021 - DNA, 533 bp, Homo sapiens
aactgataccaatgtttataatgccatgatttctaggcaaagtaatggatgtcatttaaaaagccctcgtttggrcatctatctgggtttaagttcttcattgtgcaatttttttaaccgtgagatcttgggaaggtcatcttctttagcctgagttattttatctcactgtgttgatttatgaatataatatgagaatgatagcaataagtagcatattgaagtctgactaaaccaaaactaaacaaggaaaaaatgtagatattaagaggggctttagtttctaagaagtaaatatataatatagatcctctgtccctgcctttgaaatgagttgctggggtaaaggtagctatgttaatgtaagaaattactagaaaagaatttatgaaggcttcatttcagccagctgtcaaagccccagattggtatatggtaagactctttgtaaaagaacctctcatcccagcaggtgtgggaactagacagagctagtctcctgcaaaatcgtgaagttggtgaagatttcttct

SEQ ID NO: 509022 - DNA, 533 bp, Homo sapiens
aactgataccaatgtttataatgccatgatttctaggcaaagtaatggatgtcatttaaaaagccctcgtttgggcatctatctgggtttaagttcttcattgtgcaatttttttaaccgtgagatcttgggaaggtcatcttcyttagcctgagttattttatctcactgtgttgatttatgaatataatatgagaatgatagcaataagtagcatattgaagtctgactaaaccaaaactaaacaaggaaaaaatgtagatattaagaggggctttagtttctaagaagtaaatatataatatagatcctctgtccctgcctttgaaatgagttgctggggtaaaggtagctatgttaatgtaagaaattactagaaaagaatttatgaaggcttcatttcagccagctgtcaaagccccagattggtatatggtaagactctttgtaaaagaacctctcatcccagcaggtgtgggaactagacagagctagtctcctgcaaaatcgtgaagttggtgaagatttcttct

SEQ ID NO: 509023 - DNA, 533 bp, Homo sapiens
aactgataccaatgtttataatgccatgatttctaggcaaagtaatggatgtcatttaaaaagccctcgtttgggcatctatctgggtttaagttcttcattgtgcaatttttttaaccgtgagatcttgggaaggtcatcttctttagcctgagttattttatctcactgtgttgatttatgaatataatatgagaatgatagcaataagtagcatattgaagtctgactaaaccaaaactaaacaaggaaaaaatgtagatattaagaggggctttastttctaagaagtaaatatataatatagatcctctgtccctgcctttgaaatgagttgctggggtaaaggtagctatgttaatgtaagaaattactagaaaagaatttatgaaggcttcatttcagccagctgtcaaagccccagattggtatatggtaagactctttgtaaaagaacctctcatcccagcaggtgtgggaactagacagagctagtctcctgcaaaatcgtgaagttggtgaagatttcttct

SEQ ID NO: 509024 - DNA, 607 bp, Homo sapiens
tttagaattaaactccatactacgccacctctgccttcagggaatgcatagtactgtgatggagactggtagatacatgaaaaagtggcaatgcaacatggcaatgcaacatagcgatgtgtgagcccaaaagagtgcaagagctggctaggaatgtcttcttcaagtttccgaactgagccccgatattgaacatagagttacttacaaacaatgattctctcttcctatgatatataattaaaatgacacctgcataatgcctctattgtctccactcatatgcaattctcaacaattaatagacaccaagaataaaagcacagaggaagatggagatgyctcgatttaaaaagaagaaaatcttaagtgttattaaaactaaaaaatagctaggaaactgaggtaggtctcttgaaacacaagtcccattatcttttatgatatcctcctggtcacagataaattaatttttttagctttaaataaaaagccaccacattgcccttttttactcttctatcttgttttccattctgaatctgagtgcctggcttctctgcagatattgttgtaatcaccatactcaattagcaagaaagaccta

SEQ ID NO: 509025 - DNA, 607 bp, Homo sapiens
tttagaattaaactccatactacgccacctctgccttcagggaatgcatagtactgtgatggagactggtagatacatgaaaaagtggcaatgcaacatggcaatgcaacatagcgatgtgtgagcccaaaagagtgcaagagctggctaggaatgtcttcttcaagtttccgaactgagccccgatattgaacatagagttacttacaaacaatgattctctcttcctatgatatataattaaaatgacacctgcataatgcctctattgtctccactcatatgcaattctcaacaattaatagacaccaagaataaaagcacagaggaagatggagatgtctcgatttaaaaagaagaaaatcttaagtgttattaaaactaaaaaatagctaggaaactgaggtaggtctcttgaaacacaagtcccattatcttttatgatatcctcctggtcayagataaattaatttttttagctttaaataaaaagccaccacattgcccttttttactcttctatcttgttttccattctgaatctgagtgcctggcttctctgcagatattgttgtaatcaccatactcaattagcaagaaagaccta

SEQ ID NO: 509026 - DNA, 651 bp, Homo sapiens
ctgtttctgttgctgctgaaagcaggtagtgtgctgattgcaattgtgatgaaaaggcagaaaaagtgtcctacgacaagtaaaatccattattttgaaaataatacctcaagataataattttgcccattccccaaaagctacaatggttccctacttgtttgtatctggcttttcttttgaaggaaaaaaaatgattcttaataaggaactctctataaatattcatacttttaaagaccaatgcaaaaattccctaattaccattgaaatrgtttgaggaatctgttaactctgttttctattcatacactttagctaaataaggattatctttaaataaattgaattattttcttcaaaattattattattaatttctatattttttgaacacctatcatgtctaagtaaatttgcaaagtgcttaaaatatgttatctcatttaatacatgaaacaacagctatatgaagaaggtactgctatcctcattttatggtgaaggaaactgacgttcaaagagaacttgtacaagatttcacaatgaataagtaggatttgaatcttaatagatctgatcccaaagccagcgctggcattcattagggaaagtgccaccctcaactctttgtttctgctcatataaata

SEQ ID NO: 509027 - DNA, 528 bp, Homo sapiens
gctgtcctgtgcattttagaatgttcagcagcatccccagctctgcccatgagatgtcagtacctccattcctctccctgcccacctaagccccagtcctaacaatcaaaaatgtctccagacattgcccattgtaccctgggaaggaagtcaacattactctggctgacaaccactgattccaatgaaccatcctagacccatttaaacagatcttaggtagtttcattgctttctgtcaaacattgtctttgggtagcaagggtgtcatctctagcctagggtgcatctatagggctctgcagagccttaaggcatgagtgggggcctgtaggggtgtgcaggggaaggaggagggtggaagtgggaggggaaagaaaaaggagccagaaatgttagcaaggcagctctgggacagtgtttgcttttgctccctggagagggtcaccgggggaaccattaggtctyttgtccacaagctggagagacccttcctttgatacacacagggcacagtcagccttaact

SEQ ID NO: 509028 - DNA, 390 bp, Homo sapiens
cttcaatctccagccccttgtccctctcccctccccagaagtcagtgggtggggctaaaagttccaaccctctaatcatgcctagttctccttttttttttttttagttgtttatttttcttggcatgcagaataagagctattgtctaggtctttctggtgacctcttcatcctgaactacctagaagcctccagccactagtcatttcattagtatacaaaagacactcttgccattgtggagatttcaggagtttcgggagccatgtgccaggaaccagggacaaaacccaaatatttattttttctcataccacaatgattgacattgrtctgtaattttttctgcttgtaatatcctagtccagtttttctattaaggttatggc

SEQ ID NO: 509029 - DNA, 592 bp, Homo sapiens
ttccctagaggagaaaccctgaagcaaagaaaaaatcaaacaagctgtttgggatcaacctcagcaccttaacctcagcaacacagcatccaaacccatgccgctacagagtggaacaccttaggagaatctgttttcagtatataaagaatataagcaaaacagccaaaatcggatgggcttgaaactcaaaaatccataaactctgacaccaggcctcactcagttctccttctgcttctgagaatttctgatacctggcaggcaaggaagctaaaggaagaggaggaagaacatttctttctaactcttcggtttccagaatctcattcacatctcctacctcccatgacccataggcagcacagggagctgtacaggaggaaactgaggyagcagagttaatcccagtatgtagcagtcagaccccacttctgtgtgctggggaatgaggctaccatttcccagtgatgagctggggcaagttacaccagctctgtacagcttgtccctctgggccactgaagtcccaaagccagagattcagtgtgctccaagcaaggagaagctcaacacagacgtattccttctc

SEQ ID NO: 509030 - DNA, 576 bp, Homo sapiens
caacagcccaagcccaaggagggaaggaaccttacctttgaatgaagttccaagttttgcttattacactaacattgaactgcatacagaactaaatggagactgtccttgtcactgatcatacctggaggatctgtattatctaaaagtgaccagaaaagttatgggacttctcagagttttcatccaggtttaggaaaagaaataacttgcagcataggtttaaaggagcatcttggggaaaaaacaaaactgtttttttcttgcactacataaggttctgagcagccaacacagttatatccatatcactctataggttyccaagcagccctgtgaagaaggtcaaattgttactcccagttcacagatgaggaaatcaaggagctgttccaagctggaaaggcaggcggcaggattcccacagcccacagccctgcactcccccaacatggactagatccaatgcccccagcttgctcctcaagcaatgatagcacctccatgagggaatcaactttattcccaggacctcacttggtgtttgacacctagccggtgttcagccttgagcaa

SEQ ID NO: 509031 - DNA, 609 bp, Homo sapiens
accattgctgactatgaacaactctaataagtttgacttgggttttatcttaaccaccagaccattccctctgtaactcaggatagcacccctccaccccatttgctcgcagtagcctataatctttgtgctcttgctgcagttccctttggtttccctttgggagagaagtccctgctctagccaagggaaggggttccatgttttccttgttcccttccatgcctagctggattgtagagttaggtttatgattatgaaataaaaactaaataacaaaaaaaagaagtgtcactctctcagtagaaacaatattcccataatcaaacatccaaagcaaattgtatgatttttttgtattatccaggatttcaagactctgtttcagggcagaaaagccaagtagaaacaatggtcaactttcagcatacctattttcagcagcctacttgctgcttcttatgcaaacataactattatttgtattattttgtccaaaatgttaatacgartttatgtaaacattctaaatatatggatcataaataaatactactgaatcaaaactataagaaagcaatatgattggccctagaagacttttatata

SEQ ID NO: 509032 - DNA, 581 bp, Homo sapiens
aaagggttagaaatattcttacatagtgatatttgaagctcaaaattcttgttctttgggacatttgtggtcttttcaaacaatccaaagaggctccctgaggtgaataatgcactctattgggggaattctgtaacttcttataaatcacctcagctcctatccctagtgatctacccttcagccatttaataaaagggtcaccccaccctaactagcttcttactggctgtcagggtcccagcaggaaaatagaagcctatcttccttggtatgcacttggtccttgggaaattcattcatccttgtcatgacaataaataygtaataagtaaataagtaaataaacaaacaagcattatgggcttgccccattctttgctctgttgccttgagctgctccctgcaattacctgcattcacaactcccctctcacagagtttgccaggaggaagcaggtgcaactctctgtgttcacatatgcctctcggttccaggagtcaaatatcaattttatccaagacttctcttagcctgcttcatttgggtctcttagtagcactgggacccttgattccac

SEQ ID NO: 509033 - DNA, 589 bp, Homo sapiens
aggttaattgaacttcttgaatctttggttaatttttttatcaaattacaaaacctagtggcttaaaacaataacacttattagctcggaatttctgcaagttgggagtctaagtgtggtttagctatggtcgtctgggtttggtttctcataaggcagcacaaatctcaaggttcaacagggaaggatctgcttcctagctcacttgtgtggttgtcagtgggattcagtcccttgtgtattgttgractaaggcttcaactccttatgagctgttggccagagacttgcttggttccttgctctatgggtctctccatagagtatcttacaatatagaatcatgcttcatcagagtaagcaaggaagaggacaagagagagttcagcaggagagaatacaaacaagatggaagtcatagtcttttgccacataatcacacaagtgacattccatctgcagtaggcagaacaattctactcccctcccctcccccactcaagatgtccacattctgatcctgaggacctgtaaatatgttatgttacatggcaagggggattaaagtttgcagatggaattaaggttg

SEQ ID NO: 509034 - DNA, 637 bp, Homo sapiens
gcagaagggccatttctcccccagggcaatgagactcttcacctatctcacatggaaacactaagattctggacttctcttaccttttaaacaatggttagttacrttactgccccttgcaatagtgtatgttgttgacctgaagccgcatggaggctaccaattcacatctcatccctgagtcttttcatcagctctggaaaaaaaccaaatatgtaacataaattcctctctgacccaaaactcaactgccaatggaggaaatggaagttcgtcagaaaaacattttaaccttggctcttcttcctctagcaacttagataaccctagatcaagccttccttttcagaattaacaatttcttgccaagaaattccccaagaggcttcacaggcaaaaccggacaatagctgatgaggctgctgcagggttacctgagcaaatacatactgcatctcctatgggagagggttcggggaatagggagaagcctgtgtggatgaaaaaagaaaaaaggtgactttttctaatcacttctaagtattccttttttgtaaaacagtttagctgttaacttctatgctaaggcacgtatgcactttggaaaggtaatttgagagcgagttgagccatgaca

SEQ ID NO: 509035 - DNA, 607 bp, Homo sapiens
tgttggctgaggaagaaaggaggaagcacttactctcttgcgcctgctctccattggttaaagacggccccacagaggtagactccttgtgcytctaggttacatgtgtgagtgatgagtcacttctctcagcctcagcaacacccaggaccctgcagtctcaggcaaggcactgtcccattgttgtgcccaaggctggccaaagcctccctagaactggcctggtggtacaagaggtgggccaataagattttgaagaaattataatgataaagagttaggaaaaacaggaaaaaatgtagcttggatggagttcatggcaggtaaattgtagacaaagtagtacattcaaagatttgaaaaaagtcataataatgacatttgcagataacatttatgctgaaaataccaacaaatttaggatggaatatagccaagaccgagaaacaagaattgataaagctcacattcacagccatctaaacagtaggtgaatctggaaagcaatgacagaaactccttaaaacgaatgttgagttggtaagcatgccagtgctgtatgtgtgggtgtgtgtgggtgtgtacacgcatgtgtgtgtgggtacaa

SEQ ID NO: 509036 - DNA, 607 bp, Homo sapiens
tgttggctgaggaagaaaggaggaagcacttactctcttgcgcctgctctccattggttaaagacggccccacagaggtagactccttgtgcctctaggttacatgtgtgagtgatgagtcacttctctcrgcctcagcaacacccaggaccctgcagtctcaggcaaggcactgtcccattgttgtgcccaaggctggccaaagcctccctagaactggcctggtggtacaagaggtgggccaataagattttgaagaaattataatgataaagagttaggaaaaacaggaaaaaatgtagcttggatggagttcatggcaggtaaattgtagacaaagtagtacattcaaagatttgaaaaaagtcataataatgacatttgcagataacatttatgctgaaaataccaacaaatttaggatggaatatagccaagaccgagaaacaagaattgataaagctcacattcacagccatctaaacagtaggtgaatctggaaagcaatgacagaaactccttaaaacgaatgttgagttggtaagcatgccagtgctgtatgtgtgggtgtgtgtgggtgtgtacacgcatgtgtgtgtgggtacaa

SEQ ID NO: 509037 - DNA, 607 bp, Homo sapiens
tgttggctgaggaagaaaggaggaagcacttactctcttgcgcctgctctccattggttaaagacggccccacagaggtagactccttgtgcctctaggttacatgtgtgagtgatgagtcacttctctcagcctcagcaacacccaggaccctgcagtctcaggcaaggcactgtcccattgttgtgcccaaggctggccaaagcctccctagaactggcctggtggtacaagaggtgggccaataagattttgaagaaattataatgataaagagttaggaaaaacaggaaaaaatgtagcttggatggagttcatggcaggtaaattgtagacaaagtagtacattcaaagatttgaaaaaagtcataataatgacatttgcagataacatttatgctgaaaataccaacaaatttaggatggaatatagccaagaccgagaaacaagaattgataaagctcacattcacarccatctaaacagtaggtgaatctggaaagcaatgacagaaactccttaaaacgaatgttgagttggtaagcatgccagtgctgtatgtgtgggtgtgtgtgggtgtgtacacgcatgtgtgtgtgggtacaa

SEQ ID NO: 509038 - DNA, 557 bp, Homo sapiens
tctcttggccttcattcaagagaagctggcatgggccrttgcctagcaacagcacgcagtgcacttttctactagcccatagaaacactgtctctctggacctcatgccattcagcatcatggttttgtaaaaggatgtcaatctcttaagaactttccttccttgctccaaataaatgctgcttgaaggaagaagttatttcaattttcagcccttcatcgcaaacattgcacttgacttaacaaagaccagagaaataagaagggagagccatcatcaacccccggcttatctgaccactggcagaagaaacaatataatcatacagcctatgcaatatattttcattgaatgaactatggctgtttaatgccatttatatattcaacagatatttaatgaatgccttccaatatgctgacataatactaagtgtttaggatatggtaacttaacaagacagacactgttcctatcctcatggaacttacttgtctgttctttaatctccctagagactaaatgttcacccataaaaacacattctaagccctag

SEQ ID NO: 509039 - DNA, 576 bp, Homo sapiens
atctcatggttgtttggcattaacagactatccagatcatgacccagatggtctgatcttaaacattttagatcaacagttttccttgccaccacagttgaggatagctaccactttcattgactttttagtctgagaactccatgaggtcaatattgttttcctatttttcaagtaaggagactggcagaaagaaacctattcaagtgtcacaatcaaagcaaatcacttgaaaattaaactttgaacctaaaacatctgagatatagaatcaagcaagcaygttttatgctctaaaagtctttgcttcttgttaaaacaaaatattgtaaataacaatctacaatattgtttacaaggaatgaattcagcttatatttataagtctacagatggcactacaaattataataaataaattagtatctaattatggataatttgggggtacaaattttcagaatattgtgaaatgctaattatttttattctgttctaatatacacatgactatcttttttttttgtctgggctcaaaagttcattttcacatcacatgttacttaggggggaaaa

SEQ ID NO: 509040 - DNA, 576 bp, Homo sapiens
atctcatggttgtttggcattaacagactatccagatcatgacccagatggtctgatcttaaacattttagatcaacagttttccttgccaccacagttgaggatagctaccactttcattgactttttagtctgagaactccatgaggtcaatattgttttcctatttttcaagtaaggagactggcagaaagaaacctattcaagtgtcacaatcaaagcaaatcacttgaaaattaaactttgaacctaaaacatctgagatatagaatcaagcaagcatgttttatgctctaaaagtcyttgcttcttgttaaaacaaaatattgtaaataacaatctacaatattgtttacaaggaatgaattcagcttatatttataagtctacagatggcactacaaattataataaataaattagtatctaattatggataatttgggggtacaaattttcagaatattgtgaaatgctaattatttttattctgttctaatatacacatgactatcttttttttttgtctgggctcaaaagttcattttcacatcacatgttacttaggggggaaaa

SEQ ID NO: 509041 - DNA, 551 bp, Homo sapiens
tgcatcaacagttttgttcagctcattagttaatgaggcaactagaaagatgttgtgaccagttgaaagaatatttgagaagtatttgagaagctagagtatgtaaaagaaagtaaggtttttgaataagatacaaaacaggtccaatttcatacttttgagatgtctgttcaactagagaaaagctatctggcgtcttgtcccctcaaatccccaactgctttgccagccctgaactctactgtttgtttctccatagcatgacatagttgtaggctctatactttacacttcctatttgaccttcttgccttctgctgggattagcaaatacccaaaaggaaaatagtggtagtggaagtctgtctttcctcaaagcatttctcttttctccggaatctcagctccttaactcttggctctttgctcaccagatatctttaaagaggtctcttttgagtatcttctcttctcttgtccactttcaccrttgctcttgatgagagagttagtctaatacaaagtactttatcatcagtgaaagcagaatt

SEQ ID NO: 509042 - DNA, 444 bp, Homo sapiens
tgaattgtatctgattgcttaataatttcaaattgcacaatactttctctaccataaatgttatcatagaaatgaaccaaaatagaatatcaggasagattctacaagagtgcttttcctgctgaggtgcattttatttaggaaatcaggtctggagatatctaaccttaatgagaggtagtggtagaattaataaatctcccaatattccctgaagcagctgctcttttttgaaataatgagcatatggtttcatcatattttattgatttgatccccttgagctaaagaaatattccagtgaaatgcaaacaactttcacaatttctgcatatttctcaagcccactattttcttgatgaaacaggaagctgatgagcatacaaatgaaaagtcaaaggcagtgttcagatttcttaaccaaagagaaagcaaaagggaagg

SEQ ID NO: 509043 - DNA, 568 bp, Homo sapiens
ctgtttgtgataccagaataataagaattaccagatccaagtctgttatttttgttgaaagtggtcctgacataatctttcaagctttgaatgtacatctcaatctcaatatttttgcaaatttaaaagagcagcagagtcacaggaagctatacttcaaggggtaattttctctatttaattcttgaaataattgtgagctattttgagggagaagcatttttggaatataattagtaggacaatattgagaaggaggatgtggcaaaacacagtttacrtatgtcaaaatatataagaaaatgtagttctctgtaataaaaacaatttcctacagtaatggaattatttaacaaaagaaattttaattgaattcattaccataactcttcatatttattagagaaatcaaaatattaaagttctattccacaaataaaattaacattttctcctattcctcagtgtattttaggaaactgaaagggtagttaaaaattgtaaagcctacataaatggttgaacagcttgtagaagaagagtgactatcttctagtacgtatattta

SEQ ID NO: 509044 - DNA, 568 bp, Homo sapiens
ctgtttgtgataccagaataataagaattaccagatccaagtctgttatttttgttgaaagtggtcctgacataatctttcaagctttgaatgtacatctcaatctcaatatttttgcaaatttaaaagagcagcagagtcacaggaagctatacttcaaggggtaattttctctatttaattcttgaaataattgtgagctattttgagggagaagcatttttggaatataattagtaggacaatattgagaaggaggatgtggcaaaacacagtttacgtatgtcaaaatatataagaaaatgtagttctctgtaataaaaacmatttcctacagtaatggaattatttaacaaaagaaattttaattgaattcattaccataactcttcatatttattagagaaatcaaaatattaaagttctattccacaaataaaattaacattttctcctattcctcagtgtattttaggaaactgaaagggtagttaaaaattgtaaagcctacataaatggttgaacagcttgtagaagaagagtgactatcttctagtacgtatattta

SEQ ID NO: 509045 - DNA, 555 bp, Homo sapiens
tggccactttgcttttcccttcaatccaacaaggtagagattttaacttcttggcacacacatactagataattggaccacttgagactgtcacaggtgaaatggaatggaagcttctatcaatgtcatccttaggttrcccttttctctgcgttttgtgaactgaagccaataattttctaaaagagatgccagtagagctattactttctcaataacctattcgatctctggaatcagttttcaacatgttacctgccttaagtgtgatcattaagtatttcttatagtgatcaatttatttggaagatactatattggagtttagaaagagctgagggcattttaagaggtgacatttgattacctatacaaattttcacctactgacataatagcatatttataataaatggaagctataaaatgttaacatgagtaattattttggcaatatcgtttgttaaatgctatagtctattcagatagtcattaataataacccagggttgtgatattctcaatacttatagaatctgcctggactctctattg

SEQ ID NO: 509046 - DNA, 548 bp, Homo sapiens
cacattgaaattaaatgtcccattgggctgtgtttcatgagttatttagtgtttgtgttctcaccgtaggtgtctgtatttcattgttgtatttgtttttatgacgaaattgcatgtttctatctcatcctttacttggttaatttaaatcaagccttacaggattcaaaaactgcttcttacatacttatgcaattaaattttaatagaacacagtggtacttctctagataagactatactaatttatcaaattatttaaaatgggaacttcattagaataagactgatggctataaacrctccagctcaaaatgagctattgaactttctagttggctgtgtcttcaccccagtaaagaatgtgtctttaaagctaagggtaacattaaattcagaattgaagccacagagtacgagggattgatttgcagcaaatctgataactctccattttcaaatgaaacgtggacagaaagaaggcaagcattcttaccttacattcactatatattcattagtaaaactttggattgtgatcctccaaa

SEQ ID NO: 509047 - DNA, 548 bp, Homo sapiens
cacattgaaattaaatgtcccattgggctgtgtttcatgagttatttagtgtttgtgttctcaccgtaggtgtctgtatttcattgttgtatttgtttttatgacgaaattgcatgtttctatctcatcctttacttggttaatttaaatcaagccttacaggattcaaaaactgcttcttacatacttatgcaattaaattttaatagaacacagtggtacttctctagataagactatactaatttatcaaattatttaaaatgggaacttcattagaataagactgatggctataaacgctccagctcaaaatgagctattgaactttctagttggctgtgtcttcaccccagtaaagaatgtgtctttaaagctaagggtaacattaaattcagaattgaagccacagagtacragggattgatttgcagcaaatctgataactctccattttcaaatgaaacgtggacagaaagaaggcaagcattcttaccttacattcactatatattcattagtaaaactttggattgtgatcctccaaa

SEQ ID NO: 509048 - DNA, 583 bp, Homo sapiens
aagaggaaaggggtggaggatgactgggtacrtttacttgataggagtgttttctcagtgttaggtgcttctcataatcatgggatgcctggtagccgcccctacagattctgatagaactagcttggagcttggactgggaatcttataaggtctcttgttaattcaggtacagcctagattgataaccactgtgctataagaaattatacagctagacatatatatagacacttttcctttagatacacacacacacacacacacacaccccagtgaaagttccagaattcttctactggaaatgtcttagagatggctattctggttggaaggcagtctggagatatatctggaagctgcaatttttcagcaagaatattctttacttatattttatttggaatggctgttaatggtggggcaggtgatggccccaaaacccaaaaggctttcttggcacctttgctggtgaacacaaagactgaactctggaatgtatcattctctcaacatctgtcatctgtccctgacaataaacagaccaaagccttcattagttctggtttggaaattttgtaca

SEQ ID NO: 509049 - DNA, 565 bp, Homo sapiens
cacttaacctataattgaaaaaaatagcatgtgtctttttatcctttaatgatgaaaggaaataatgtatatggtaaaacatttcaaaaataataaaagatacacaaacataaaagccacgtaacattactactcaggtaaagtcattatttactgttgaatgtacaaccaggtgtctccattggtgtctcaaaggccgaatatggtcagcagattttttttttttttgtcagcttacaatgtgcttttacaattttgaattttagcgcttatattcagagtgtttcttacagtcacaatgcatgcgtggtcttgtgcatattttgaacatgagatccctaggatcatagacagcattttatttgctgtacattatcatattattgtagaaaataagcagaagcaatcagcwttagattctttcagcctcaagtcccaaattcctagtcagataatttgctttccattgcactcctctctaaggagaaaaagggcaggtagcaaggggaactaccatgctattttggctttgtcattactaacattgctgagatgcttaattaat

SEQ ID NO: 509050 - DNA, 578 bp, Homo sapiens
tacggttgggacatattcggctcaggctcccccctggctggctggccagtaatccaatctcagtcattgaatactagaatcacaggtttacattattccagaaaaccatgaagggaccaagtcccttagtccatggtgattctaaacattgcagtttgtttcttctccttcatgctgccatcaagaactggtcctccagccatcagaggcctcaaacttgtccacagagagacacatgtggtctttaggccacagtgtttccagttattaagggcacaggcccagaccaccatattgaggctcactcatttttttacataagttatttaacttgtctgtggcctcttctctgtaaaattattatgatatagcagtaccagaatctaccacagaggactgttgtgagcattaaatgtgttaatactcatgaaacacccaaaatgcagatttggcacctgtgcaataaagaatcactctcatcctcaccattattattgcaagaatctgtagcagggcctggaacacaagtagagtcacaaatcctcwgccgtgttcttaatctcagggactttcaacat

SEQ ID NO: 509051 - DNA, 618 bp, Homo sapiens
gccttcaaatgagagtggtacgaattaatgccagtaattttcctaattctgccttttaaaaaatactgtaaaacatctaataattggcacaatttaagtgaaaatagtaagggatcgaaaaaagaaacagtacacacaccaaacaaacaaaatcaacagagaaaatgagccagtcaattaaagatccctttgtagaatagaggccttgactcagaagacaaaccagatagaagtaggtaggacatcattacatcacatacggtatataatcataatataycaatttagagaagacctgaaaaagagacaagatggactcttccagaagacttcagaactttttcaaacaataattgttagtggtttataaatttgaaaaacatacaaacatggtttgccctaaacactgaagtcaaattaactttatgaagtaaggggtctacagcacccagagtggaaaaaatgagccattcttaaggtcctactttttctgtgcattgtcgttagagtagaccaaaggtattgataaggcaattcactttactctagattagtctagcatgtaattagacttttggctgacatctgcccagggaccaggtccttccacagctctgc

SEQ ID NO: 509052 - DNA, 401 bp, Homo sapiens
atatctaaattaatttccaattgtgtaatttgagaaaaagagacgaagattaatttccctaacgagtagggaagtgtgtttcttttttttcttttttttttgagactgagtctcgctctgtcgcccagcctgaagtgcagtggcacgatcgcggctagtgcactgcgaactctgtctcccgggttcacgccattctcttgcctcagcctcccgagtagctgggactacaggcacccgccatcacgcccagctaattttttgtgtttttagtagagatgggggtttcaccgcgttagccaggatgacctcgatctcctgacctcgtgatctgccttcctcggcctcccaaartgctgggattataggcgtgagccaccgcacctggcaggaagtgtttctta

SEQ ID NO: 509053 - DNA, 601 bp, Homo sapiens
agcaacttcacccataggtaggccttgttgatccctaatgagggaaagaacaggtgttgaaaaaaaataggaatgaagttttgaaataaactgtaccaaattttttcatatacaagactctagcatactaaaataaggctttataaccaaaagtgacagaaaagttaaggaatctggccaaggagccattaaagaatctactatgtaatgggaaagggatttatcacagcacaactggragtcagttattggaaaaataattattacttgtttaaaccctaaaatactgagactcctcaataaactggcttcaaacttcttgactctttaaaacttcatatacatttattattggcaataatactatctgcatagcacacatttccctgaacaaatgaaaattattttaatcttagaggattttggccttaaattttaagtagtctacaggcctaaagcaatgtcagtcctaaaacacttaagattgatgttcaaatggaagcctgggctcctgcgactatcagcctggggatgccaaggtcttatcaaccttagggaagtcccagacagttaacaatttaactaatgccacatattaaca

SEQ ID NO: 509054 - DNA, 522 bp, Homo sapiens
gtttatgtatggtaaaacagctacttaattcattgttcaataactagttaatgttatttgtctaatgtaacttttataaattccccttagagtttggtgctaagtaaaactgtccctcctgagcaaataagtttttttcctatagatgtcatgaatctgagtgccacactttatattctgttttaatacttatttctaaccttaagattatgttcttaaccacaaatggtacagggctttcatttatttttcagtttttttgtcattataatccttgtcataaaggttttattgcatatgacttttgcttaacctgccttaaaaatccattttgggggamtaagtatggaaaaaatttgtaatacacttttcctgagaaacattataataatgctgtaatatttgcacagttatcactgtaagaactttcacctttaagaattatacttcttcactttgtttctctaatctctagaatttggcagctatatgttttggcatttatattttaatgaggtcagt

SEQ ID NO: 509055 - DNA, 567 bp, Homo sapiens
tctgttaaatgaaggaattgacccatccaattgaggtagttacataatttgtgggactcagtgcaaaatgaaaatgcagagccttttgctcaaaaaagcaagagaaaaggtggacttttaagggtactattaagtactttaaaggatactaaactataaagttttctatttagggtactaaaataaaaagttttttctttttctacagtctccctcattctcaactcgttatggtggtttttatttgctacttaatgtcattctaagtaagtaaaacttaaaattttacattttcagcatgacttttaccactcatctttatatttgaraatgccagttttaaatgcaagtacaggagcatttaactagtatgtagaatcatcgtacataatcatacagacatatgtatttcacccgcactagactagtggaaacattgcacaaaaccaacaatttgttctttttttttcacttcttgatatgtgcccattctataaaccctccttacctttagtttactgataaatgaaggaaaatgaaagatccagtgcaacgtcatgagtaatg

SEQ ID NO: 509056 - DNA, 573 bp, Homo sapiens
tgctcctcacatggtagagagagagaaagagagatggctctttggtatctcttcttataaggtcactaatcccwccatgaggatcccagcctcacgacctcatctacacctaattatctcccaaaggccccattccatctctatgtactactacattgggggttagagtttcaacatacagattctaagggacataattcagtccatagcaagcttatatccaattgagagccaggaggcctgcaaagaggagtcccctgacacctgttagaaaatgggctccacgtgtcaagggatccatcctcatcattaagatataggctgagtggacacaatggctcccacttgtaatcccaacactttgggaggccaaggcaggtggattgcttgagaccaggagtttgagaccagcctgtgcaacatggtgaaatcctgtctctaccaaaactacaaaaattagctgggtgcggtggtgtcatgcctgtagttccagctacttaggaggttattaaacctcctgagtaggaggcaggaggatggcttgagcctgggaggtggaggttgcagtgaact

SEQ ID NO: 509057 - DNA, 573 bp, Homo sapiens
tgctcctcacatggtagagagagagaaagagagatggctctttggtatctcttcttataaggtcactaatcccaccatgaggatcccagcctcacgacctcatctacacctaattatctcccaaaggccccattccatctctatgtactactacattgggggttagagtttcaacatacagattctaagggacataattcagtccatagcaagcttatatccaattgagagccaggagkcctgcaaagaggagtcccctgacacctgttagaaaatgggctccacgtgtcaagggatccatcctcatcattaagatataggctgagtggacacaatggctcccacttgtaatcccaacactttgggaggccaaggcaggtggattgcttgagaccaggagtttgagaccagcctgtgcaacatggtgaaatcctgtctctaccaaaactacaaaaattagctgggtgcggtggtgtcatgcctgtagttccagctacttaggaggttattaaacctcctgagtaggaggcaggaggatggcttgagcctgggaggtggaggttgcagtgaact

SEQ ID NO: 509058 - DNA, 645 bp, Homo sapiens
tgcataatggacctgggtcttcaatggggtggatttttaatggtagaaatttcacaagaacaggtaacttctgaaagcttctgaacatatgtcacaaaataaagcatttacattgttcttgctagtcatggaaattgcaactctctgctctcatgaggacatgatgttagattcattgttccatgatcctctaagctcatctcagaaataagtcatgagttttgattgccctctactttggaaggagacaggatgaatgtcaaatcccatgattttctagtttccaagaaactttgaaactggtcattttttatacacagtaaggttttcctccacagcatccctaacaggtacatatccagcctctgcttggatgtctttaaaaatgaagagtttactacttcttgagacctccrgcttaaacaacacccaggcataatttccccattctgtatgccccaaccttatatgcccattacaacattcagatgattagaaatcacctcctggcatagagctgtgatttctctccctgaaaaatcatagggcaggcctgcttcctcctccaggttggtaatattggtaatattccttcagctctctgaagacctctaactcttacccttacatttcctcaggccacat

SEQ ID NO: 509059 - DNA, 310 bp, Homo sapiens
gggtagggtctggtgcagcaggagtccccatactagttgactctggatacgtcacctcattctttagagtgccctacatttattatcattatcattatcattatccagaccagtttcatacaaggatcccccatgagagctggatatggtttgtccccaccaaaactcaagttgaaatttgtttcccagtgtggcagagttgggacctggggcctagtaggaggtgtttttgtyatgggggtggatccctcatgaatagattaatgccctcctgtgggagtgagtgagtcctcctgggttagttaccaga

SEQ ID NO: 509060 - DNA, 454 bp, Homo sapiens
gcagggatgctgacgagctaaggtgtccgtggggggcgagggcccgagtgaggaggtgaggcagccagaagcccggagacggtggcaccgggtggccttgggactcggcctctctgttcccctccctccctggtctctgagccctcayttctccctcaactcccatagctggtaaaaactggatgtttgttcactgcactaaatgtaacaaaaactgccccatttcttctgccacaaagcaggactattccgaggaagcatgaacagtccaccgaggtgggggcatcccttgggcaagggcggcctcttcccacctggaaaccccagcatcctagcctcctgccctccaggctcagccagagacgccacagttcacacaatacgcgtgttcagaaagctgaaggtttttaacagtgaaaatcaagatctttctcccaagtgcagacccaggaga

SEQ ID NO: 509061 - DNA, 430 bp, Homo sapiens
gtccgtggggggcgagggcccgagtgaggaggtgaggcagccagaagcccggagacggtggcaccgggtggccttgggactcggcctctctgttcccctccctccctggtctctgagccctcatttctccctcaactcccatagctggtaaaaactggatgtttgttcactgcactaaatgtaacaaaaactgccccatttcttctgccacaaagcaggactattccgaggaagcatgaacagtccaccgaggtgggggcatcccttgggcaagggcggcctcttcccacctggaaaccccagcatcctakcctcctgccctccaggctcagccagagacgccacagttcacacaatacgcgtgttcagaaagctgaaggtttttaacagtgaaaatcaagatctttctcccaagtgcagacccaggaga

SEQ ID NO: 509062 - DNA, 454 bp, Homo sapiens
gcagggatgctgacgagctaaggtgtccgtggggggcgagggcccgagtgaggaggtgaggcagccagaagcccggagacggtggcaccgggtggccttgggactcggcctctctgttcccctccctccctggtctctgagccctcatttctccctcaactcccatagctggtaaaaactggatgtttgttcactgcactaaatgtaacaaaaactgccccatttcttctgccacaaagcaggactattccgaggaagcatgaacagtccaccgaggtgggggcatcccttgggcaagggcggcctcttcccacctggaaaccccagcatcctagcctcctgccctccaggctcagccagagaygccacagttcacacaatacgcgtgttcagaaagctgaaggtttttaacagtgaaaatcaagatctttctcccaagtgcagacccaggaga

SEQ ID NO: 509063 - DNA, 454 bp, Homo sapiens
gcagggatgctgacgagctaaggtgtccgtggggggcgagggcccgagtgaggaggtgaggcagccagaagcccggagacggtggcaccgggtggccttgggactcggcctctctgttcccctccctccctggtctctgagccctcatttctccctcaactcccatagctggtaaaaactggatgtttgttcactgcactaaatgtaacaaaaactgccccatttcttctgccacaaagcaggactattccgaggaagcatgaacagtccaccgaggtgggggcatcccttgggcaagggcggcctcttcccacctggaaaccccagcatcctagcctcctgccctccaggctcagccagagacgccacagttcacacaatacgcrtgttcagaaagctgaaggtttttaacagtgaaaatcaagatctttctcccaagtgcagacccaggaga

SEQ ID NO: 509064 - DNA, 518 bp, Homo sapiens
cctgctctggcttattaggagaattgggtgatggccctcactgcccctttgtggggccccagagtggcaggcacctggtctcatttgccctgggtactctcccctcagccccagcatgtacaggagaaaccaagctcggagcggccttgggcacggcccggctgatgccaggaggaccttttcatgtttcctggaatgtgttaggttttgtttagacaccgaggagtcccctaaggatgctgaatgaatgtggcattttctatgctcactcctgccccgccagcctggggccaggcgtcctcctccctcctcagggatccgtagtggagaggtggagaaatgtgcctgtcccgcagctgggggccgtgccctgtctccstgctctgagctgcggttctccggctggtttgcttcttctctctacatcccctccagatactgagctgtgcttggctgttgtgcgctgtggtttttagtgtctatgtcttgaggcatgggtgagctttactcctcttccc

SEQ ID NO: 509065 - DNA, 518 bp, Homo sapiens
cctgctctggcttattaggagaattgggtgatggccctcactgcccctttgtggggccccagagtggcaggcacctggtctcatttgccctgggtactctcccctcagccccagcatgtacaggagaaaccaagctcggagcggccttgggcacggcccggctgatgccaggaggaccttttcatgtttcctggaatgtgttaggttttgtttagacaccgaggagtcccctaaggatgctgaatgaatgtggcattttctatgctcactcctgccccgccagcctggggccaggcgtcctcctccctcctcagggatccgtagtggagaggtggagaaatgtgcctgtcccgcagctgggggccgtgccctgtctccgtgctctgagctgcggttctcsggctggtttgcttcttctctctacatcccctccagatactgagctgtgcttggctgttgtgcgctgtggtttttagtgtctatgtcttgaggcatgggtgagctttactcctcttccc

SEQ ID NO: 509066 - DNA, 518 bp, Homo sapiens
cctgctctggcttattaggagaattgggtgatggccctcactgcccctttgtggggccccagagtggcaggcacctggtctcatttgccctgggtactctcccctcagccccagcatgtacaggagaaaccaagctcggagcggccttgggcacggcccggctgatgccaggaggaccttttcatgtttcctggaatgtgttaggttttgtttagacaccgaggagtcccctaaggatgctgaatgaatgtggcattttctatgctcactcctgccccgccagcctggggccaggcgtcctcctccctcctcagggatccgtagtggagaggtggagaaatgtgcctgtcccgcagctgggggccgtgccctgtctccgtgctctgagctgcggttctccggctggtttgcttcttctctctacatcccctccagatactgagctgtgcttggctgttgtgcgctgtggttttyagtgtctatgtcttgaggcatgggtgagctttactcctcttccc

SEQ ID NO: 509067 - DNA, 639 bp, Homo sapiens
cccaaaatatatatcttccggcaccactccagacctactaaattgaagcaatctgggtagagcctggaaatctgtattttacaaacctctgcaagggagtctaatgcagattctgggcttgcagaaacagcccattggcagcacagtgacagcatttagacccatcatggaatgagtatgaccactgctctaagaaaaactcttgctcacaaccataatttgcacaaaataacaccctaatgtgcagaaaccggtaataaatatatcttctgctgtgaccagtttacaatagagagagtacaggccctttgctgacagggttctgttgtcatgatggtgggttcaaatgtctccakcccactcctcacagaaatcatagctctgcttcctaaaagacccaaattaggctgtggagagacaactaattttgattcttagagctgaccttttcttttatatatactaactcctttgaaaaaaatgttctgaatgtaaatggcaacttggattattttttcttcattttggctaatataatcgtcattagtgcattactgaaaaattgtctactcgcagtttgagctgtgctggttaagggacgatgggttagcctgtctctaggctctgcagcacctgatc

SEQ ID NO: 509068 - DNA, 526 bp, Homo sapiens
aggacgtgtgcattcaacagagcaagcaaaaacaygcaatctgcaaagcgcatgtcaaaaatcacaaacaaggacaacagaaacaacaggggcgggggagtgtgggagagaggactaccgacagcaggattctttgaatggcaagtggcaggttgtgctggctgtcccctgggaccatgctgggaactagcggctatgtgtaggcccaaagacccaaaaacagtgaaagtggagagggggcaggacccaaaagctcagagtcggcccatgtcagcccttcaatcagtctcttctactactaattttccctcatgtttttaaatttaattctcagcttccttcaaataatagtcaatgaaccatccaaatttcctccaaatacccttgaaaatgttgaattatgcaattaaggatggtgtgatacaataatatgaggagaaatgttgtcatacatattttaatgaagcacacagacttgggaggaagagagggagagagaaagtgatttcccagagctgcctccacc

SEQ ID NO: 509069 - DNA, 293 bp, Homo sapiens
tgcaggaagggggctgctccctgtgttcacaggggacagtgttggggtgagcagaccaccaacatgcrcgccagggtgtctgcagctccctcagaagtgctgttcttctcatgcggggggaggtaccgcaaacatctgcgatgtgagaaggaccaaagaaggagtatgtcgtcctgtcccataccgcatggcggtgtaggtgacaggtactagaaacacagcaagggaaagggctttgcggcctgggcagtgcacacatgggcagacgtagaggaagcgaagggcttcactta

SEQ ID NO: 509070 - DNA, 619 bp, Homo sapiens
gggctgctccctgtgttcacaggggacagtgttggggtgagcagaccaccaacatgcgcgccagggtgtctgcagctccctcagaagtgctgttcttctcatgcrgggggaggtaccgcaaacatctgcgatgtgagaaggaccaaagaaggagtatgtcgtcctgtcccataccgcatggcggtgtaggtgacaggtactagaaacacagcaagggaaagggctttgcggcctgggcagtgcacacatgggcagacgtagaggaagcgaagggcttcacttacagaagaaaggtgtgtgtgtgtgtatgtgtgtgtatgtgtgtgcatgtgagcatgtgtctgagcatgtgtgttgtaagaatattcttgcagggagcaacgtctgaagaaggctcaaagaggaaaatgaatattaaagtcacaattgttaaggggctagatctcatggtacgtgctcttgccataagaaattaaaatttaaaataaaagaagtaaaatgaatggacatgaagaaactcttggaggtgatggatatatttgttaccttgatggtagtgatgataacatgagtatacacaaatgtccaaactcaccatgttgtatacaataattatgtg

SEQ ID NO: 509071 - DNA, 619 bp, Homo sapiens
gggctgctccctgtgttcacaggggacagtgttggggtgagcagaccaccaacatgcgcgccagggtgtctgcagctccctcagaagtgctgttcttctcatgcggggggaggtaccgcaarcatctgcgatgtgagaaggaccaaagaaggagtatgtcgtcctgtcccataccgcatggcggtgtaggtgacaggtactagaaacacagcaagggaaagggctttgcggcctgggcagtgcacacatgggcagacgtagaggaagcgaagggcttcacttacagaagaaaggtgtgtgtgtgtgtatgtgtgtgtatgtgtgtgcatgtgagcatgtgtctgagcatgtgtgttgtaagaatattcttgcagggagcaacgtctgaagaaggctcaaagaggaaaatgaatattaaagtcacaattgttaaggggctagatctcatggtacgtgctcttgccataagaaattaaaatttaaaataaaagaagtaaaatgaatggacatgaagaaactcttggaggtgatggatatatttgttaccttgatggtagtgatgataacatgagtatacacaaatgtccaaactcaccatgttgtatacaataattatgtg

SEQ ID NO: 509072 - DNA, 389 bp, Homo sapiens
gccagacgtggccggagattggcagggaagggcagcatcagagatgatggcaggctgctgcacatctgctctgagcccagcattgtggggaggcaggggccagggtgaggggacctgggggactgcagcttggggagtgtggcaggccagggctggcaaggagaccaggtagagagagggagcaagcagtggtggggaaggaggaggaaacagccccgaaaggtcaactttgaactatggtgtgtgtgtgtgtgtgtgtgtgtgtgtgtgtttggggtgtgtgtgtgtatttgtgttggggaggtgaataggagagaggaaatttcaggtcgtggttgtttggctttcatyactactgcaggacaaaagaaactagctttttttttttt

SEQ ID NO: 509073 - DNA, 603 bp, Homo sapiens
aattaagggcatgaggaaagggagcacatggagctgccaagatgtgataataccatattcctatttcagtaatgtactgaaaagatcagagcacagaagaaaatgaatatggtaaacattgcaacatactcagtaacaagattactttaaatactatgaatgatgtcagtgcaaaccttggaggtcttaatgaaaaaataaattcaagttctaatttggaattgaaaaagaaaaaaaaaagactaccaaaaaagttgacattacccaataccctacttaaataataacagaaataaatttaatatgtgtttaaaatgttattgtcttttctttaaatagtggcatcgcttttaatatacacagaagaattatcaccttctttaacaacatagtctggtattagagatcacacactttaatccataacttaaggcactagccaaaggtagagacaaaactataattgattttgattgttaaaatccgcatgctaaaatttcaggataaaataaacacaggaaaattgagccttatataacactgaagcaggaagggaattatgcactcaagcacagcataaaagrggaaaaaaacacacttggt

SEQ ID NO: 509074 - DNA, 641 bp, Homo sapiens
acataactttttatgttctgcaattaaaatttattgttacagcaacctgttgcctgtaaagtgctaagggattactgccatcatagcaatataagggccttcagatagcttgcttgctgctttctatgctmtttacgtagttcacaattacatttactccttcttcatcaggaggaatatgttaacttattactttccaaaccacactaatcaatcctattcatccctctcctcctaaaaacaagcaaacaaaacaaacagttggcttcatggcttataagggaatgccatttaccttttcttgaactctttcctttgccttgaatgatggtagctcttagccaaaagaaataattctggcatccacaatgtttattaaagtgaagacaaattaattgcctagtggaagcaatttaatttgatggaatttctatataaattgatatagcatatccccaaggaagcatatacatgagggtcctataccttagtaattttaataacatttaatttataagatggcatacatgcaaatatatttttcagacacaaaaaagggaataaagaaggcattactttttacaaagcaatgcataatatttgaacattgattaatttcctaattactaaattgaagttaa

SEQ ID NO: 509075 - DNA, 131 bp, Homo sapiens
gtaaagaactactgttttaaggtggagaaaggacttctataatcgtttgtttgctgacgataytcattttaaggttgaaatggttacttaattttaactaagtttctaaaaatagtgtgtatatgtgtgtc

SEQ ID NO: 509076 - DNA, 616 bp, Homo sapiens
gcaggttcccttttgcttattgaaatagaataaccagagaagaacaaggcaagttttaaaaataacttggtacacatgtaggtgaaataaccttacctcccagtagctgagagaaaaaaaaaagatctcaatgctggctgttgttccaggatatttttagtaagatggccctgtcgtctttgatggtcaatgaaggaataatggcagaaaaaaatattaggcgaggagaaggctacgggcattgtttggtgtttcatttaatttccacctcatccaccagagaaaagcaaacataagcagaggytgatgatgagcacagtagaaaggaaaatgtgatgtgtcttttccttgtagttggttgataatatgtgatttgcttataccacattctgatgggaggtattttcagtctgtggctttgtaagttgaagggcctcctaagaaactcctgtttcgtaagatattctctgtcttaacttttttcaggaaaaaatatgattttttggagttgcttaatagtttttagcttttaaataagtatagtttatttaccacagcatttgaactgtcaggattttactgtgaatgctaccagaaaggtttgttctatttttac

SEQ ID NO: 509077 - DNA, 616 bp, Homo sapiens
gcaggttcccttttgcttattgaaatagaataaccagagaagaacaaggcaagttttaaaaataacttggtacacatgtaggtgaaataaccttacctcccagtagctgagagaaaaaaaaaagatctcaatgctggctgttgttccaggatatttttagtaagatggccctgtcgtctttgatggtcaatgaaggaataatggcagaaaaaaatattaggcgaggagaaggctacgggcattgtttggtgtttcatttaatttccacctcatccaccagagaaaagcaaacataagcagaggttgatgatgagcacagtagaaaggaaaatgtgatgtgtcttttccttgtakttggttgataatatgtgatttgcttataccacattctgatgggaggtattttcagtctgtggctttgtaagttgaagggcctcctaagaaactcctgtttcgtaagatattctctgtcttaacttttttcaggaaaaaatatgattttttggagttgcttaatagtttttagcttttaaataagtatagtttatttaccacagcatttgaactgtcaggattttactgtgaatgctaccagaaaggtttgttctatttttac

SEQ ID NO: 509078 - DNA, 616 bp, Homo sapiens
gcaggttcccttttgcttattgaaatagaataaccagagaagaacaaggcaagttttaaaaataacttggtacacatgtaggtgaaataaccttacctcccagtagctgagagaaaaaaaaaagatctcaatgctggctgttgttccaggatatttttagtaagatggccctgtcgtctttgatggtcaatgaaggaataatggcagaaaaaaatattaggcgaggagaaggctacgggcattgtttggtgtttcatttaatttccacctcatccaccagagaaaagcaaacataagcagaggttgatgatgagcacagtagaaaggaaaatgtgatgtgtcttttccttgtagttggttgataatatgtgatttgcttataccacattctgatgggaggtattttcagtctgtggctttgtaagttgaagggcctcctaagaaactcctgtttcgtaagatattctctgtcttaactttwttcaggaaaaaatatgattttttggagttgcttaatagtttttagcttttaaataagtatagtttatttaccacagcatttgaactgtcaggattttactgtgaatgctaccagaaaggtttgttctatttttac

SEQ ID NO: 509079 - DNA, 430 bp, Homo sapiens
ctgcacttctccctcctcaccctgcttcttccctagttctgtcttcctgttaagcctcacaaaaacagatgatcctttcccgaagggaccacatagaaggttctggaagcacctgtgctgcacctggattctggggctctccattcctatctgaggtctggctccttagcaaacgctacattggctaagaaaaagatgaagacttcaatgaggtcatcataggcacccaaataaaaagaaaggaacagaggtgcagacagttctctggagaaaatgaagccaccggcagtattttcartgaatcaaattggagggtcacctgatgtcttggttcgctgggtcagcttggacgcaccctgctgcatggaggggccatacacggcttcatataaatgagggacgcacactgcaaaatgaaatgtctgctgga

SEQ ID NO: 509080 - DNA, 555 bp, Homo sapiens
tgcacttctccctcctcaccctgcttcttccctagttctgtcttcctgttaagcctcacaaaaacagatgatcctttcccgaagggaccacatagaaggttctggaagcacctgtgctgcacctggattctggggctctccattcctatctgaggtctggctccttagcaaacgctacattggctaagaaaaagatgaagacttcaatgaggtcatcataggcacccaaataaaaagaaaggaacagaggtgcagacagttctctggagaaaatgaagccaccggcagtattttcagtgaatcaaattggagggtcacctgatgycttggttcgctgggtcagcttggacgcaccctgctgcatggaggggccatacacggcttcatataaatgagggacgcacactgcaaaatgaaatgtctgctggaggctgtggtagaggaagccctaatctgatttacctcccggcggtgtcctgctttcaatccaattttctggacagttagattgagatagaatcaaaatgggatttgccaggagcaaaagaaagatat

SEQ ID NO: 509081 - DNA, 555 bp, Homo sapiens
tgcacttctccctcctcaccctgcttcttccctagttctgtcttcctgttaagcctcacaaaaacagatgatcctttcccgaagggaccacatagaaggttctggaagcacctgtgctgcacctggattctggggctctccattcctatctgaggtctggctccttagcaaacgctacattggctaagaaaaagatgaagacttcaatgaggtcatcataggcacccaaataaaaagaaaggaacagaggtgcagacagttctctggagaaaatgaagccaccggcagtattttcagtgaatcaaattggagggtcacctgatgtcttggttcgctgggtcagctyggacgcaccctgctgcatggaggggccatacacggcttcatataaatgagggacgcacactgcaaaatgaaatgtctgctggaggctgtggtagaggaagccctaatctgatttacctcccggcggtgtcctgctttcaatccaattttctggacagttagattgagatagaatcaaaatgggatttgccaggagcaaaagaaagatat

SEQ ID NO: 509082 - DNA, 430 bp, Homo sapiens
ctgcacttctccctcctcaccctgcttcttccctagttctgtcttcctgttaagcctcacaaaaacagatgatcctttcccgaagggaccacatagaaggttctggaagcacctgtgctgcacctggattctggggctctccattcctatctgaggtctggctccttagcaaacgctacattggctaagaaaaagatgaagacttcaatgaggtcatcataggcacccaaataaaaagaaaggaacagaggtgcagacagttctctggagaaaatgaagccaccggcagtattttcagtgaatcaaattggagggtcacctgatgtcttggttcgctgggtcagcttggacrcaccctgctgcatggaggggccatacacggcttcatataaatgagggacgcacactgcaaaatgaaatgtctgctgga

SEQ ID NO: 509083 - DNA, 569 bp, Homo sapiens
gaaaaataaccaaataactacacgacaaaaagggtccacacacgatgctctggaaaggaggcacaggagtccctagttctgcccagggtacccgagtttggtcttagccaagccctccagtaaacaagaaagagaaagagcatctcagaaggaggagagcctagacgtgaggaggtagccacatagccccaggtgaaactggaatgagcggaggtggggatggagcacaaagggccagggggccctggaggctgttggaaaccacctttgatgacagactcctagaagctcaaaggagcttagagatggtcacactgagtctaggtttccacattcagcagcacagtccaggtccagatctctaaattcagtgctttatgaacgcctgtcatctatgctaccaccctgctcttttaacaactcactcccccagttaagctgcactttagcaagaaaacgycatcccacattttactattcaaattactgaaccgatggtccaaggtggctactcagaaagcactaaggccccgtgcctttgggagtgaggaaggtgtctccagaaggtg

SEQ ID NO: 509084 - DNA, 455 bp, Homo sapiens
tgcctaaatcagaaaccttagatttcctttataccactctcctactgcatttcatgttctatagattctatcataagatagataactattaagattaggataaaatgtaaattcttaacatgacccacaagacccttatttacctctctgactttaactgtcattacatcaacaaccccccactctaacttccaaattcaactccaccaatcctaactcattgagrgtccctaaggtcacatgccacttcaagcatttaaacctttgcacatgttgtttactagaaactcttcctccaaatgctttactggaacactcattcccatgacacttcagagcttatttatttcttctctggagaagcctttcttgacaccacttcctccaagtttgggataggtgcccctcctatgtgctcccagatcaaaccacactttcccttattgcactgagtt

SEQ ID NO: 509085 - DNA, 503 bp, Homo sapiens
agacctcctttttttttttttttttttttttttttttgtattttcaaagggcggatgggtggattttaggaattgagctgatccctttttaaaatgggtttttcttttactgtctcttaaatttcatatccagtcatgggcatcaracccgtatcctgtctctgctctgggtatttctccattctagcagttacagaaatagctgagggaggtgtgactggttctggaaaaaaaaaaaaaagctgaactcctcacgctgaggaggttgcagggccacagctaggcgggctgggggtgggaagatggctgtactgctgggctgtcaggcagaggggccacacatccagatgtgcttttgagctccccgcagcttttagggagtggcttccaaatgagtcataaaactcagaggtaggtttggaataggagatttcaagtgggctcctgctcactgtcagagccacttactctctttactggggattaaagaactccacgagcat

SEQ ID NO: 509086 - DNA, 503 bp, Homo sapiens
agacctcctttttttttttttttttttttttttttttgtattttcaaagggcggatgggtggattttaggaattgagctgatccctttttaaaatgggtttttcttttactgtctcttaaatttcatatccagtcatgggcatcaaacccgtatcctgtctctgctctgkgtatttctccattctagcagttacagaaatagctgagggaggtgtgactggttctggaaaaaaaaaaaaaagctgaactcctcacgctgaggaggttgcagggccacagctaggcgggctgggggtgggaagatggctgtactgctgggctgtcaggcagaggggccacacatccagatgtgcttttgagctccccgcagcttttagggagtggcttccaaatgagtcataaaactcagaggtaggtttggaataggagatttcaagtgggctcctgctcactgtcagagccacttactctctttactggggattaaagaactccacgagcat

SEQ ID NO: 509087 - DNA, 503 bp, Homo sapiens
agacctcctttttttttttttttttttttttttttttgtattttcaaagggcggatgggtggattttaggaattgagctgatccctttttaaaatgggtttttcttttactgtctcttaaatttcatatccagtcatgggcatcaaacccgtatcctgtctctgctctgggtatttctccattctagcagttacagaaatagctgagggaggtgtgactggttctggaaaaaaaaaaraaagctgaactcctcacgctgaggaggttgcagggccacagctaggcgggctgggggtgggaagatggctgtactgctgggctgtcaggcagaggggccacacatccagatgtgcttttgagctccccgcagcttttagggagtggcttccaaatgagtcataaaactcagaggtaggtttggaataggagatttcaagtgggctcctgctcactgtcagagccacttactctctttactggggattaaagaactccacgagcat

SEQ ID NO: 509088 - DNA, 427 bp, Homo sapiens
gaggaggcaacaggcagactggccagaaacattcactttggagttggaaggacctatattcgaattgctgtcctgccactcactagatgtttgtttttccccttctgaacctcagtgttctcatctgtaaagtggccataacagtgcttgtctcacaagagggatggtgaggattaaacaatctatttatatgaaatgcagmattgtagctgatatataataaacactcagtaaagttttcagttatagttgttattatgtatgccccacattctgaggggctgctgtgtgtccttatgggcctatgtcctgtgaagaaatatcatccatgtgtgtcatggagaataagagaaaggccgggaatccaccactcctgcaccccagtgagccatcatctcagagtggggggaaggggtcatccagtact

SEQ ID NO: 509089 - DNA, 427 bp, Homo sapiens
gaggaggcaacaggcagactggccagaaacattcactttggagttggaaggacctatattcgaattgctgtcctgccactcactagatgtttgtttttccccttctgaacctcagtgttctcatctgtaaagtggccataacagtgcttgtctcacaagagggatggtgaggattaaacaatctatttatatgaaatgcagcattgtagctgatatataataaacactcagtaaagttttcagttatagttgttattatgtaygccccacattctgaggggctgctgtgtgtccttatgggcctatgtcctgtgaagaaatatcatccatgtgtgtcatggagaataagagaaaggccgggaatccaccactcctgcaccccagtgagccatcatctcagagtggggggaaggggtcatccagtact

SEQ ID NO: 509090 - DNA, 427 bp, Homo sapiens
gaggaggcaacaggcagactggccagaaacattcactttggagttggaaggacctatattcgaattgctgtcctgccactcactagatgtttgtttttccccttctgaacctcagtgttctcatctgtaaagtggccataacagtgcttgtctcacaagagggatggtgaggattaaacaatctatttatatgaaatgcagcattgtagctgatatataataaacactcagtaaagttttcagttatagttgttattatgtatgccccacattctgaggggctgctgtgtgtccttatgggmctatgtcctgtgaagaaatatcatccatgtgtgtcatggagaataagagaaaggccgggaatccaccactcctgcaccccagtgagccatcatctcagagtggggggaaggggtcatccagtact

SEQ ID NO: 509091 - DNA, 274 bp, Homo sapiens
tgtgtccctgcctcacctcactccccactgtcgtggatttgttggctcatctgtagtgcgctccctgaagaaacactcagttcactcagcttgtttctaacccaaagcactctgcagggcccatcctctcatctttgcctggggatgccagaccacgcactgcggatgccttccgccttagcactagtgggctaaatgatgactgccttgctgtcccaacaccacccatcaaagggaagacatcacyactggggtcagtacagcccaagtgaca

SEQ ID NO: 509092 - DNA, 580 bp, Homo sapiens
atactcctggtaccaggtaaggaaaatgcaaataaaatccaacagggagaagtggagtatggacaatggagcattgtttttagcaatacccactagctcaggttttcacaaaagagatttgctagttgtttgatatctacagaaaaatggacaagtttttcttgatttctattgagaaatttcctccactaagtttttgttcttattttattaacttaatcaattaatttaataaaatgtattaatgcaataaaagaaactaaattaaaatataacaaaatattatgtacttttttatatctatgcytctatatatctgcattttaaggtaataatttaaaatcattattttttcatctaatacttgtgtactctataaagagtcagattgcaacaagttcagacattgaggtttatacagtctccattgcaactctaccattgtatttcgaaagcagccatagacaatatgtaaatgcataagcattcctgtgttccaataaaactttactgaataggcagtaggccatagattgctgaccctggctctaaaacagcttaaatagctacttgtactaaa

SEQ ID NO: 509093 - DNA, 611 bp, Homo sapiens
gtctgttttatttatgcagtgcctcagatagcaccatatgcttgtggattcttaatacatgctatttgatgattgatttatacactcyatttacaaggtgttaatgtaaaaaaaggccaaattcagtctcatgtctcagtttaatagtttttacatttttccagtaatgtcttttgtaaacaacactaaatactacttcaagttcatcaatggctctttatgattagttgatattctaagacaacagaatgtacatgaaatatacaaataaatacgttctgtgttagacaaacaatgtacagatggttttaaatttttatgataaatatatggactgcatatttttgtagaatgatttattgcaactagtcttagagagctattcggagatacagaatagtgtaactaaaatttaatagaactttagaaagtaaaagagtgaagtagaaacatttcatttcatcagcacagcaaaaactttgggacttttgtctagcacaaaatttcaatgttcagttcatgcactagaaataatcatatatttttggtaacagaaaaaaatggagaggccccatgacaatcaatttctgtgtaaacaattatttgaaaat

SEQ ID NO: 509094 - DNA, 606 bp, Homo sapiens
ctgcatatgagaatcaggaagtaggccctcaataggcaccaaatatgccattttttaaaatcttgaatttcctagcctcctgaactctcagaagtaaatttctattgtttataagccacttagtctatggcattttgttatagctgcccaaataaactaatcaaagaaggaacgcttttcaactctttccacgtggccagcatttttcttacatatatgataggaattttcaaacagattatataaggaactcttacaactcaataataaaagtgcaaataactcaggccaggcgtggtggctcacgcctgtaatcccagcactttgggaggccaaggcaggcggatcatgaggtcagatggagaccatcctggctaacatggtgaaaytccgtctctactaaaaaaatacaaaaaattagctgggtgtggtggcaggcacctgtagtcccagctactagggaggctgaggcaggagaatggcatgaacccgggaggcagggcttgcagtgagccgagattgcaccactgaactctagcctgagtgacagagcgagactctatctcaaaaaaaataaatgaataaaaaataaagtacaaataactc

SEQ ID NO: 509095 - DNA, 624 bp, Homo sapiens
aacgacttctcaccactaataccactcatactcacagcattctcacctaagtcactaccttttttctctggattacaatagcctcccaatttatttgctcacataaccatttattctacacagtgcaccagatacacccctttgaaatgcaaacacaatcatgttattctctggtgaaattatctcatacattcctatcgcatttaaaattaattcagaatcatcccatgattatcaaaaccctacatgctcttccacaacatggtttacttccaagatatctcttcaaattttttttcrctgtactgaattggtgactaatagtcatatttttgtttttgttcaaaaagtcttgacttgtaaatttttcagtttcttctttatccacaggtaactctttcctcacaaggtgaattgcttgcttccttgagttctgctctcaaagatacccttcattttctacctaatattaataactgtaatcactcattattccattactatgctctatagtgtatacaactgttttttgtcatgtcattaactaaattatttatttgttccagtaatgtattccataaatattgtacacctaaaaattatgctatttttactgctgtatgc

SEQ ID NO: 509096 - DNA, 624 bp, Homo sapiens
aacgacttctcaccactaataccactcatactcacagcattctcacctaagtcactaccttttttctctggattacaatagcctcccaatttatttgctcacataaccatttattctacacagtgcaccagatacacccctttgaaatgcaaacacaatcatgttattctctggtgaaattatctcatacattcctatcgcatttaaaattaattcagaatcatcccatgattatcaaaaccctacatgctcttccacaacatggtttacttccaagatatctcttcaaattttttttcactgtactgaattggtgactaatagtcatatttttgtttttgttcaaaaagtcttgacttgtaaatttttcagtttcttctttatccacaggtaactctttcctcacaaggtgaattgcttgcttccttgagttctgctctcaaagatacccttcattttctacctaatattaataactgtaatcactcattattccattactatgctctayagtgtatacaactgttttttgtcatgtcattaactaaattatttatttgttccagtaatgtattccataaatattgtacacctaaaaattatgctatttttactgctgtatgc

SEQ ID NO: 509097 - DNA, 400 bp, Homo sapiens
tgaaaacttttccccccaaacccactgtgatctctcaagcaattggtaaggaatccaagagagtctgtatatgatacagatcagggagagcagaacacttgggaggtgaccaggtcttgggggccgagcccttatgaatgggattagtgcctttataaaagaagctcaatggagttcttgtgtgccttccactatgtgaggayatagaaagaaggcaccatctatgaaccatgaaatgggctctcatcaacactgaatttgtgagcatcttgacctgagatcttacagcctcaagaagtgtgaaaaaagaaatatctgttgttttttagtcacccagttcatgttattttgttataagagtccaaatagaccaagatattccacttaatatataggggaa

SEQ ID NO: 509098 - DNA, 400 bp, Homo sapiens
tgaaaacttttccccccaaacccactgtgatctctcaagcaattggtaaggaatccaagagagtctgtatatgatacagatcagggagagcagaacacttgggaggtgaccaggtcttgggggccgagcccttatgaatgggattagtgcctttataaaagaagctcaatggagttcttgtgtgccttccactatgtgaggacrtagaaagaaggcaccatctatgaaccatgaaatgggctctcatcaacactgaatttgtgagcatcttgacctgagatcttacagcctcaagaagtgtgaaaaaagaaatatctgttgttttttagtcacccagttcatgttattttgttataagagtccaaatagaccaagatattccacttaatatataggggaa

SEQ ID NO: 509099 - DNA, 400 bp, Homo sapiens
tgaaaacttttccccccaaacccactgtgatctctcaagcaattggtaaggaatccaagagagtctgtatatgatacagatcagggagagcagaacacttgggaggtgaccaggtcttgggggccgagcccttatgaatgggattagtgcctttataaaagaagctcaatggagttcttgtgtgccttccactatgtgaggacatagaaagaasgcaccatctatgaaccatgaaatgggctctcatcaacactgaatttgtgagcatcttgacctgagatcttacagcctcaagaagtgtgaaaaaagaaatatctgttgttttttagtcacccagttcatgttattttgttataagagtccaaatagaccaagatattccacttaatatataggggaa

SEQ ID NO: 509100 - DNA, 400 bp, Homo sapiens
tgaaaacttttccccccaaacccactgtgatctctcaagcaattggtaaggaatccaagagagtctgtatatgatacagatcagggagagcagaacacttgggaggtgaccaggtcttgggggccgagcccttatgaatgggattagtgcctttataaaagaagctcaatggagttcttgtgtgccttccactatgtgaggacatagaaagaaggcmccatctatgaaccatgaaatgggctctcatcaacactgaatttgtgagcatcttgacctgagatcttacagcctcaagaagtgtgaaaaaagaaatatctgttgttttttagtcacccagttcatgttattttgttataagagtccaaatagaccaagatattccacttaatatataggggaa

SEQ ID NO: 509101 - DNA, 653 bp, Homo sapiens
ggccttgctgagagtgagcccagcatatcatggaaaatgaattcaccacactgtggcacaaaccccrtatcatccaacagcttcttcaaccagagcagctcagtcttggtccttatccgtgaatgatggttgcagaaccacgctggctttacagggatctgggtaggatccattgcccccaccctgaatgtattcatagtgatgtgctatatggtttaggagccttggtaaataagtcaaggtagaactgtctcaactcagaactttcttcaggtaagaagtatgcttccaacagaagttcctaacaggaagcagctatcaacatcaaaggggagtatagaaatcaatccaagactaaccccacagtctactcttttcttccctatcatctgtgcccctaaagaagtcaggggagttccctggccagacctaactcagtacttaaatatctttgataggcctgggaaacagaacacaggaagaaaagccgtggcttttcaccccagcagtggaatctattcttgttttttgtagcttgaggtgtttacacctaaggaacagaaagtgaacttaaaatgcctttaattaagaaattaggtttaaatgattccatataacaaatctgatttaattttaaatttttgaatacattt

SEQ ID NO: 509102 - DNA, 653 bp, Homo sapiens
ggccttgctgagagtgagcccagcatatcatggaaaatgaattcaccacactgtggcacaaaccccgtatcatccaacagcttcttcaaccagagcagctcagtcttggtccttatccgtgaatgatggttgcagaaccacgctggctttacagggatctgggtaggatcyattgcccccaccctgaatgtattcatagtgatgtgctatatggtttaggagccttggtaaataagtcaaggtagaactgtctcaactcagaactttcttcaggtaagaagtatgcttccaacagaagttcctaacaggaagcagctatcaacatcaaaggggagtatagaaatcaatccaagactaaccccacagtctactcttttcttccctatcatctgtgcccctaaagaagtcaggggagttccctggccagacctaactcagtacttaaatatctttgataggcctgggaaacagaacacaggaagaaaagccgtggcttttcaccccagcagtggaatctattcttgttttttgtagcttgaggtgtttacacctaaggaacagaaagtgaacttaaaatgcctttaattaagaaattaggtttaaatgattccatataacaaatctgatttaattttaaatttttgaatacattt

SEQ ID NO: 509103 - DNA, 653 bp, Homo sapiens
ggccttgctgagagtgagcccagcatatcatggaaaatgaattcaccacactgtggcacaaaccccgtatcatccaacagcttcttcaaccagagcagctcagtcttggtccttatccgtgaatgatggttgcagaaccacgctggctttacagggatctgggtaggatccattgcccccaccctgaatgtattcatagtgatgtgctatatggtttaggagccttggtaaataagtcaaggtagaactgtctcaactcagaactttcttcaggtaagaagtatgcttccaacagaagttcctaacaggaagcagctatcaacatcaaaggggagtatagaaatcaatccaagactaaccccacagtctactcttttcttccctatcatctgtgcccctaaagaagtcaggggagttccctggccagacctaactcagtacttaaatatctttgataggcctgggaaacagaacacaggaagaaaagycgtggcttttcaccccagcagtggaatctattcttgttttttgtagcttgaggtgtttacacctaaggaacagaaagtgaacttaaaatgcctttaattaagaaattaggtttaaatgattccatataacaaatctgatttaattttaaatttttgaatacattt

SEQ ID NO: 509104 - DNA, 491 bp, Homo sapiens
gattttcacttactgcaaagaaaaatgcttagctgaattattgtctgtctgggttgcaagtagcacacccccaccatctgtaaaataatattttggtagactagagggcatgttgttaaaggaacccaaaggagaattattttgataaagttagggacaatctctagtatgtgtgttttataattctgcaacttatgtagaaatatatctgaatgaaatgttgttgaaaagctgtatatcattttaattttaataaatcgagtcacattttatattcactgactgagaagttggtatttaggaaacctgtgagaaattactttaataatttgtgtgtatggcaaacattcaccttctgacttaattcagaatttctatataaaaacaaaaatttaattctktaatatcatcttaaaatgagggatgttcatgccatgttaaataaatcatttccacttatttttaatacatagtattagttaggatgcttg

SEQ ID NO: 509105 - DNA, 572 bp, Homo sapiens
agctggtacattctgattcttgtggcatgtcttaataagactttgtcagtctccatagaacatgcccattcttccagtaaagaaatctcatccatgcaagtacaaattcatgcaagatataagggtgatcagtgatactgtagaagacacccaccccactggggccaatcaatacactatttttatcttcctgtccagagaccatgaatggtttagagtattagatttgaaggatgctttcttttgcataccagcgaatgcagaaagccaattattgtttgagtggacagaccctgaaacagccrcacaatttcaatattgttggacagtgcttcctcaagggtttaaaaattccccaactgtatttggggaagcactggctcagaacttaagagacttacaattggaaaatggggtactgctacggtatgcggatgatttgctaatctccagctccttgaagcaagaatgtcaggataacactgtaaaaactaaaccatttggcagcctgtgggtacaaggtcttaagcaaaagggcacaggggtacagatatgcaaacaaactatgggat

SEQ ID NO: 509106 - DNA, 636 bp, Homo sapiens
ccctgcccagcatcaggcctgcaggtcctgctggagcacatgcctcagggagactcaggagtgggrctctcacaggactggggcgctcctttccatccctctcctcacttcccccctcccctgagggtgctgcagggctgggcagggcgggctgggagcagggagatgtaccgtgaaactgaattactgcctttcacatcgtgactcccaagtatgcagaaggaaccctctggggattctcaggtttcagttttactttctatacgcattttactgaatttgacttgtgcacttaagtgtattttctgtgtccgcaggatgatttgagacaacatttagataaatctttggaagagaacagtaggttaaaatcgcttttgttgagtatgaaaaaggaagtgaagagtgcagacactgcagccacgttaaatttgcagatcgctggtaagttgatcgtgtatttggtcactttgtaaactttaggtgttcaaatgtgcctaggtagactttgttttaaattcttcactgagggaagtgagcagcagcagacgcagttggtaagtggggagccgagcccctgcctcactggctggggtggaggctgcctcggccggagtttatggcacacacgtgtgt

SEQ ID NO: 509107 - DNA, 412 bp, Homo sapiens
gcaggatgatttgagacaacatttagataaatctttggaagagaacagtaggttaaaatcgcttttgttgagtatgaaaaaggaagtgaagagtgcagacactgcagccacgttaaatttgcagatcgctggtaagttgatcgtgtatttggtcactttgtaaactttaggtgttcaaatgtgcctaggtagactttgttttaaattcttcactgagggaagtgagcagcagcagacgcagttggtaagtggggagccgagcccctgcctcactggctggggtggaggctgcctcggccggagtttatggcacacacgtgtgtctggggcagtcctggcatggatgtaggaggcaaggccacccctgtcctcaccctgcccraccgtcctcccctcagcacagggtgtcagg

SEQ ID NO: 509108 - DNA, 379 bp, Homo sapiens
ccgttgcccggtggcactgccctccactgggatgtgctgatgggctttagcttcatttattccacctccgctgtgagtttctgagaacttttcgtggaaacaacaggtggagacctgagtttgggctgaaatcttaggttcatctgtgcaaagatgtctgccctgtggcagcggtgctcgagccatgtccttgccggcactgggagctgagtcctttaatcctagctgctctgtcagggggttgtggtctgtgtttatggctttaatttgcatccgctgctgttgagatactggccgtgcctgtctcttcttttctctccaggtctgcccacctttgttctggggttgcttctyttagtattgagtcctaagagatctt

SEQ ID NO: 509109 - DNA, 569 bp, Homo sapiens
aaataaggagatccccctgtctgtagaaaaaaaagaatgtttggtaagatgtggtgtgaacaatgacatctataagagattatttattaacatttgctcagaaaactagaaaatagaatgatgtcttataatccatcaatatcataataaaaatgctaagtttttcaactatggtaaatatagagaacataacattgcccatcttagccatttttaagtgtacagggcaatggcattaagtaagtcacattgttgtgctatcatcaataatagcaatctccagaactctttccatcttctaaaactgaaactctatttcaattaaatgayaaccctctccccatttcccctgcttcaagttcctggcaacctccattcaagttctgtctctatgacagtgactactctgaagcaggttcactgtgccctggttaccaacttatcagagtccagggagacagaacaatcatacacaacaagttacaagaatctggtgtagtatttataggtggccaacaagggactgcagaagcctaggatgtattgtgggtctgtcccctgaggcacag

SEQ ID NO: 509110 - DNA, 569 bp, Homo sapiens
aaataaggagatccccctgtctgtagaaaaaaaagaatgtttggtaagatgtggtgtgaacaatgacatctataagagattatttattaacatttgctcagaaaactagaaaatagaatgatgtcttataatccatcaatatcataataaaaatgctaagtttttcaactatggtaaatatagagaacataacattgcccatcttagccatttttaagtgtacagggcaatggcattaagtaagtcacattgttgtgctatcatcaataatagcaatctccagaactctttccatcttctaaaactgaaactctatttcaattaaatgacaaccctctccccatttcccctgcttcmagttcctggcaacctccattcaagttctgtctctatgacagtgactactctgaagcaggttcactgtgccctggttaccaacttatcagagtccagggagacagaacaatcatacacaacaagttacaagaatctggtgtagtatttataggtggccaacaagggactgcagaagcctaggatgtattgtgggtctgtcccctgaggcacag

SEQ ID NO: 509111 - DNA, 569 bp, Homo sapiens
aaataaggagatccccctgtctgtagaaaaaaaagaatgtttggtaagatgtggtgtgaacaatgacatctataagagattatttattaacatttgctcagaaaactagaaaatagaatgatgtcttataatccatcaatatcataataaaaatgctaagtttttcaactatggtaaatatagagaacataacattgcccatcttagccatttttaagtgtacagggcaatggcattaagtaagtcacattgttgtgctatcatcaataatagcaatctccagaactctttccatcttctaaaactgaaactctatttcaattaaatgacaaccctctccccatttcccctgcttcaagttcctggcaacctycattcaagttctgtctctatgacagtgactactctgaagcaggttcactgtgccctggttaccaacttatcagagtccagggagacagaacaatcatacacaacaagttacaagaatctggtgtagtatttataggtggccaacaagggactgcagaagcctaggatgtattgtgggtctgtcccctgaggcacag

SEQ ID NO: 509112 - DNA, 556 bp, Homo sapiens
tttcatgtatagattaaggtgtctcatcactgtaaaaaatgtttttcattatttctccatttttttctttttcaatttttattttaaaatcagagcatacatgtacagatatgttacaaagttattttgcatgatgctgggatttggggtatgactgaacttattaaacaggtagtgagcactgtaccccataggtattttttcagcctctgcccttcctccctttgtctcccctctagtagttcccagtgtctattgtgcccatcaaccgtggattggataaaaaaaaaaactgtgtatagatacaccatggaatcctatgcagccataaataaaaagaaaatcatggtcctgcaaaaacttggatgcagctggargtcatttacctaagtgaactaatgcagaaacaaaaaaccaaataccacgtgttctcacttataagcgggagctaaacatggggtacacatgggcgtaaagatgagaacacagtttttagcctcttcctgtcttctcctttgtgattcctaatacaaatttgttggtattgttcacaggg

SEQ ID NO: 509113 - DNA, 556 bp, Homo sapiens
tttcatgtatagattaaggtgtctcatcactgtaaaaaatgtttttcattatttctccatttttttctttttcaatttttattttaaaatcagagcatacatgtacagatatgttacaaagttattttgcatgatgctgggatttggggtatgactgaacttattaaacaggtagtgagcactgtaccccataggtattttttcagcctctgcccttcctccctttgtctcccctctagtagttcccagtgtctattgtgcccatcaaccgtggattggataaaaaaaaaaactgtgtatagatacaccatggaatcctatgcagccataaataaaaagaaaatcatggtcctgcaaaaacttggatgcagctggaggtcatttwcctaagtgaactaatgcagaaacaaaaaaccaaataccacgtgttctcacttataagcgggagctaaacatggggtacacatgggcgtaaagatgagaacacagtttttagcctcttcctgtcttctcctttgtgattcctaatacaaatttgttggtattgttcacaggg

SEQ ID NO: 509114 - DNA, 556 bp, Homo sapiens
tttcatgtatagattaaggtgtctcatcactgtaaaaaatgtttttcattatttctccatttttttctttttcaatttttattttaaaatcagagcatacatgtacagatatgttacaaagttattttgcatgatgctgggatttggggtatgactgaacttattaaacaggtagtgagcactgtaccccataggtattttttcagcctctgcccttcctccctttgtctcccctctagtagttcccagtgtctattgtgcccatcaaccgtggattggataaaaaaaaaaactgtgtatagatacaccatggaatcctatgcagccataaataaaaagaaaatcatggtcctgcaaaaacttggatgcagctggaggtcatttacctaagtgaactaatgcagaaacaaaaaamcaaataccacgtgttctcacttataagcgggagctaaacatggggtacacatgggcgtaaagatgagaacacagtttttagcctcttcctgtcttctcctttgtgattcctaatacaaatttgttggtattgttcacaggg

SEQ ID NO: 509115 - DNA, 556 bp, Homo sapiens
tttcatgtatagattaaggtgtctcatcactgtaaaaaatgtttttcattatttctccatttttttctttttcaatttttattttaaaatcagagcatacatgtacagatatgttacaaagttattttgcatgatgctgggatttggggtatgactgaacttattaaacaggtagtgagcactgtaccccataggtattttttcagcctctgcccttcctccctttgtctcccctctagtagttcccagtgtctattgtgcccatcaaccgtggattggataaaaaaaaaaactgtgtatagatacaccatggaatcctatgcagccataaataaaaagaaaatcatggtcctgcaaaaacttggatgcagctggaggtcatttacctaagtgaactaatgcagaaacaaaaaaccaaataccacrtgttctcacttataagcgggagctaaacatggggtacacatgggcgtaaagatgagaacacagtttttagcctcttcctgtcttctcctttgtgattcctaatacaaatttgttggtattgttcacaggg

SEQ ID NO: 509116 - DNA, 518 bp, Homo sapiens
aaatatttcactacatccactatcaccttccacattgaagcatttagcacgatatggagttgtcccaggcttgaagactgtgaatacggtggaatattaaagctaaagtttacaggaaaacacaaatattgacatcttatacatttcagctattttttcctgtaatataagaaccttgtaatggaacgtataaaggggaaattgactctcagacagtttcattttgacgaccatggagggtacatcatcgggcttcgatgccgcctgcactgagcagaagcaccttgatctgccaagacctcaaaatacgggctggcccagccaccacaggatggggaaggctggattctctgaataggatgtggaatggtcaggcaggtgcctggatccagacccgccgaacagacgtctccagraatgctcctttaacacttgaagcatgcatgtctcacctgtgagatggagaaagtgtgtctcccaggccagtggggctgggattggagaggatggaacaggca

SEQ ID NO: 509117 - DNA, 460 bp, Homo sapiens
caatacgtcagcaactgaagattggaaagattgctttaataaagtgttcagattcgttatggttggtttgtctttattgaaattccataaagtatggctcatagggaggtgttagattactcaattaaaaataatgttaatttaactgcttaagcagtgattttttttgctgattgacttttatatgtcagcagttcactaggacattacaatggctcaagggcactcacagacrtttgttgtggaccctccgcaaatgtgtcacctgaccttcacggtcagcaggtcagcaggactgagaagggtccctctgagactttgatcagctcctgttggaaagatcctttcccagtggaaatctattgtaccacactgttcctttcttagatctgaattaatggcagcattggaaaaaggctcataaagctgacaaaatgaacaaagagaaacatttctggag

SEQ ID NO: 509118 - DNA, 613 bp, Homo sapiens
gcagtacctttaatttcattctatctcacgatggtaggaggagggagagcaagtggtgtccatctgggcctccagtgggacaaggggactgacccaagcatcrccaggctgcccgggcatggcctgtgtccagcagagcccccgctggctctcacattgccttgccctgcaccccggacaagctcccacacaccccagaagaatggagctgggcagtccatctgcgggttacagagaaacacaaagtaaaggtagtcacttaaatacaccacttaaaaaaagggcttaggtcatgagcaggcaattcataaaacaaaggaaaaaatgcaaatatatctttctaaaaacatagtgatacaggaaacgcaggttaagtatcaatgagacattatcttttcccatattgcgagtgactaaagatgcaataatggtggctccaatgaggatgccggaaatgaaggactcacacattcaccactggtggaaatgcagatgggaacctttctggagaaacaaactggcgctcagtttccaaattcaagatgtacaaaatatggggtgatatggttcggatgtgtcccccctcaatctcatcttgaattgtagctcccat

SEQ ID NO: 509119 - DNA, 613 bp, Homo sapiens
gcagtacctttaatttcattctatctcacgatggtaggaggagggagagcaagtggtgtccatctgggcctccagtgggacaaggggactgacccaagcatcgccaggctgcccgggcatggcctgtgtccagcrgagcccccgctggctctcacattgccttgccctgcaccccggacaagctcccacacaccccagaagaatggagctgggcagtccatctgcgggttacagagaaacacaaagtaaaggtagtcacttaaatacaccacttaaaaaaagggcttaggtcatgagcaggcaattcataaaacaaaggaaaaaatgcaaatatatctttctaaaaacatagtgatacaggaaacgcaggttaagtatcaatgagacattatcttttcccatattgcgagtgactaaagatgcaataatggtggctccaatgaggatgccggaaatgaaggactcacacattcaccactggtggaaatgcagatgggaacctttctggagaaacaaactggcgctcagtttccaaattcaagatgtacaaaatatggggtgatatggttcggatgtgtcccccctcaatctcatcttgaattgtagctcccat

SEQ ID NO: 509120 - DNA, 585 bp, Homo sapiens
gcacatggaagaaacatattacaagtgtgtaaataatattggttatttttaaacaatccrcttgccttcctaaactggtaagctaaaagagaagattcatattctagaattattcctattatgcttcatttggatgcagtttattgaccaaaatattccccttaaataccaaaacaacttgacactgatttttctgtctgaaagaaacactgttaaacctgaaagtagaatcttggtacataattctcctgggaccatgtatcaaatcgtaatttccaggccctgtgattgcaactgtaattttccatcgacagagctctctgccatacaacatgctttgatttaatcctcacaaaggctctgggaattaggtattattgttgctttgtagaaaaaggaactgctccccactgtcaatcatccagccaggagtctagctgcccagcctggcccggtggccattgttggctcgacagaggtgctgtctcttgccactgccagccccatcaccatcctgggaaggaggctctctagtcagccctataaacgcacctcctgaatatccatgaaaaaatcagcaagaag

SEQ ID NO: 509121 - DNA, 500 bp, Homo sapiens
ctaagtggcagatgttggactttcagggcccaacccctgagagctggaactctccaggggccaagagcagagtcttccaggggggcagagaggaggccccctcagattgtgaccctagctgcacccctgctgaagggaaaagaggaggaaggggtcagcagggtgagggggagtcaaagcagctgaaggaggatggaagggcaactcacctggcgcagacacacagccccgcctcttctcccctgcaacagacagcagggtgaggcctccgygtggacagactcgcacccaaactgcctggcccaccaggccctggcagggccatttcccttctcaatctatctttcccttcacctaaagggaaacttctgatttcccttcctcctccgtcctccaggaactctttccagattgcctttccatccctcttcccacccaagacccagtcactcttccatctctccctgccttagcacttgggaatggcacatacgtgccct

SEQ ID NO: 509122 - DNA, 614 bp, Homo sapiens
tcctgacttctatcgccactgccacttggatgtccagtagtcatttcaaacttaacttggtcaaaacagaactacttatttccctactcccccatttccrtgtcttgtttaagtttaaatgtgcctattttaaaaaaaggtggcctggcgtggtggctcacgcctgtaatcccagcactttgggaggccgaggcgggctgatcaccaccaggtcaggagatcgagaccatcctggctaacacggtgaaaccccgtctccactaaaaatacaaaaaattagccgggcgtggtggtgggcgcctgtagtcccagccactcgggaggctgaggcaggagaatggcgtgaacccgggaggcagagcttgcagtgagccgagatagcgccaccgcactccggcctgggcaaaagagcgacactccgtctcaaaaaaaaaaaaaaaaaaaaagaaagaaagaaagaaaagaaaaggcacatcattcacctacttgcttcggcaacacgactatgcatcatccttgattaaatctctatcatctactcttttcatcattactaggtgatagtcttgccttctgcattacgttaaaaatagacacaaatgataactaatcaa

SEQ ID NO: 509123 - DNA, 614 bp, Homo sapiens
tcctgacttctatcgccactgccacttggatgtccagtagtcatttcaaacttaacttggtcaaaacagaactacttatttccctactcccccatttccgtgtcttgtttaagtttaaatgtgcctattttaaaaaaaggtggcctggcgtggtggctcacgcctgtaatcccagcactttgggaggccgaggcgggctgatcaccaccaggtcaggagatcgagaccatcctggctaacacggtgaaaccccgtctccactaaaaatacaaaarattagccgggcgtggtggtgggcgcctgtagtcccagccactcgggaggctgaggcaggagaatggcgtgaacccgggaggcagagcttgcagtgagccgagatagcgccaccgcactccggcctgggcaaaagagcgacactccgtctcaaaaaaaaaaaaaaaaaaaaagaaagaaagaaagaaaagaaaaggcacatcattcacctacttgcttcggcaacacgactatgcatcatccttgattaaatctctatcatctactcttttcatcattactaggtgatagtcttgccttctgcattacgttaaaaatagacacaaatgataactaatcaa

SEQ ID NO: 509124 - DNA, 621 bp, Homo sapiens
atggagctttagggagtgaattcagaaaggcatggtggagctggattttgaaaggctttaaaagccaagtcacagttacatttaatgtcatagcaaatatgatccactgatagtttttggaaaacaggtagggaaaascacttacgaaggacaattgttctaataatagagaacataaaataaatgaggtgggacaaggtcactaagctagttatatcccatttgtcaaaaaacccactagtactctccttgatgtttctggagttcacttttttgttgccttaaccctattggcaaagacttggctatagagtactaattgtgatgcaagcaagttcttttgccaatggcaaccagcagagcttcccctgaagattggaggggatgagtcaggggcaaggaaggattaacagattctgcctcaagtcctggtgaaccaactcctctccccaagacagacacatactagtgaaataaattggatttaaatcatcacctgaggcaatcctgaaagagaaaagcagtcctagaaaagagtggaggaaaagaggacagccccattctctttgtgaccacgaagactgccgccatgtggttgggagccacgtaacttcttttagt

SEQ ID NO: 509125 - DNA, 635 bp, Homo sapiens
ctgttcacacctggattcatcactatgaccaggaagattggatcttcaagtacagccatagctattggctcaccctgtgttttgggtaggaatgaagctaggtgacaatttccagagaaaggcaaatagatgagatctgggtgcccactccaatatgtttttagttctacctaaagtttaagtaaaaataatgtagttatgaaaatatttacaagtaggtaaaataaatgccttaacgtatgactaaagatgaataaggttgatcaggaagaggttcttggaagcaagaaggtttatgaatggaaacttaaagatttgatgagtcgctgtctattccaggtagagggaagaaaatgcacagagactcagagagtcatttttktggggagagcaaccactttgctggagtagcccaaaacattaaagtcagagaataaagagctttaaagttaattagattagaggtaagataatttggcaagggcttgtaggtgggaggctacccaggggagcagcatgttataatggaaaaagcattttaatagcgtccaggaagcctggattctgccatgaattagcagtttctgtttgggtaatcaagttcccttggcttcagtgtagtcacctgtaaaaga

SEQ ID NO: 509126 - DNA, 428 bp, Homo sapiens
gcttgcataacctctgcaatgatgcagagggaaagaatgcccactgcacaaccacaagttaccatcytgagttgttttagacagggagataattcgcagtcattgcaaattattttgcaagccccgaacttttggtcccttaagtgttcatctttatgtctgttcagataatattgctgctcactgctgactagagtcacagcactaaatacaaaattaacacccatttcgtctttacgaagtgttttttaaaagtatttaaatcagtaagagattcttaacaatcaaatataattcttttcattattaagtcatgggcagatgaaatagaatattctccagagagttgaggagtcagatgtaaatctcagccctgaacatataggaagaaatgtaagtctgggtgagcagcactgatcctgggtctg

SEQ ID NO: 509127 - DNA, 428 bp, Homo sapiens
gcttgcataacctctgcaatgatgcagagggaaagaatgcccactgcacaaccacaagttaccatcctgagttgttttagacagggagataattcgcagtcattgcaaattattttgcaagccccgaacttttggtcccttaagtgttcatctttatgtctgttcagataatattgctgctcactgctgactagagtcacagcactaaatacaaaattaacacccatttcgtctttacgaagtgttttttaaaagtatttaaatcagtaagagattcttaacaatcaaatataattcttttcattattaagtcatgggcagatgaaatagaatattctccagagagttgaggagtcagatgyaaatctcagccctgaacatataggaagaaatgtaagtctgggtgagcagcactgatcctgggtctg

SEQ ID NO: 509128 - DNA, 606 bp, Homo sapiens
taggtaatgactgcctcaaagagagaagacrggcttggtgagaaataactggtctcaaatctccaatgtcctaactttgtccaaggaatttgtagagcgaaaatgaactaagtcacatccacacgacactccttaagatacttggagatgtccccacatacccacaagacttattttgtccatgctagacaccctcagttcctttaactatccgccatttcactcattcattcttctctggaaaaaaaattgccactttattgtttttttcttgagcttttactcatggcagaaggtgaagcagaagcttgcatgtcacatggtgggaacagtagcgagagagatgttggtagggggagctgcaacacactttcaaccaaccaggtctcataagaagtcgttatgatcaatgtcatcttaaaatgtggcactcaaaatcaagcacaattttccaaagactatcagatgtaaggagaacatggtaaaatagctaacctttatttcttatgagttgaaattgactcaggtgagccaagaaaacaccctgacgtcactctgagtgtagccccctttcttctcttcattcccttcaaatatacttgggcc

SEQ ID NO: 509129 - DNA, 606 bp, Homo sapiens
taggtaatgactgcctcaaagagagaagacgggcttggtgagaaataactggtctcaaatctccaatgtcctaactttgtccaaggaatttgtagagcgaaaatgaactaagtcacatccacacgasactccttaagatacttggagatgtccccacatacccacaagacttattttgtccatgctagacaccctcagttcctttaactatccgccatttcactcattcattcttctctggaaaaaaaattgccactttattgtttttttcttgagcttttactcatggcagaaggtgaagcagaagcttgcatgtcacatggtgggaacagtagcgagagagatgttggtagggggagctgcaacacactttcaaccaaccaggtctcataagaagtcgttatgatcaatgtcatcttaaaatgtggcactcaaaatcaagcacaattttccaaagactatcagatgtaaggagaacatggtaaaatagctaacctttatttcttatgagttgaaattgactcaggtgagccaagaaaacaccctgacgtcactctgagtgtagccccctttcttctcttcattcccttcaaatatacttgggcc

SEQ ID NO: 509130 - DNA, 606 bp, Homo sapiens
taggtaatgactgcctcaaagagagaagacgggcttggtgagaaataactggtctcaaatctccaatgtcctaactttgtccaaggaatttgtagagcgaaaatgaactaagtcacatccacacgacactccttaagatacttggagatgtccccacatacccacaagacttattttgtccatgctagacaccctcagttcctttaactatccgccatttcactcattcattcttctctggaaaaaaaattgccactttattgtttttttcttgagcttttactcatggcagaaggtgaagcagaagcttgcaygtcacatggtgggaacagtagcgagagagatgttggtagggggagctgcaacacactttcaaccaaccaggtctcataagaagtcgttatgatcaatgtcatcttaaaatgtggcactcaaaatcaagcacaattttccaaagactatcagatgtaaggagaacatggtaaaatagctaacctttatttcttatgagttgaaattgactcaggtgagccaagaaaacaccctgacgtcactctgagtgtagccccctttcttctcttcattcccttcaaatatacttgggcc

SEQ ID NO: 509131 - DNA, 651 bp, Homo sapiens
atgcccagctaatttttgtattttttgtagagatggggtttcatcatgttgcccaggctggtctcaaaccccttggcctcccacagtgctgtgatgacagatgacaggcatgagccaccgcacccagcctcatttactatttttaggaattggctaaccctggaaggggcagtcagcaagacccctggtgtcaaagcgtcagaaatctagatgaatgcagttctgttctctgttcccatattgctctcctgcttgatccctgcccagacccctgactccccccaaccctagataactcatccctttggccccaggaaggggagctgaggcacagcacagctcctggtggctcagccccaggctcatctatgcgagcgctctctgagtgtggtggatccccacaacccactccttttctgggagataaggaggcttttatgagttygtaaggaatcccctctgggtacctctggctgaattcctgccaaatgaggtagatcttgactttcctggctggccagtttcaacctcttttaaccttgagtccctttgactaaggaatacctccagtcctttctgtggggggcagttaggcttgccctggatgaaggcctttgaaaaccatcctcctttgtaaatgaccacgtccag

SEQ ID NO: 509132 - DNA, 382 bp, Homo sapiens
tgggctgcccccttggcccaatggaagaatgtgctcctgagcctgccactggtggaacgtgctgtacaccaagcaccacatcaggctgacctggcctcgccgttgcggcccaccccttatgcttgtgccaagctctccacctggttctgatgcagggcaggagagccccaaacttggggcttagcttgggagggttcacccaggaaagaattcaagggtgagccagtggtgttagacagcaaattttaytgaagcggcagtgtgcagcagcagcagaggtcctgctccttgcaaagcagggctgccccatgggcagtttctccagggtagcagctcagaggcggttctgcagttatacttatacccactttcaattatatgt

SEQ ID NO: 509133 - DNA, 155 bp, Homo sapiens
tcagggaagtgcacagtgcctgacctttcccgcagcctcctccccactgggcttccgtgagaggatcamcccttggagtgtccagagattcctgttaaatgctaaagaccacaggagagtttgggcgggggaagatgtttggggagcaacttagt

SEQ ID NO: 509134 - DNA, 155 bp, Homo sapiens
tcagggaagtgcacagtgcctgacctttcccgcagcctcctccccactgggcttccgtgagaggatcaccccttggagtgtccagagattcctgttaaatgctaaagaccacaggagagtttgggmgggggaagatgtttggggagcaacttagt

SEQ ID NO: 509135 - DNA, 600 bp, Homo sapiens
tgactctaaaacaaaaacattaacttgaattacagatttgggcctaatgtaattataagcattcttaaaagtgaaagaaataataagagaaactgagtrctgtgatgtgagtcagttaaacttttttttcaactttttctttaggtgattattttcccttaacataaaatttactttagctcaactatacaaacatgtgagttattgttatgtaaccatcactcttcattaagaaatgctttgtaaaaagtgagccagtttttcatatacattcttcaaaatacattctcaacattatacatcaaattatatatacatacatgcacacatacactatatatatcaaggatttatatgagaggattaattaagaaaaaaattagtggaataaaaataatgtttatgataattttggccatagaatatataatacagatgatgtgaagtacaaaatgttttttatacttcatattttgatgtacaaagtatgtttgtctttgtaattcagatgattactttgcacttgtgttcccatgaaaaatgcctttcatttctaagctggtattggcatctcagccaacacttttctccttcttttct

SEQ ID NO: 509136 - DNA, 636 bp, Homo sapiens
taaaacaaaaacattaacttgaattacagatttgggcctaatgtaattataagcattcttaaaagtgaaagaaataataagagaaactgagtgctgtgatgtgagtcagttaaacttttttttcaactttttctttaggtgattattttcccttaacataaaatttactttagctcaactatacaaacatgtgagttattgttatgtaaccatcactcttcattaagaaatgctttgtaaaaagtgagccagtttttcatatacattcttcaaaatacattctcaacattatacatcaaattatatatacatacatgcacacatacactatatatatcaaggatttatatgagaggattaattaagaaaaaaattagtggaataaaaataatgtttatgataattttggccatagaatatataatacagatgatgtgaagtacaaaatgttttttatacttcatattttgatgtacaaagtatgtttgtctttgtaattcagatgattactttgcacttgtgttcccatgaaaaatgcctttcatttctaagctggtattggcatctcagccaacactttkctccttcttttctgcgtcttctccttttctgctttttctggatctcaggccagag

SEQ ID NO: 509137 - DNA, 519 bp, Homo sapiens
ggacctggaaatgtaagatacatgaagaaaatctaagtggagaggctgtttgtggttaagtgataacagtgttgtaagcgatgcatgaggtaggtgttcagtgcatatcctctgcattttattaataaacactgtaaaatttagaagaaaattgtttcaccaaatgcacataaaactaataaaatagagtggattttgatatgtctcagattatttgtaaactttatttgttttaacaaataaaaaatatttttaatatgttaagggtcttgtgcattgattgaagtgtcatcctgctgtcaacattaacttattctaccttactcaggcttgtaggtaaaacatggtaagactataccattaagtaatatggtggaataacatctgtagtgattctttttcccagtggccttatacttcaaataatttagagaatattgttcccacgtrttacatttttatttattttgtaactgtgaagttattgtgatggttatactgaagattatataggagtat

SEQ ID NO: 509138 - DNA, 595 bp, Homo sapiens
taggctaaagcagcttaaactttcttaaatgaataaataaaatttggaatataaaaatagaatattgctcagctttgcaaaatcagcatatgtaacatataaaatcaaaatcttaacatgctaaataaaggcagtcacaacaagacaggttgtctgaatacactkatatgggatatctagaaacaaaaaataatactatatttgacgggctgggcgcggtggctcacgcctgtaatcccagcactttgggaggctgaggcaggccaatcacctgaggtcaggagttcaagacccaggcctggccaacatggtgaaaccctgtctactaaaaatttaaaaattagctgggcatggtggtgcacgcctgaaatcccagctacttgggaggctatggcaggagaatcgcttgaacctgggaggcagaggttgcagtgagccgagatcataccactgcactccagcctgacaacagagccagactccgtcggaaaaaaaaaaaaaaaatcagccaagaggagaaatacacaagatgaaccataaacaaagttggtgttatatttatagagacaaccatgcccatacatatgtataattt

SEQ ID NO: 509139 - DNA, 534 bp, Homo sapiens
tgctcgcctctcaggattaaacagcataatgcaaatcaaagagtttgaagaattggtaaaacttcacagcttgtcacacaaagtcattcagtgtgtgtttgcaaagaaaaaagatgtagacaaatgggatgacttttgtcttagtgagggttatggacattcattcttaataatgaaagaaacgtcgactgtgagtatgttcttttggtggattatgtttaaaacttccatgttttttggtacactttctatcagttttatgtcaacacaacacatatcgtcttggtaagaatttcattttcagtgtcagagcctaaaatagctggaggtggagaagcatgagtggaacatgtgccagagagcgcccaccctgtcccccagtcaggggcaggaactgagatgggtgggtgtgtttgcatgggtgggtgtggcagaggtggctgaaacgtgaatgcagtgtcatcctataagtgagacaatgtgttattcrtctttctgtgcttggcttatttcaccaagcatgttctccaagtc

SEQ ID NO: 509140 - DNA, 261 bp, Homo sapiens
ttcctactttcctattagtgaaaataacaaactgacttctctattaatattttaaaaagaactaatgtcccaaaactagcaaatctgttgttagtagcaaaacttatttttgatattggaaagataatcaattcttatgaaaaatatcaaatgcttttcctttggattgaggccattgtgaaggtcactactcgactgttgcaggcaaatgcagttgaattaagaacatggytttatcctatgtgtacatatatagatata

SEQ ID NO: 509141 - DNA, 569 bp, Homo sapiens
gcttaaaatagccatgtattkagaagaactcatataaagattttatgaacaaatttcagtgcatccataggatggaataatatgtaaccattgagggtgtcagtagatacagagatatgtcggcatgcagagatgtactttgctgtatcaagtgagaaaaaatcagtttgttatacatatacacaaatagaatctgctcttgtgttagctggaaatatgtggaaaatataatcaaacttatttctggggatttgtaagtgaagtttttccctttctcttatctgtgatttctgcaatgaacatctgcaaagttttagttaagtttcattagtaatgaaataatccttgggaagagaaggaatatgctacttgcatagatacaaataatttcttacattctattatttatttttatacctgtggatggctatcttctgtgaacttttaccctcttcagaagtagagggcttctgtttacctcttctggtagattttattgtgtatacatcttattatatatagattgatgtgtaaatagtatggattaattattttagtttagttatata

SEQ ID NO: 509142 - DNA, 465 bp, Homo sapiens
tgcttttaatttctcgttaccattagaacactcagtaatcatatgaattgtgcatttgtttgttttgcttaactctttttgtttgtttatgtttggggttttgttgttgttgtttcacttttctcccatctcttcctgacttggtgaaatccaaagaatgctccaaattgtggggaacaaggcttctgaattggctaaaactcatgtggctgcaaaaaaaaaaaaaaattccagttagcagaaatgatttttttaacttttttatttttattttttrcataagtggttgcatcttttgctagccaaggccaaactgagggagtagtggtggcgacccaaagttaagattctgccctgttcactacagaaacctgagtttggttcctaagtctagttctttctgtttgatatttgtgttacttttaaaatatcagcagtttgtcccagctatgatgtggtagtaaa

SEQ ID NO: 509143 - DNA, 614 bp, Homo sapiens
tgggatctcacacaagccagttattcacactgagttgcattttccttaactatcatctgaaaataatgttttcttcattccctggtaggtattaaatgtgaaaacttatgaaagcragatgataaaatatgatttgttactactattatggcaatcaacatataaaacatattctttatatatatatatatatatatatatatatatatatatatatatatatatatatatataaataatatatagaataagagaaaaggtgggtccccaaacatggcaatgtgattattagatgcatctttcctcatagtcttctatcatatctaacaagtggcctagtggtaaactctgcttctcaaccaaaaagaaagcagtctacatttcaaggttgtactttacctcatcataaattcctcaaacttttaactggtaaggttaaggctggaccggtatgtatctgccacaggtttgtgctctggaggaccgaggtatacaagaagtgttgccatttatcaaaaggtcatcttccaacagctttatgatccctagatatagcaaactacttagaaaaaagtagcagttcacatttagcagtacacatttctttaacttgt

SEQ ID NO: 509144 - DNA, 518 bp, Homo sapiens
tgaaaacttatgaaagcaagatgataaaatatgatttgttactactattatggcaatcaacatataaaacatattctttatatatatatatatatatatatatatatatatatatatatatatatatatatawataaataatatatagaataagagaaaaggtgggtccccaaacatggcaatgtgattattagatgcatctttcctcatagtcttctatcatatctaacaagtggcctagtggtaaactctgcttctcaaccaaaaagaaagcagtctacatttcaaggttgtactttacctcatcataaattcctcaaacttttaactggtaaggttaaggctggaccggtatgtatctgccacaggtttgtgctctggaggaccgaggtatacaagaagtgttgccatttatcaaaaggtcatcttccaacagctttatgatccctagatatagcaaactacttagaaaaaagtagcagttcacatttagcagtacacatttctttaacttgtaa

SEQ ID NO: 509145 - DNA, 614 bp, Homo sapiens
tgggatctcacacaagccagttattcacactgagttgcattttccttaactatcatctgaaaataatgttttcttcattccctggtaggtattaaatgtgaaaacttatgaaagcaagatgataaaatatgatttgttactactattatggcaatcaacatataaaacatattctttatatatatatatatatatatatatatatatatatatatatatatatatatatatataaataatatatagaataagagaaaaggtgggtccccaaacatggcaatgtgattattagatgcatctttcctcatagtcttctatcatatctaacaagtggcctagtggtaaactctgcttctcaaccaaaaagaaagcartctacatttcaaggttgtactttacctcatcataaattcctcaaacttttaactggtaaggttaaggctggaccggtatgtatctgccacaggtttgtgctctggaggaccgaggtatacaagaagtgttgccatttatcaaaaggtcatcttccaacagctttatgatccctagatatagcaaactacttagaaaaaagtagcagttcacatttagcagtacacatttctttaacttgt

SEQ ID NO: 509146 - DNA, 467 bp, Homo sapiens
gcttccccgccccaagaagggcagtttggaggaaagtctttggcctgatggaaggcggcgcccatcgggggcggggctgagaactaggccggcgccgctgcctggtaagcggggaccaagaggcccacggcctccatcaggaaccaggtgcttctccaaatcccggacgtccaggaggaacaacggcgtcaagctggctgacaccaggaacacccagaagtccccgctcctgtctgtccttccgcactcaggagcggggatggccacagggacaccatctgcccacaaaccgctggcgtttgctgccatggtgcrcggagatgcggtccccgaggaggccactttcggccaggacgccgggatcgtatcagcagcagcatcccgcgctgacactcagtattgacttttcccggacattgctggattttttcctttttaaaacaattttgcagtgggagaacaaaaaa

SEQ ID NO: 509147 - DNA, 467 bp, Homo sapiens
gcttccccgccccaagaagggcagtttggaggaaagtctttggcctgatggaaggcggcgcccatcgggggcggggctgagaactaggccggcgccgctgcctggtaagcggggaccaagaggcccacggcctccatcaggaaccaggtgcttctccaaatcccggacgtccaggaggaacaacggcgtcaagctggctgacaccaggaacacccagaagtccccgctcctgtctgtccttccgcactcaggagcggggatggccacagggacaccatctgcccacaaaccgctggcgtttgctgccatggtgcgcggagatgcggtccccgaggaggccactttcggccaggacgccgggatcgtatcagcrgcagcatcccgcgctgacactcagtattgacttttcccggacattgctggattttttcctttttaaaacaattttgcagtgggagaacaaaaaa

SEQ ID NO: 509148 - DNA, 636 bp, Homo sapiens
gctggactgctaagtagtctgctgaccataagttagatctcaggagaatgaccaagatatataaaaagcacacagtaaagaatttttaaatttccattgttgaaaagacacaaaaatgagtaactcaaccttgcttcactatcactttctagagaataaataacccatgcagtattagaacttctgcttctagtcatgctatayacactattttcatcatataatgtatttggctatttgactaccaatgttcattttgcagaaggtgttctcctatagaaaccctgggtactatataaatagggtctatttcatttagggtatattaccagacctctaaatggattactctgaattgtacagaataaatttattcagtattagcaatataacaagtaaaatatacttgcatttgtttgatttacaaatatatgtctgaattaggaccaaactattttaaaagttgttttaaaacgtcatctactacatatttgcgataacccagggactcattaacttttataataccaagagccaagaagaaattatgaacgaatactttgggaaaacaaaatcggagaatgattaagtcatttaaagaagtaaagttcttattattcattagaagatttaaca

SEQ ID NO: 509149 - DNA, 548 bp, Homo sapiens
tcccaaaggctattttttgaaacaaaaattaataaaaattcataggccattagctaatctggtaagataaaaagagagaagacacaaataagcagtatcaataatgagaggaaagacctcacaacaagcctatagactataaaagaatcataagagaggcttatgaggaattttattctagtaaacttgataagggagttggaaagattccttgaaagatgcaaatagacaaaattaacttaaaaagaaactcaaacttgtattagtaattaaaaagcttctcacaaagaacatttaagtcagataatacaatagtgacttctatgaaaaaatctgagaaagaaggaatatcaatcacacaaaaactctttctgaaaagtaaaggcagaagatgtattgtctcgcttattttataaggttcacactaccattataaaccaaaatcatwccaagtaaggaaaaccactaaaacagatgcaaaaatcacaaacaaaatattacccaatagaatccaataataaataaaaaggataataaatcaaggttgg

SEQ ID NO: 509150 - DNA, 528 bp, Homo sapiens
catgtttctgccaagggaagaagggttatrtgatttaaaggatatgaaaggcctgatgctaggcccttcttgacctataaagcaaggaaattatggaagagtgagtggccattatttacagtattggttttactcctactcattttctacagtctttggaagaagaggagctattcgaaatctgtaagaagaaatctgggggccagatgacattgaaattagtggcagaaacccctaaataaactaaagggaggattgtggcttctcgaggaagctatccatatggtcacttccagcataaacaatgtaataaaaatataccatcaggaagtaggctctagaaatgtgatactattgcaaaattagtcatttgtccatggtatttacatagtgtatacagaacccatgatgagggactaaaatgcaccgaaaacattaatagactagcataggtctggagcagaaggaaaggatttagtgattgatttctacctactggcaaataatctaggtagaatatttgcacca

SEQ ID NO: 509151 - DNA, 617 bp, Homo sapiens
gtgcattgaaacactagaaagctcccagaaagaaggcagagaaaccactgcaatttcagggatttgcaatcagaactctgatatgatttgttcttatttgacaagtaaatgctcagaactggtctcaacttaaaataagatgattttttttttagttttgcatttgatgatttaaattgatgtttatgtgcaaaatggcatcaattaacccccaaacgaccttaatttgttgaattactataattttaaaatagtttaataggtacttttttttttttttgagacagagtcttactctgccgcccaggctggagtgcagtggcgcgatctcggctcactgcaacttctgccttycaggttcaagcgattctcctgccttagcctcctgagtagctgggactacaggagcccgccgccatacccggctaattttttgtattgttttagtagagacggggtttcaccatgttagccaggatggtctccatctccttacttcgtgatctgcccgcctcagcctcccaaagtgttgggattacagggtgagccacagtgcctggccttaataggtactttcaatatgttattccaaaattctgcataaacctgttgagaaa

SEQ ID NO: 509152 - DNA, 617 bp, Homo sapiens
gtgcattgaaacactagaaagctcccagaaagaaggcagagaaaccactgcaatttcagggatttgcaatcagaactctgatatgatttgttcttatttgacaagtaaatgctcagaactggtctcaacttaaaataagatgattttttttttagttttgcatttgatgatttaaattgatgtttatgtgcaaaatggcatcaattaacccccaaacgaccttaatttgttgaattactataattttaaaatagtttaataggtacttttttttttttttgagacagagtcttactctgccgcccaggctggagtgcagtggcgcgatctcggctcactgcaacttctgcctttcaggttcaagcgattctcctgccttagcctcctgagtagctgggactacaggagcccgccgccatacccggctaattttttgtattgttttagtagagacggggtttcaccatgttagccaggatggtctccatctccttacttcgtgatctgcccgcctcagcctcccaaagtgttgggattacagggtgagccacagygcctggccttaataggtactttcaatatgttattccaaaattctgcataaacctgttgagaaa

SEQ ID NO: 509153 - DNA, 591 bp, Homo sapiens
gggtttgtacataatataaaagcagttttaattttaagactccacattgcatttataaagcccaagtactaaagtgtaatcaataaatttcctatgaagatagagatctagatagtggcgaaaagtgaatcattggactcatggaaataagaatatataaataaaaatgaaagaaaatatgaatattctatgaaggaagcaaggtcaggataactgtaatcactctaggataactatttttgagtgtccctaacagttcactcaaatctaacatggttatcacttataaccaycttcattttgtcaaattttcagaataactcctagtatcattattgaagttgtatttcaaaaccttaattttaaagggttcagtcaattgcagtgaaatgggaagattccaagggtatgtaactagatctagaccccttttgaagttaaagctgaagttcccagaccaaaacatcaggaatgctctggacaagaggggtcaatatgcaataatgaagacaaatttttgcagaagccccataattcttgaaagttcatgatgacattttcagagatacagcaagaattggaaaagagcag

SEQ ID NO: 509154 - DNA, 591 bp, Homo sapiens
gggtttgtacataatataaaagcagttttaattttaagactccacattgcatttataaagcccaagtactaaagtgtaatcaataaatttcctatgaagatagagatctagatagtggcgaaaagtgaatcattggactcatggaaataagaatatataaataaaaatgaaagaaaatatgaatattctatgaaggaagcaaggtcaggataactgtaatcactctaggataactatttttgagtgtccctaacagttcactcaaatctaacatggttatcacttataaccatcttcattttgtcaaattttcagaataactcctagtatcattattgaagttgtatttcaaaaccttaattttaaagggttcagtcaattgcagtgaaatgggaagattccaagggtatgtaactagatctagaccccttttgaagttaaagctgaagttcccagaccaaaacaycaggaatgctctggacaagaggggtcaatatgcaataatgaagacaaatttttgcagaagccccataattcttgaaagttcatgatgacattttcagagatacagcaagaattggaaaagagcag

SEQ ID NO: 509155 - DNA, 573 bp, Homo sapiens
actgtgggaggaggcctggtggcaatgagaggatgagggmcgtggggaaggaccgccaagccttgcggagatgtctcgcccacattccgcccagcgccgccgccacgctggcctccccacctctcagcaccacggacagcgccaggcgcgctccgggtccacgccgagcccgagcgggtcaccactccttcccaccagtcctgggaacgctgcctcagagaatcagctccccttcccgaagctctttcccttctcctcagggtgttggaggttccactacttccttaaggaggctttctcatccccaaatgtctctacttaaaactttgtcacgcttacccccaggaaatcattagacatccatttgactgggtaggagaattccctttttctaaagacctgtccagaatggctcatggtaactacactatagcaaaaaacagactgtcctccagccctatctcactgatctggaagaaggaaggtgtgcatagcattaggggttctcttccccaacccgtccttcctctcatgcacagttgggcaaactgtgggcttcaggaaaaggatcca

SEQ ID NO: 509156 - DNA, 573 bp, Homo sapiens
actgtgggaggaggcctggtggcaatgagaggatgagggacgtggggaaggaccgccaagccttgcggagatgtctcgcccacattccgcccagcgccgccgccacgctggcctccccacctctcagcaccacggacagcgccaggcgcgctccgggtccacgccgagcccgagcgggtcaccactccttcccaccagtcctgggaacgctgcctcagagaatcagctccccttcccgaagctctttcccttctcctcagggtgttggaggttccactacttccttaaggaggctttctcatccccaaatgtctctacttaaaactttgtcacgcttacccccaggaaatyattagacatccatttgactgggtaggagaattccctttttctaaagacctgtccagaatggctcatggtaactacactatagcaaaaaacagactgtcctccagccctatctcactgatctggaagaaggaaggtgtgcatagcattaggggttctcttccccaacccgtccttcctctcatgcacagttgggcaaactgtgggcttcaggaaaaggatcca

SEQ ID NO: 509157 - DNA, 598 bp, Homo sapiens
tgtgccctcctcgcaatccccccacaacccacgtctccccacagagtccccattcttgccacagccatccaggaggagctggagaaggggactcctgagccagggcctctcaatgctgtggtaagagagtctcctgatcatggggagggcggcagagtcccctgagaagtggggaggagaggaggaatggactcttcccagcatctttctgctcttcaggatgagcggcaccattcggtcctcatgtccctgctctgtgcccatctggggctgagccccaaggacatagtggagatggagctctgccttgcagacacccagcctgtggtgaggactggctgtaggaacctgtgggtgaagggcctccaggatcctggccacccctagcccgtcctgctgaagcacccatcacctccaccaagccctcagtaactctcatccccgtttttcccagtagacacatcccccactgcttctagggcggtggttctcaaaaagacaagttccctaccccagacctgcccactaggactatctgggaattggccctttttacagattcccraagagtttcttctacaggtgggccctgtctgct

SEQ ID NO: 509158 - DNA, 339 bp, Homo sapiens
attgttgtcagctgaagtgctagttcaaggcaagctgcaacttctgttgcttttaagctactgagaagtaagattttctggttgtttattacaaaaataacttagcctatactgactaatgacttattactttttatattactaggatagttacatactgcattcaaatcctctcaaaatttttggagatgcaaatgcacagagtgagaaatcaaaaagcttagcagaaagcagcagctaggaggtagaggttagtattaayagctgcatggtgctggggggaaagaattgacgtttaagttctgccaagttagaaagttctggtaaacatcttagact

SEQ ID NO: 509159 - DNA, 521 bp, Homo sapiens
aaattaatgtttcaacacaagaaaatattctgagatatttttagtgtttgaaaacaagacctggaaagctatgacaaaacagaggtaaacaaagcataatgaattcattgcaaatgtatttacatctgaaataattaataatatgtatattttgtgaaccatcrttacctttttcactagccatactttatgactttgtgtaattatataaaagatttctcaaaatcttgaagtctattcaaacattgaggctaagggattatgtatcacaggagtaatgagaactctagaaaaataacttgacaacaaaaagtccttatagttatatattaaatatcaagaaaatcaatgggaaatctttgttatttgtgattaaaaaacatacatggttaattttcatgttactgtagagctttgcctcaacatgaccagtcgccatgtgagttattttgttttgcaacctggatattaaacattccagagtcttcagctttcttatcagcacagaaaaggcaatttat

SEQ ID NO: 509160 - DNA, 412 bp, Homo sapiens
tctcagagtgtcaactgatagttgtcttttgagtccgcttgattctaaaataaacttaaacttctatttttcatgatcartgccccctctctttatggtactagagctgtgctgatctgcaggaatgctaaatatgaacgtcacaggccacaaacctcctttatttttcataactaaatgtaatttgtgattgtaagttaaattattgattcctcagtcaaattccctttctacctgttggggaagccttatatttctctgattgtttggatatagtaaggcatctggaccagagtcatcctctgtctcctgctggtatctgctgagctgcacctcttacccatcattttttggtctttggcctctacagaggtccaccagcctctgttaagattacctttgtcccaccaca

SEQ ID NO: 509161 - DNA, 632 bp, Homo sapiens
gagtgttattgagcagtttatgatttggcaggcattgtgctgaatgctttaaacaaattatctcatttaattctccttactttagttgctaaatatgtttatttttgattggtatgttcatgactttttactaaaaaagattcaattgatgaaatgttttcttcatcttaagtataacgtgagtcaacygaaataggccaattgtatagcaattattaagattgttaaatacaattagggtctccttcaacaggtccagatttattgaaaaaaagttttcatatcagatgttcatgaagattccaatttatgcatacactattgccagtctgaactaggtaacttcccaaactcctcatatagtttcattaacctttaaatttattactaaatcagaattcagcgttctcatttattagtaaattagaacattgaaatatttagagctgacgtatttaatatttctttgtttctttaaaaagctgaaatgtagaaaaaagttttagctttgaggatgatttttacggtattttttcttatggtgaaaaagtatacagaacctacatactatgcaattagttgaataatctttggaaaatccacataattaattattatataatcaacaaaaa

SEQ ID NO: 509162 - DNA, 617 bp, Homo sapiens
aacatgccccccactcaccacattgctgatgatgaggagaaaagagctgcagcccttaaacgagcccagacctaggatctccctgagccagggctgtgatactgtctttggggctctgtgattcctggtgtctgcaagcttctgggagccaccatgttccccagtacccacagtggaagctgtttgtggtacacctggtccatccacagcctcgcatggtgctggcacctgtggcagcacctggagctgcctaccacactgcagccagcaaatgcctgctcgtgtacagtggctggaccccacacatgcccacacacccctcgctgctctctgtgcctgtctcaccsttggcaggtgtgggatccaggccggtagcatgagctgagcatagcctgtcaggccaagtgggctgaaagagcccagcaggcctgagcaaaacttgggcaaagatgccaccagccacagaggtttctagctggaaaaatgacaccccaaggatcccatgacacttccatgacaatcacatttcccttcctgcaatgaaaacttcccagacttacaaacctggcatccccgcatgagctccctgatctaatagatgtattctaatacagcag

SEQ ID NO: 509163 - DNA, 648 bp, Homo sapiens
attttgtttttatcaattaacacgagcaaagcacttcagtgacagcactttcagcataaacactgatgacattaaaaagcaagctaacaacaaatcagatagactagtaaatggattatgtgacctgtgtagacaacccctatttaaggcacaaccaaaattatcaatgcttgtcaagatcctgaagagaatgcatttcgtaggcttactctcaactacagataatttaaaaatacagtttgttagtcatttctacttactgcttcatgcttctttctttgctaaacgtagcttgccagaattgtgggtgggttttcatggcctcttaaagtctcacaaaatatactaaagaaaacaaaatacttaattacttcccctataatataagtagacaactttacatctgtaatggaaatatgctagtttggcaaataacctcttattgctggaaatggaggggtggcatttacaagaaatggaaataacatgagagtaagaaagcttgggwcagatttaataatattcaaattgtgctgtatacataaactaatccagtcaaatgaaaaaattacattaacatttgtactatagtacatcacaactcaaaggtattattaatcagatgttatttttgactaatatatttaa

SEQ ID NO: 509164 - DNA, 617 bp, Homo sapiens
gctctgtggtgtcactccctgacacctaaatgtgccacctctaatcaccccttttggtctatcgccacctagggaaagaatggaaatagttacgtgaacccccttgtgktacctgggaagcaaatttagaagagcagcatagtgtgtgatttcttacagaaaattttcaaagaaatctgttcatcaatcaaagcaatcaagtctttagggatcctagtatggtatcaagtttcaaattcagcctatgggtggagagtggtagcaaagatcaatttccttgatatctaaaagcttaaacataacagcagttgcaattatttaaacaatattctgttaaaaaaatgcttttcttcttattaaaataactttaatacaactaattccatcacaataataattctaatattaaatttggcattgtattaataacagatagatggaaaatatagaaaaagccaaagtagaaaattagaatgacctattttgtaattctaagagattttataattttgattgcatttttcctattattttatgttcatgtatatttaaaacactgagatcacagtgtgcatattgttttatactagcacacaatcccttaaattttttatatt

SEQ ID NO: 509165 - DNA, 553 bp, Homo sapiens
ttcatttacatggagctatactgtggtatacatataccccttaaaggtgtgattcagtcatgcaggcagcatgccggtttctagaaatgcatcatttgagctaatggggtactgtgactttggcttatctatctattctttaggtagtgcaggataatcattgatgggctttcctaactgattgactttgcaatcaaacaggcatagcctcttattgcctgtgtaaatttggaccagttacttaaactatctgagccttagttttcttatctgtaaaattcagttatctacctgggtagtattgtgaagattggcargtgtacatagaggacttttcagtgcagaatttggcgtatagtaagccattgtgtgcaatttttagttgttgttgctagtcatgcttttctgtttataagccaagaatggaaggagcaaaataatcctcagtatttgtaatgacttcctaagtattattgcttgctagtgggtgaaaaaaaatccctcttgactggctttttttccatattaactacaattaaattgctgggcatca

SEQ ID NO: 509166 - DNA, 482 bp, Homo sapiens
cttcgcattaaaacaacggagttgagtacttgtgacggcaaccatatgttttgcaaaagcctaaaatatttactgtgtggcttattacagaaagaacttgttgactcctggtttatagtatcatatctgtgaagaaagagggagagggagttgagagagggagaaaatgggatcgagggcatttaaggaaagattggccttgaaaagaataaaagcatacttcatcttgtaaaactgggggaaaggatgataggactgtgcaaatatagaccagtttgttggtgctggaggagaaagaggagggagytccccccacaaccatatataccccacactcttaagttaaatgttttggctgccgttgatcatgacattttagaggacaaaaactgtgtcgtattcatctctgcctcccccacagctttcagcacagtgccttcctttcagccattctcactaaatatttaattgaatcccaggtg

SEQ ID NO: 509167 - DNA, 572 bp, Homo sapiens
ccctatctcagcagctgcacagtcagatatgacatgaaacacctctctctcagtgcccactgggaaaaattgtagtctggaagggctccagctaatggtcagcacagactgcacagataaggggacttgtcccacactgtgaaagcaacactcacaattactgaatgctgttaaatgagacatgctttccatgcaatatcccacttcatctcaacataaccccatgacgaaagtcctagtgctattccgattccatgggtaagtaaatgtggcttagaaatgtgaaccaactatcccaagatcacatgtccagtaagcagcaaagtccattaatgaccccaggtagtctgattccaggtggccttcactactgagcaacatcatcttgtgcgcacaaagacaagtaaaggtaaagggttttaayagttctcattatgcccaagctgcagagcaagaaaggaaacctcagaagaaaacatcccattggccccaaatatagaataatggttgttctatgatggggtgctattgtcttatactcagagtacacaaccccaaaataaacaagatgg

SEQ ID NO: 509168 - DNA, 340 bp, Homo sapiens
ggggtggatttaagttggagaaacaggctgggactatatcacatggttaaaagttaagatttcacatgaaatataatgaaaagaaattgagggagatttatgctagagactaaattgactagagcatatctttattataaagggatgattctgagtgctgtatgaacaagaaattgaagggaacaaatatataggtagggaaactagttgaaacagtattgtggttgagcaagtataaaatgttggttgcatggactaagctatatatrgggaaatgggaagaaatgaatggatgtgaaggttattaaggagtttggactgatgggatatggtggtagac

SEQ ID NO: 509169 - DNA, 583 bp, Homo sapiens
ggtactcaactcaaattttattccctgattcctgcaagtcggcttcaaattccaccactatttgccatcattctggattttgatggattttggtcttctagtctggctgcagaaatgcaaatatctatttgtggtctttcacaggatgatttgtacttttagttaaaaagatgaagggagatagtagaaatctctgtgggtgagtgagggggacaaaaggattttatgttcatgtgaacctaggtttaatttctgacccataaatttactaacacttgttcatcttgtccatcattgtttttagtgaaccaagaatacctcatgacaactcaataaacatttgttagaaaataaatgggtgaccttgaatagctctttttctctctcttgttctcacctactctctctctstcatctcatagcaaaagcccatcagtgatataatgaaatgatatggacaattctaagccagttcctggtccacaataaatatcaaaaaattacatttcttttcctctagaattaagaaagtttaattcccaactatactatgcagtagccatttctttgatcagatcaataa

SEQ ID NO: 509170 - DNA, 519 bp, Homo sapiens
tttctctgtcttctgtctcccaactcccaagcctcgtccaaagctaaatgagggaaaaaaattaaaaaattaaaaaacctagtcttatttccaagggtggtaaaaaggcctggagatggtggggaaaaggaattaatagcccgtggtctttcttaacttggtctaattgtcaagcgcaaaagagctattttcaagatgtaggcatgcatgcctctgtggggttaaatgatgaacaggagtttcagctttggcttcattctttatccccatatgtaacttaaaaatcagggtcttttatagcctgggaggacaataataatcactttgacttttctgcttaaatgacagtggctgtttcctacatacratgacttaccccaccccactacttccccttcttctgttcttagtggttttggggagttcacagaaggcttaccacgtgttcacaaaccaggctggcagccacagtcaccacaaagaggcccttttttctttttctctcctgtttatcaatgt

SEQ ID NO: 509171 - DNA, 661 bp, Homo sapiens
ctagaaacataaatataatatgggaaaaaaagacaaaattgaagactaatagaaaaaaattataatctgacccaagaaaattacaaataacaggaaaaagagaaagaaaagtatttaccaaataaatagtgtaacaaaggacccacggagtactcagcatgtcatagcattattgttataagatttcagaacatgatgaatgaaatgctctaagagatatagattatatagaagggactcactaaaaacaacattggcctctaccagacagtggagcaatatcataaaakttctgagaggataatttcaaacctacgattctataggcaagtcattattattaaaaacaattttttcaggcatacagaaactcaaaaacttaactcctagttccactttatcaggaggatggagaatgtatgacacacaaatgagagagtaatccgagaaagaagtagatgcaagaatcaggaaacagaagatccaacagcaaaggggtgaaagatacaagggttgagaagagacctgggtcagaaattgcgagtagctgccgaaccaacagtaggaactagagaaggtggagatggcaggtggctcctggacagagaaatggaaaaggaacctacacattaacatggtctgatgcatgttagaacattta

SEQ ID NO: 509172 - DNA, 480 bp, Homo sapiens
gtctcaaaaacaaacaaacaaacaaacaaacaaacaaaacaattaccatttgttggatgacctgctcaccatgctccatgcccaggggccccacaagtggacctggctccaatggcccatggagtgccacagcttgggcrttaacccaggcttcccactgcacgacctgcttgaccttggacaagtgaccattcctctcgttcttccatgtcagcatctgaataacaggattcaatgagtctgagatctgtgctccacaggttaaaccagatgatgggttgggaaagagttttgctaactgtttgaaatgataattccacattggaatacaacccttcagcccattgattcgacaaatctttacggaggccctgggcatctatcccaggagctgggctgagcatggaggacccagagatgaagaagggagggtcctagtcagagagatgagaaccagggaggaaggctgagagcacattc

SEQ ID NO: 509173 - DNA, 613 bp, Homo sapiens
agtgctcacctatggtgatctggctgacacaactgtagtagctgccygtcgttgcagaggaaaggttataacttccgctgctcacatctttgtctgttaagaaaataaaagacaagaaggttaattataacttagtagacaccatgaccacaatgtaaatatatgactggtggtaaataaaccagctctccttgtctatgacacgggtagtctcatactcattcagtggttcacccatcaacgtttagggagagccaggtgccagaccctgggatgggcacttagaacatatcaataaacaacccagacagctacacacaggcaattgcagtttcatgtcatcattattacaatgggagagtgaagggtgcttgggcagttgggggcagggagttagacaggagagagggtgcctgacccagactatagactaaagagtatcaggtaaggtttcctggaggaaatttaacatcctaatgaaaacctaaaaggtgagtactatctgactgggcaaaaagtggatgaattgagggaaacgatgcaggcaggggagctatcatccccatcctccatcctctggaggctgagaggccacaggcagcttcgtgggtta

SEQ ID NO: 509174 - DNA, 360 bp, Homo sapiens
acatgaatttggatgaggtgggaatgacacaagtccaagttgaagccgaaacttcttttacctcagagattaaatgtaaatcttttatgcaacaaaaaatgaattcctaatgcttataaattaaagagaaaatgatttgtatttgttgatttttgtttctcaactctgaccctataattaccatttttkttgttgttgttgttttttggagacagagtctcgctctgccatccagcctggagtgcagtggtgcgatctcggctcactgcaacctctgcctcccgggtttaagcaattctcctgcctcagcctcccaagtaactgggaccacaggtgcatgccaccatacccaatgggacc

SEQ ID NO: 509175 - DNA, 670 bp, Homo sapiens
gctctcggctgaatctttcttgggaaactgcccgcaaagagaattccccagggtcacattcattcctcgtggcagcttgcatccaggcaatgatggcaggttacaatagctttgttgtgggacaatgttgaaggactgtcccagctccaggtatccctctgtgagggctgaggccatgtttgtgcatcatcacagctcatatcttccctctgcctggttatgcttccctccatctaccacacacacacaccatacatacggatcccaactgctctccccaggaaacttcttgcatgcacatctctggctcaaaatctatttcccagagaaccagaaytaagacagctaagctccctcttgagtcagtaccatggttgctgggattttcatttggtttttaatatcaaaacaatgtctgtggaaacgtttggacacttatatatcacagacaaataatattcctgtaacagggcataagcagacttcccacttataactggtggtaaagaaaattttctttatagagtactgttttgggaactcagaggcgtgttttgataaaaacagtattgccaagaatctttaagaagaggattattcctatccttcaaagcatctgcctgttagtgaccacaaattatttggtataatattttttgttacctgtgtc

SEQ ID NO: 509176 - DNA, 670 bp, Homo sapiens
gctctcggctgaatctttcttgggaaactgcccgcaaagagaattccccagggtcacattcattcctcgtggcagcttgcatccaggcaatgatggcaggttacaatagctttgttgtgggacaatgttgaaggactgtcccagctccaggtatccctctgtgagggctgaggccatgtttgtgcatcatcacagctcatatcttccctctgcctggttatgcttccctccatctaccacacacacacaccatacatacggatcccaactgctctccccaggaaacttcttgcatgcacatctctggctcaaaatctatttcccagagaaccagaactaagacagctaagctccctcttgagtcagtaccatggttgctgggattttcatttggtttttaatatcaaaacaatgtctgtggaaacgtttggacacttatatatcacagacaaataatattcctgtaacagggcataagcagacttcccacttataactggtggtaaagaaaattttctttatrgagtactgttttgggaactcagaggcgtgttttgataaaaacagtattgccaagaatctttaagaagaggattattcctatccttcaaagcatctgcctgttagtgaccacaaattatttggtataatattttttgttacctgtgtc

SEQ ID NO: 509177 - DNA, 439 bp, Homo sapiens
tgtccattaacacatggaatgcaccatggaagaccagagtaacagccccagagaacccagccaccctgtgcggcaatacctctattgataacacattcagcactcaacttcaatgtgaaggagacatttacccccagctcctctggaatcagcctttgcacactgtcctgctgcttggaacactggtccctcacctgaatagcctcaactcaaatttgccttcccttccactgtgacatcttctacccagccagcatcttaggaaaccacaaatcaccttccaaaatgcataaaaatgccctacttgttacaatatcctaacttaagtaagttaaccytcatattcacactccatataaaccaaaccggaaaatttattccataacatacgattaaaatctaaataccccttcagggctattttgacaaaagggaaatt

SEQ ID NO: 509178 - DNA, 643 bp, Homo sapiens
caagttgtaattaagttatgtaatatgaataagtctagagatttaatatacagcatgagaactagagttaataacttcatcttgtgtgaactggaaatttgctaacagtagattttaggtgctcttaccacacacatgttaaaaaaggtaactgtgatatgatggtcatgtcaagttgcttgactgtagtaatcatttcactatgtataccaagacattatgttgtgcaccttaaatatatgcggttaaatatataaatatatagtatctgattcatcataaacacttaataaataaatatatgttctttttccaaaaaaataaaaagtctctaaggaactctggactctctaagatttcaggttttagcatttcttatataaaattatagctaatttatagcatatatttaattttgaaaaaatatagttcacacagctaacaagtcttttttgtttaggaaatttctacatcatttactctgaaaatggagttcattagcaaatattttaatcygcattattgatataaacgagctatgacaagatctgcataattatgatggaatataaatagatgagtctcaatttaaaagcaacaatgaagccacagtattttgaagagacaaccatccaagagaaca

SEQ ID NO: 509179 - DNA, 428 bp, Homo sapiens
aggaaatcataatgaaacctgactttcatggggaaccaaaacaaaagaaaggtgtcaaaagggaagacaaagagraagggaaaaggctgtatatgagggaaccttttgaaacatcataaaagctcacaactgtgttgtcataatccagaaacatcccaacccgacccaaaggtctttgcacatagtgagttaagggaagaaaggtgttggagaggctataaaggctgtttctctttgaagaaaattgaaaaaatgcttcctcaaaagcaggaacatgatttgtgtttgctgtcctggaatctttacagactcctagaatccagctggaggactgggttacatccacttcccagtaatgcctgccagaggagaaggcctgagctccccatgctgcaaagttctctgctctctgggactccccgggtgca

SEQ ID NO: 509180 - DNA, 428 bp, Homo sapiens
aggaaatcataatgaaacctgactttcatggggaaccaaaacaaaagaaaggtgtcaaaagggaagacaaagagaaagggaaaargctgtatatgagggaaccttttgaaacatcataaaagctcacaactgtgttgtcataatccagaaacatcccaacccgacccaaaggtctttgcacatagtgagttaagggaagaaaggtgttggagaggctataaaggctgtttctctttgaagaaaattgaaaaaatgcttcctcaaaagcaggaacatgatttgtgtttgctgtcctggaatctttacagactcctagaatccagctggaggactgggttacatccacttcccagtaatgcctgccagaggagaaggcctgagctccccatgctgcaaagttctctgctctctgggactccccgggtgca

SEQ ID NO: 509181 - DNA, 428 bp, Homo sapiens
aggaaatcataatgaaacctgactttcatggggaaccaaaacaaaagaaaggtgtcaaaagggaagacaaagagaaagggaaaaggctgtatatgagggaaccttttgaaacatcataaaagctcacaactgtgttgtcataatccagaaacatcccaacccgacccaaaggtctttgcacatagtgagttaagggaagaaagrtgttggagaggctataaaggctgtttctctttgaagaaaattgaaaaaatgcttcctcaaaagcaggaacatgatttgtgtttgctgtcctggaatctttacagactcctagaatccagctggaggactgggttacatccacttcccagtaatgcctgccagaggagaaggcctgagctccccatgctgcaaagttctctgctctctgggactccccgggtgca

SEQ ID NO: 509182 - DNA, 271 bp, Homo sapiens
tggaattgcatgaaggtggttagtgaacctaatccccacctttttcaatggtacattgactttcaagggtacattgactttatcaataagggaatgactttctcagcaatcaaagttcatyagtgtaactcaccattccagtatgttttccaagtcctgcaaagaaaaacacaagtacttaatcatgagaattctgtcctactttccctagtattctttgttgtttttctgggttaacaaggtaggtttattgatacacctctaaggcacc

SEQ ID NO: 509183 - DNA, 489 bp, Homo sapiens
ctaattttaatcccaaaattcaacctttacataaatacaacgaaaaattgttatttcttattcaagacaatgtttttgctcagaatgagttcagaccatcagagtatcttcatattttgaaatggtgactacgcaagctatgaaagtactcagcaacaattaatcaatttttacttaaaccaaaaaagaaagtaaacactcgaattttttctttaaagaatccagagatgtagttaatggaagcatgaccaccaatttatctttattccctgtgtttctccacagtgatcaaagtccctacttcctgggagtctttaccagttgatgggatctatttgaacacttttcaaatccagtctgctcaytgaagatttgaaaaggactacaaacataacctttacaacaagggttttccaattaatcctacacatttaacacttacactgatgacatgtagtatactacaaagctacagtaagcaaagcagca

SEQ ID NO: 509184 - DNA, 592 bp, Homo sapiens
tatgcttctaattttaatcccaaaattcaacctttacataaatacaacgaaaaattgttatttcttattcaagacaatgtttttgctcagaatgagttcagaccatcagagtatcttcatattttgaaatggtgactacgcaagctatgaaagtactcagcaacaattaatcaatttttacttaaaccaaaaaagaaagtaaacactcgaattttttctttaaagaatccagagatgtagttaatggaagcatgaccaccaatttatctttattccctgtgtttctccacagtgatcaaagtccctacttcctgggagtctttaccagttgatgggatctatttgaacacttttcaaatccagtctgctcactgaagatttgaaaaggactacaaacatracctttacaacaagggttttccaattaatcctacacatttaacacttacactgatgacatgtagtatactacaaagctacagtaagcaaagcagcatggtactggtgtcaaaatagacaagtaaaccagcggaacagatcagagaacccagaaactgttacacctctctacagccaactgaattttgacaaa

SEQ ID NO: 509185 - DNA, 644 bp, Homo sapiens
gctttcataacattcaggttttagacatgactttaaattagtaaggtaatgatgagcgatgcaaaatagtgaaactaaaacaatgagaaagctccccaaaatatcctactttagaaatcaaaacacaatttttcgaacaagtaaatttataagacctaatwtggtatgtgattgtgattgtcatctcacttgagtctcaatcttattaaactgtgaaaaatttcttaaaatgtcttagatgagttctggaaaatatttgcaattctaagatttttcactgctttcacttaaattcagaagtgatataaaactagcagctttatgctgctttatgctaaaggatttaaaattgccaaaacaaagattatagtttttatattagtcagggttctccagacagaaccataggatgtatacatatatgtgtgcagatacattcatgggccatttgagtcagccacagaccacatatggtggtcccataagattataataccaatatgtttactgtaccctttctgtattcaattatgtttagatacacaaatagttatcattgtgttacagttgcctacagtatgcagtacagaacatactgtacaggtttgtagcctattgtaggaacaataggctatagtgtatac

SEQ ID NO: 509186 - DNA, 644 bp, Homo sapiens
gctttcataacattcaggttttagacatgactttaaattagtaaggtaatgatgagcgatgcaaaatagtgaaactaaaacaatgagaaagctccccaaaatatcctactttagaaatcaaaacacaatttttcgaacaagtaaatttataagacctaatttggtatgtgattgtgattgtcatctcacttgagtctcaatcttattaaactgtgaaaaatttcttaaaatgtcttagatgagttctggaaaatatttgcaattctaagatttttcactgctttcacttaaattcagaagtgatataaaactagcagctttatgctgctttatgctaaaggatttaaaattgccaaaacaaagattatagtttttatattagtcagggttctccagacagaaccataggatgtatacatatatgtgtgcagatacattcatgggccatttgagtcagccacaraccacatatggtggtcccataagattataataccaatatgtttactgtaccctttctgtattcaattatgtttagatacacaaatagttatcattgtgttacagttgcctacagtatgcagtacagaacatactgtacaggtttgtagcctattgtaggaacaataggctatagtgtatac

SEQ ID NO: 509187 - DNA, 644 bp, Homo sapiens
gctttcataacattcaggttttagacatgactttaaattagtaaggtaatgatgagcgatgcaaaatagtgaaactaaaacaatgagaaagctccccaaaatatcctactttagaaatcaaaacacaatttttcgaacaagtaaatttataagacctaatttggtatgtgattgtgattgtcatctcacttgagtctcaatcttattaaactgtgaaaaatttcttaaaatgtcttagatgagttctggaaaatatttgcaattctaagatttttcactgctttcacttaaattcagaagtgatataaaactagcagctttatgctgctttatgctaaaggatttaaaattgccaaaacaaagattatagtttttatattagtcagggttctccagacagaaccataggatgtatacatatatgtgtgcagatacattcatgggccatttgagtcagccacagaccacatatggkggtcccataagattataataccaatatgtttactgtaccctttctgtattcaattatgtttagatacacaaatagttatcattgtgttacagttgcctacagtatgcagtacagaacatactgtacaggtttgtagcctattgtaggaacaataggctatagtgtatac

SEQ ID NO: 509188 - DNA, 644 bp, Homo sapiens
gctttcataacattcaggttttagacatgactttaaattagtaaggtaatgatgagcgatgcaaaatagtgaaactaaaacaatgagaaagctccccaaaatatcctactttagaaatcaaaacacaatttttcgaacaagtaaatttataagacctaatttggtatgtgattgtgattgtcatctcacttgagtctcaatcttattaaactgtgaaaaatttcttaaaatgtcttagatgagttctggaaaatatttgcaattctaagatttttcactgctttcacttaaattcagaagtgatataaaactagcagctttatgctgctttatgctaaaggatttaaaattgccaaaacaaagattatagtttttatattagtcagggttctccagacagaaccataggatgtatacatatatgtgtgcagatacattcatgggccatttgagtcagccacagaccacatatggtggtcccataagattataataccaatatgtttactgtaccytttctgtattcaattatgtttagatacacaaatagttatcattgtgttacagttgcctacagtatgcagtacagaacatactgtacaggtttgtagcctattgtaggaacaataggctatagtgtatac

SEQ ID NO: 509189 - DNA, 590 bp, Homo sapiens
gtcacgctaactactgcagaaaactaagggtttctttcctctttctcaccttttgcttatgcccattatacaaacagcactttcgccttctctttcagaccccgctgaccacaggcctggttcactgccccttgccctttactgtttcttccttttaggcaagaattgaccatcgctctcttctcacattgacaaaagcatcctaagccaaccaaattctaaatgtctatccattcattttactagatatacacagataggtctgaaacttcaattagtttcaggctaggatctctaatatgtaagatctgagaagtggcagagagctctgcagccggtgtgttcattcccccactcattcagggtctcagtaaacatatactgagtctcttctttgtaagaagcactgtgttagacattggatcatggtggcaaaaaaataaaaatwaaaattaaaaaaaacaggcctgatacttatctatatgtgatttgcagtctagggcagttgttttgtgaatagctgcatcatgataaggtaaagcatttgtcaaaaatgtagaaatctggacccacatttgcttactgaatcg

SEQ ID NO: 509190 - DNA, 651 bp, Homo sapiens
ctggcccgctacgaagtgtgtcgccggtcagctttcccaaaagcacgcattgcagctctgatgcagtctatcactggcagatcggtgtctgagaacgcggcgccattgccatggctggaatagccaaggtcttggttggagaggtggtgcaagaggccctggacatgtgtgagatgggggagaaacgcccccgctgcatcccaagcatttaagggaggctgttcacaggttaaagcccaagggcytcttccccaacagcaactacaaaaaaaaaatatgttcttttaggcccaaggccagagggaaaggtctgtttgtgcaggaataagtattgcattcatcttccaatgacaggactgtgtttgctggagcttctgcatctcagtccaccctggatttacccatgactttaatgtctttctcaaactctgacactggccttccctagatgaagacagtggcttgtttcataatcacttcgactaaatatttgggcttcctagggcatatagaggcatttttctgtgtttgcctagttggaagaagatgggtacatgggccttgagttttttgtgggcagggagatgctttcagagagggaaatctcttccaggggacttgtatggttttatactgaagcctggagttgct

SEQ ID NO: 509191 - DNA, 587 bp, Homo sapiens
gaactctgtgttgatgggaatgttctaagctgcactgcccaacacaggagccataagccatctgtggctactgagcccttaaaatgtggctagtgtgactggacaaacaaatttcaaattttatttttattttattatagagacagggtctcactctgtcatccaggctggagtgcagtggtacaatcctagctcactgaagcctcaaacttctgagctcaagccatcctcccaccttagcctcctgagtagctggtacaggtgcatgccactatgcccacctaattttttaatttttgtagagatggggtcttgctatgctgcccgggctagccttgaattcctcgcctcatataatcctcccacctttgcctccccaagtgctggggtgatggttacagtcatgagctactgctccccatctcaaattttattaatttaaatttaaagagccattttagattctaaagtttgtaattgcttgttggcactatgattgtactttcacagtcttatcctccaygaaaggtcagggcatgttaggctggcacagccatgcaggtagttttacttcagagacagagaca

SEQ ID NO: 509192 - DNA, 587 bp, Homo sapiens
gaactctgtgttgatgggaatgttctaagctgcactgcccaacacaggagccataagccatctgtggctactgagcccttaaaatgtggctagtgtgactggacaaacaaatttcaaattttatttttattttattatagagacagggtctcactctgtcatccaggctggagtgcagtggtacaatcctagctcactgaagcctcaaacttctgagctcaagccatcctcccaccttagcctcctgagtagctggtacaggtgcatgccactatgcccacctaattttttaatttttgtagagatggggtcttgctatgctgcccgggctagccttgaattcctcgcctcatataatcctcccacctttgcctccccaagtgctggggtgatggttacagtcatgagctactgctccccatctcaaattttattaatttaaatttaaagagccattttagattctaaagtttgtaattgcttgttggcactatgattgtactttcacagtcttatcctccatgaaaggtcaggrcatgttaggctggcacagccatgcaggtagttttacttcagagacagagaca

SEQ ID NO: 509193 - DNA, 597 bp, Homo sapiens
attcagctatagaagcaatgcaatgcaatacaatatagctatacagtaacatcctttttctataacttgggaacaaaagtcacaaaaaatattttgtgtttagttaggacttccacactgcagaaccaytggcatgtcaagctacttcgtttttcctgacaaaaccccagatgacccccaccatttcttcttttcctgctagtctgttactcacctgtgcttccattttagtacatgcagactgttaaaataaaatattataaactagattacttacaaacaacagaaatttctcacaattctagaggctgggaagtccaagatcaaggcagatttggtgtctggttagggtctgacttttggctcacgcagggcaacttctctcacgtggtggaaagggcaacaagctcatttgggtttctttaataagggcattaatcccactcctgagaccccatcatcatgacacaaccaccttcccaaaattttacctactaatattatcaccttggaaggtaggatttcaacatatgaatttagaaaggcacgaacattctgtacatagctgcttctgtacctggtgtctttaatcagcag

SEQ ID NO: 509194 - DNA, 625 bp, Homo sapiens
ctgaaagattggtattcacagtaccatcaccaagtgataaaaaaatggaaaattcagttaaacagcttttttgtttctatttgacagcacgcttttggtatcacttagcgatgtctgagtttccctgtttagtaattaggcaatgataagagtagaaattgaacacatcaaccagccagtcacaggcattgcaaacaatggccattgttctcagtactggaggagtgtctgtgtcccctcctctttccttgtggggaggcctgggaattctaaagggaggctgacacccaaggtgagaggcagtggatgagctcaggaaagtaacattttctcaaaagtatctcaataatttaaaaatgggcttgatatgtgsccactgaaaacaaatcctacccactttggtttttgagtaggattttggcattctagctctctaatcaaagtcagaatctctgaagttctttctaacttccctcaaatgcttgagaaatttaattcagtctctgaatccatctattgggctgctaatacatgcattaagatggaattaacagtacatatgagtgaagaacttcgcatatgcactgctctaaagaaatatttcatcaaatagataactcatggt

SEQ ID NO: 509195 - DNA, 601 bp, Homo sapiens
tgtccctgacactgcacagatgaagctgtaaatgaacagtacacacacaaatgttatttctagttgttttgcagtgcttcacttaaatcttaagctgttctttgtagtcatattgtgattgtttattatcggaactctccatcctcagaaatcttgccaacgtcacatgtactaacaaatactgaaagctcaagtgatctttaattcccactgttccctaattgaacatccaattcaggaagaatagggcagtatgaggaaagttggacagagaaaaaagaaagctatgcaaatgcctcaccaattttactttttaaaatggcagtagtaagtaaatgcttgcgccatcaaatgatgaaacaaggtgactaaaatatttcacagcctaaaagtgttccactcttatgtattagccctaatacagtgatgctctatgataatttgatagcacttttgttgggcaatcccagtactttactcctttggctactggttctgactataagtgaaaataagcattctgactgtcattgtaatccgtctcatcaactacaatgaatgagagcagtttgagatasaaaaatattttgcttctttttat

SEQ ID NO: 509196 - DNA, 542 bp, Homo sapiens
gagttttgtggcatctttcggctaattcatagcatgttttttttatattgaagtttccatccatagtttgtaatggaggttaytttactatttattaatggtgctgaggatttaaaggatatatagaataagggagcttggaatattgagttccatttaaataatcataaaagtaacagaccattgggggagattaaaagccagccgaacttgctttgaaatgttctatttctacaatattagaaatgttggattctcaaagacttgcaaccgtaaatcatatttcccagaagtaaagctttttgagggtattcaggctgctagaaaaacaaacacacatcaagagtggccttcaaaaagacagaggagggtgtattgtcagggggcgcagcaacagacagaagcagttgccatgtaaggaagacacttccgtcacaccttctcagggttttactactgtaatattgaaataaatgtgcactttttgttatccattttgtctctctttcatcattatggagccttgagatatttagtttcgt

SEQ ID NO: 509197 - DNA, 542 bp, Homo sapiens
gagttttgtggcatctttcggctaattcatagcatgttttttttatattgaagtttccatccatagtttgtaatggaggttattttactatttattaatggtgctgaggatttaaaggatatatagaataagggagcttggaatattgagttccatttaaataatcataaaagtaacagaccattgggggagattaaaagccagccgaacttgctttgaaatgttctatttctacaatattagaaatgytggattctcaaagacttgcaaccgtaaatcatatttcccagaagtaaagctttttgagggtattcaggctgctagaaaaacaaacacacatcaagagtggccttcaaaaagacagaggagggtgtattgtcagggggcgcagcaacagacagaagcagttgccatgtaaggaagacacttccgtcacaccttctcagggttttactactgtaatattgaaataaatgtgcactttttgttatccattttgtctctctttcatcattatggagccttgagatatttagtttcgt

SEQ ID NO: 509198 - DNA, 620 bp, Homo sapiens
aattatagactacacacagagcttaagaacccgagaaccttcaggatttctggggaccctctgaactcaaaaaaccttattagaatcatatccacgcctacaagcagaaccaaataattccacctcttctggtacattttagaaaccaagtcttttttttcttttgagacacggtctcattccatcacccaggctggagtgcagtagtatgatcatgactcactgcaccctcgacctctgggctcaggtaatcctcctgcctcagcctcccgaatagctgagattacaggcacgcgccatcatgcccagctaatttttgtatcatttgtggagaaggggtgtcgctatgttgcccaggctggtcttgaactcctgggctcaagcgatcctcccaccatggcttcccagtgtgctaggattacaagcatgagccaccacgctcagcccctagaatctgagccttactgttgttcttggaaaggggcagtactattagacgcatcacactcctgcaaccaaaatgagataccaagaggccaaccaggcagttatggtagactcaaaagaacactggacttacaktcagaatacccagattcaggtcccaccattattaccag

SEQ ID NO: 509199 - DNA, 617 bp, Homo sapiens
ggtttagagaggaaatttgttgcccagtctggaaataggcagttcgggcatatgaacccaggtggacttacccaccatcccttcacgcctctctgcttggtctttcctgtgtgatagactaacaagatttgccgaggcccttaataagatttacagggagcaaagtttccctccgtttctctgtatttcctttttctctactttcttcaggaaatcaaccatccatatttccccctttctccaggaaatctagcatctggtcatttcctgagagcaaggtacttacataagccatgtaagtaagaacaagtatgaaaactaacagaagacccccagggcttaggagggctttctgtttaggcctttctggatgatctccctggttaatattgttattaccatttatttacgaattcttgaatttagcctcttacaagtgataatgaacaggtggtgcttccagaagggaaaacaaggagaaacagtttcttttgttacatcagaacttcttgagaggaaaattatgggatggttaattccaggggcttatttgcaaagttgatttagagggagatattggagctgcgtcagttytgtgatgtagtaagactattgtt

SEQ ID NO: 509200 - DNA, 608 bp, Homo sapiens
ttctcctccatactggaatccacgaagtcaagcaaccaactccatggtaactgctaagaggaaaataaggaagtgtagaccatggctctttgctaaaagaagcctataacttattctggaagataattctgcagagccgtactgaataacagtgtagggaaaagagccaccttaaagcaacacatatcacttgtccatctggatcccacctgcaaggctagcgtcatctggatagagagattaggtgaggaggtagcagataggtaggtgggggatcctgaatacctgacaagctgaggggtgaggccattgcstaaaccagtctgtgaggggatattatagccagggtcagggagcgggaacctcaaggagacagtggtggctccaccatcagacaaaccaacccactacctagacccaggtgccagggcctcccaaggagagtggtcaaggatatgctcaaagagttgactggagactctcaaagagttacattcctttacatatgacccacactggggagtggtgggggaacaggactttatctctaagataaaagtcaataggcctcaactgtggcttccacctgggtactcagatctgcacag

SEQ ID NO: 509201 - DNA, 637 bp, Homo sapiens
ctccctcgctttatcatggagagcaatcatgcacttcactcctaacttctatggtatacttctatatcctctaacactggtatgtatcagttataggaaaataactgaaatatgagggggaacattttctgtgaggccggaggaaccttgcttcatcaggcttcaggtttcttcaagaaggggcatcaattagtggaacactcatggcctctctccactccatattcacttttccccagggaggaaggatgtctaatgttataataagattggggtaaggaccggccaggcacggtggctcacacctgtaatcccagcactttgggaggccaaggcaggtggatcatgaggtcaggagatcgagaccatcctggctaaaatgttgaaaccctgtctttactaaaaataccaaaaaattagccaggcatggtggcaggtgcctgtagtcccaactacttgggaggctgaggcaggataatggtgtgaacccaggaggcagagcttgcagtgagctgggatcgcaccactgcactccagcctgggcaacggagtgagactccaamaaaaaaaaaaaaaaaaaaagattgggataaggaccaactatgttgcccctcccccagactcttttcttttgggc

SEQ ID NO: 509202 - DNA, 524 bp, Homo sapiens
ttcagagagatatcatccagagctctgccaacagtcacactggcacatacactcacagacacagacacaggcacacacagacacacacacacacacacacacagaggctgtaagagcaccccctcccacctcctcttctcgctctcattcaagtacttcagtggcacgcctgcctccacactgctctgaggatagcttttaaagacacagcagcagctcctttctgctacatatgtcgaaataccaaaatagtctctttagtgaataacaagttggaaatatgtattgaattaaaagctcacctttaaatttaccttacctttttctcacctgcaaaataactgaggtcagggatatgatctttgcctaaaagctactgggctggactttagaaatgtaaaattaagaccaaaccttgttayagagaattttcttgccagcgagctatatttagtaaaattgtttttcattttggggcagaaggcagacagcacaggataccagtagctatctattcctcttcc

SEQ ID NO: 509203 - DNA, 573 bp, Homo sapiens
  misc_feature (1)...(573): n = A,T,C or G
gcacacaaaataaataatagagtaaactggcatgatattgttgactaaggacggtagacaatacatgattgacaaacatactgagcattaaactagctagcttttaggtcttacactgnaacccctgcatcatgcagaccaagatggttcyactgacaattgactactgagaggaaaaaattaagcatttggttaagaaactagattaaaaaaaaaaaaacaccacttctccccttttgttgctgttaaaaatgtaaactggacatttgctgtagtgagccaatgccaaatccacatgggacactttgtgggtgattgagagatgggcaaacacttgggggaggcaaaggaagtaattcccatccattgaaacaaaatgagacctgaacctcactccacaaactccactgtggtctccgtcctcctttaagaggtccttgatgtttatttttattaatactctgtataactttgaggctcagagaccaaactcatatctcccatctcagctctgtctgtatattcaatggcataaaatttaatttctctgaaccttactgtttcagcttccat

SEQ ID NO: 509204 - DNA, 623 bp, Homo sapiens
tgtttttctgggtacatataaagtactggggagctacagatagacttgagcagagaaatgtcatgatctgatatattttagattacagtgaagtatttcgttagtctatgacaagaaggaatgagaatgcagagaatctcttaatctcaatcagactatccattttgagaatgtgacttcacagtcgtgaagctgactttattctgaagggctragagattcttagattttcttgccttgcagtctctgcaagagctgggcaaatttttgttttctttttaactttttatggtttttatttatttttaactttttattatgaaacatttcaattacatatgtaagtagaaaaaatgtgtttaatctatattccttctactcccacatccccagattattttgaagcaagttcccaacattttatcatttcttctataaacttatgcttatatctctaaatgtagtgtctaaaagataaggactctttaaacataactgccataccattatcacacctataacaaacaaattaacaataatttcctgtattacccaatgcccactcagtgcttaaatttccccaaatatctggcaatttttagctttgtacaaagtacagttgt

SEQ ID NO: 509205 - DNA, 623 bp, Homo sapiens
tgtttttctgggtacatataaagtactggggagctacagatagacttgagcagagaaatgtcatgatctgatatattttagattacagtgaagtatttcgttagtctatgacaagaaggaatgagaatgcagagaatctcttaatctcaatcagactatccattttgagaatgtgacttcacagtcgtgaagctgactttattctgaagggctaagagattcttagattttcttgccttgcagtctctgcaagagctgggcaaatttttgttttctttttaactttttatggtttttatttatttttaactttttattatgaaacatttcaattacatatgtaagtagaaaaaatgtgtttaatctatattccttctactcccacatccccagattattttgaagcaagttcccaacaytttatcatttcttctataaacttatgcttatatctctaaatgtagtgtctaaaagataaggactctttaaacataactgccataccattatcacacctataacaaacaaattaacaataatttcctgtattacccaatgcccactcagtgcttaaatttccccaaatatctggcaatttttagctttgtacaaagtacagttgt

SEQ ID NO: 509206 - DNA, 412 bp, Homo sapiens
tggctcaatcctgtaatcccagcactttgggagacgtaagcgggaggattgtttgaggctaggagcctcaacaccagcctgggcaacatagggggaccccacctctacaaaaaaaaattcagaaatttgtcagacatggtcatgtatgcctgtagtcccagctacttgggaggctgaggtgggaggatatyttgagctcaggagtttgaggctacagtgagctaggaattcatccctgcatgccagcccaggtgacagagcaagcccctgtctcaaacaaacaaaacaaatgaacagaaaactcagggaccatggtccaactaccttttaccatgcacactgatgagaaacaaacaatgaatggaggagaggtgtgctgtgggaagcagaagtaggagagcttggagatgga

SEQ ID NO: 509207 - DNA, 660 bp, Homo sapiens
tgtgcatcgtggctcaatcctgtaatcccagcactttgggagacgtaagcgggaggattgtttgaggctaggagcctcaacaccagcctgggcaacatagggggaccccacctctacaaaaaaaaattcagaaatttgtcagacatggtcatgtatgcctgtagtcccagctacttgggaggctgaggtgggaggatatcttgagctcaggagtttgaggctacagtgagctaggaattcatccctgcatgccagcccaggtgacagagcaagcccctgtctcaracaaacaaaacaaatgaacagaaaactcagggaccatggtccaactaccttttaccatgcacactgatgagaaacaaacaatgaatggaggagaggtgtgctgtgggaagcagaagtaggagagcttggagatggaaggcgaggaaagcatgaaaaaggaaaggaagtgtagggaggaaaaatcaaatagacacagaaatgcagagaaaaacagaaatacctgagcaagttattgttgcctcatcccagttagctctccagacctcagttctagttcccgcctcattgctgtgttcaggcctccccagtagttgccccttaaaataagtttttctattttaaaaacattgttcttttacttgtatctcaaagaat

SEQ ID NO: 509208 - DNA, 660 bp, Homo sapiens
tgtgcatcgtggctcaatcctgtaatcccagcactttgggagacgtaagcgggaggattgtttgaggctaggagcctcaacaccagcctgggcaacatagggggaccccacctctacaaaaaaaaattcagaaatttgtcagacatggtcatgtatgcctgtagtcccagctacttgggaggctgaggtgggaggatatcttgagctcaggagtttgaggctacagtgagctaggaattcatccctgcatgccagcccaggtgacagagcaagcccctgtctcaaacaaacaaaacaaatgaacagaaaactcagggaccatggtccaactaccttttaccatgcacactgatgagaaacaaacaatgaatggaggagaggtgtgctgtgggaagcagaagtaggagagcttggagatggaaggcgaggaaagcatgaaaaaggaaaggaagtgtagggaggaaaaatcaaatagacacasaaatgcagagaaaaacagaaatacctgagcaagttattgttgcctcatcccagttagctctccagacctcagttctagttcccgcctcattgctgtgttcaggcctccccagtagttgccccttaaaataagtttttctattttaaaaacattgttcttttacttgtatctcaaagaat

SEQ ID NO: 509209 - DNA, 660 bp, Homo sapiens
tgtgcatcgtggctcaatcctgtaatcccagcactttgggagacgtaagcgggaggattgtttgaggctaggagcctcaacaccagcctgggcaacatagggggaccccacctctacaaaaaaaaattcagaaatttgtcagacatggtcatgtatgcctgtagtcccagctacttgggaggctgaggtgggaggatatcttgagctcaggagtttgaggctacagtgagctaggaattcatccctgcatgccagcccaggtgacagagcaagcccctgtctcaaacaaacaaaacaaatgaacagaaaactcagggaccatggtccaactaccttttaccatgcacactgatgagaaacaaacaatgaatggaggagaggtgtgctgtgggaagcagaagtaggagagcttggagatggaaggcgaggaaagcatgaaaaaggaaaggaagtgtagggaggaaaaatcaaatagacacagaaatgcagagaaaaacagaaatacctgagcaagttattgttgcctcatcccagttagctctccagacctcagttctagttccygcctcattgctgtgttcaggcctccccagtagttgccccttaaaataagtttttctattttaaaaacattgttcttttacttgtatctcaaagaat

SEQ ID NO: 509210 - DNA, 655 bp, Homo sapiens
tcagctgcttttctttccttgatggaacctctggattgcgtgccctatcctataatgtgaaaaaagggcttccagaaaaggtggaggaattactttctgaaattctgaaaggctggatccaaaggtgcagaaaggaacattatttcctaccatataaaacccagtagggcgtgtgatgctgggacactgtatgagtccattctcatactgccataaagaagtacctgagactgggtattttataaaggaaagaggtttggttgactcacagttctgcaggcttaatagaaagcataactgggaggcctcaggaaacttacagtcatgggaaatgggaagcaagggacgtcctacatggcagcaggagagagagagagtgaagggggaagtgccacacttttaaactatcagatctcatgagaactcactatcatgagaacagcatggggaaagccgcccccatgatccattcacccccgaccaggtccctcccttgacatgtggagatttcaattcaagatgagatttgggtggggacacagagctaaaccatatcggacactgaagatgygtgacgcactgttccaccgggagttatagccccattgaattgtcaaatagggtcccccctggccaggtgctgaattattccaga

SEQ ID NO: 509211 - DNA, 627 bp, Homo sapiens
tgcaaggcgatcccagaattcccctgcaagtacatccaagaagaaataaatatctatagaggtgttgcaaacctcccaggagtcatgacacaaatgaagtcctttgaagtccagttcccctctggtgtaggtaccgttttcaccctatagtgcagagtttctgtccccacacgctagatgccagcagcatccagcctcgctgatgacaaccaaaacatctccatacagtgccaggtgcccttttcccctggatgggctgatactgaggggctgagctgcctgcagcccgcaccaactgtgtgaatgcagccgacctgctgcgggaggagatgatgctgggattcccagaacagcagaaataggtgaaagggrgaggagagtctgggagggattggggtccctggtttagcttcctgttttcccaaggctcagttgtcctgctgttcccgtaactcagggatatgccctggagcaatcccactcaatacctgtgctggttgagtcctgtgctggttgagtgcctgcctttccttcctcagatccatcctgtttcccctgctcacttctggattatagggaactgcacctcccaggttcccttgttttctggcttctggacacattcta

SEQ ID NO: 509212 - DNA, 492 bp, Homo sapiens
gggtgggcggagcaggaataaaaggaccaagcaaatgggaaaagggagatgcaggcaatgataatgggggaattggatactggctggcatggtrgctgacttagcaagccggagaaagctgaaaccaagcctgggctggaagctccaacaggcaaccgcattccaccctcaagtcgttgcaggaatcgacactgaaggcatgtagcatgcctccgagagtgaggcaatgagtggagcaggaaatgggggcgttccctaaaagcttagacccttccaaaatctctccctcttgaatgtggtgccagacaatatcccttcttgctgccccatagaagactggagcttgctctatgggaaggaaaagccagagggatcctagactcagactctaggcctggtcaagggagaagaaatagagattgtgtgcaagtccactgacagaatggtgagtctctcccagaaccctgatgcccaaagctctcccgggcaggc

SEQ ID NO: 509213 - DNA, 632 bp, Homo sapiens
ctgggcagagacagtgaccagagcttgtcctgtggtaatcactgctcccctagaaaggtcagtagtacaaagaaactgctcccagccttaataaagtgagcaggactatctgtgtcctaccagttgacaaggtccatatttcacaagtgaagtctggatagtttgctgctgatagatgtcagatagaattccccatctcctcctctcatcttctggcattgagtgacaagtaccttccctttactagttttcactgaatgcaaaaacttaacctcccggtgtgttcattaaacctcagtctccctaataatctctcctctccagaattgtattcttaggccactttgtgacagagactatgctgtccctgcagagagcaggtaattaccttgcccatgtcatccccaatagtgatgtatctttgacctcacttgatcttgattttcaacacctctgtatgcaggtataaaaattaagtgcagcamatttctgtcagtccctaatagcagtttcttcttgcctaaaaatgccaaaaccacctgaacagagaaatgtgctagatagctactgagtttgtggtcattagagaagtggtatatttagacgcaccacatagaacatcagccaacttc

SEQ ID NO: 509214 - DNA, 592 bp, Homo sapiens
ggcccgggtgctaagcccctcactgccccagggcagcgctggccggccactccaagcgtgtgggtcccactgagcccgtgcccacctggaactcacgctggcctgccggcgtggcagccccagttcctgcctgcacctctccctccacacctccccacaagcagagggagctggctccagcctcggccagcccagagaggggctcccacagtgcagcygcaggctgaaggcttccttgagcacagccagagtggatgccatggcctgaggaggggccgagagcgagcgagggctgctagcacgttgtcacctctcactagcatccatctctttttcggcagagcccaaagagggcaaaaacctggtccttggagaagtcactcactcacataaattactcagccctagctcggatgcccttttacgaatgagataataaattccaggatcacgaaagccatgccagttgtgttttctaggactgtagaagttcggagccctcaaaaagacccagggctgtttcctcctgcaggctgtcccttgctgtaccactgacctgctgggacactgagctcgccacttgaccttttta

SEQ ID NO: 509215 - DNA, 655 bp, Homo sapiens
gacaaccagcaaggaaattaagacttcagtcattctrtacctgggtaggactgaattctgctaacacttgaatgagcaacacatgagttatctcctagaggctctggtacagaacagaatggaacattgctgacctcttggtttgatctcagtaaaacctataccaggcttctcgcctacagaactgtgaggtagtaaatttgtgctactttaatcaataaagttgtggtaatttgtcatggcaacaatagattttagtgacttacaataaatgtagaactcttcagatattctttttcttccagtgtcagttttggtaaatttcatttctccacaaagatttccatttcatctaagttgtcgaattatcgttcttgatgatatactcttttactgttcagaaaatctgtagtagtaactcctttttcattcctgacactggtaattcatattttcctccttttttcatcagttgagatagttttataattgtcaccgatatttttttaaaaaaataaaatgaaaacaatttagactttgctcattttctctgttgtttcttccacttactcactcactctttttctctcccctctgcctctctgtcttaattttcttccttccgctgctttttgttttttttccaactaggctc

SEQ ID NO: 509216 - DNA, 576 bp, Homo sapiens
ctcctgttttccttcacttttcatggccttctggaagtctttgcggtgttgttgatgtgtttgtgttactctttttgttttgtatcttattcagaatttatgattgttacctacgtgaagatccatccagcaggcgttgacttggtcatgccgaaagctcaactccttcaaacactttttgaacagtacccctttcatcttcctgctctggtagctggagactccygcctccctggatctcctgcgagttccaatttgttcccctgaaatagactgaaagctcagcttgtcctgaatcccatgccagagcctcagggaagctggtcagtaatttctgcttatcctccgactccctcttctggctcttatagctctagcttctcccacaattatataagatctcattcctaaaaatagattcctattcctagtggttctgtttccctcactgaaccttgattgagttccatttgagttccatccataagtagaatggcaacctaaacaatttatgcttaatgctttttgtagtgagcaggaggcaacaatttcacgccttccttccaccaaccttgg

SEQ ID NO: 509217 - DNA, 612 bp, Homo sapiens
tggatttgccaaaaggcacatggagaactccatggttttagagggggccgtgtgcagacagagagtaaattacaaactttttctccgaaacaggaacaatcacagattaggactctccctggtgctaacatctcacccagaacatgctgctgccttctctctgcctgtgggaggggtatttcaggatgctaacgtgtctagtagcagcsgtgccttaatgaaaattccagagctgagcgcggtggctcatgcctgtaatcccagcactttgagaggctgagacgggtggatcacatgaggtcaggagtttgagaccagcctgacggacaaagtgaaaccctgtctctactaaaaatacaaaaatgagccaggcatggtggcaggcgcctgtagtagtcccagctacttgggaggctgagatgggagaattgcttgaacccgggaggcggaggttgcagtgagccgagatcatgccactgctctccagcctgggtgacggagtgggactccatctcggaaaaaaaaaaaaaaatccagcacatcccttcctggctacatctcccctccaactgtgtccagcaaagttctcgcctcctttctcagagtagagaa

SEQ ID NO: 509218 - DNA, 515 bp, Homo sapiens
gagcaagatcatgtgccatttgtctttctatgacggtcctttttcactcaacataccgtcctctggggaattttaaatttctattctgatttcagtactgcctctgatgatgtccctgacaacattctatgatcctcttctgtggtcaygccctcgcctccccactcaggtcctctgtccttgtagggcaagagcaggggctgggaggacgttggccctgcctgggtagccctgggttcggatcccggctcccatttctcatgtgtgtccctctgcacctgcatctcacagactaggggtaaagcctggtaggaactaacagatgagcttgcagtagatgagggggaatgatgacctttttaagaaatcatttcatgaagcagaagctgtggattcatggtgcagtccagggatagcttccttttggaccacaaaaggacaagttactccctgatccatctgtgccaacatgaataacaaagcgagcaaggaaggggtagacctgcacgaagcag

SEQ ID NO: 509219 - DNA, 515 bp, Homo sapiens
gagcaagatcatgtgccatttgtctttctatgacggtcctttttcactcaacataccgtcctctggggaattttaaatttctattctgatttcagtactgcctctgatgatgtccctgacaacattctatgatcctcttctgtggtcacgccctcgcctccccactcaggtcctctgtccttgtagggcaagagcaggggctgggaggacgttggccctgcctgggtagccctggrttcggatcccggctcccatttctcatgtgtgtccctctgcacctgcatctcacagactaggggtaaagcctggtaggaactaacagatgagcttgcagtagatgagggggaatgatgacctttttaagaaatcatttcatgaagcagaagctgtggattcatggtgcagtccagggatagcttccttttggaccacaaaaggacaagttactccctgatccatctgtgccaacatgaataacaaagcgagcaaggaaggggtagacctgcacgaagcag

SEQ ID NO: 509220 - DNA, 515 bp, Homo sapiens
gagcaagatcatgtgccatttgtctttctatgacggtcctttttcactcaacataccgtcctctggggaattttaaatttctattctgatttcagtactgcctctgatgatgtccctgacaacattctatgatcctcttctgtggtcacgccctcgcctccccactcaggtcctctgtccttgtagggcaagagcaggggctgggaggacgttggccctgcctgggtagccctgggttcggatcccggctcccatttctcaygtgtgtccctctgcacctgcatctcacagactaggggtaaagcctggtaggaactaacagatgagcttgcagtagatgagggggaatgatgacctttttaagaaatcatttcatgaagcagaagctgtggattcatggtgcagtccagggatagcttccttttggaccacaaaaggacaagttactccctgatccatctgtgccaacatgaataacaaagcgagcaaggaaggggtagacctgcacgaagcag

SEQ ID NO: 509221 - DNA, 563 bp, Homo sapiens
aaacctcacagccattggggggtaaacttttcataacaaatgctatattttatcccacgaagtttcttttgatgtcagaatacaagtattttacaaccccccagtgaaaaratgctgccagttacaagtgccagatgccattgctttaaaatgtttccaaattataggactgttaaagtatggggaaaaaagtatcttggaactggtgactcaggtattgcaaatctataatattgattgattgtgaatattggccctttatatagggtggtgctgtgcagtgcacaacatggacagccattagtggtggccctgttgagtattagaatttagaatcaatattcctctgcctttccagattctggtatttgttgatttcatgaatccttcccaagacaggctacaagcattagaccagcaggaacaatgaaagtcatgagtgagacagaacacagcttccagggttctgagtgtgggttctgcagtacacacatcctcagtttgaggaatgagggagtctctttagactttgaaggaggccacacctgctgtgccacttccca

SEQ ID NO: 509222 - DNA, 555 bp, Homo sapiens
aaataagcaaatcaattattagaagtgtttgcagaattgaattcacaagttttctaattgttttttctttttatgcatttagccatatctgatcttgaattgagttaaggaaccaagcttcaaaagaatacaatttgaaggagcagaggagtatcctgtaattataaaacatcatgatactctttaaaattctatatgttactcataatttctaagttcaatgatctgtgctgttatattaattaactttcaaaattctaatagctgagcagatcacttgatttcacttgcctacactactttttgttaattaatggaaaccataaattcagagcccttgcaaattgtgctgcttcattgcatttagtgctgttttaatttctactcttaattaaataatgaggctccagagcacattcctaactgtgaggcaaactagactgtgkttctagctgggattccttctagccagcccagtcaatcaatgcatgtcttctgtaatacataggagtttattactcaaccttggaggctcatgtggctcatgtggtggga

SEQ ID NO: 509223 - DNA, 649 bp, Homo sapiens
agctgctgtgactcattataaatctgctaaaatggaaattggattgaatgtttacaatattatatcttcatatgttggggaatgatatttcttcatttgtttgagtctgaataaatctacaacaatttctggaggatatttattactyattgaatattagggataatcctggatttttcctgtaatttagaagcgattcatatcttctagtggttgtagatgtgtggtcttctgagttctccattttgttccattggtctatgtgtctgttttttgtaccagtaccatgctgttttggttactgtagccttgtagtatagtttgaagtctggcagcgtgatgcctccagctttgttctttttgcttagaattgtcttggttatatgagctcttttttcattccatatgaatttaaaatagtttaattctgtgaagaatgtcaatggtagtttaatggaaatagcatttaatccataaattgctttgggcagtatgacaattttcacaatattgattcttctatccatgagcatggaatgtttttccatttgtttgtgtcatctctgatttcttgaatagtggtttgtagttctccttgaagaagtccttcacttccactgttagctgtattcctaggtattttattatt

SEQ ID NO: 509224 - DNA, 630 bp, Homo sapiens
actaatacaatttttatggattcaaagcctcaaaggctgacatatgctacagagaagataagattatacagagtccaaattcggagttaattatagactcaaatctactcacttggacttccagttcactagtgagttatatctccaccctgaagaatataccctacaaggaaatagtagggattcaggtcaaagagccattagaactgatttgtctttagttcctatgtagttcctttaatagtgagttctccatcaggaacatagaacatggcctacagaatgagaggtgcatggttcaagtccaggaacagaggayagcagctggctataactggcttggacagtctactacgcatatttctcccaccctcatactcagtatagtgaagttggtagcttgaaattgactatgatgaaagcatttacaccaagaaaactggcaaatgctacaaatcaaattttttttcagaatcaactattgaacgtttaccagcacaccactatttataaccaagaactactgattttcgtagacattatcacagacccaaggaactacccaaattttatttctggtgaaatgaatcaggactaaggaaaagaaaaaggtgatcatggttgtcctat

SEQ ID NO: 509225 - DNA, 477 bp, Homo sapiens
tgaacccgggaggcgaaggtggcagtgaggtgagatcgcgccactgcactccagcctgggtgacagagcgagactccgtctcaaagaaaaaaaaatatggctcttactatcccaatatagttgcttatgctcaatcccagtatatatgtacagtagtttcagaattctaacccatacacaaatgaaaagtaaatttactagrgttcaatatttgtgcacagttctttttgtatttagtcttgtaatatacagatgctattttctaaagttacttaggttacattttagtcacttcctcttccgtgtggttatgttatttatttataatctgttaggtcaatatattactgtttgtattctgttttgggtttctcccatgtcatgctaattgcaattatttacattttggatatgtgaaacatgttggttctgagtcagaacagtaaaaaaggtatgctgagagatgtgtctcttctc

SEQ ID NO: 509226 - DNA, 627 bp, Homo sapiens
gggatgtggagtgtagagatcttgatcaccctggcctccatacaggagaagagtatgtttttgaaaagttctaaggccggrtgcagtggctcgcgcctgtaatcccagcactttgggaggctgaggcaggtggatcacctgaggtcaggagttcaagaccagcctggccatcatagtgaaaccccatctctactaaaaatacaaaaattagctgggcatggtggcagatgcctgtaatccgagctacttgggaggctgaggcaggagaatcgcttgaacttgggaggcagaggttgcagtgagccgagatggcgccactgcactccagcctggacgacaagagtgaaattccatctcagaagaaaaaaaaagagttctagtagactggatcaatagaaattttagtatgatgtagttaaaataattcaaaatcaaaatgttgctacttacatagcataactgaatttggagctagaaaaaggcaattttaaaagactattaataataataggagagataaatctacccatagacaattatacattttctgtgccaagtccagagccaacagaaaacatcagaatcttttagtcttataaaaactctgcaaaccagcatgtttatgtt

SEQ ID NO: 509227 - DNA, 627 bp, Homo sapiens
gggatgtggagtgtagagatcttgatcaccctggcctccatacaggagaagagtatgtttttgaaaagttctaaggccggatgcagtggctcgcgcctgtaatcccagcactttgggaggctgaggcaggtggatcacctgaggtcaggagttcaagaccagcctggccatcatagtgaaaccccatctctactaaaaatacaaaaattagctgggcatggtggcagatgcctgtaatccgagctacttgggaggctgaggcaggagaatcgcttgaacttgggaggcagaggttgcagtgagccgagatggcgccactgcactccagcctggacgacaagagtgaaattccatctcagaagaaaaaaaaagagttctagtagactggatcaatagaaattttagtatgatgtagttaaaataattcaaaatcaaaatgttgctacttacatagcataactgaatttggagctagaaaaaggcaattttaaaagactaytaataataataggagagataaatctacccatagacaattatacattttctgtgccaagtccagagccaacagaaaacatcagaatcttttagtcttataaaaactctgcaaaccagcatgtttatgtt

SEQ ID NO: 509228 - DNA, 502 bp, Homo sapiens
gctgttttgtaaagcagtctgacaaatatttttacattaaaaatacayagccacttcaaccaacaaatcacactcctgggaacctatgcaatcaaaataaaatcaccaataaaattttattgcagcattgctcttattgcaaaaaacaagacagaaaaaaatgcatttccagcaataaggtaataataaatctatatattgtggaatattaagtagccaataaaaagaatgaattagagattaccattcgacttgaaaggattttcctggatgtatctttgagtgataaagtaagatgcagagaagggaatacaccgtgatcccatttttaaaaagcaaatattgaacaaaatccataaaagtgtgtgtgtgcaagtgtgtgtgtgtgtgtgtgtgagagagagaatgtgaacatggagacaagcagaagaatacacactagcttgctaacacaggttacttaagaagggtggagaatgcaggggttgaaaagaaaacatga

SEQ ID NO: 509229 - DNA, 502 bp, Homo sapiens
gctgttttgtaaagcagtctgacaaatatttttacattaaaaatacatagccacttcaaccaacaaatcacactcctgggaacctatgcaatcaaaataaaatcaccaataaaattttattgcagcattgctcttattgcaaaaaacaagacagaaaaaaatgcatttccagcaataaggtaataataaatctatatattgtggaatattaagtagccaataaaaagaatgaattagagattaccattcgacttgaaaggattttcctggatgtatctttgagtgataaagtaagatgcagagaagggaatacaccgtgatcccatttttaaaaagcaaatattgaacaaaatccataaaagtgtgtgtgtgcaagtgtgtgtgtgtgygtgtgtgagagagagaatgtgaacatggagacaagcagaagaatacacactagcttgctaacacaggttacttaagaagggtggagaatgcaggggttgaaaagaaaacatga

SEQ ID NO: 509230 - DNA, 324 bp, Homo sapiens
ccccagagtacacctgcacaccgtccactgaggcccagaggttggtctcccgcggctgcccccatctcgaaaccactaagatgggcagcagtgtccgggtggtgggagttgcagtggtcctgcaggcatggcggtgagaacagaggaggggcagtggaaggagagggtcttagacatacagcgttcccygtggcacctttgcaacgcaacccgaaagaagccggaggcagacaggtgttgctgccttaagttctcatgacgtgcaaagctgcggtcacgttgcagtcatttgtgtaacatgtacagtttaatgaaagatgtaat

SEQ ID NO: 509231 - DNA, 550 bp, Homo sapiens
ctcgctgtctgctgactcctgtaaagacaccctagcacagggttcagaccttttgatgtcacccccaatgctctccctgtcactttgagatcccgagagcccacatgcacgcaagccaggtggcaatgctggtccctgtcccaaccagtgaccaaggcagcgctgaccctgaggagcttctgtgggtggaggagcagtttccatgttggctgaataagctcacaagcccttccgacaatcacacccacaaggactggtcaccgttgcaggcagggtggtcttaggacaggaagagatgtgacttctctgtgccctgtggagtcatatatggacagcgcattyagacgctgtaaggtgccccgcacctggggagtcatatataccacagggacctccttcagggtggcttgtggtgggccagatcagcttccggctggcccgtgagcccccagcacatcctcacacaagcagacagtccccaagcagccaccctgaaacacctggagcagccaggcaggctgcagacagtggccccctgagccccggccag

SEQ ID NO: 509232 - DNA, 246 bp, Homo sapiens
taacgctgcagactcggtttcagtttttcatttgtttctgactgttgtaactctggttttttatactttagttcaatcctatcaggctatttcaagcttgtcagaatataaagtcaaaagagtattacaatggtgattggaaagaacataagattaatttgaagtagaaaaaaggcattttataaatgaatgtgaaatgcctggaggcctaccaagaatacccrgccatgcattagtttttcagct

SEQ ID NO: 509233 - DNA, 657 bp, Homo sapiens
actgaatttattctcattatttttgctaatgcaacctgcttaactggctgtttaatttcctaaatggtgctctgtctttattagtgggtgatttgagagaaaagcctactttaacgtttggtaccagcattctgggtgcttcttctttcctctctttctgtcttgggaacaaaggggcaaagataacttagttatctttggaggttaagagcccattaccatgctgttttggttactatagccttgtaacagaatttgaagtcagataatatgttgcctccagctttgtcctttttggttacgatcgctttgtgagtgagctacaggttcttttttgtttcatacaaattttaaatttttttctaattttgtgagaaacggaaaaatgatcttggtattttgataggaattgcattgaatccataaattgctttgtgtagtatggtatcattttagcaatattgattcttctaatctatgagcttgggttgtttttccattttttgtgtcatctgcaacttctttcatcagtsctttatagttttccttgtagagagctttcacctccttggttaagtgtatgcctgagtatgttattttattttgtagttattgtaaatgtgattaacttattgatttggttctcagcttgattgc

SEQ ID NO: 509234 - DNA, 598 bp, Homo sapiens
aaagttcttgaaatttctaaacaatatgaaaacctcataaaatactaatctaggcagtaagtcctatgagtcattgaccaatgtactttaaattgacaaaagatttgcctaccatkaatatttattgattgacgttcagaatttaaactgaattactaaagctaactttaagtatttaatcctaaatacttaggggtcttattttctccaaagctttataggtctggtcggttttattgttcttatcaagattcctctgaaaatagtcaaaatctatcttagatcctcataattctgtagtgtgtaatttttttctttccttaaacacattaactaagtatatagtaggacagagaccacaagagactgtaattcacagtcaagtagcttcctttcccttttgtgttttggaaggactgtttcccccttactgaggctgtatttgtggaaagttcgagtccaccttccttatattctgaaccaggagaccccacattgcctcattctccacctggcctcaatctccacctggcctcattcttcaagtgtcctgtccgcacctgcatgcactcgtttttgcccatgacgcctgccagct

SEQ ID NO: 509235 - DNA, 557 bp, Homo sapiens
tgcttgtagaagggcactgtgaagcccccgttgatgtagtgtccatggaacacagccagccccatgatccgccccacaaagtggaaataagacaagtggtcctgtagggggcaccagagaacacgaatttgtcagcatggtgccggccaatgtgggaatctcgtgctgtccccaagcttcttgggaaaagtgtcccagaggcaaccagacctactgactcagggactcacaggccccgctcctgaacaagtgaaagaaggctgcttgtgtagcagaaatttgcctagattcgctggacagcgttttgtatgctctcagggccaacacctcctcagaagggccatataactggcagaggagccccgtgttcagcaatsactgagaatttcaccttcgtgacaacagagaatcgaaccaagcccagggccttgacactgcagggcctcggcaccatgctggacgcgcacccaggaagccagccctgtgcttcctcccactgcacaggaaagaaaagggcaagttcccttcctcctccaccaccactccctcgatccaga

SEQ ID NO: 509236 - DNA, 458 bp, Homo sapiens
ctgggacacccggggcgcctcttgccctggcttctcctgggtctgcacttgggagaaagatcttgattttcactgttaaaaaccttcagctttctgaacaygcgtattgtgtgaactgtggcgtctctggctgagcctggagggcaggaggctaggatgctggggtttccaggtgggaagaggccgcccttgcccaagggatgcccccacctcggtggactgttcatgcttcctcggaatagtcctgctttgtggcagaagaaatggggcagtttttgttacatttagtgcagtgaacaaacatccagtttttaccagctatgggagttgagggagaaatgagggctcagagaccagggagggaggggaacagagaggccgagtcccaaggccacccggtgccaccgtctccgggcttctggctgcctcacctcctcactcgggccctcgccccccac

SEQ ID NO: 509237 - DNA, 458 bp, Homo sapiens
ctgggacacccggggcgcctcttgccctggcttctcctgggtctgcacttgggagaaagatcttgattttcactgttaaaaaccttcagctttctgaacacgcgtattgtgtgaactgtggcrtctctggctgagcctggagggcaggaggctaggatgctggggtttccaggtgggaagaggccgcccttgcccaagggatgcccccacctcggtggactgttcatgcttcctcggaatagtcctgctttgtggcagaagaaatggggcagtttttgttacatttagtgcagtgaacaaacatccagtttttaccagctatgggagttgagggagaaatgagggctcagagaccagggagggaggggaacagagaggccgagtcccaaggccacccggtgccaccgtctccgggcttctggctgcctcacctcctcactcgggccctcgccccccac

SEQ ID NO: 509238 - DNA, 458 bp, Homo sapiens
ctgggacacccggggcgcctcttgccctggcttctcctgggtctgcacttgggagaaagatcttgattttcactgttaaaaaccttcagctttctgaacacgcgtattgtgtgaactgtggcgtctctggctgagcctggagggcaggaggctaggatgctggggtttccaggtgggaagaggccgcccttgcccaagggatgcccccacctcggtggactgttcatgcttcctcggaatagtcctgctttgtggcagaagaaatggggcagtttttgttacatttagtgcagtgaacaaacatccagtttttaccagctatgggagttgagggagaartgagggctcagagaccagggagggaggggaacagagaggccgagtcccaaggccacccggtgccaccgtctccgggcttctggctgcctcacctcctcactcgggccctcgccccccac

SEQ ID NO: 509239 - DNA, 533 bp, Homo sapiens
ctctgcagtgaccttactaggagcatctacgctgctgccaggacaaaagacgggaagaggactaaagctcacccatgcctcaagacatagacactaaaaaccacagcgcacaacagccaagcacagctcagtatctggaggggatgtagagagaagaagcaaaccagccsgagaaccgcagctcagagcacggagacagggcacggcccccagctgcgggacaggcacatttctccacctctccactacggatccctgaggagggaggaggacgcctggccccaggctggcggggcaggagtgagcatagaaaatgccacattcattcagcatccttaggggactcctcggtgtctaaacaaaacctaacacattccaggaaacatgaaaaggtcctcctggcatcagccgggccgtgcccaaggccgctccgagcttggtttctcctgtacatgctggggctgaggggagagtacccagggcaaatgagaccaggtgcctgccactctggggccccacaaaggggcagtgag

SEQ ID NO: 509240 - DNA, 533 bp, Homo sapiens
ctctgcagtgaccttactaggagcatctacgctgctgccaggacaaaagacgggaagaggactaaagctcacccatgcctcaagacatagacactaaaaaccacagcgcacaacagccaagcacagctcagtatctggaggggatgtagagagaagaagcaaaccagccggagaaccgcagctcagagcasggagacagggcacggcccccagctgcgggacaggcacatttctccacctctccactacggatccctgaggagggaggaggacgcctggccccaggctggcggggcaggagtgagcatagaaaatgccacattcattcagcatccttaggggactcctcggtgtctaaacaaaacctaacacattccaggaaacatgaaaaggtcctcctggcatcagccgggccgtgcccaaggccgctccgagcttggtttctcctgtacatgctggggctgaggggagagtacccagggcaaatgagaccaggtgcctgccactctggggccccacaaaggggcagtgag

SEQ ID NO: 509241 - DNA, 541 bp, Homo sapiens
ccgcccacctcggcctcccaaagtgctgggattataggcatgggccactgtgcccggccctcttctgtttctttacttcccttttatttatttattttgtagagatgggggctcagttttttgcccaggctcaaactatcctcctgcctcggcctcccaaggtgctgggattactggcatgagccaccgcgcctggcccttgtttcctttcttctctaataaacttactttcactctactctgtggactcactctgaattctttcttgcaggagctctaagaaccctcttttggggtctgaatcagaaccccttttcagtaactcccatagtgcttgccacagagccctgatctgaaatcaccaattcacggcctgcagatgcactaaatgaagatgatagtggtgcctcttcccctgcccaacaccatgccctctggcacaaggaggatggccactggcagtgakggggatggagtaagtgctatgagactaggagaggaacaccccagaaacacctgaggtcacagagtgaacgaggca

SEQ ID NO: 509242 - DNA, 608 bp, Homo sapiens
ttaagactaggataaatgagactgtaattgattaaactgttagtgcatgcaagaatgtgtctcagatattttattcctcaatgtaatatttttcaaaatatgtgtttttgttagtataagtcagtcttactattggaaagcttctttgttctgatttgttttgttttcagatttctaacaaacttggtgtgcatcatagttatctccgtgcagattgtgttgaaaacacctttgatgcttctcccagtcccaaggtactcctggtaaatacaaaaatccatttttaatacaacatttgttgacaattgtgcatgtctatcaaaaagaaataaatctgggaggaaatttgtgaaggcaggaggctaagagtgcaagggaaatgaaacaggcagagattatgcatgtgaggatatttgcttcactcttagctggatgtgaccagaatatttcttagtggataccagaataatggcagtttcttagaaaacattgtcttctggagtgtaagaacaggaagaagataaatacaactaaaacgttggccaaaaaaaagcascctacgatcccgcaaataaaaagtaatgaaaaaatgctggtttctgaaagcc

SEQ ID NO: 509243 - DNA, 509 bp, Homo sapiens
cttgatttcacctgccagcttattcctcttttcccttgtaaactaacatatacactgtttctgataaatagaatatgaaaatttggggagggtgggagacattaatctgctaactatagggatcatattattttatattactaatagcttctaagaaacaagagattatatgttgatatggtttggatatttgtctcctccaaatctcatggtgaaatgtgatacccagtgttggcggtggggcctcgtgggaggtgattggatcatggaggtggatccctcatgaatgaattagaamcattctcttgttgataagtgagttctccctcagttcatgcaagatctggttgtttaaaagagtctagaagctcccctttatcctctcttgcttctgctctcaccatgtaacgggcttgctcccagttcactttctgccatgactgtaagcttcctgatgccctccccagaagccaagcagatatggctgccacgcttgtgcagcctgcaga

SEQ ID NO: 509244 - DNA, 562 bp, Homo sapiens
tgaggcttcaattacttataaaacaattgaggacaacacatgacacaaagtgggtatcaataaatgaatggtagatgctgtcatcgttattattgctggtatatcatcatttttattccttccccaaaacatgtaatatttgtaatattttgcataaatggaatttttttaatttttgcattacttaatgatttgactggaatacatacttaattcttaggtggatgagtgaatgaatgagtaggacctcgagaaatgagcaaattctcatattatagtttgtcccatagagagtagtggagaataatcaagtctcttttcctccattatacatctacagcacaaaccatgtactctttttcagggtataaaaaaatctcattatgtaattttactatgtattattgcagagaactctcacattacctaaacatgagaagcgttttgcacatgcagactcttaaattttatcttctgaatttagtatcactttttaagracaatctgaaatagtatgagttgttactagtaatgcatacctcagaattctttaggccaacag

SEQ ID NO: 509245 - DNA, 669 bp, Homo sapiens
tgagttctctcaatccattgtattcacaatttctctttgcattcagactgagaaaactggggatatgaaggtgtgacaattccttcattcaaatcgtagccctgaaagtaacattttcaacaaagtattcagacattgccttaggaaatcattgaaaaggcaaaacattagaggttttaaggttaacagtacaatctaaatagaagttggtactgaatacaggagcttttacttgaaaggagtcgatggctcagaaatatgatctgcatgcagcctaagtgacaacttaaacaaagaaagctgctaggcttaattcgaatggattccatgaatgtgttgtagtattatgaacttgtttatagtaataacactaatgcatctgctcmatctttgtgcagttacctagactacattgtttgacactaccattttgtattaacctccatcttctgtgctatgtctgtcatttctttcactataacataatgtgacagaagcttcatttacctaaacttatcttggcaacttgtacttcattaaagagaatcttgcaagcatcagttaaggctttcttatctggccatgcatagccaggcttcataaatcattctttcactttccattttgcagcttctcaaaaggtaacattattgaattcagatcactgga

SEQ ID NO: 509246 - DNA, 669 bp, Homo sapiens
tgagttctctcaatccattgtattcacaatttctctttgcattcagactgagaaaactggggatatgaaggtgtgacaattccttcattcaaatcgtagccctgaaagtaacattttcaacaaagtattcagacattgccttaggaaatcattgaaaaggcaaaacattagaggttttaaggttaacagtacaatctaaatagaagttggtactgaatacaggagcttttacttgaaaggagtcgatggctcagaaatatgatctgcatgcagcctaagtgacaacttaaacaaagaaagctgctaggcttaattcgaatggattccatgaatgtgttgtagtattatgaacttgtttatagtaataacactaatgcatctgctccatctttgtgcagttacctagactacattgtttgacactaccattttgtattaacctccatcttctgtgctatgtctgtcatttctttcactataacataatgtgacagaagcttcatttacctaaacttatcttggcaacttrtacttcattaaagagaatcttgcaagcatcagttaaggctttcttatctggccatgcatagccaggcttcataaatcattctttcactttccattttgcagcttctcaaaaggtaacattattgaattcagatcactgga

SEQ ID NO: 509247 - DNA, 435 bp, Homo sapiens
ctatggagttgagagagagggaatatttctctacgtagtcaaaagcaataagctaataattcaccatttgataaatcattttaacttcttaaacacaaagtgttaggaggttttgttgacttttctagagttaatgaccaatgacctctctgtccctattaagggacttactttctatgaagtcagaaggaagtgtagtgagatattttgcttaaggaattagagttcatttaatctgtgaataattaccaaaagtctgtttaccgctttttcctaggcacacggttagtgaaccgtgtgcctaggaaaggtttctcaacccctcttgcagtcagatgtggcagaatgactgmatttttgtcaatgaaatataaatggaagagatgtcatcactttcagacctgggccataggattttcctatgtgtaagcctta

SEQ ID NO: 509248 - DNA, 491 bp, Homo sapiens
ggctcccctggttctgaggcgttcagacttggactgagccacgttaccrgctcctctggttctgcggcttgtaaacagcctgtcatgggactttgccttcgcaaccatgtgagtcaattcttcccaataaattctctttcacatgtatcctgttggctcagtccctctggagcacccagacaactacagcacaggaagcagggcttcatcacagactggggctgggggagaggcaggaataaaggctgcggactgtcaaagatacccagagaggggctaggaagtcgggagggtgggaggtgcagcagatgcagccaccgggcaccaaactgcagcaaggtctctgaccccagcttcttgcacctcaccacgggatgcagcaattccgctcctcgatacagacccagaggccatgaaagctgggacttgaacaggtatttgcatactcatgttcctaacagcactatttacaatacccaagaggtagaaag

SEQ ID NO: 509249 - DNA, 491 bp, Homo sapiens
ggctcccctggttctgaggcgttcagacttggactgagccacgttaccggctcctctggttctgcggcttgtaaacagcctgtcatgggactttgccttcgcaaccatgtgagtcaattcttcccartaaattctctttcacatgtatcctgttggctcagtccctctggagcacccagacaactacagcacaggaagcagggcttcatcacagactggggctgggggagaggcaggaataaaggctgcggactgtcaaagatacccagagaggggctaggaagtcgggagggtgggaggtgcagcagatgcagccaccgggcaccaaactgcagcaaggtctctgaccccagcttcttgcacctcaccacgggatgcagcaattccgctcctcgatacagacccagaggccatgaaagctgggacttgaacaggtatttgcatactcatgttcctaacagcactatttacaatacccaagaggtagaaag

SEQ ID NO: 509250 - DNA, 430 bp, Homo sapiens
tctggggtgtgggctcgcaggacatccggagtttyccgtcccttacctgggaatcgcgacttccacagcttacttgaaagctcatatgaggctctgtgacacttctaagggttaagattgctgctgtgtgtcttcaaagaaagagccacctttgggtcctccaagccctcacccagcatgttggtcaaagcctccgccttttgtgtgcggcatgtgcggcagttcccctccccacgaaactggacaggccctggtgggctggccagagcctcccctgccgagccttcctccttctcctgggatagatggctgctccagaccccaaggtcgctgtccaaggaggcatcctcaattgctgtgtgaaaacaggcagggtttcaaggtggaggagagggagcactggcctgtacacccccagttccctagactg

SEQ ID NO: 509251 - DNA, 430 bp, Homo sapiens
tctggggtgtgggctcgcaggacatccggagttttccgtcccttacctgggaatcgcgacttccacagcttacttgaaagctcatatgaggctctgtgacacttctaagggttaagattgctgctgtgtgtcttcaaagaaagagccacctttgggtcctccaagccctcacccagcatgttggtcaaagcctccgccttttgtgtgcggcatgtgcggcagttcccctccccacgaaactggacaggccctggtgggctggccagagcctcccctgccgagccttcctccttctcctgggatagatggctgctccagaccccaaggtcgctgtccaaggrggcatcctcaattgctgtgtgaaaacaggcagggtttcaaggtggaggagagggagcactggcctgtacacccccagttccctagactg

SEQ ID NO: 509252 - DNA, 430 bp, Homo sapiens
tctggggtgtgggctcgcaggacatccggagttttccgtcccttacctgggaatcgcgacttccacagcttacttgaaagctcatatgaggctctgtgacacttctaagggttaagattgctgctgtgtgtcttcaaagaaagagccacctttgggtcctccaagccctcacccagcatgttggtcaaagcctccgccttttgtgtgcggcatgtgcggcagttcccctccccacgaaactggacaggccctggtgggctggccagagcctcccctgccgagccttcctccttctcctgggatagatggctgctccagaccccaaggtcgctgtccaaggasgcatcctcaattgctgtgtgaaaacaggcagggtttcaaggtggaggagagggagcactggcctgtacacccccagttccctagactg

SEQ ID NO: 509253 - DNA, 641 bp, Homo sapiens
tacatttgaggtttacagggactaattctttctgaaagtcatgattcatgaacatttgagtctcccttatcactgaccagccacaggaccataaaatgaagcaacacactgctctgttctcaatattttcaaacactgtgcctttctttcctactagatttttgccttctaaatcagttacaaaattgtatttatcattgtaggcctaaagcttagcatagtttcttgctcttctcatgctgatagaaagaatggaagcaagaatgaaagaagaatgcagatgaggaggcaggaagacaaaaaatgtaggagaaaaacaaattggcacaatagtctacctactttacaaagctattgtaaagacgaaatatgtggaaaatgcctgaaaaagaaaacattatagtaaaaatattatgtatttgttttgctatatgccaggcactattatatgcatgtatgtatacacacagatatatgtgtattttgtacatgtatatatgtgtatacatatatatgtgtgtgtgtatttgtatgtgtatatatatgtgtgtgtttatatacatgtatgtgtgtatatatgtatgtgcatgtgtgtgtrtgtattccaagtttttcaacaaccctttgaagttgatgctata

SEQ ID NO: 509254 - DNA, 520 bp, Homo sapiens
accaaactttgcttgataggcaaataacacaaatagaatcaatattatgctaaaagaaaaagacaaacaaaaaatatgagggttctctatttctgacataaaatgaatgcttgcaaacttcatactatatcagctacttcacatggattaataaagttacataatgtaatgagctcttggtgttttcttcattctttgctctgcaatttcagggaaatcaatggaaagtatactcactctatggcttttaaatgtgaatcttcatttctgaaacatattctycccccctgtaaaatgaaggaggttgcactagaaggctactaggaccctaaatctactttctggtaactacatttatgctcatagtgaaaaacaaagaaattgttttgtattaatccttcattctggtaattaatatatatgaatgcttgctttgtggatgcctgaaaagaatattttcttcctcagaaaaataattactataaaggaagtaattaactttttctttgaactcaacctg

SEQ ID NO: 509255 - DNA, 470 bp, Homo sapiens
acagtatcaaataaattactttttttggccctgttttaaatttttatttgtttaatgtttgttcttaattatttaatttttttcttatttaaatgttataatttattttggctaatggtttaacaaactcctcctgtgttcttcatgggatcacctaacacctcttgtagttaggtatggccatgtgactgaattctggccatgggaatgtgggcaaaagtaagaacggaaaactttcagcctaacytatacaattggatatacaatacttcacattcactattccctcatttctctgcctggctagatgtggagtgccggtaaggaagctccaaggtcctaggcaatggcagcctcagaacaactaagaattcaatgattgcgtagaagaaagtctgctaataaatagtacaaacctagtataacatatacatgtttactgcattaaggtactgagatttttattattc

SEQ ID NO: 509256 - DNA, 541 bp, Homo sapiens
tcatgcaaagcagaatgggaacgagcaaatgttgatcccttactgaaatgcgactcagtttgctatatgtattttattttatttttctccccgagtccttttattccaaagaaatattaattgctgtccttgcctaaatttcttcctgatctttgtttctatctcattttggattgtcatatggttttcttggtggctttactttgggtgaggaaacatgtttaaatgtcataggttgactgaggctgtgggtttattctggagagattctgtatagtcacgtgttaaccctcttttcatggtgtttcaggctgcacttagtgcattggaacgcagtcaaatttgaaaactttgaggatgcagcactggaagaaaatggtttggctgtgataggagtatttttaaaggtaaaaaatctcaccaactttaaatgaygtgttgtattctaggatgaaaagatagaacagtataatattgttatttactttaagaatattgggatccctacactggtaagataaatagtgattgttaaggatat

SEQ ID NO: 509257 - DNA, 611 bp, Homo sapiens
ttgctgcaaaggacattatttcattttttatggctgtgtagtattccatagtgtatatattacattttctttatccagtccgccgctgatgggcacctaggttgattctgtgtctttgctattgtgaatagtgtgacagtgaacatatgagtgcatgtgtctttttggcaaartgatttattttcctttgggtttatatccagtaatggtattgctgcattaaatggtagctctgtttttagttatttgagaaatctacaaactactttccatagtggctgaactaatttacattcccaccaacagtgtatatgcattccctttttgccacagcctcaccaacatctgttgttttttgactttttaataatagccattctgactgttttaagatggtatctcgttgcggttttgatttgtacttttctgatgattactgatgatgagcatttttcatgtttgttggctacttgtatgtcctgagaaatgtctgttcatgtcctttgtcccttttttaatggggttgtttttctgcattgcattttaaaaggaaaattctcagtctcccttgaagaagtgaagcctccttctttatgcactggccactgtct

SEQ ID NO: 509258 - DNA, 511 bp, Homo sapiens
ccccccccccaaaaaacttttcacaccaccttgaacagactctaaacttaggcactacagttactaagcagcctttggattctttgtttttgaagttagatcttttcagctattagtggaaaatgtgcctcactctactccaggattaccaatagaaatgaaaggacagaaatggcattagtgtttagagaagattatgtatatatggctgtrtgaacactgaaaattatgagggtcaacataaaatcagcattacaggtactaaaacataaatcctgatggctttcaccgttttcttaagagcaaaattgcaaaaagtgatattaacagtcatcctagacgaatatgagcaaatgatttgtttttccttaaaagagcctccaagtgtattgtgatcattttcacactgatcaaagagagcacccttctgtcaacaggtatctgcagttttcaggacctggcagaaattcttctatgttctgcctttaaaggtcaggtacaaaagcagaga

SEQ ID NO: 509259 - DNA, 638 bp, Homo sapiens
acagtggctcacgcctgtaatcccaggactctcgaggctgaggcgggcagatcacctgaggtcaggagttcgagacagcctggccaacatggtgaaaccccgtctctactaaaaatacaaaaattagccaggcgttgtggcaggcacctgtaatccttgctactcgggaaactgaggcaggagaattgcgttaaccgaggagatggaagttgcagtgagccaagatggcgccactgcactccaccctgggtgacagagcgagactccatctcaaaaaaaaacaaataaataaacaatgtaaataaaaaatatgaacaaatttttttcttgaagtacttttaaggaaaaaagctgagctttggaagtttggggttttttttcctcccctgttgcaaattcttgtggtttgggttgggtgktgaagagtgcttgcccggcaggcctctctacttcaagatgactacacttagattctgaaacagggtgaagagtgaatggatcacggtggccttttctctttttttcttttttttaatttaacttttccttttttgctgtctagtcaacctcatcagtcttctgcttcttggtatcaacgttgtcatcctcagcatcttcaactgcccatttgcccatag

SEQ ID NO: 509260 - DNA, 286 bp, Homo sapiens
acaggtccccagccttcctttattgagaagttgctgaaatttacctcaaggacaagccaggaatgaaggttcagggatgtkgtccctgctgttctttcaggcagagacctccagccttttatcatgtagaggttgtagaggtagaattattgctacagcaagctgaagaagaaggtgtgggaatattgtgatttccatttaagctcaaagaaatttattttttatttgctacacaggctctcagatactagcttgttagaagccaggccacataaagctgctggca

SEQ ID NO: 509261 - DNA, 286 bp, Homo sapiens
acaggtccccagccttcctttattgagaagttgctgaaatttacctcaaggacaagccaggaatgaaggttcagggatgttgtccctgctgttctttcaggcagagacctccagccttttatcatgtagaggttgtagaggtagaattattgctacagcaagctgaagaagaaggtgtgggaatattgtgatttccatttaagctcaaakaaatttattttttatttgctacacaggctctcagatactagcttgttagaagccaggccacataaagctgctggca

SEQ ID NO: 509262 - DNA, 583 bp, Homo sapiens
ttatctcaatcaaatatcacattaaaatgttgttctccatatgtatctaagaaagctttaaagaggaattttgagcagttcttgactacttgactgaacatataatctattattgtattttatatggagaaactctcttatttatatgtttatttatttatctggtttccagatgctaaagtgtatgttcattatagtacattatagttcattaaaatgttcaagtctaaattgcactcagcatagtgaaactgctgctatttttcttaaacattatacctcttcagaacagatttgcaataggtactggcccaaactgataacttccttcccttcattttgcataatacagcaattttggtttcaaaatgccaccacaatcttaaatattctgactagctttgctgagtttgcagtagcaacaatgataatacccattgtaaaaacgaaatgcagaaatagtgactgtcaaatcctaacatgttcyttatatccacacttcagttttcttaccagtataatctacattccagttaataatttaatgctaatcagctccttatcttctgaaaaggagagtctg

SEQ ID NO: 509263 - DNA, 592 bp, Homo sapiens
ttcataatgtagataatgaaaacaatattttttgtccagtaaacaaaacaatttgagcagattgcgattgttcacttttagctaactgaaaccatatactcacatataaaatactcaatagaaaacgtcttcgcttaataatttgcattttcctgtctccctctcttagcttcctatattagtcagctcagcactagtataaatttggtgatttaggtccagagttatttcagtgcctcttatagtttggaaatccaagaagctactcctctcatccatccctcaaaattcattagtttgtgtttggaaagtacaggattttcaatcttgtctctgccatttatgagttctatgactttaagcaagtaaattagccctcataaacatcaacttctactatgaaatgaagtagtaataataatagtaataacatctatcccaaggattattggaagaataaatgtggtatatttggagtgttagaacgggcatatattaggtatcagtgatgtttrcaacatgttactgatacaaaatttttttacttgaagatttacttttatgataattatattttatacaataccaataa

SEQ ID NO: 509264 - DNA, 555 bp, Homo sapiens
ctggcagaatcaaaccaactctgttgcctgtggactcacgacgcacaccactacctcttccgcctcctcctctgctgcctctgtccacggaggggactttattgttcagtggggaggggatagtttgttgctaaaccgtggggaaaataataaaaagcgtcaaggggaaaagcacatcacagaggcaaatttgccctcacttcaggtcatcaggagctaagcgggtggagagggagggagctggcagtgtgagcgtttaatgtgttagcgatcttttcccatgggtgcctctccccttttgccttcayccaagtctttctcaatcttgatagtcatgtacctgttttgaattttatcccctgcaccttgaacctttctaaattcagagggattgaagataagactcagctctaaggctcccagattccccggataagaatttatcccaaaactgccccaaactgctgctttcccgtaagtcttctggggaacctctaatctccctttattcctgagccccaggtttttctttgcaacaggaaaggagttgtgttt

SEQ ID NO: 509265 - DNA, 437 bp, Homo sapiens
cacccatgtgggcgtgtggccttcctactcatcactgtcagtcttccctcagtgggctcaggagatccagctggacaagccacactgaacagacccactgttttaagaggctgatcttgtcatcagaaaagttggaatgagcaatggcaggtgggaggaagctcctgtctcaggtctgaggctggcggacgcctgccttgcaccttgtcttgccagctccatgctctggggaagagggggtgggakgggggctctgtgtacgaggggccatgagtgctgttcggcttggaccaacctgggcagcgtgagccatctggatcagagccaccaggggaagggggcagcctgcccacacctgtggtcctgtgaacggcctgcacggccagtggcccagcggagcggtactgtttatggcacaatgcacacaggccagcaag

SEQ ID NO: 509266 - DNA, 246 bp, Homo sapiens
ttaagctgagagagatgattgtttctctgggacaacagttcaaccagcaactcagtttcttgggcattaagacagaagtttttgctttgtaatcctcggaaataatgcctatggtaggactgaggataaatgctktgaccggtattgagtggtagtgtaggtttctgagcctttctttgccttattcggtttgcagttcttttctgattcgttgtggccttggtgttcgagttattcatgtttgtt

SEQ ID NO: 509267 - DNA, 426 bp, Homo sapiens
ttgtttgccaattcatgtggctgcttggtttacttgaaacttccagaggaggagcaggcagaagttatgcagcctcgatgacctcttatagcctcagaagacaaacagcattgcttctacacagttgcatgcctaccaaaattcaacagaaggaagcataaggcagtaggttcaatgggaggagagtcaagatcaccctgttagaaaaaaatgtaggataggagatcttgtcacagccttgttggagaatacaacaggcatcagtccaccctgtgaccaaagcaattcacgttcctcccacatgctgaacactctaattcttacctcaacatgcccaagtattattccatgatagtgttaccgcatcatcaaaatgatgtcctaggggagtgatatcagcaaratgactgactaggagacaccagc

SEQ ID NO: 509268 - DNA, 629 bp, Homo sapiens
gagctggggtatatacacctctcctgtcctcactgattgagggctttctgagaggatgctcattccaggtgctgtgaaaggccatgtgtgcaggcagggctgccttctccagtttgacatagagcagtgaggaacagatatggccwtggggagtcagcagaagtacagcaaaggggaaaggcaaagggtagcaagagtgactgctacattcacctccccgcacaaaaaaaatgtgtgtatttcaatccagagcttcttctctctgaacctaaatcttagcaagcagtttgccagtaatttcccttgaaattcaggcccctggaaagcagcaggagatctgggtacaggctataccactgtggtctgctcactcttagtgatgcgtgagtaatgctccctggactccccaggttctagtcttctcatgtcgatgtagttgattccacttcccttgctgcacaaccaggctgggatgcctgggcagaggcagacatgtgaggtataggggttcaaatctgtttccaagttttatccagatcccaagtatttcttcacgtacatgggcggtggcttggcaggagatgcagattctctctcctggaagtgaggcaaggaggctggcgtctggg

SEQ ID NO: 509269 - DNA, 632 bp, Homo sapiens
agctgagccctgtcttgaagagtcatgttaatactaaaatgawcatccagaaacacgataaaacttgatgtaatacactgacttttaagtagttggttatcaatcatcattgtgcaaaaaaagtgaccaatgtaatacttacacattcacccatataggatgtatcttattataattagtggcagaagtataaatatttggtaatgtatttataaagctaccaatgagaaatttaaaaagaaatttaaaaaattatatataaataaaaagtgtaaaatttaccttatttatggaaactccacatatatatatataaacattaatgtaggtacatatatatatatttatttgataaatagttgggtgcgtgtagttccatatgcatatattcatgtctaaataaggccatttacatatatatatgagaaacatatgcatatttacaaaatgttttaataaattaaatctcttaagataattctatttattcctcatcaaaatagttggtttctagaaccagatatagtacctgctctggctataggaatgtccttgaaatttgatgtatttctaaaacactcaccaaattcatgtgtcaccttaaaatatttttctaacttacttgaggtgcc

SEQ ID NO: 509270 - DNA, 632 bp, Homo sapiens
agctgagccctgtcttgaagagtcatgttaatactaaaatgatcatccagaaacacgataaaacttgatgtaatacactgacttttaagtagttggttatcaatcatcattgtgcaaaaaawgtgaccaatgtaatacttacacattcacccatataggatgtatcttattataattagtggcagaagtataaatatttggtaatgtatttataaagctaccaatgagaaatttaaaaagaaatttaaaaaattatatataaataaaaagtgtaaaatttaccttatttatggaaactccacatatatatatataaacattaatgtaggtacatatatatatatttatttgataaatagttgggtgcgtgtagttccatatgcatatattcatgtctaaataaggccatttacatatatatatgagaaacatatgcatatttacaaaatgttttaataaattaaatctcttaagataattctatttattcctcatcaaaatagttggtttctagaaccagatatagtacctgctctggctataggaatgtccttgaaatttgatgtatttctaaaacactcaccaaattcatgtgtcaccttaaaatatttttctaacttacttgaggtgcc

SEQ ID NO: 509271 - DNA, 632 bp, Homo sapiens
agctgagccctgtcttgaagagtcatgttaatactaaaatgatcatccagaaacacgataaaacttgatgtaatacactgacttttaagtagttggttatcaatcatcattgtgcaaaaaaagtgaccaatgtaatacttacacattcacccatatargatgtatcttattataattagtggcagaagtataaatatttggtaatgtatttataaagctaccaatgagaaatttaaaaagaaatttaaaaaattatatataaataaaaagtgtaaaatttaccttatttatggaaactccacatatatatatataaacattaatgtaggtacatatatatatatttatttgataaatagttgggtgcgtgtagttccatatgcatatattcatgtctaaataaggccatttacatatatatatgagaaacatatgcatatttacaaaatgttttaataaattaaatctcttaagataattctatttattcctcatcaaaatagttggtttctagaaccagatatagtacctgctctggctataggaatgtccttgaaatttgatgtatttctaaaacactcaccaaattcatgtgtcaccttaaaatatttttctaacttacttgaggtgcc

SEQ ID NO: 509272 - DNA, 632 bp, Homo sapiens
agctgagccctgtcttgaagagtcatgttaatactaaaatgatcatccagaaacacgataaaacttgatgtaatacactgacttttaagtagttggttatcaatcatcattgtgcaaaaaaagtgaccaatgtaatacttacacattcacccatataggatgtatcttattatrattagtggcagaagtataaatatttggtaatgtatttataaagctaccaatgagaaatttaaaaagaaatttaaaaaattatatataaataaaaagtgtaaaatttaccttatttatggaaactccacatatatatatataaacattaatgtaggtacatatatatatatttatttgataaatagttgggtgcgtgtagttccatatgcatatattcatgtctaaataaggccatttacatatatatatgagaaacatatgcatatttacaaaatgttttaataaattaaatctcttaagataattctatttattcctcatcaaaatagttggtttctagaaccagatatagtacctgctctggctataggaatgtccttgaaatttgatgtatttctaaaacactcaccaaattcatgtgtcaccttaaaatatttttctaacttacttgaggtgcc

SEQ ID NO: 509273 - DNA, 577 bp, Homo sapiens
ccactcattttgtcctacctctctgtgaccgtgaaagacggctgtgctcttggcaaaggtcatctctctgtcatgagtctggatctccttttcttctcctgattatctgtcactcagttatccccactctcttccacaactttaacttcagcttctctattctaagagactcttctcgcaggctcaaggctctcctaccctccatcattcctccctctaccccacacagccagcatgtgtccagctagtctatccttcagccaaacttccttagaaagaggmcttacctcactgtccctacccatctactctctgactcacttcttaactccatgactgggttctggtttctttcccttgcctgttgtgacttcctatggacacagccaaaaaccatcacatagtcctgttgtatggcatccccaccatcttgaaatgtcctctccctcagttcctatgtgttaccacacacgcctgccttggcttctccctctagttgttccttctctgtcttctgtgggcttcttattgtctgctcactccttcttcagtgtcctctcatgggcttccttccctt

SEQ ID NO: 509274 - DNA, 577 bp, Homo sapiens
ccactcattttgtcctacctctctgtgaccgtgaaagacggctgtgctcttggcaaaggtcatctctctgtcatgagtctggatctccttttcttctcctgattatctgtcactcagttatccccactctcttccacaactttaacttcagcttctctattctaagagactcttctcgcaggctcaaggctctcctaccctccatcattcctccctctaccccacacagccagcatgtgtccagctagtctatccttcagccaaacttccttagaaagaggccttacctcactgtccctacccmtctactctctgactcacttcttaactccatgactgggttctggtttctttcccttgcctgttgtgacttcctatggacacagccaaaaaccatcacatagtcctgttgtatggcatccccaccatcttgaaatgtcctctccctcagttcctatgtgttaccacacacgcctgccttggcttctccctctagttgttccttctctgtcttctgtgggcttcttattgtctgctcactccttcttcagtgtcctctcatgggcttccttccctt

SEQ ID NO: 509275 - DNA, 577 bp, Homo sapiens
ccactcattttgtcctacctctctgtgaccgtgaaagacggctgtgctcttggcaaaggtcatctctctgtcatgagtctggatctccttttcttctcctgattatctgtcactcagttatccccactctcttccacaactttaacttcagcttctctattctaagagactcttctcgcaggctcaaggctctcctaccctccatcattcctccctctaccccacacagccagcatgtgtccagctagtctatccttcagccaaacttccttagaaagaggccttacctcactgtccctacccatctactctctgactcacttcttarctccatgactgggttctggtttctttcccttgcctgttgtgacttcctatggacacagccaaaaaccatcacatagtcctgttgtatggcatccccaccatcttgaaatgtcctctccctcagttcctatgtgttaccacacacgcctgccttggcttctccctctagttgttccttctctgtcttctgtgggcttcttattgtctgctcactccttcttcagtgtcctctcatgggcttccttccctt

SEQ ID NO: 509276 - DNA, 577 bp, Homo sapiens
ccactcattttgtcctacctctctgtgaccgtgaaagacggctgtgctcttggcaaaggtcatctctctgtcatgagtctggatctccttttcttctcctgattatctgtcactcagttatccccactctcttccacaactttaacttcagcttctctattctaagagactcttctcgcaggctcaaggctctcctaccctccatcattcctccctctaccccacacagccagcatgtgtccagctagtctatccttcagccaaacttccttagaaagaggccttacctcactgtccctacccatctactctctgactcacttcttaactccatgactgggttctggtttctttcccttgcctgttgtgacttcctatggacacagccaaaaaycatcacatagtcctgttgtatggcatccccaccatcttgaaatgtcctctccctcagttcctatgtgttaccacacacgcctgccttggcttctccctctagttgttccttctctgtcttctgtgggcttcttattgtctgctcactccttcttcagtgtcctctcatgggcttccttccctt

SEQ ID NO: 509277 - DNA, 472 bp, Homo sapiens
ggtaaagccatcaagtctgcatttcatccttctacctgggtactggctccaagaatctgttctctatcaacacatcaagacccttgacttagagagcctcatatacacagcaggaataaaaggagaggagaaatagagaatgaamctcagcctaaccttcctcatctagcccttttctaattcatccggtaccttttctaattcttcgcaaagacactgcgtaagttttcagaagctttagctgggccacacctccaggcttccaggatttgaagaattatgtcaatatagaaaccagtttctggacagcgaatagcaaatccaaaatcactctaaattggtgattgtcaaccaggatggttttgctcctaggggacatttggcaccacctagagacatatttttaaatggtcacaactagcagttcttattggcatttagtgggtaggggccagggatactgccaaagtgc

SEQ ID NO: 509278 - DNA, 607 bp, Homo sapiens
tggctacatcaggtagaataaaatcatcctttcataaaatagtgacctccttttttatttgcatttccaaagccaagcacgtggtaggtagacaacaaatgcttgctcctgggctgcgctaaaggcatctataaccactaagcccaaagagtgtggtgtcccttcaaaaggaaggagccagtgtttatatcactttttcttgaccttcacggctgcactcaaagcccacctccagcatgaggcactatccagtccaatccacagtgatcactccctttctgagtccttctaggaaatcagacacagtcatttgaggtgtgtgttagtaatctttcctcagatgccctgtgagctcttttgcacagtaccaaggcatgtaataggcaggaaacgtatttaattgcttggcttagttctagttttcaatgtgtacttctccagaattatccaattaaccctaacttgagaagataggcaaactggatttgcacacactggagtcaattcctgatayccccgggggtgtgaatgaacagaggtcttcttgctggcttctgtaacagtatctctctttggccagcacccaatttttggaaccattatgagc

SEQ ID NO: 509279 - DNA, 261 bp, Homo sapiens
ccaaagtgtggggctcacccctctgcggtgcttaagctcattttagagcaggatttytaaacctcagcactactgacatttggggacagagaaggctttgatgtcagggctgtcctacgcgttagtgggtgctgagcatcatacctggctttgatctaccaaatgccaggaatgtgcacccccccccatccccacataccccagtcataaaaaccagaaaatgtttccaaacattggccaaatatccttgtggtggggagg

SEQ ID NO: 509280 - DNA, 569 bp, Homo sapiens
acctaacttatggtttagccatatctgtcacgttcttcctatttgacctctggcaacatgagcattcttcagtataggttttacttttttagcttcctaatctttgcctggaatgctgttctttctcttctctgcttacagtatccttttctctttccagatacagctcagatgcctcatttactagtatatctctagtgtctacaaatcacttcactatcggggaacctgccccgatagtcacgtaggttctttwctattttccctgagcttcagccggcttgagaaataaagggacagagtacaaaagagagaaattttaaagctggggcatccgggggagacatcacatgtctgtaggttctgtgatgccccacaagctgtaaaaccagcaagtttttattagggagtttcaaaaggggagggagtatatgaatagggtgtgggtcacagacatcaagtacttcacaaggtaagagaatatcacaaggcaaatagaggcagggtgagatcacaggaccacaggaccggactggggcaaaattaaaattgctaatgaagtttcaggc

SEQ ID NO: 509281 - DNA, 569 bp, Homo sapiens
acctaacttatggtttagccatatctgtcacgttcttcctatttgacctctggcaacatgagcattcttcagtataggttttacttttttagcttcctaatctttgcctggaatgctgttctttctcttctctgcttacagtatccttttctctttccagatacagctcagatgcctcatttactagtatatctctagtgtctacaaatcacttcactatcggggaacctgccccgatagtcacgtaggttctttactattttccctgagcttcagccggcttgagaaataaagggacagagtacaaaagagagaaattttaaagctggggcatccgggggagacatcacatgtctgtaggttcygtgatgccccacaagctgtaaaaccagcaagtttttattagggagtttcaaaaggggagggagtatatgaatagggtgtgggtcacagacatcaagtacttcacaaggtaagagaatatcacaaggcaaatagaggcagggtgagatcacaggaccacaggaccggactggggcaaaattaaaattgctaatgaagtttcaggc

SEQ ID NO: 509282 - DNA, 637 bp, Homo sapiens
ttctcataactgacccgcccaggccaccctctggtttagaaaagtccctgctccatgaagggaattttctgggggagacggcatctgagaaatcagtatttcacgacggtgtctttccagtgatggttctgcaagctggtagagtggtgagtcgggatttgaactcagatctttggccacccaggttttccttgccttgccttgcagggctggtcttaggcttcaagattcatttttgtagtttgtgggttttctcttaaaacgaggctcttattcctgcaaatatttacaggttactttattctrtgtggaacagaattgcttctaacctggtgggggcagggaacactgcagtaagggctcaattaactgatttcacagtggtcacgactcagacattcattttagagattaagtggaaaataaaagagatcagagcacctcaagcatacagcaggaacgcacagtgaattaaatggagagatggaagtatttggtccctgaagacgagcatgacattgcgatttagcttggatgagaaaactgaggtttcttggaaatgcctacccacgtgggggaatttctctgtcaagtttctgctgctttgcagccatttaaaatgggtcctgaaatatct

SEQ ID NO: 509283 - DNA, 637 bp, Homo sapiens
ttctcataactgacccgcccaggccaccctctggtttagaaaagtccctgctccatgaagggaattttctgggggagacggcatctgagaaatcagtatttcacgacggtgtctttccagtgatggttctgcaagctggtagagtggtgagtcgggatttgaactcagatctttggccacccaggttttccttgccttgccttgcagggctggtcttaggcttcaagattcatttttgtagtttgtgggttttctcttaaaacgaggctcttattcctgcaaatatttacaggttactttattctgtgtggaacagaattgcttctaacctggtgggggcagggaacactgcagtaagggctcaattaactgatttcacagtggtcaygactcagacattcattttagagattaagtggaaaataaaagagatcagagcacctcaagcatacagcaggaacgcacagtgaattaaatggagagatggaagtatttggtccctgaagacgagcatgacattgcgatttagcttggatgagaaaactgaggtttcttggaaatgcctacccacgtgggggaatttctctgtcaagtttctgctgctttgcagccatttaaaatgggtcctgaaatatct

SEQ ID NO: 509284 - DNA, 579 bp, Homo sapiens
ctgcactcagggctggtggggaagtcctcacactcaattaacggggattcccactcccgtctctgactcacagcagcaccttttcctggtcctccggttagaaaggcagggtttctctctgagattttcttgccagcacttgttctgcattggggccccagttctacactggggccactctcaggttaaagccagaaaataaaagaggaaggcagaaaaatttatcctcagacgattcattcctcaarttttgactcccttctccaatcgtcctgctattgtgaactttctagagtcttcaggtggtttcattttgtacattgtccagaggcctcaactatacttggtgggaaggaataggcgtgttattccctcttcaccagccccagaaggctcatctcttgcttttattgaactcaggtttaattcaaattatgaattttgtacttttccagcattgtattatattttagctgagggtccttcatctgcagacagacatgacgctggaagcagtaatctcccactttcttttctaatgactcacaagcaatctttttatttaacattaataataca

SEQ ID NO: 509285 - DNA, 352 bp, Homo sapiens
cacctgcattgagctgtccaaatccagctctacctcacaccagcatggagactcactcaccaaggttgcaatctccctgctagaaattcagcggagtaattaaaaattactttcccatctgatctggctgtttctctttacaattcagagctacttccgattcccatgaggttcgtccacatcctgccaattgctaaatgtttattgtaaaaccagagaacaatgactacctcattcctggagaaataatgctttcaatgatcgcatggacttatacagacgacyggcaccatggcctgccttgccagggaggctctcttgggaaccatcaataatcataaataatgataat

SEQ ID NO: 509286 - DNA, 616 bp, Homo sapiens
ccaggtgatagcatgagttaacagaaattaattcaaaccattcatttgttagaattttaggtccttaggagtgaggaccatatctcattttagttagtacccttggctcctggtatagtacctagaacatagtaggtgcctaataaatatttactgaatatatatactggctattttagtgataaagattttttatttttaagaagccaagataaaagacagaatattttaaagaagaataagtgctatagggtccctaagtttgttgccattttcttcatttgaattagaaaatcatttgaaaattacattgtccatatcttatggaataaacctcaaatcatggcctggattttcctttcttctcctttctaggtcttctcccttcaaggagaccttaggaaaaaaaatcttttttatatattttcaaggaaaagtaattattcctatattatggagaaatgataaagaaaatactcttttaaaatttgtcacaatacacagcatggaaattctatagcttagaccaaaataagagmaacacaaacttgaggttagaaggggtcttaagaatcatctatacattctctcctctccccagtcctacagtcaaaat

SEQ ID NO: 509287 - DNA, 614 bp, Homo sapiens
tgggcttggtctgaacctctagggtttactgggacaggatgcagaccctgagggaaagctagcctggagccattttaaatcctgcccaaaggctgcccaggagcatgtggagagtgtgagatsctgtgtggaggaatgtcagataacagggatgcgggcagcatggcgggaaggaattgcacagcctgtatcaaggtagtgtcagtgggtttcccaggtagaaggatttccagcaaactccaggtcaggagttcaagaccagcctagccaacatggtgaaaccccgtctctactaaaaacacaaaaattagctgggtgtggtggcacacgccggtagtcccagctacttgggaggctgaggcaggagaatcgcttgaaccagggaggcagaggttgcagtgagccgagatcaagctactgcactccagcctggtgacacagcgagactctgtctcaatcaatcaatcaatcaatcaataaaataacttctcgaagttgatgcagctacaatggctagaactgcagcccccgatcttcacatccgtgggagtgagagtcagctcaaaatatctgccaggcctgggagtgcgacacagatggcagttcagcaagga

SEQ ID NO: 509288 - DNA, 627 bp, Homo sapiens
cagtgaggccttcttcatgaagcctctcccagttctccgcctcaccccaccaagctggaactgatcgcagcctccaaactcccacagcaatcctttgcctcctcttctgacgctactctttctctcttggatgaaagccgtgtgtatccmtgttggttctccacttctagaacctgtcgttttggggctgcaggacttggtggattcacactggcatcccctcaggaagcaggtgagcaggaagtgactgttggatgcacgagaaagcaagggaaccacagaggtgggaaaatgctgtctctttttcattgttaagtcactactttaggcacaagagtgtaactaagtcctttccaaatggaaaatggctactttagagccacgtggactcctcacaaattacatgttgtgtcttctgttcctctttaaaatatttttcacaggtagcttcattaaaatgacgatcacttctgggagcaaattaataaattcaaacatagactattagaatttgaagggacctgcaagacccttctctctttagctctcaattttagatctaagaaaactgggtcaagagaggcaaaaataacttactcaaattccctgtgagtgcttgtggtatat

SEQ ID NO: 509289 - DNA, 608 bp, Homo sapiens
ctgcaatgaggacactggctgcctytcactcttctggggacagcactaactgatttgtttacacctctcatggtgcctagcacaggcccaggcaaaccaagagtggtaggaaccagcactgcataggggccttgtgaagttaggtaacgctgaagccacagggcttggtggattcctcccgaggcctagctacaaatatgattattagtttttctgtgctctgttgttttttttttttcactaaacatgattctttaacccattcctgtcaacactggcatcgaccaacctcccaaggtccctgctgtacccctcaaaaccattaagcctttgctggactgtgatctaagggcggctggcaaacacagttttgtcggtttccaccactcactctgctgagatcagcttggcctacacgaatgggtcctgtctgctcccatcccttcttacttgtggtaatctcggacacagtagatcttgttctctgagtccacggtgaagggcaccccatccaaacactcattacagatgacacagcggaaacagccggggtggtaggacttccccagggcttgcaggatctggagcagagaccaagactcagtggg

SEQ ID NO: 509290 - DNA, 561 bp, Homo sapiens
acttcctgagattcaagtgtgtgttccygaatttgtaccagtcatacttattattatttcatcattatatagtttaactattttataaaccaatgaaataagatgaaaaacacactgctgtttctataaagttaaatgatttggaatgtaacttgataagaggcaagttgctaaaacaaaactgctgttgaatttggagtgggagtggcaactaaaaaaatataaaagaacatagtaaaaatgtacaggattctgcacacagatttctctgtaagtgtcaaagtctttaaagtggcccaaatgggaaagccctatggatgtaatttacacagggaagacaattcagaatcaaggaaccaaaaacaaagaaaatcctatggccgtacataaaaacattgaccaatgtaaaacttttaggttttaagttaaaatatttagggtatatatgttccatttatcacttttatgattccctatgttaacattaactttttttttttagaccgtcttgctgttgccttggctggagtgcagtggcgtgatgacagcacactgtggctt

SEQ ID NO: 509291 - DNA, 561 bp, Homo sapiens
acttcctgagattcaagtgtgtgttcctgaatttgtaccagtcatacttattattatttcatcattayatagtttaactattttataaaccaatgaaataagatgaaaaacacactgctgtttctataaagttaaatgatttggaatgtaacttgataagaggcaagttgctaaaacaaaactgctgttgaatttggagtgggagtggcaactaaaaaaatataaaagaacatagtaaaaatgtacaggattctgcacacagatttctctgtaagtgtcaaagtctttaaagtggcccaaatgggaaagccctatggatgtaatttacacagggaagacaattcagaatcaaggaaccaaaaacaaagaaaatcctatggccgtacataaaaacattgaccaatgtaaaacttttaggttttaagttaaaatatttagggtatatatgttccatttatcacttttatgattccctatgttaacattaactttttttttttagaccgtcttgctgttgccttggctggagtgcagtggcgtgatgacagcacactgtggctt

SEQ ID NO: 509292 - DNA, 561 bp, Homo sapiens
acttcctgagattcaagtgtgtgttcctgaatttgtaccagtcatacttattattatttcatcattatatagtttaactattttataaaccaatgaaataagatgaaaaacacactgctrtttctataaagttaaatgatttggaatgtaacttgataagaggcaagttgctaaaacaaaactgctgttgaatttggagtgggagtggcaactaaaaaaatataaaagaacatagtaaaaatgtacaggattctgcacacagatttctctgtaagtgtcaaagtctttaaagtggcccaaatgggaaagccctatggatgtaatttacacagggaagacaattcagaatcaaggaaccaaaaacaaagaaaatcctatggccgtacataaaaacattgaccaatgtaaaacttttaggttttaagttaaaatatttagggtatatatgttccatttatcacttttatgattccctatgttaacattaactttttttttttagaccgtcttgctgttgccttggctggagtgcagtggcgtgatgacagcacactgtggctt

SEQ ID NO: 509293 - DNA, 561 bp, Homo sapiens
acttcctgagattcaagtgtgtgttcctgaatttgtaccagtcatacttattattatttcatcattatatagtttaactattttataaaccaatgaaataagatgaaaaacacactgctgtttctataaagttaaatgatttggaatgtaacttgataagaggcaagttgctaaaacaaaactgctgttgaatttggagtgggagtggcaactaaaaaaatataaaagaacatagtaaaaatgtacaggattctgcacacagatttctctgtaagtgtcaaagtctttaaagtggcccaaatgggaaagccytatggatgtaatttacacagggaagacaattcagaatcaaggaaccaaaaacaaagaaaatcctatggccgtacataaaaacattgaccaatgtaaaacttttaggttttaagttaaaatatttagggtatatatgttccatttatcacttttatgattccctatgttaacattaactttttttttttagaccgtcttgctgttgccttggctggagtgcagtggcgtgatgacagcacactgtggctt

SEQ ID NO: 509294 - DNA, 650 bp, Homo sapiens
ctgaaatcataggataaatcatagataaaagacaacgaaactcttagtttatttcttctcttcctcgctccttttcttttcaatcccccactggacccccactgaatctaaactctactgagctatttgctgtcttgtgttccccagtgatgcgtaatgacttgcagcctgggagagcaaatacaacactgaaactgtgcttccacgtgtacacgagagcctcagaaactggcttggcaaagctatttggctgctgatcttctgtccagtttctttcagctttactgaaaaccacccttggagttctgctcgtcccactcaatgcagtctcatccaccatggagcatactgatgggcaaagttcagaccttgcattatttttactgagagcctagcagaggagcaataacaaataggtatacaactgaccaaatgttgagataggatacgatccgtgyccttccttagaaggcaaaaggcaaaagggttatggggttcagaagacaaggaacatacttctggcctaagagacgtgtaataaaaaagaggtcatttaagctgcaccttggagaatggaatcatgttttaataagaaaggtgtggagaaatagggcaggacacactactcaagttagcagtgttacaaaggt

SEQ ID NO: 509295 - DNA, 420 bp, Homo sapiens
ctgtctaattggtttatgtcattcattaggcatttcttttctttaaagttggcaacttgatgccagattatggggagagattccgtaccacccatgtctgttttgttgttccccaggttataaatgagatgatgyggaggctcctctggcagtgtccttagcttggctcccaatttcaacattgttagagtcctgctgtgtttggactggaggctctcccctcccacttccgctgtcacacaccaggaactatgctggtgcaatgtgcctgcagggctagccactttcttctttcctcctgcactgaaaactgagggtttcctgatctgggacctggataactaaaggctctctcacccctgaaaagggattgccagagggaagatggggaaaggtgtggcgggaaagggagcaaaaggt

SEQ ID NO: 509296 - DNA, 468 bp, Homo sapiens
aaaaactaccttgcatattgtattctttaggagacaggttcagttacatataacagagaccaaaataatgatgtgtttgcaagataggaatgtatttctttcatatatgacagtccctaggttagctgtccagagctagaatgtctatgctgctccacaaggtcttaaaaggacccaagtaccttttattttcttttttaccacccttgggggttgcccttgcacaygtagtccaagaggcctaccaccatgctgacgtgctaaatagcaggttaaaagaagtacagagatggacattgttcgtccgtttaaagcaatgtctgaaaagttgtaagcatgatttttccctcatacctcaaagattaggcacaaagccattcctagatgcaaagggagactgagccatataacctttattctgagatgccctgggctcagataaaagtgagggatcccgttattatggga

SEQ ID NO: 509297 - DNA, 468 bp, Homo sapiens
aaaaactaccttgcatattgtattctttaggagacaggttcagttacatataacagagaccaaaataatgatgtgtttgcaagataggaatgtatttctttcatatatgacagtccctaggttagctgtccagagctagaatgtctatgctgctccacaaggtcttaaaaggacccaagtaccttttattttcttttttaccacccttgggggttgcccttgcacatgtagtccaagaggcctaccaccatgctgacgtgctaaatagcaggttaaaagaagtacagagatggacattgttcrtccgtttaaagcaatgtctgaaaagttgtaagcatgatttttccctcatacctcaaagattaggcacaaagccattcctagatgcaaagggagactgagccatataacctttattctgagatgccctgggctcagataaaagtgagggatcccgttattatggga

SEQ ID NO: 509298 - DNA, 667 bp, Homo sapiens
tgtggggctaggaactggttggcattttggatccagagatttgtaggctcttggcttggagaacaaagacttcattgcctagttgatgacaatatasaaacacatctgcagagtatattctttggcatcagcaaatgccagcagtatttagtgaacctctatgtttctagtccccattcacgtctcctttttatctgttatttttctccatgtttttcctcattggaaatgtttccaaattgaacattaattttgaagaaaaatgggttgaggggagattcttagacttacagatgttatgagaatttaaaataagggaaaatgaaactaaaatatcctgtaccctgttcgtcttgtaatgagcgcccaagtgccattgtttagaaacaagtcttggaacatcctccaggcccaccataaacataagcacattacagattactgatggataacagcaaactaaaactcatacttcatctttgcctctctccctaaaatttcttctcacacaaaagaatcattctagatataaaatattttaagactttctgtatagcctcacctgttatgtttcaaatcttagtgtatgatctagtgtcaaattatggtgagtaggggaaaaatgaaggcagagggattttttttctggagttataccttatagaaa

SEQ ID NO: 509299 - DNA, 554 bp, Homo sapiens
gctgtgtgtttttgtcctctagcaatggtgagcactttagccttgatatactggagcctaaaaacatatggcaacagctctcaatcaatgtcctggagctctcaatcaagttgatgttttgtttggttgtgttaaaaatggatttggccggcactatggttcacacctgtaatcccagcactttgggaggccgaggtgggtgggtcatgaggtcakgagatcgagcccagcctggccaacatggtaaaaccccgtctctactcaaaatacaaaaattagctgggtgtggtggcgggcgcctgtaatcccagctacttgggaggttgaggcaggagaatcatttgaacctgggaggtggaggtggttgtagtgagccgagattgtgacattgcactccggcctgggcaacagggcgagactccatctcaaaacaaaataaataaaaaaggatttaaggatagttttcatggcatcctttccccataattgcagatattaaatgcagcctaagaacaagtgttaaaacatcctcagagacagtttagtagtgaaac

SEQ ID NO: 509300 - DNA, 560 bp, Homo sapiens
ttctcagcccctaaaaatgataagcatgtgaggcaatgcatgtgataattagcttgatgtagccattccacaatgtatacatatttcaaaatatgttgtataccataaatatattcaayttttattttttaattaaaaaattttaaaaattgagaatgtactcatggctttggaaccatgtgaataaggtttctttgttaagggactaatgaatatttttgtttatgggcccagatggttaggtggactgaggaatgccatgaaaacgaaatacttgaggagaactgagagcacaagggagattgatgtggctgacccattgttgtcctttgctttagtccaacctagagattttcattatttatttttcacactgagaaagacaacctacagtgatattagagatgtagcgatggtgcaaaattgctggagaaaataacctgaagacaactggaatattacttgcttctcacagatatcaaattcacatttacccaccaagtaatttcagatcagatgtcttttttctgcatttcctttgcttttctacaagccacaaa

SEQ ID NO: 509301 - DNA, 560 bp, Homo sapiens
ttctcagcccctaaaaatgataagcatgtgaggcaatgcatgtgataattagcttgatgtagccattccacaatgtatacatatttcaaaatatgttgtataccataaatatattcaacttttattttttaattaaaaaattttaaaaattgagaatgtactcatggctttggaaccatgtgaataaggtttctttgttaagggactaatgaatatttttgtttatgggcccagayggttaggtggactgaggaatgccatgaaaacgaaatacttgaggagaactgagagcacaagggagattgatgtggctgacccattgttgtcctttgctttagtccaacctagagattttcattatttatttttcacactgagaaagacaacctacagtgatattagagatgtagcgatggtgcaaaattgctggagaaaataacctgaagacaactggaatattacttgcttctcacagatatcaaattcacatttacccaccaagtaatttcagatcagatgtcttttttctgcatttcctttgcttttctacaagccacaaa

SEQ ID NO: 509302 - DNA, 501 bp, Homo sapiens
cccaggaatcccacctggggactgctggggctccacatgctactgatagaaaaagtgagatcagcaaatgcaaaggatttctttcaagcacagcctgcaggtggattttggcagtttcctatcagcgtttttccatctatggaaaacagctgctggtgtgagccaatgcttcaggagcactcctcctgcctctgtctagcctgaggcaaccccacaatcagtctcagataccaacatgagcatgaaacakactccacaaaggagctgttcaacaaggggtcccatgatttcagggccactagtccagaaaaggatattcagtcacggtgcaaaagaagagggtatatgaggacctctttgaagggagctgagagtgagtatcctgatcccaccagcaggaaggaggtgaggtgccaccctttccttcaatcctagttgggagagggatttcccatgggaaacattagaaaatttcatatatgtttcttccgctgggggctg

SEQ ID NO: 509303 - DNA, 535 bp, Homo sapiens
tgcccatgtctaaataaacaccctctggagttaggcacaggttctgagaatttataacaaccatcttcatgtaaggaaaaagaacatttacatcattttttaaacctacatgaaggataactttacagaaaatgcacaacacttcctgaattcatagccctatggtactgcatttcatttattaatgttagtctacaaatatataaattttggtgtaaatgtttcccttcaatactatgctttccaacatggyagccactaaccccctgtggctatctaaatgtatctttagattaattaaaataaaataaaagtaataatttgctttcctagtcacttgccacatttcaagtgctcaatagccacatatgactagtggttacaatatgacagagtgaagatacacatttacatcactgcagaaagttctattggacagcactatttctgaataaagtaagacctgcctatagacagcccctcaggaagaaacaaatctatgactgcaataaagtacttggaaaggtctatttac

SEQ ID NO: 509304 - DNA, 535 bp, Homo sapiens
tgcccatgtctaaataaacaccctctggagttaggcacaggttctgagaatttataacaaccatcttcatgtaaggaaaaagaacatttacatcattttttaaacctacatgaaggataactttacagaaaatgcacaacacttcctgaattcatagccctatggtactgcatttcatttattaatgttagtctacaaatatataaattttggtgtaaatgtttcccttcaatactatgctttccaacatggtagccactaaccccctgtggctatctaaatgtatctttagattaattaaaataaaataaaaktaataatttgctttcctagtcacttgccacatttcaagtgctcaatagccacatatgactagtggttacaatatgacagagtgaagatacacatttacatcactgcagaaagttctattggacagcactatttctgaataaagtaagacctgcctatagacagcccctcaggaagaaacaaatctatgactgcaataaagtacttggaaaggtctatttac

SEQ ID NO: 509305 - DNA, 653 bp, Homo sapiens
acttagtgttccaatagcaccttgtgcatctttctgtcatagagttttatgttgcttttagcagattttcttcattgggtttcttcatcaagtgaaatctatttgtacaccttgctgtgcgaaaccaaacttcatacactagaaacagtagaagaatcatgacaggctttttgtttgttggttggttggtttgtttttcaccgtatgccagggacaaggggagagatgtttggacccatcttgaataattgctactgtactgaagataattttacacttataaagtcaataaatatttagtgtccagctaataatataaactgaactggattttcctgatagactttccaaaaccttccatagttataaaagaaataattggatatcattgtaatttcaaggacatttctggattagttgctttcaactttctttttttatttttcaacattattttcattttacttttttttattattatactctaagttctagggtacatgtgcacaacgtgcaggtttgttacatatatatacatgtgccatgttggtgtgctgcacccagtaactcatcattttgcattaggyttatctcctaatgatatccctcccccttctccctaccacacaacaggccccagtgtgtgatgttcc

SEQ ID NO: 509306 - DNA, 594 bp, Homo sapiens
ctgggtcacaggagattctgccaaattattttcctagggaatttgaccatgggcacttccacaatgtcacgtgaaagttctaattttcccacaactttgccttctgtcttctctgtagccatttggcaggtatgccggtgagacctcattcaggttttcctttgcatcttcccaatgtaactaagaagattgagcactatttaacacatttacgtgttattttgatttcctctattgtgtttgtaactttttctsattttcaactttgtttttggccttttttttaaaagttatgagtcatttatataatctatacatgaaatactgcaaaaatatttagcatagatatatttattttcaaaacacctgcaaatagaagtaattcagcagtttgaattacagtcttgccagtctgtagcttggcttttcacaatcttaatgatttttttttaatgatcatatggttcctaattctagtaaagttaactttttcattcacttctccttcatggttagtgtccctttaagaaaattcccttaacccgtggccatgaggatattctcctatgtttacatttaagagatttattatct

SEQ ID NO: 509307 - DNA, 340 bp, Homo sapiens
ctggtggtgtggcactcatgctgcaaacaggaagcaatgagcaggatagcagaggctacaaggaatgttggagcagaagatctggatctctgagtctcagtcactgtatttaccttgactgcttatcttgggttatgcatgtaagataaacagctctgtattttgcaatgaacacattattactgcatatattcacctttcattctacttcccaaacattcttgattattctgtaatcttttttttaacctttttttctctatgtcttccaacatacartgatgttataggaatcatctattcctcctagattgcaactagcccccaatttctggacaaa

SEQ ID NO: 509308 - DNA, 591 bp, Homo sapiens
tggctcctagaaaattcctgatgaggtagcatccatatgcaacagtcatgttyggctacttagaggattttcttttctttattttttgtttttgtttttgtttattgagacagagtcttgctctgtcgcccaggctggagtgcagtggtgcaatctcagctcactgcaacctctgcccctgggtgcaagcaattctgtgcctcagcctggctggaattacagttgcctgccaccacgcctggcttggggtttcacagtgttggctaggctggtctcaaactcctgatctcaagtgatccacccgtctcagcctcccatagtgctgggattacaggcatgagccaccacgcccagcctacttagaggattttctaaaagttataattacatgaatatggattgatcgtcttgaatgaatttactttttattagatagtctcctctcagtatgacaagaaggttgaggttcattttctaatacagtatacataacacaccaataagaagaagtatttctatgcaagagtaaagaggtgagtttgggccatctttattcactttgagacatttcttatgcatgtaaccttaagc

SEQ ID NO: 509309 - DNA, 622 bp, Homo sapiens
ccagtgcatttgtctttaacttccagttgagaggaaagatagacgtggacctggcagttttggttgtgtgtattgtccaccccccttcccccaacttaactttgtgtccttatggtaccccattaggtaatgtggtaaattgctcttgtaaattagatgagggactatagtatcatactcttgttcacagtacctcayttgccttttagataatttctaagaaatcttttttataacagccatatcttgtttcatttctgaagggactaaaacaatttttaaaatactggaaccaaagtggaggaagacagccatttaacaaatcaatttaagggaaataagaataccaaacacacaaaaaacaaatttaaaacctgaagtgaagaatatgtttctttttgcttattttgtatttacactctttcatctttttcgtttgatgatttggggctatatttccatattctctacacaattatttttaagtggcgattactcaccttttcattttctttctgagttatcgctttaccttttaaaggccatatgttaagttttgggtatgatattgtgaatattgcaccacattggaatgtaatattatcaaacactcccttttaac

SEQ ID NO: 509310 - DNA, 624 bp, Homo sapiens
ttttttttaaagtacccgaaattcacaaaggagaaaaataaagaaaaaaagtgaacaattygttaagatgtgcttcattacaatgtgtgccatcactacctctgtctagtgtcaaaacactttcatcactctaaaataaaaacccatacatagtaaattgttatcccctgttcttttcttcccatcccccgaggaactaccaatctgctttctgcctctatggatttacctattctaaatatctcatataaacaggatctgaccttctgtgtctagtttctttcacttagcatgtttcaaggtttatccacattgtaaaatatatcattacttagttcctttttatgcctgaagagtgtcccattgtgcatatacatatatatatgtgtgtgtgtgtgtgtgtatgtgtgtgtatatatatgacattttgcttatctattcatatagtgatggatgtttgagttgtttctactttttagttggaatatgaatatttggaatatgaacatgcgcccacatgtatttcaatctgttttaaaatcttcggggtatatacctggcattagaagtttttaaagaatgtcagaggtttctccactagatgataaaatgtattgtaaaact

SEQ ID NO: 509311 - DNA, 624 bp, Homo sapiens
ttttttttaaagtacccgaaattcacaaaggagaaaaataaagaaaaaaagtgaacaatttgttaagatgtgcttcattacaatgtgtgccatcactacctctgtctagtgtcaaaacactttcatcactctaaaataaaaacccatacatagtaaattgttatcccctgttcttttcttcccatcccccgaggaactaccaatctgctttctgcctctatggatttacctattctaaatatctcatataaacaggatctgaccttctgtgtctagtttctttcacttagcatgtttcaaggtttatccacattgtaaaatatatcattacttagttcctttttatgcctgaagagtgtcccattgtgcatatacatatatatatgtgtgtgtgtgtgtgtgtatgtgtgtgtatatatatgacattttgcttatctattcatatagtgatggatgtttgagttgtttctactttttagttggaatatgaatatttggaatatgaacatgcrcccacatgtatttcaatctgttttaaaatcttcggggtatatacctggcattagaagtttttaaagaatgtcagaggtttctccactagatgataaaatgtattgtaaaact

SEQ ID NO: 509312 - DNA, 376 bp, Homo sapiens
ctgggcaccatagtgaaggttatgggataagcccgtgcctaggcaaacctagataacggacatctgggttgcatagcaatggttatgtgcaatcctacgttatacacctgttacaatttgattaactgtctttgtcctgcctctgtatccctgctttcacaccactgtaagcttgcttcaagctagccgacccccttttstaaagtgtatataaaagtcaagtgctgtctttgttctgggcccagtctttggacgtgagttgctgggcctgagtgcactcaataaaaggttctcctgttttaacccgagacctctcttgtcctcctggatcccgcaacaatagagccaaaatcttggtcgttgaattttctccttt

SEQ ID NO: 509313 - DNA, 376 bp, Homo sapiens
ctgggcaccatagtgaaggttatgggataagcccgtgcctaggcaaacctagataacggacatctgggttgcatagcaatggttatgtgcaatcctacgttatacacctgttacaatttgattaactgtctttgtcctgcctctgtatccctgctttcacaccactgtaagcttgcttcaagctagccgacccccttttctraagtgtatataaaagtcaagtgctgtctttgttctgggcccagtctttggacgtgagttgctgggcctgagtgcactcaataaaaggttctcctgttttaacccgagacctctcttgtcctcctggatcccgcaacaatagagccaaaatcttggtcgttgaattttctccttt

SEQ ID NO: 509314 - DNA, 608 bp, Homo sapiens
tttagataatgtaataaaagcttacaaaacctctcttcaattagttaattctgtcatctttaatctcaattcagatattactttctcaaggaatgcaatttctaagactgagtcaagtccacccgatagatgaacttgatatatgtgttcgttgtacttgttcttctgccttgttccacttattacatttataattaataattttgtgtaattagctcttagatgcttagattctttactagactattagactataaatgtatccatgaatttatgactccatacctattttatctattacatgtagtaataaacctgcagaataaatttcaaggtatcckttacttaaagacagattctacattatatatgccccagacatttaataagtttgttatcttaataaatgcatgtcaatgactgcactttcaatagagaacttctgccatttctaataaattactaattatgaattcaagcaggttgcatagtgtccctccaaaattcatgtcaacttagaacttcagaatgtgaacttattttaaaatagtatgtgtaaatgtaattagtatgaatgatatactagatttagggtggaccccaagtta

SEQ ID NO: 509315 - DNA, 553 bp, Homo sapiens
aaacatttcattacaatttttaaagtagtttagattgtccagatgtttgtaatcatgtacaaaaaagcctcctgattgtctatatttggtctcacatggcatcatttgaaagtagcatccatggcatataaaaatattccataargcaataatttggtgggtggtgacttgaggctagcagattcatttgattagacttcagtactaatgaggcctaggcaatcagttttgacccacaattgacccctttgatttagttaattttaattaagatttccagttagcctcagctaattttcttgaaaatatatgcttttggttgcaaaatggattgtgccaagcgaatgatcaaatgaatttgctatcattatccaaaaacaatatatattggtgttgaagtctgtttatatatggtaatgctttaataatagctaatattttcatgctagtcaactgttaaaaggaagtatagagctctaatcacttaataataatgcattctttataccacaaatataccaacatatgacataagttttattttcattagtac

SEQ ID NO: 509316 - DNA, 553 bp, Homo sapiens
aaacatttcattacaatttttaaagtagtttagattgtccagatgtttgtaatcatgtacaaaaaagcctcctgattgtctatatttggtctcacatggcatcatttgaaagtagcatccatggcatataaaaatattccataaggcaataatttggtgggtggtgacttgaggctagcagattcatttgattagacttcagtactaatgaggcctargcaatcagttttgacccacaattgacccctttgatttagttaattttaattaagatttccagttagcctcagctaattttcttgaaaatatatgcttttggttgcaaaatggattgtgccaagcgaatgatcaaatgaatttgctatcattatccaaaaacaatatatattggtgttgaagtctgtttatatatggtaatgctttaataatagctaatattttcatgctagtcaactgttaaaaggaagtatagagctctaatcacttaataataatgcattctttataccacaaatataccaacatatgacataagttttattttcattagtac

SEQ ID NO: 509317 - DNA, 514 bp, Homo sapiens
tacaatttttaaagtagtttagattgtccagatgtttgtaatcatgtacaaaaaagcctcctgattgtctatatttggtctcacatggcatcatttgaaagtagcatccatggcatataaaaatattccataaggcaataatttggtgggtggtgacttgaggctagcagattcatttgattagacttcagtactaatgaggcctaggcaatcagttttgacccacaattgacccctttgatttagttaattttaattaagatttccagttagcctcagctaattttcttgaaaatatatgcttttggttgcaaaatggattgtgccaagcgaatgatcaaatgaatttgctatcattatccaaaaacaatatatattggtgttgaagtctgtttatatatggtaatgctttaataatagctaatattttcatgctagtcaactsttaaaaggaagtatagagctctaatcacttaataataatgcattctttataccacaaatataccaacat

SEQ ID NO: 509318 - DNA, 484 bp, Homo sapiens
agttggtgaatattcgagttgtttccagttttgggcaattaggaataaagttgctataaacattaatgtacaggactttgtggggagttctactttcatttctctttggttcatattcaggagtgggtttgctaggtcacaggatagacatatgttaaaactttgtaagatactgcaaaactgttttccaaggtggctataccatttgtattcaaaatcaacacttttagcctagascatataactggccttcctgaaatccatggatatctatctgtgcaatggttttagagacattttattgactcccacatgtaattaagttacttggcttttaggcaaaagatgataccatgtctatggatgagatgactctagttttgaactctgggttttgcagaagagtttgcattatcctcctcctgaggaaagcagatacatccgccacgatgcatgtgagtcaggtcttctgcgtgtcctctga

SEQ ID NO: 509319 - DNA, 499 bp, Homo sapiens
ctgtttcattccctccaagtcccttatcagagaggctttttcagtcactttgagtaaaacagaaacctaccttttcatcattcttgaccccttaactaaacttgcttgagtttttgttgttgttgtttgctcgttttttacttattaccacttgacatcacttttgtgggaayccccttgcttttatggaaatatgtaagagtaaagaacttcatcttattttccgattatccccaggtcctagaacagtgctggcatttggaagctgttcagtatttgctgaataaatgaaatgaattatgctgtgattcattgtgtgtttggaggtgtttggagggactggcatgggaggattggattctacggtggtaatagtgacatggcatgatgaaggcatggagtagaggggcggccacagaaatgcaaaggaaggatgactgagggagaggcctctagctcggttgttgcaggacagggatgcttgactggcagtgccttg

SEQ ID NO: 509320 - DNA, 483 bp, Homo sapiens
gtttcattccctccaagtcccttatcagagaggctttttcagtcactttgagtaaaacagaaacctaccttttcatcattcttgaccccttaactaaacttgcttgagtttttgttgttgttgtttgctcgttttttacttattaccacttgacatcacttttgtgggaacccccttgcttttatggaaatatgtaagagtaaagaacttcatcttattttccgattatccccaggtcctagaacagtgctggcatttggaagctgttcagtatttgctgaataaatgaaatgaattatgctgtgattcaytgtgtgtttggaggtgtttggagggactggcatgggaggattggattctacggtggtaatagtgacatggcatgatgaaggcatggagtagaggggcggccacagaaatgcaaaggaaggatgactgagggagaggcctctagctcggttgttgcaggacagggatgcttga

SEQ ID NO: 509321 - DNA, 527 bp, Homo sapiens
atgctggtttctttccccttcctcactccttcctggggcctatatgtgtgtatctctaacacacatacacacacacgcaggcacacacacactcatacacatgcacactcacacacaagaggatacgttgcatatacagctcaatgctacaaagaagcccttttaccagaagagcacacgggaactccgctgaagtttgacagggtgattgtcttgtggctactctaccttgaggccagagcacagtgagggcctccctcctgcccccagccacaccaaagagggggcaggggktcacagggagcaaaagaggagctttttgccatcaccatgagacggtgaccacaggagcctggctcgaaggtgagggtggggctggtgactggtgcctgtggattccagagtggttggcctacacagcctactgagaggtagagcatggtcctttgcgtccctgtggactccgagtgcctgccatggtttggaaggtccactgaaggctgagtgctcagcggcgttgccagcca

SEQ ID NO: 509322 - DNA, 527 bp, Homo sapiens
atgctggtttctttccccttcctcactccttcctggggcctatatgtgtgtatctctaacacacatacacacacacgcaggcacacacacactcatacacatgcacactcacacacaagaggatacgttgcatatacagctcaatgctacaaagaagcccttttaccagaagagcacacgggaactccgctgaagtttgacagggtgattgtcttgtggctactctaccttgaggccagagcacagtgagggcctccctcctgcccccagccacaccaaagagggggcagggggtcacagggagcaaaagaggagctttttgccatcaccatgagacggtgaccacaggrgcctggctcgaaggtgagggtggggctggtgactggtgcctgtggattccagagtggttggcctacacagcctactgagaggtagagcatggtcctttgcgtccctgtggactccgagtgcctgccatggtttggaaggtccactgaaggctgagtgctcagcggcgttgccagcca

SEQ ID NO: 509323 - DNA, 527 bp, Homo sapiens
atgctggtttctttccccttcctcactccttcctggggcctatatgtgtgtatctctaacacacatacacacacacgcaggcacacacacactcatacacatgcacactcacacacaagaggatacgttgcatatacagctcaatgctacaaagaagcccttttaccagaagagcacacgggaactccgctgaagtttgacagggtgattgtcttgtggctactctaccttgaggccagagcacagtgagggcctccctcctgcccccagccacaccaaagagggggcagggggtcacagggagcaaaagaggagctttttgccatcaccatgagacggtgaccacaggagcctggctcgaaggtgagggtggggctggtgactggtgcctgtggattccagagtggttggcctacacagcctactgagaggtagagcayggtcctttgcgtccctgtggactccgagtgcctgccatggtttggaaggtccactgaaggctgagtgctcagcggcgttgccagcca

SEQ ID NO: 509324 - DNA, 379 bp, Homo sapiens
tgacaccacagcccctggaagccacttggcacttgtcttcaraagcagcacatcagctttgcaggagagctgtcccctgagctagcactgctgagacccttccctctgccctccctcctatctggagtgttccaaaagcaggctgacagatgggggttcccgtgagcattccttgctgcatctaagggctggaatgtgggctgaaatgtgggagcacagaggtacactggcccagcgatcccaccctaactcactggaccctgaacctgtccacactgggaaggtctgcattgaggtatagcacggctgcttcttctgaaccacatctttatcatttatggggatttgtaaatatcagcttcccatcttggcaaagaag

SEQ ID NO: 509325 - DNA, 599 bp, Homo sapiens
tgtactgctccctgtggagcagggctaccccacaggcagtgtgcccagagtagcagctcagggrcagttcagcagtcatatttgtacccacttttaattacatgcaagttaaaaggcagttgatgcaggcatttctaggaaaaaggtggtaacttccgggtcattgggttactgccatagaaaggggtggtaactctcaggtgttgccacggcgatggtaaactgacatggcacactggtgggcatgtcttatggaaagctgcttctgccctggccctgtttcagctagctctcaatttggtccagtgtctgagcccagcctctggagttgagtcccgccccctacctcactatcttggttctatttggagatgccctgaaaggctgtgtccagtcccacagtgagtgaggaatctatgctgaggttcctttggaggtgaattttgaatgacgtataacccagtacagtggaaaagtccagaactgagggatgcaggctaatattaaagactcatagttttgggggctgtctgtccaaaggctcatgcatgggcagaaagagttcacctgacctgtgctgtgggaagtttgctgtaaac

SEQ ID NO: 509326 - DNA, 599 bp, Homo sapiens
tgtactgctccctgtggagcagggctaccccacaggcagtgtgcccagagtagcagctcaggggcagttcagcagtcatatttgtacccacttttaattacatgcaagttaaaaggcagttgatgcaggcatttctaggaaaaaggtggtaacttccgggtcattgggttactgccatagaaaggggtggtaactctcaggtgttgccacggcgatggtaaactgacatggcacactggtgggcatgtcttatggaaagctrcttctgccctggccctgtttcagctagctctcaatttggtccagtgtctgagcccagcctctggagttgagtcccgccccctacctcactatcttggttctatttggagatgccctgaaaggctgtgtccagtcccacagtgagtgaggaatctatgctgaggttcctttggaggtgaattttgaatgacgtataacccagtacagtggaaaagtccagaactgagggatgcaggctaatattaaagactcatagttttgggggctgtctgtccaaaggctcatgcatgggcagaaagagttcacctgacctgtgctgtgggaagtttgctgtaaac

SEQ ID NO: 509327 - DNA, 541 bp, Homo sapiens
ccgcctcagcctcctacatagttggaactacaggtacaagccaccacacccagctaatttttgtattttttgtagaggcaggctttcaccataatgcccaggctggtcttgaactcctgtgctcaagtgatctgcctaccttggcctcccaaagtacttgagattacaggcatgagccaccacacctggcctagcctgatttttttcacctataaataggagtaatattccttgaggagagagactaccgggccatctctgcattctccgtagtgcctaaactcaacatgcactgaaatattcaccaartgattaaacaaatgcacctaaaactacaattccaagaaggaatccttggtcaataaactctcctattcctggactctctgacctagaacaaccttgaggtacaagacaaggccataggtccacaaccccggggaaccagaagatacagcagaagctgtcacgatgcagatggaaagcaggacatacctggaaggaagtgggaatacagacgaggttcagattctcttgcttc

SEQ ID NO: 509328 - DNA, 620 bp, Homo sapiens
tacctgacaagctgtaacatgaaaagctacacttagtccattaaagatttttcacagtgacacttgagtgcagcttcagaaatatgccaccttgccatttatcattttcagggcacgggtgtcggaaaggagtttgctatgaagaacaaaacaaaatggattgcatgtgtagaggtgagctggcgaatactgataaatgtacttcactgaatgtcagcaaatgtcacttgagaagccatttgcagctaccataacagcctcccaaacccaacaaagagtagcaaaaacgggcaaaatgaactgggcgtcttgcttccgcatgaataagcaatcagccctctcagaagttacaccagaaagttgttaaacttgatagaagaagcttttccaaccatactgatgcatactatagaytgctgcagagggctggagaccttctgaggacgtcagcgctgtgactctgggcagaacttcacaaccccttctcttccaggtaggtgccttccttttgtatgtgcagccactggctgtctctgagacatattttctgggttttcccacaccagcttgctgcttttgctgtgtctacagacccctctactccctacccactcctaatc

SEQ ID NO: 509329 - DNA, 465 bp, Homo sapiens
cagtattaccatcactacccactccctcccttcgaggaaaaacaattaataatttgcatatgctcatgacacaaattaaagacaaagggccactcacaggctgtgggcactacatagccctccgcaggctgcagagtcccagcgccgaacggttctagcttccgaatgaatagcattaagctgcaycactaaagcgaggtgttctgggccctctggcccattcccacaatagaatcgagtttccccaatcagaaacatctcccaatctttccgtaagcttttaggggggaaaaaaagaacatacagttccaaggggggaaaaatacatatatactttgccctttttattttaatagccaaacatgtaatgctagctaaatagaaattcttgtctgttaataggttcctttagtttgtaataaataggaatgctaatgagtaaaatttggtatttggtatgcatta

SEQ ID NO: 509330 - DNA, 542 bp, Homo sapiens
aggtcaccaatatcttcttccccttgtaagataagacagtcaarttgggagcaggcatggctgcacccttgtggaagctcaggagattgggggcttgcctctctagactgccatcccaccccctctcaagaggagcccagggggtctcacggctccaccaggtttgtctttgggaagcgtgtggagttggctctatcgcacaaatatacggtgatggaggcatctggggtctactccaagacagtctagcctgaaaaatgtttaacgcagacgtaaccagatatccacccccacccccaccaattctgccaaaaaagaatttgagaatgtttgcccagacgccccactcttcctggtgtgtcccctgggtgcactgcttgggaaatgaactccactgtgacagcatgaggtgtgaagctgacgtttgacaatcggtttatgtggctttcagaagagttgctctatttccttgccctgtggcaataattaacgaagagaaccaactgcctattgaggcctcgcccagagcacttattctctaa

SEQ ID NO: 509331 - DNA, 638 bp, Homo sapiens
ggattggaaaatatctgttatcactgctaatactactgtggtctgttatctacattcaycattttttaaaaagctaaatttcagttggaagttagtgaagataaagacgtaagccttttcccaaccaaagtcatggacccctttgaattctacctattaatctcttggtgaagggaagggggtgtctgtggactccaagttaaaaggatttgttttagaacagtgtttctcgcagtgtggttccagcaccagcaatattagcattatctgggaaactatcagaaatgtaaattcttgccccgcaccccagcagatttactgaatcagaaactctggggtggggcccagcaatctgtgcttgaataagcctccaggtgagtctgctatgagctcaagtttgagaaccactgccttagagttgggtaggatacaatctccgaagcagaatgcgtggccaagatgactccttcccctcaaagtcttagagaatgatctattgcctattttcctgctccacttccttcagactaactctgaatctggggtagactgtggtttggagtttaaaaacccgagatccttgttaatgcgtaatgaagtgctacaaagcagcttctgtcacaagggtggtataaaat

SEQ ID NO: 509332 - DNA, 638 bp, Homo sapiens
ggattggaaaatatctgttatcactgctaatactactgtggtctgttatctacattcaccattttttaaaaagctaaatttcagttggaagttagtgaagataaagacgtaagccttttcccaaccaaagtcatggacccctttgaattctacctattaatctcttggtgaagggaagggggtgtctgtggactccaagttaaaaggatttgttttagaacagtgtttctcgcagtgtggttccagcaccagcratattagcattatctgggaaactatcagaaatgtaaattcttgccccgcaccccagcagatttactgaatcagaaactctggggtggggcccagcaatctgtgcttgaataagcctccaggtgagtctgctatgagctcaagtttgagaaccactgccttagagttgggtaggatacaatctccgaagcagaatgcgtggccaagatgactccttcccctcaaagtcttagagaatgatctattgcctattttcctgctccacttccttcagactaactctgaatctggggtagactgtggtttggagtttaaaaacccgagatccttgttaatgcgtaatgaagtgctacaaagcagcttctgtcacaagggtggtataaaat

SEQ ID NO: 509333 - DNA, 638 bp, Homo sapiens
ggattggaaaatatctgttatcactgctaatactactgtggtctgttatctacattcaccattttttaaaaagctaaatttcagttggaagttagtgaagataaagacgtaagccttttcccaaccaaagtcatggacccctttgaattctacctattaatctcttggtgaagggaagggggtgtctgtggactccaagttaaaaggatttgttttagaacagtgtttctcgcagtgtggttccagcaccagcaatattagcattatctgggaaactatcagaaatgtaaattcttgccccgcaccccagcagatttactgaatcagaaactctggggtggggcccagcaatctgtgcttgaataagcctccaggtgagtctgctatgagctcaagtttgagaaccactgccttagagttgggtaggatacaatctccgaagcagaatgcrtggccaagatgactccttcccctcaaagtcttagagaatgatctattgcctattttcctgctccacttccttcagactaactctgaatctggggtagactgtggtttggagtttaaaaacccgagatccttgttaatgcgtaatgaagtgctacaaagcagcttctgtcacaagggtggtataaaat

SEQ ID NO: 509334 - DNA, 209 bp, Homo sapiens
agacgccccactcttcctggtgtgtcccctgggtgcactgcttgggaaatgaactccactgtgacagcatgaggtgtgaagctgacgtttgacaatcggtttatgtggctttcagaagagttgctctatttccttgccctgtggcaataattaacraagagaaccaactgcctattgaggcctcgcccagagcacttattctctaaaca

SEQ ID NO: 509335 - DNA, 621 bp, Homo sapiens
atcatgctaatgtgccatttctatggcttaagcaacacatctaggaagaatgagggtactaacagacatggaagatggtggggaggagtatgtgtgtgatagtagatcaatatgcgaattaccagtgacttaaataatatttctatgaatcctacccacatattgaggccaaaagttgaagggaaatacacttttgattgaaagaagtagtagaattcatgagtaagtaacaagaaaaaaaaaacattaaaattggagactgtataacctagctgacccccacccaaacatgatttgtagtagtcattaatgttgctctccaaatattgcaggcacaggctagaattgcacttyttaactccctacagtacttgggagccatgtgacgtgttctggtcaatgagtgatgagcataagttatgagagataatttcactgccccagagattgtttgtagggattcctttttctctgtctcagtgccagttaatattccatatagtaactgttacgtatactttgatcataaagtgaggagggtaacaagataaatctgaactgtgtgttatatataataattgtaatttgggcattaattattaccatatcatttagcatttc

SEQ ID NO: 509336 - DNA, 615 bp, Homo sapiens
ctaagctaccatcgtatttaatatcatcttctttcctaggtggttggagcttctttcgagtgtggtgagttgggaagatttccactgacctctgacttttcaaggatgaggaggtgatatattagttattagattgctatggaaattaagctcacattgactacaataggcagtcattgcatgaaaaagagaccagtctgtcagcctgtaatgaaacagcatttaaactgcatatgtatgtgtgtatgtttttctgtacttttatatctgcatgtattcttacatgtgtacatgctacactcagcctataaaccttctcattaggaaactatggcaatgggactatcactgactccataaatattcctaactactttaaaacaaatgtgtgatttcttctgccttgtagggtgtccctgwtactcattttaatattctttaattataaaaaaagatttgtgaagtgggatatacatggaactgtgccttgggcctccgtggggttgattctggccaaggataaaaatgaaagtagaattcttaattggttttcatggtgcctaattattctggggcctgtctgaaatggaatgcattttgttttgtggtaagttt

SEQ ID NO: 509337 - DNA, 650 bp, Homo sapiens
cacctgtagaacaaatattagaactcaggcaccccaaatcttacacccactcttctcttcccacaccatccacaaactatagcaacctctgtggaaagacagcaatgtgtagatgctttatgtgctgcctgaactgaaaaatgtcatgcttgtaaaaactgtcatggctggttacccagaggaagtgctacttgtctttccatttcattagcccagtttatttttaatagaagaaaacaaatggttctcaaaagtattctataccttgtaggccctgcaatggaaggacacaaccacagtaaccaaccctgacactgtcatttctaagctgtacagcttcttcctagaaacttcattctctgaactatagtttttctcattggcgaagaaaaaaaaaaaaaagcctggatagtaacattctaaatagttaatacagtaaaatagaaacctatgtcacaggattgtttatgtgggggaggaaaaaataattttccctgtaacctctgagttcctagcttagatctctataacayagaacatattaacaagaaaaaaaaccaaacatgtttactaacatgtgagttttatatatatgggggagaatactcagataaaaaatatttctcagagaggtagcttagaattccagc

SEQ ID NO: 509338 - DNA, 639 bp, Homo sapiens
ctgtacctcttacttgttctgtgacccttggcaaatcacttaccctctttaagcctcagttttcttctctttagtttacttgggaatcaaaatgcctacctgatggaattccaatgtcataaagattaataaaaataatatacataaaactttctgcaaattgcctactgtataataaatacatgcccattagtagctataattttatttgttgyatctttttacatcaattactggtttaaaacttactatagaaaaagaaatctagatttagcaggtaaaggtattatccatgaagggcagaactccctctaagacaaatgttaatctatttgtaaaaataaaagataaacttctaatatttctttaaaccagtaaccaaacctattaacataaataaaaaacagaataaaatccaaattaacatatctagactaatataatctctgttaaatgttgaataattgtctgggctattctattgaaataccttttctttaaatactacattgcactgagctgtaaagtaattgttttattcccctagaaccatgactcagtattacttggaattcccatctgtttgtgacatcacttttgcctcgaatgttattcccttactgggtaaacatatttgcc

SEQ ID NO: 509339 - DNA, 457 bp, Homo sapiens
attgtatgtggtatcagtcagagttttgactgaacactgaaggcataaacagccagattttcaattagaatttaaggacctacttacagagatgtggacaggtttaggggagtgagtagctgatgttaaggtacttattaacccgccataagtctccccattcctgaaaaggaaggggaggtaatggagttgcctaagtttatyaagagctgaaactggaggctgtatagaaactactcaacaagagctgttcttctagagagaggccattgccagaatgcaggcacagaaggaactcaaaagaaataccctgacttctctcttcttctgtgcagcagtagtgcacggggtctagtgagggagatctattggctcctgaaagaaatggtcccaacttgtccttttgcattttgatatgctttttgatggtctcctgatgttctatgacatcaatcag

SEQ ID NO: 509340 - DNA, 513 bp, Homo sapiens
taggttttaaaagatcactctggcagcattgtggaggatggaattcaggagaggtagtcaaaggcaggagagccagctagagatcattacagtgtttgggggaagaagctggcttgaggtggggatggcaatggaaagaaggagacagattataccctatgtggttcttaaacttccccagggttgtgagccactctcatcatcagatgaaaacctttgacctctacagagagaagagtgcatatgggcatgaaaaaaaatacagtttcacaaggcctgcccttcgttatccccatcaggaaarcagggcacaggcctggattctagaggtctcaactgagacccatcaatgagccctgccctataggacttcaggaaaggagagcacgcatcaggctgggctcatgagaaagaaagccccacagaggaaggggtacatgagctaggacctgagatgaggatggagaaggcactttagatcgcataagcagtctccaggcttttagcactgtg

SEQ ID NO: 509341 - DNA, 319 bp, Homo sapiens
gcttaattgtatcagcagtccccagtattaggaataaaaatgggttaagagccmgccctggaaggcttaacatttctcaaacacactgtcagaaattacaaagttctgctttgtaagattgggtgtcacaatacatgattcctggaagtgacagaatttgttccagctgccgtgctgagccacattaaagttagacgtttctttcatttgctgtaagtctaataaagtggtaatttggagtgtacctgtagtattttaatgtttttcacaaacttctctgccactaaaattctgacaaccccttctctgacaagagttc

SEQ ID NO: 509342 - DNA, 620 bp, Homo sapiens
ctatttagggggatcaagttctcaagattcttatgggtacattctttaagagtagttctctctagaagggttgaaaattacctccttggtataatggccaatatttggatgatgggtatactagaagcccaacccccaccagtatgcaggtaatactcatgtaacaaacaagcacatgtaccccctgaatctacattttttaaagaatagttctcaaattgatgtccctgaactagcagcatcagtaccacatgaggacttgtaagaaaggccagttttcaggcctcctcctaggcrtacagaagcataaactctgaagtggaacccaccagtctgtgttttaataagccttccaggtgattctcatgcacactaaaatcgaaaaacactgccttaaagctttttttcaatataaaagtactccagaaaatagaaagttgatgcatttttcttccaagctccttttctcaatgctttacaattttctgattaaatctaggagaaataaaaagaacccaatcaggtggtactaggctttcaacacacactattcttcctttgaaaaagaaaggcgtagctgtgctccagacctaaaaacagcaactgcaagagcacccagc

SEQ ID NO: 509343 - DNA, 620 bp, Homo sapiens
ctatttagggggatcaagttctcaagattcttatgggtacattctttaagagtagttctctctagaagggttgaaaattacctccttggtataatggccaatatttggatgatgggtatactagaagcccaacccccaccagtatgcaggtaatactcatgtaacaaacaagcacatgtaccccctgaatctacattttttaaagaatagttctcaaattgatgtccctgaactagcagcatcagtaccacatgaggacttgtaagaaaggccagttttcaggcctcctcctaggcgtacagaagcataaactctgaagtggaacccaccagtctgtgttttaataagccttccaggtgattctcatgcacactaaaatcgaaaaacactgccttaaagctttttttcaatataaaagtactccagaaaatagaaagttgatgcatttttcttccaagctccttttctcaatgctttacaattttctgattaaatctaggagaaataaaaagaacccaatcaggtggtactaggctttcaacacacactattcttcctttgaaaaagaaargcgtagctgtgctccagacctaaaaacagcaactgcaagagcacccagc

SEQ ID NO: 509344 - DNA, 554 bp, Homo sapiens
ctgcaggttaattaagcttttgaggactatcccaggaattattatttccatgaaaaatgcttctggattctagagtactgacttaaagccaaaattaggaacatacttcatttataagaggtcttaaacttgtttctgtaattctcataatccatgtactctttgaagatgatcataattatcaatgagcaataaaacctttaatcaggtagtatgcagcagcacagttcttatattaaaaacacagatgctattcccttacgcctacattcactcaacacattcattaagtgccttctctgggcagggccctagacaaacagcagtaaattaagtctggtctctaagccagaagagcttagagctctttggggaagaagacacatgcacaagtaatacacaatcaacattcttaagtgttgtaatgaagatgtaaataaaatgcattgcaggttatcaacagtcttaagtactgtaatggagatgtgaataaaatgcattgcagcttcrgaggaaatcaaaatgctttcttctgaaaaaagagggaaggcttc

SEQ ID NO: 509345 - DNA, 554 bp, Homo sapiens
catctcaaatagacaaagtttttatacttgaaggcactttgatacaatagtggtagctaatattcaccaagcatttgctgtgtgccagtcactgttgcmagtgcttcacatgtagtatctcatttaattctttcaacaattctgtgaggtgggtgccattatcatcacattccatagatggagaaactatagataagtgacttttccaaggtcacagagttacagatgggcaagctaggaaaactaagtccagttattctgacccagagcccacactcttagcctttatcctccactgctcacaatgaaggctggatttgctctggaggatttaatcaaaagttctcatttttgagaaatctcaattaatgaagaaaatttatctctttagactgtatgtaccccctaaattcactcattcttgttcaaattatttaattaaatattgtccttctccaagaaaactccgtgattaaacggatgccttttcagtggtatgttggaccagctcatgagaaccaatcattagcttttcagaacttttgccagttatt

SEQ ID NO: 509346 - DNA, 525 bp, Homo sapiens
tctccatttgaaagcaagtaattcccctgaatgaagcaatcctttatcttttcattagtaagatggtttggaatttatatgtgtgaattatcttggaaaacagtatattactgataaaaatattttatagctaatttaacaatgttaaatcacaggaggggaagctattgccatatgcctctcagacgatatttcagcagttttgacttcagctaaytcaactcttataaaatacatgattttcagtctcataggcaaacatctattgtaaccaactctggaaataaaacaaaaacctatggtgatttccttaatgaaattttttttagattttatgttaatagggagcaaatcttaaaatctttttgggctttcatctcccaacattagatgtatcttaacatttttgtttgcaaaatatcatctcactacaaaactgtgcgacttgtacaaagtttcatggtcttgtccatctccctctgaatatatgccatgggcaaactaggaaaaacacattcctcccag

SEQ ID NO: 509347 - DNA, 648 bp, Homo sapiens
actgaccactgaaagaaaagggaagtagttgtcaagaaggcttaaagttactgtcaagtttacacagatacactgagaagtttgtatgaggaacgtgattttcttgaaatcagctaccaacaactactggaccatggaaatgcacactggttgttattaatgtctgacatctgcatctttttggagatgtccacattgtttttcttgttagaaacaaagtgctctgtatggtggtcttcatcaattttttttttaaatttagggtacaggccaagcgtgggggctcatgcctgtaatcccagcaactttgggaggccgagggggatggatcacgaggtcaagagatagagtccttcctggccaacatggtgaaaccctgtctgtactgaawatacaaaaattagcttgttgtggtggtggaagcctgtattcccagctattcaggaggctgaggaaagagaattgcttgaacctgggaggtagaggttgcagtgagccgagatcgcaccattgcactccagcctggtgacacagtgagactctgtctcagaaaaaaaaaaaatcggtacatattgtgtctgtgaacctaacattcaacaagagtacgtttctttctttgttaactatttagcatattgaagatcacag

SEQ ID NO: 509348 - DNA, 523 bp, Homo sapiens
accttacactggttcctgagatggccccaagtgaagtacagcaaaggaaacctcaggacaagacatgtcccgatccatcactggagcctgaggtcctctttctggttaaacacgtgaggcaggtgctactcttytccttcctgtatggatgagaagggctcaaagggttaagtaacatgattgaggtaacaccaaggtgagtacatttgccttagtccatttgcattgccataaaggatatacctgagcctgggtaacttataaagaaaagaggtttctttggctcatggttctgcagactgtacaacaagcatggtgccagcatctgcctctggtgagggcttcaggctgcttccactcatggcagaaggcaaagggaagccggtatgtgtaagaatcacatggggagagggaaagccagagagaggaggaggaggttccaggctctttaaacaaccagcctttgagggaactaatagaccaagaacctactcattataacaaggacaaggacagtaccaag

SEQ ID NO: 509349 - DNA, 439 bp, Homo sapiens
gaatgtcaaaggattaagagtactccctggcacaagctgatagagcccctgaatattttgtaaaatcattctctttgtagttatgctataatatcaaaggcaataggaaggatgtcrtattgttgcgggatctttggggtgccgtttttctggctggaaaacctttgtggccggtggcatctttgcccaagttttgcactaggctcatttcgcccactccgcctggcaggctgtgcttggctcacgctaccggcctgggtctcatgcctgccaagtgcaagtcaggcatggaatggtgatggatgtgtgagcaagcatggggtctggccagtcagatatgccacctgctgcagcggggcaggcagttccaggtgccagcatgattgccagcgatccgcgaggctgcgaccggaccagtcgcgctgcaagcagtttccgc

SEQ ID NO: 509350 - DNA, 439 bp, Homo sapiens
gaatgtcaaaggattaagagtactccctggcacaagctgatagagcccctgaatattttgtaaaatcattctctttgtagttatgctataatatcaaaggcaataggaaggatgtcgtattgttgcgggatctttggggtgccgtttttctggctggaaaacctttgtggccggtggcatctttgcccaagttttgcactaggctcatttcgcccactccgcctggcaggctgtgcttggctcacgctaccggcctgggtctcatgcctgccaagkgcaagtcaggcatggaatggtgatggatgtgtgagcaagcatggggtctggccagtcagatatgccacctgctgcagcggggcaggcagttccaggtgccagcatgattgccagcgatccgcgaggctgcgaccggaccagtcgcgctgcaagcagtttccgc

SEQ ID NO: 509351 - DNA, 569 bp, Homo sapiens
tttaaaaatagataatatgtaacatagatactattctwccacagtccttggcagtgtttctcagtcctctcaagaattagtcatttcatcatccctcactagacgcagcaagaagggataaagaggaaactggaaatttgttctgaagtacatctccaatattttgaatgttgatcaacagcattctgatcttctccctgaatgagtaaaaagaaaagatgtaatactgggtcagccaaacccactgcgtggcacttagccaggatgattcattttgcttggagcaatcttacaccctttgtgaaactgggtttcttttggttgaaggaagaaaaagactcgtccagagctgtcagtcacttcttaagcaccttcaaatgaaggccttattggattgttttgatctgcccagaatcttcaaacctgactctagatttgttcaccttcttactctgtaggccacatgtaatgcttgggattttttgtacaatctttattagaataataacctgacaggtttcaaatctacttgagggaagttgaggtgaacataatgatcaggttccctc

SEQ ID NO: 509352 - DNA, 556 bp, Homo sapiens
ggcaccccgggcccagctccacttctggcaagtctctcctcattgttctgggttcatcctgtctgttagtggggaaggcctgtccaccttaatattacagaggctgactgcatggtgggcactgagctaggcccagggcactggggggccacagcttggagaaaaacagatgcaaaccctccccctagagcttgtaaccgtgtgagacggactgacgttaaacaggtaaaatgtaagtacagatggacgccaaagaagacaacaacacactggggccttctcgagggtggagggagggagggagggcggcgagaaagaaaaaaccacctactgtgcttattacctgggtggcaaaataatccatacaccaagcccccatgacacgcaatttgcctatataacaaacctgaacatgtactcctaaacctaaaatacaagttttttaagaagtggacaaaatgcaaataacgccaccattggcagctctgagaaggttgtgaaggaagggcgatctggggctgagtctcaygggggcctcgacctgctgccccagggg

SEQ ID NO: 509353 - DNA, 563 bp, Homo sapiens
ccttttaaacaaaaatcctgttgctgctttaagtgaatgtttggctttgggtttttcaggccacacagatagcatgagttccaacgcctggcagaagcaaacatgaatcctatctgagggaaaagcacttaaagccaggcctcaatggatttccatagataaagttctaaggaatatgagctgtcaactaaaaatcccaagacacatgccaaacaagtaagcagaaaagtcagttacagaaccagacccttaagactgcacatattggaaataccagacatggaatacaaaacaggtagcgctgagtgttttgktttttttttgtttgtttgtttgttttttgagagagagagagagagggtcttgctctgtcactcaggctggagtgcagtgatgtgatctcggctcattgcaacctctgtgtcctgggtcaagtgatcctcctacctcagcctcccaagtagctgggactacaggtgcacaccaccatgcctggctaatttttgtatttttgtagaggcaggtttttgccatgtctccaaggctggtctcgaactcctgga

SEQ ID NO: 509354 - DNA, 561 bp, Homo sapiens
tcagcagctcttatgctcaccttcctttctgtgtctactgctgccttctgccttcagaagccccctccttctttctgcacctgggctaagacagcagcttcctattcggtgtctgtttcccacatccacctctagagctcatcccaaagagtgatggtgctgtggaccaaattgtctcccaaatgcacgcattgaagatcctacccaggactsactgtatttggagatagggcctttatggaggtaactaatgttaatggcggttataagtgtgacctcagttacctaatccaataggactggtttggaaatagatttctgttgcctaagctcccagcctgtggtgttgtattatggcagcctgagcagatgaatgcagatggtgagcagctcttcccctgagccacactgccgaggctgccctgctcagaaacctttggtgttgctgccctgtaagacggaatcctaacgcttcatcattcgaggccggcccgttctcagccttgcctgcacttccgggactgtctctccttgctcttccatccccaggctcttcttcag

SEQ ID NO: 509355 - DNA, 561 bp, Homo sapiens
tcagcagctcttatgctcaccttcctttctgtgtctactgctgccttctgccttcagaagccccctccttctttctgcacctgggctaagacagcagcttcctattcggtgtctgtttcccacatccacctctagagctcatcccaaagagtgatggtgctgtggaccaaattgtctcccaaatgcacgcattgaagatcctacccaggactgactgtatttggagatagggcctttatggaggtaactaatgttaatggcggttataagtgtgacctcagttacctaatccaataggactggtttggaaatagatttctgttgcctaagctcccagcctgtggtgttgtattatggcagcctgagcagatgaatgcagatggtgagcagctcttcccctgagccacactgccgaggctgccctgctcagaaacctttggtgttgctgccctgtaagasggaatcctaacgcttcatcattcgaggccggcccgttctcagccttgcctgcacttccgggactgtctctccttgctcttccatccccaggctcttcttcag

SEQ ID NO: 509356 - DNA, 577 bp, Homo sapiens
agcatggctcagtgcaagtccaaagcctcagaaccagagaagctctcagtcttggggtgatggcccgggaacctggctggagaagccrggacatagagggtactactgatgtgtggcactgtacctggcttccttcattgactttttaatccactcccacttctatctgaaaaaataggtgaactagaaatcacctttaagtagtcctagtcaaatgcccaactatgttgtaaaactttgaaagtgaaaactttttggtataaaaattaaatgagataaagtatgaacatgaacatttgcttagcttagaacctgacatgtggcaatcattcgataaatggcagttgttagtacaatactaacctgtgattaatggaaatttatgtaacagaaaattctgaacttaataaactaataagtctatttcgttccccacttagaacccagggtctagcagaggtgtgatgaatagaagatgcttcatctgtatttgttgaatgaatgaaccccactgtcgtctccattcccattatcaaaacctaaccttgccattaccagcgacagcaaccaccactga

SEQ ID NO: 509357 - DNA, 577 bp, Homo sapiens
agcatggctcagtgcaagtccaaagcctcagaaccagagaagctctcagtcttggggtgatggcccgggaacctggctggagaagccgggacrtagagggtactactgatgtgtggcactgtacctggcttccttcattgactttttaatccactcccacttctatctgaaaaaataggtgaactagaaatcacctttaagtagtcctagtcaaatgcccaactatgttgtaaaactttgaaagtgaaaactttttggtataaaaattaaatgagataaagtatgaacatgaacatttgcttagcttagaacctgacatgtggcaatcattcgataaatggcagttgttagtacaatactaacctgtgattaatggaaatttatgtaacagaaaattctgaacttaataaactaataagtctatttcgttccccacttagaacccagggtctagcagaggtgtgatgaatagaagatgcttcatctgtatttgttgaatgaatgaaccccactgtcgtctccattcccattatcaaaacctaaccttgccattaccagcgacagcaaccaccactga

SEQ ID NO: 509358 - DNA, 609 bp, Homo sapiens
ccctttttcccatatattaaataactgtattcccttgttggtgtgttttaattttttggctgaaaatgagtaggcaggccgggcacrgtggctcactcctgtaatcccagcactttgcaaggccaaggcaggtggatcatttgaggtcaggagttcgagaccagcctgaccaacaaggtgaaactccgtctctactaaaatacaaaaattagcctggtgtggtggtgggtgcctgtaatctcagctactcaggaggctgaggcaggagaattgcttgaacccgtgaggcagaggttgcagtgacccgagatcatgccacgccactgcactccagcctgggcgacagagcaagactctgtctcaaaaaaaaaaaaaagaaaaaagaaaaaatgagtagactgagggataaggtgtgaggaagccttcgccatgccaccaacagcctttctttccaaattcctgacccctggaggacatcaagccctctcccatgttccagtgtgacctggtctaggcacccctcctgctctgaggcacgaggatcgttcctttggccactgagaatgcaattcccttttgtccaagaggaagaagaaagaaagtcccatt

SEQ ID NO: 509359 - DNA, 638 bp, Homo sapiens
tgtgtgagagcaggggaaaaatccatttgagttttatctaaacaccactgtgtgttttctgagggtggattaagactaccttgggcccatggcctgttctcagtagctgagacctgaraaatttggagaatcactttgtgctatggaaggaccataaaacaggcactcaggtgctgctggacagtggggcgttataccttcaaaatgtgagtttctagtaagtccacttccaggaattcatccccagggaatatctatggtgtgcacagagcaattccatgccaaagatggataaagagaatgtcccaatctgcctgtgtgacaacatgaggccactgaggcagccctctttccttccccttctcccagatctgcccaggccagtgcccccacccagatggcatggactctgccctctgcctggggccctttcactcacccaggccttggcatttgcctatgcaaagccctgagcagagcagggaggtggctggagtgagggcagcatggactgggaaactcgctcaggctgaggtttacagtggggtggtgtccagaacttcctactgaccctgattccaaacgaggtccccttgggtgagggaagttgccgcctgccttatggttcaaatgtggaa

SEQ ID NO: 509360 - DNA, 638 bp, Homo sapiens
tgtgtgagagcaggggaaaaatccatttgagttttatctaaacaccactgtgtgttttctgagggtggattaagactaccttgggcccatggcctgttctcagtagctgagacctgagaaatttggagaatcactttgtgctatggaaggaccataaaacaggcactcaggtgctgctggacagtggggcgttataccttcaaaatgtgagtttctagtaagtccacttccaggaattcatccccagggaatatctatggtgtgcacagagcaattccatgccaaagatggataaagagaatgtcccaatctgcctgtgtgacaacatgaggccactgaggcagscctctttccttccccttctcccagatctgcccaggccagtgcccccacccagatggcatggactctgccctctgcctggggccctttcactcacccaggccttggcatttgcctatgcaaagccctgagcagagcagggaggtggctggagtgagggcagcatggactgggaaactcgctcaggctgaggtttacagtggggtggtgtccagaacttcctactgaccctgattccaaacgaggtccccttgggtgagggaagttgccgcctgccttatggttcaaatgtggaa

SEQ ID NO: 509361 - DNA, 362 bp, Homo sapiens
aaaaaaatttaaattaagctgtatggagttgtgcacacctgtagtcctatctcctcagccagaggaatgggttcagcccaggagttaaatgctacagtaagctatgatgacactactgcactctagcctgggcaaaagagtgagacygtgtatctaaaaaaaatgaatgaatgaatgaatgaataaaataaaaataaaaccctgcaatgatgcctcatcctggataagagaacctccaaaatcttacagcagcctgtgcaatgtggtcccttctgtgtgtccagctccatccatctctggtcactctcactaaactcccactaaactattaggcagaaccaatatcaaacagctgagagtca

SEQ ID NO: 509362 - DNA, 640 bp, Homo sapiens
ctgcgaagcaatcctagttgccatcattggggtgctggcmtagtactggtcctgcaggtttctaacttgtcatcctagctggtaatgtctcctggtttttatggaaggcttaattggagagtgtctgatgcctgaaggactttcctggttgacaaccttgaaaatggtgaaagaaagaaattgaaaccaggtaagctcttccttgtgcattcttccctccctcacaggtggagcctggcaaaaaaaaaaaaaaaaaaaaatacctgttcaatgagatgcacagtaaatgcaaggatggctgcaatgaatagaggctgcccagagaatgaatagaggctgcaatgaatagaggctgcccagagagttacctacccacttaacagtctcatcaaatttgctaacaaatttgcctggtgaaagaaagatgtcgatgtcaatcgctcatgcccctttcaaagggaaatgtcccctgtggccccagttggttgctcacttttgtattacataaccagtggtggccagaagacctcagggaaggtagtagttcacagacttgccagagtcctgtgacagggcacccacagagctgggccaatctagctttgccttttgtgtatgtgtccctggactattgagagtc

SEQ ID NO: 509363 - DNA, 409 bp, Homo sapiens
tatctcagagggaacataattttctaaacttatggatgtaactaaaaagaaaataataaaataccattatacaagaaataaaaattcgaaattattcaaataaacaaaaatagcgatagctttcaatatgccaatatgtggrcgttttcagattaataatttcttattgtaatggaacatttcaggcgagcctaggttatcattatctctgttgtcaacgtttttttttcctgcaagtgcatgtcattttccttgacaatacaaataaaattctaacatgaatatctagaattcacatgctttgaaataaattatggtgtgatttgtaataacttttaatcataatataaattttccctgggttttaagttataactcaaaatttatttcaaaagttctgtaatcagac

SEQ ID NO: 509364 - DNA, 409 bp, Homo sapiens
tatctcagagggaacataattttctaaacttatggatgtaactaaaaagaaaataataaaataccattatacaagaaataaaaattcgaaattattcaaataaacaaaaatagcgatagctttcaatatgccaatatgtggamgttttcagattaataatttcttattgtaatggaacatttcaggcgagcctaggttatcattatctctgttgtcaacgtttttttttcctgcaagtgcatgtcattttccttgacaatacaaataaaattctaacatgaatatctagaattcacatgctttgaaataaattatggtgtgatttgtaataacttttaatcataatataaattttccctgggttttaagttataactcaaaatttatttcaaaagttctgtaatcagac

SEQ ID NO: 509365 - DNA, 592 bp, Homo sapiens
ctggcttggtgtctgcccaaacagccacccagttttgtgcttaaaacccagggccctgttggtgtaggcacccgagggaatcccctggtctgagggctgagaagaccttgggaaaagcacagtatctgggctggagtgcaccgtacctcatggcacagtccctcaaggcttcctttggctaggggagggagttccctgaccccctgtgcttcccagtagaggtgacataccactctgcttcggctcaccctccatgggctgcacccactgtctaaccagtcccaatgagataagtcatgtacctcagttggaaatgcagaaatcacctgccctctgcattgatctygctgaaagctgcagacgaagatgttactatttggccatcttgcaagccaccccatccagaagatacttttaaatggcttccatttttcctcttttctaatacttgcccatttgcttgtgataaatgtaaactacttgcttctctgtaatattgtttttttatccctctgttttttatttgattctatcattccttttatttctttgattaattttatttatatttacttacttcattgtattaagc

SEQ ID NO: 509366 - DNA, 646 bp, Homo sapiens
ctggatttccatattttgaacatttacttggatgaacatgctgatttttaagcaagcacagtcttatgaataggatataatttctgggcaacttcactgactctattcatttccctggttggcatttatgctgtctaycacctactgaagccaattccatgttcctttgtagttaactagccttatttgtaaaataaagtcaagcctgtattgaaatgaaccttaaattaacactgaaatcattaaaacacctgcaaacacactgagctctgggtcgattttacccactgcttccctcacaatagttatctgggaatatcacggaattggacattccaaagaaggtagttagtttccccacttattaaagggttaaacattaggactaatatttttttgcttgagtgatctgtgggaagcatttaggaagcattttaaaaatgcacctcataacacaacaaacacaaaggagccatgttcataaagggtcaaatctgcacagtgatcagtgggagcaggcatttttgtctcctctctactcttctttgccattaggctcttggaggtgtaggtgactttgggctcccttggggatcatgtgggcagtattctcctaattttgtgtttatcagctttcctatctgtg

SEQ ID NO: 509367 - DNA, 622 bp, Homo sapiens
cctgggatatagcccagaccccagggttcgaatcccagcgtagcaacaactgcctcctgggcttgggcaggtctcgacctcttgattcctaattgactgcatgatgagtgaggcaccttcttccaccatattgcgtaatcctctagccctggggcggggggtggaattacctggccaagaataggtttggggtaaggtacttttctcacctggcaagtgtgctgggagtcaggaaagcatgatgccttccctttcctcgaggagtttgtatatcccatgcccccactgccacacasccggcaagtgtttcatgcttgtaataaatcaacaaatcaaagaattgcaaagaaccagtggtgttaaagcataattttcaaaaaggtaaaaccgatttaaaggagaacttgaagaactcatatatgtgggcagtcaagaatactgaaatgaatttgccaattgtgcaaaattggttaatatcctataggacaggaaaaagtaatgtttgggagccatttctttcctacaggcttgaaatcgtatctctaccaaacaaaattcgtcccatgattacagtagtccctcctattctcacgagacatgttccaagaccttcagtggatgc

SEQ ID NO: 509368 - DNA, 601 bp, Homo sapiens
ccgaatgaactatatcagcgattgtctgatggagcaggcatggggggagttctgctggtaccaccccagcgggcagttgggcaattgcctggtgacctgtggggcaatctgtactttttatatcatcttcctgggtagagaacaacaggagccagacactctgggaaacttcctagtggcctagcattatgggaatgtgcccataytcctggttgaagtcttctactccgaatggagggaggccttgcccttcatatgcctaagaattgggctagactttcttggtcccagggagctgaggttctgaccctctggtccctagggactgggcttggaaaggatggttgtagactaagccagcagatccccgagatctttataggtgcttgcctcacattgttaaggatctttcttttgagagggtgctgggctgtgctgctctttagagttgggcagactcctgacagtcccatctctctacttgcgttgcaggtgtgggctaagctggtggccccggctttagactggaccccacaatgtttgcagagatgttcaggtagctgtggtgatacggcagaggactcctcagtctccctcccag

SEQ ID NO: 509369 - DNA, 541 bp, Homo sapiens
gattatagtaacatagcacctggaaagaaggggagaagccagcgctgggaaagtgttcttgggagtggtgagagggtaatgattggacagagcctagggagagtttgagcctgagaatgaggtaatagaaaacaagcagtcatgacagtaaaagggacagaaattggtgttgaacaaggctccttcatagcagtacaggagacttcctcactgtggcagtgccctgtatttgcatctctggggatcttaragtgcctcggcaagctgtggtcctgtgggttcgtgtgcagaaagacttcaagtgtacatgaacacatgacagtagaacaaatctgtgtccgggtgttctgtgcacttttcgtccctgttgaccctcacatccccccatgcactgttctcttcctctttccttactaggttgcctgtggctggagaaaggaatgtgctcatcaccagtgccctcccttacgtcaacaatgtcccccaccttgggaacatcattggttgtgtgctcagtgccgatgtctttgccaggtggagc

SEQ ID NO: 509370 - DNA, 684 bp, Homo sapiens
cagtttggtaggccagcagcatgtggaaactcacagagaaaatatgtcggcttcagagagaggctcctggggccccctcagccagcactttggatagctccaaagaggaaagtggaggaaggctgatccccagtgtcyatccaatcttctctacctgcaacttacaagagtattctaaagaaacactgcactggaggtgggtactgatgcagctattggggagtgaagcaggaccctcacccacagccacaaccactcccacatggtctcaggggctgactcatggtgaccagtgctgtggaatcatgccccattacttttgttttacagtttcagctcctgtagagatcatttgtctctccaagtgcagtcctgtgactgggcactctgccaccatggtgcaaagcccgctcccctaaaaggcccctggttaaagcagagaagtaaaagagctaggcatagcagacccaaacaagaacattttgtcaaaaacagatctctttcaccaactaagcttgaacaaattgtataaacactatatttagacactttgaaggaatgtttaaagtttgtgtttcctaaatgacagtcagatgtcttccctgactatctgtgatcagctgtagaattcacttccccatcccatactcgtgatctccaagagactagctactcagtgtgtgt

SEQ ID NO: 509371 - DNA, 464 bp, Homo sapiens
tgcttgcactgccgctgcacaatcaatgaaaaacattacagaaacaaccaattagggcctgaaatgccttcaggctttttccttcgtgggcacatctggctgcggtggggtcacagtgaaacttctctcctgtggattcactgggacccagaattagcaacaatggaataataaccagctttagaacaccaagcaatttttaataacttcacaaatctttccttccaactctgtctggttaatctattacctaattcttacctttgatagaattcttacctttggtccctccatttaccaaggccccatcattcccatccctagaataaaacctggtccaggcgtacacagtccaggctgggtggaagggaagtatacatgagtggacagtgaaaggaccccaaacttscagccccaaggaccttctgagaaggagattctcagaaagggcagcagcgatccca

SEQ ID NO: 509372 - DNA, 658 bp, Homo sapiens
  misc_feature (1)...(658): n = A,T,C or G
tgcttacccacagccactgatgattctgtgaccaggaggacacacaggatgcagcaaatgccatccttagggcaaaactggatgctagggagcaccagggtttgtggctgagcatatcacttcccaggaaagaatcagggttttgttaaggagtaaaaggagaatggatagtgggtaggcaaccagcaatatttgccagagtccttaaagcttatcttgctcaaactcccatttcacagacaagcamaatgagttacataaataatttcatggtcaaacagttagactctgggctaaaactcagaactctggactctcaggacaaggttgttttatcaatactgcaattcagtaatacttattaaatatggacaggatttgatgattggcagaatattggaggtaggagtagaaaaagaggaatcaagaattactccaaaattttccatcctanagacagaaaaaatgtacaaagttaggaaagagatgagaagtaactgagtttaagtcagatgtgcacatgcatgtataggagattgtggggagacacactgggagtgaggggctaggggcccttggggggtggtgcatggtgcagaattgtaactgacgagtctggttggaaggcaaaccttgggggtccccaccaaaggtagtg

SEQ ID NO: 509373 - DNA, 658 bp, Homo sapiens
  misc_feature (1)...(658): n = A,T,C or G
tgcttacccacagccactgatgattctgtgaccaggaggacacacaggatgcagcaaatgccatccttagggcaaaactggatgctagggagcaccagggtttgtggctgagcatatcacttcccaggaaagaatcagggttttgttaaggagtaaaaggagaatggatagtgggtaggcaaccagcaatatttgccagagtccttaaagcttatcttgctcaaactcccatttcacagacaagcaaaatgagttacataaataatttcatggtcaaacagttagactctgggctaaaactcagaactctggactctcaggacaaggttgttttatcaatactgcaattcartaatacttattaaatatggacaggatttgatgattggcagaatattggaggtaggagtagaaaaagaggaatcaagaattactccaaaattttccatcctanagacagaaaaaatgtacaaagttaggaaagagatgagaagtaactgagtttaagtcagatgtgcacatgcatgtataggagattgtggggagacacactgggagtgaggggctaggggcccttggggggtggtgcatggtgcagaattgtaactgacgagtctggttggaaggcaaaccttgggggtccccaccaaaggtagtg

SEQ ID NO: 509374 - DNA, 476 bp, Homo sapiens
ggttacagcccccaggagagtaaaccatccccaagacctctgttagcatacttctagcagttttcacgtatcattgacttcaccaataccagagagtcctattactttcagaatcctttaacgttttcactcctttgaggtctcattatatgacagtacagtggttctcaaacttggaggagcatcagaaccacctggagggtttattaaaacctgatagctaggccccacccccaaagtttctgatactgcaggtcagggtagggcctgataatttgcattcctaagaggttctcagatgatgtcgatgttgctggttcaagaatcatactttgggaatgaccatgatagtgtatgtataaggtattcatattctgcttaattagaatataggctaatgtcccaataagacaaatgatcaaattyatgttgttcattcattcatttggtaaatacttactcatcacctgttgagc

SEQ ID NO: 509375 - DNA, 637 bp, Homo sapiens
catgtctgagcacaactgtggcctttgcctgccatgactccccagcagcctatgagacaggccctattgtcacatttctatagaaggagaaaccaaggctcaagaatccaaagcctcagtatatactgcaaccagagcccgcttctaaccagagtcttatctagccccaaagtccattctcctacagtggtttaatcaccatagacacaatgacctccatagtccaygtcctacaactcccagcctggaacaaatctctgggtccatcagtctactaccttgcaaactcaccaggtatagtcatgactctctgttatacccttgctgtgcccccacctggaaagcccttttcctggagaagctcctccaggcatggtagcatgtgcctgtagtcccagatatttgggaggctgaagcaggaggatggcttgagcccaggagttcaaggctgcagtgagctatgatcatgccattgcagtcaagcctggtgacagagtgagaccctgtctcttccaaataaaacaaacaaaacaaaacaaaacaaacaaacaaaaacagaagcttcaagtctaagagtgtgttttgagtggttgaaaataaggaagatatcaactttaggatgtgataaacactatat

SEQ ID NO: 509376 - DNA, 429 bp, Homo sapiens
acagagtgagaccctgtctcttccaaataaaacaaacaaaacaaaacaaaacaaacaaacaaaaacagaagcttcaagtctaagagtgtgttttgagtggttgaaaataaggaagayatcaactttaggatgtgataaacactatatttagaaagatatttattctgccttttgggaagtgaaggagaaatgagggagcttgagttgaggcttagcgcttgagtaggaatgtgctagtcaaagaagcatggaaggtcattctaggcagaagaaacagcagggcgaaggcactgaagcatgcaagatctgggtgttttggggggtcaacaagctgcccagtgtagaatctttgtgcaatgaggagagtaaaggaacatcgcaggccaatctcaggaccaatctcactccctacctagaagagctagcaaa

SEQ ID NO: 509377 - DNA, 617 bp, Homo sapiens
atggattgctccatcgcatactcaggtctctgctcagatgccaccttatcccagacaccttcctcacccatcccgtctaaaacagcacatctgctgccctcagtttcctggcctctgtttattttgcttcatgatcctgatctttatattatttattgatttgtttcttgcctgtctctcctatcaggagacaagctccttaagagcatggacttgtatttttttattcactgctgtatccccagaacctagaacacttctgaaacatgttgaggaaatgagattttcttcttgccccagtaaagctgccaatggatatgggatctttggagaagctcttcaaggtctggtgctytcttccacagtactgtagccaccaatcttgtcctcatcccctgttccacacacatacctgagacttccagcctccccactagctcatgcctgcccgggggtctgagcccagcctgccctcttccaggaagcattttgagggccccattcagtggctcaatggtctgtgcacaaagggcccactgtggccatcaagccctgtgacctcccacagtgactgacttctcctcacccttcccaggtgggaagcaacaattccccct

SEQ ID NO: 509378 - DNA, 534 bp, Homo sapiens
catttggcctctctaactttgccccatctctgctgctgaggtcagcagctcaagaacgagccttgcacaggctttggggccctctccagagaaaatcgggttccttctttcccttccaagcatctctgctccctttgccctgccgctaggaagaaacctccctgtcagagcctctctacttctaaagccaagtcttttgccagtggccctgcccctccatacacacacacacacacacacacacacacacacacacacacagatacgtacacatacacacatgtgcatgtccatgcatgcatagatacacacaaacatgtatatatgtgcatatatacatacgtctatggattcatatatacacataatacacacatacacatgtgcacatatacatgcacatgcatgcacttatackcacatgcatatagatacacatagatgcacatgagcatgcacacacatatgtacacacatgcatatacatacatatacacatacatatatgctcataaagaactacatacatatata

SEQ ID NO: 509379 - DNA, 559 bp, Homo sapiens
ctctttagaaggccatctctgacctccctttaggtaagtctcattttgtttcctcatgctccctctgtgaggggagaacgtgcagccagcagctcagygtgcagggtctcctgtgcagagaagcccttttctcactcaccttctcatttctctgcctgattaccatctcgctcccttgctgggctataagctccctgggggcagaggccatgtctctgctcactgtcacaccccagccccttctaccgtgcctggcacataggaggagctccatgaatgtttgctgagtgaggaactgactgaactgaagatctacatctgagtcatctttttcaccaacacctagcccttgcaacatgcaggatatgttagttcagggtgggatgcatgggtcagttgaagccctgctgagtaacaaatagggccacaggccaggaaacaaaaactatccagagcccatggctctggtccctcctaggcagctctgtccttccaggtgctagggccaaaatcatcactgggtcctcgttgactcctctgtcttataaactgcatctag

SEQ ID NO: 509380 - DNA, 413 bp, Homo sapiens
gccatcggggccccccctttgcttcctgcaggaccagggatcaagggcaaggcgagctccatgtgggccaaaggtgagctgccgcccccagcctgagkaggagcctggctctgccctgcacagggctcggaaactattcctctgctttctccagagggtcagggtacaaagaagccctggaggtttctgcagacgatgcggctggggcggagcccgtcttacctgagcagcccccagcaaggcagccagcccagcgagtccagcggtggcgactccagagggtgagtgggctcgggtggttgggaggggctgaggcctagcggcgagccctcccttgtggcacccatgtgtagtcaggtctgagtgccacagaaaagaaagtgtgttactcacagtccctactccaagaaggg

SEQ ID NO: 509381 - DNA, 482 bp, Homo sapiens
cttgtctctcttgcttggctgaccttcctttgtccctggactagagaaaactaggattttcttgtgacttcttgttgttgttgttgttgttttgttttgttttggttttggttttggtttgtgttcattggcatttccaggttgctggcctctccagtgtcccgtttagaatatataaaacaaaaaaacaaaacccaagcaattcacaaaagtttagttttttggttccscaggtccttgcctggtctgccttcagaatcttcatatgtttgtttacatataatggtcagggcttttagttccacttctcaggaggaacgggggaaagcatatctacttcatcgtcccagaagcagaattcccaccttttagtcttttaaccatctttttacaaacagacatttacagtgtatgatactgcccttcccagatcccttttactggttgtttgacccgacccctggctgccatgttggttgata

SEQ ID NO: 509382 - DNA, 482 bp, Homo sapiens
cttgtctctcttgcttggctgaccttcctttgtccctggactagagaaaactaggattttcttgtgacttcttgttgttgttgttgttgttttgttttgttttggttttggttttggtttgtgttcattggcatttccaggttgctggcctctccagtgtcccgtttagaatatataaaacaaaaaaacaaaacccaagcaattcacaaaagtttagttttttggttccccaggtccttgcctggtctgccttcagaatcttcatatgtttgtttacatataatggtcagggcttttagttccacttctcaggaggaacgggggaaagcatatctacttcatcgtcccagaagcagaattcccaccttttagtcttttaaccatctttttacaaacagacatttacagtktatgatactgcccttcccagatcccttttactggttgtttgacccgacccctggctgccatgttggttgata

SEQ ID NO: 509383 - DNA, 503 bp, Homo sapiens
ctgggtacacacatattcagtaaatatctttgggctgggcatggtggctcatgcctgtaatctcagcagtttgggagggagaggcgggtgratcacttgagctcaggagttttagaccagcctggccaacgtggtgaaaccccatctctactaaaaatacaaaaattagccaggcatagtggcacacaattgtaatcccagctactcgggaggctgaggcaggagaatctcttgaacctaagaggcagaggttgctgtgagccatgatcgcaccactgcactccagcctgggcgacagagcaagactctgcattaaaaaaaaaaaaaaaaaaaaaaaaagttgcactgaatgtcctttcctccattaaggcatagacacaggggttggtggaatcaagtggccagagtcctagtcctaacttccccactcacttactatgtaactttgaacaagttgtgctaattttgaggggactttacttcttccactacaaaatgtacag

SEQ ID NO: 509384 - DNA, 503 bp, Homo sapiens
ctgggtacacacatattcagtaaatatctttgggctgggcatggtggctcatgcctgtaatctcagcagtttgggagggagaggcgggtgaatcacytgagctcaggagttttagaccagcctggccaacgtggtgaaaccccatctctactaaaaatacaaaaattagccaggcatagtggcacacaattgtaatcccagctactcgggaggctgaggcaggagaatctcttgaacctaagaggcagaggttgctgtgagccatgatcgcaccactgcactccagcctgggcgacagagcaagactctgcattaaaaaaaaaaaaaaaaaaaaaaaaagttgcactgaatgtcctttcctccattaaggcatagacacaggggttggtggaatcaagtggccagagtcctagtcctaacttccccactcacttactatgtaactttgaacaagttgtgctaattttgaggggactttacttcttccactacaaaatgtacag

SEQ ID NO: 509385 - DNA, 539 bp, Homo sapiens
tggactggcatctggcttggtctctatgctgctcttggatgagctgtcattcacttcattctcttccacagggatctcttcacagtatctgagaggagacaccagtgagtccacattaccctcagtggttcaagatggccaactattctaagaatctcagacctttctatccatccatatctatgagatttcctgcttctttgctttgtgtatgatcttcctctaaccaaaaatcccctgcctaccccattgctcttctgaaatctccttcatatcccaccccacccctccctgccccccatgtaaaattcctggctgcaaactcacctttcctaggcagcctccttagagttatccctacctaactgaaaggattatttgtcttaagctattttttttccatgggtgcccatcctatttgaagcctctgaatcaaatatctgggttctgagcatgcatttcctttcccaaacggtgacgaagacaggactctggacatgagygctccttaagtggcattgcccaaattcttgatgata

SEQ ID NO: 509386 - DNA, 442 bp, Homo sapiens
cagaaaaaaaaaaaaaaaaaaaaaaaaaaaaaaaaggcactaaacagatgtgatgkttttaaacataggaaaatacccgaatgtcccattactttaggatatggtcacaggtgtcagagtcaaatactgaatgaaccttaatatatcagaaattgtaggtaccgtttaaggcattgcctgattccttacaatcttagcatgtaagcaaatatcagtaacatggaaagtgattcagagtttgaaaagtggctgttcccctgactgaagatcccaacatctccagtctggtggctgatacttttgctctgggctaggctttgccttggctgaataggcataggagggactggttctcaagctcgccccctgccccaggtggatgatccaggaaactaagcagcagggaaaaattatcttaagctgtcttcactggcagagagat

SEQ ID NO: 509387 - DNA, 442 bp, Homo sapiens
cagaaaaaaaaaaaaaaaaaaaaaaaaaaaaaaaaggcactaaacagatgtgatgtttttmaacataggaaaatacccgaatgtcccattactttaggatatggtcacaggtgtcagagtcaaatactgaatgaaccttaatatatcagaaattgtaggtaccgtttaaggcattgcctgattccttacaatcttagcatgtaagcaaatatcagtaacatggaaagtgattcagagtttgaaaagtggctgttcccctgactgaagatcccaacatctccagtctggtggctgatacttttgctctgggctaggctttgccttggctgaataggcataggagggactggttctcaagctcgccccctgccccaggtggatgatccaggaaactaagcagcagggaaaaattatcttaagctgtcttcactggcagagagat

SEQ ID NO: 509388 - DNA, 456 bp, Homo sapiens
gtcagaaagtggttcccacattggccactggcctcttcttgaccatctagcaaattccacatgctgggtagcttttcctcatcatttgttgttttttcaaaggaagacagtataaagcagaaatggggaacttgtttccggttgagggtcatgcaccagggaagcccgagaaggggtcctcaatggccatacccagtacagaggtgttatggaagatggggcagattcccatgagartgagtcctcctaccaggcaacacacactgaaaccctgccgtgtgccaagcctgttctagatgctgggggacaacgtcgaccttgacaaagtccagttatcaagcgtctgctgtatgacaaattagatcattttagatagagctcaatgaatgcttggaagaaattaaaagagggtgattcaataagataatttaaaattattgaataaccatgattcac

SEQ ID NO: 509389 - DNA, 456 bp, Homo sapiens
gtcagaaagtggttcccacattggccactggcctcttcttgaccatctagcaaattccacatgctgggtagcttttcctcatcatttgttgttttttcaaaggaagacagtataaagcagaaatggggaacttgtttccggttgagggtcatgcaccagggaagcccgagaaggggtcctcaatggccatacccagtacagaggtgttatggaagatggggcagattcccatgagaatgagtcctcctaccaggcaacacrcactgaaaccctgccgtgtgccaagcctgttctagatgctgggggacaacgtcgaccttgacaaagtccagttatcaagcgtctgctgtatgacaaattagatcattttagatagagctcaatgaatgcttggaagaaattaaaagagggtgattcaataagataatttaaaattattgaataaccatgattcac

SEQ ID NO: 509390 - DNA, 456 bp, Homo sapiens
gtcagaaagtggttcccacattggccactggcctcttcttgaccatctagcaaattccacatgctgggtagcttttcctcatcatttgttgttttttcaaaggaagacagtataaagcagaaatggggaacttgtttccggttgagggtcatgcaccagggaagcccgagaaggggtcctcaatggccatacccagtacagaggtgttatggaagatggggcagattcccatgagaatgagtcctcctaccaggcaacacacactgaaaccctgccgtgtgccaagcctgttctagatgctgggggacaacgtcgaccttgacaaagtccagttatcaagcgtctgctgtatgacaaattagatcattttakatagagctcaatgaatgcttggaagaaattaaaagagggtgattcaataagataatttaaaattattgaataaccatgattcac

SEQ ID NO: 509391 - DNA, 559 bp, Homo sapiens
tgcggcggtgagtctatcgcccgagagttcaacctgctctggagagatgtgagtggtccatgcaaagtccccaaaggtccactgccctgagacagactgactcagcccagcagcacatagtggaggacacactgggaggcctcgggaaatgcaggcatgaggccctgggtggcctccagggaggtgggagaggcaggaaagagaggctcccttgaccactctccccataccctccatgatatggatggtgctgttaggccagctgctggcagggcccatggtcaagatggacagtgggactggagtaggaatcaggggagggaagacaaagaaaagccagccattgccattcactgagaatcactgttgctttctaaagtgacccagttgatgtggcaggactcctgaagatgagaattcactgtgtgctggtagggaggtttacttcatccctttatcaggctccaggcctttgatgccactgccctgcyagggtggcaagtgggtttcattccacctgccagcttccatcagcggtgggcctgagacagaggctgag

SEQ ID NO: 509392 - DNA, 625 bp, Homo sapiens
  misc_feature (1)...(625): n = A,T,C or G
tgtttaagtaaatagcctaagagcagagagtaatgatggatcacatganatggctgggtatttggttaacgaagctccgtgtgaattgagcatgtgataaacatgtcaaaaggttaatgaaaatctaggtcgcatttgtacctgtgtccagaataaaggaatactaggctttcctgctcagtattggtaaagctgcctctcattctgagtgctgactttaaaaaggggagcatattgagagggaatgatcagcatggtagaagatcccgaatattaggcaagaacatgacagcaagatttaaatatttgtcaagagtaattggtggatggcattgcanaatgtagcattaagacccatgaatagaaggtatatatgagcaactagatttcatttcagtagaaagattttstcataattaaaatacctcacaccttggaggagatgaaatacagatgaaatggataacaatctagcatggagataatgaatgcttgaaccaggccatgtcagtgggacatgacaattggcaatttctaattgattaacttggtaactgatagaaagtggggaatgagggaaaagaggtttctgtgacatctcaccctattgagttttatgcagttc

SEQ ID NO: 509393 - DNA, 525 bp, Homo sapiens
agtggtgtcaagcagagggtgagtaaaggaattggggcacagtggcatcgtctggcttccgggtctaaacccgggagttaccacgcagaggtggtgctgaaacccatgcatctatgtgaggtcaygagacagtgagtatagactgagaagggatgtgacttcaggactgagtcttagagtcacctgtgatgtgtagaggggctggtgtggagaaggaaaccaggagagggtggtatccttggaggccataagctcaaactgggcctccgggtcaaagaaaacgaggacagagaactacccactggaccgtaagctcatgcatgggtgacactaacaaaagccacttgttgggggtggggtcccgtgacggcaagttcaagaaagagctggggttgcagaaagagagaagagggtcactcctttgagatggctccacagccctctcatcagaatcacctttgggccttggagagtccaaagacgactggtgacttctatcttggtagggggatgagggccagtctt

SEQ ID NO: 509394 - DNA, 625 bp, Homo sapiens
catactctctgtggtttggtccccagggcctggcagggccactcccacgcctgtgtcctatgggggccatagtggcgcttcccaaggtcagccccttgccctggcccatcagtccatcctcaaccgttagttcacgacttggcacagggtggacatttaacagatatttgatggatcacaataagctgcgggtaaackaatctacgcacaggaactgtggagtacccttcagttagagatgaaccaggtcacctctgtccaagggagacagaaaacgggtggagaagcagccaccaggtggctcaccaaggaaccctgagacccctgcacaggggccgctgtgtcatcacaggcctgggtgttcatcagggccgggttccctctcccacggggaaccctcagctctaggtatcctgtgagtctgtgctccaggccccactctgtgcacagaggacgcaggcccctcggtaggctggaagtgccgtcagcagcagcaaagcggcgctcgcaggagcagccgtaatcatggtggcagtattggtattgatgagcagtactagtatcagtagtactggtattttcatcacctgcagtagtagaagtcttgctttggtattagagcatt

SEQ ID NO: 509395 - DNA, 625 bp, Homo sapiens
catactctctgtggtttggtccccagggcctggcagggccactcccacgcctgtgtcctatgggggccatagtggcgcttcccaaggtcagccccttgccctggcccatcagtccatcctcaaccgttagttcacgacttggcacagggtggacatttaacagatatttgatggatcacaataagctgcgggtaaactaatctacgcacaggaactgtggagtacccttcagttagagatgaaccaggtcacctctgtccaagggagacagaaaacgggtggagaagcagccaccaggtggctcaccaaggaaccctgagacccctgcacaggggccgctgtgtcatcacaggcctgggtgttcatcagggccgggttccctctcccacrgggaaccctcagctctaggtatcctgtgagtctgtgctccaggccccactctgtgcacagaggacgcaggcccctcggtaggctggaagtgccgtcagcagcagcaaagcggcgctcgcaggagcagccgtaatcatggtggcagtattggtattgatgagcagtactagtatcagtagtactggtattttcatcacctgcagtagtagaagtcttgctttggtattagagcatt

SEQ ID NO: 509396 - DNA, 535 bp, Homo sapiens
actccttcataaatcaccttcataaaccttcataaatggcccagcctcaggcattcctttatagcaagaacggcctgacacacccagggaattttcaattcaccggaagtctcacattttaaaccctgctgagtatttcaaggcccatcagcagcctgggctgacaggcatgtctagagatggctgcaggctgtggctgctggccgtggtgctgctctgcacgacagcatggtgacactcccgcatcagcaggttgggtgtgtggggggtcaggttggatcaaatgccctcatggccctgtagatgcccccggctgtacccacataagcctccgacacacaggacgatccctcacttgctcctgggcctggggggytctggaacttagaatttgtgaccctctgcatgcctacatccacctgggcattgaacacgcacttacagacaagctgggcgatgcattgccataattgaggatcccacccaggggtggccagtgcagataccaggaaggccgcgctgccgcaagcctgga

SEQ ID NO: 509397 - DNA, 534 bp, Homo sapiens
actccttcataaatcaccttcataaaccttcataaatggcccagcctcaggcattcctttatagcaagaacggcctgacacacccagggaattttcaattcaccggaagtctcacattttaaaccctgctgagtatttcaaggcccatcagcagcctgggctgacaggcatgtctagagatggctgcaggctgtggctgctggccgtggtgctgctctgcacgacagcatggtgacactcccgcatcagcaggttgggtgtgtggggggtcaggttggatcaaatgccctcatggccctgtagatgcccccggctgtacccacataagcctccgacacacaggacgatccctcacttgctcctgggcctggggggttctggaacttagaatttgtgaccctctgcatgcctacatccacctgggcattgaacacgcacttacagacaagctgggcgatgcattgccataattgaggatcccacccaggggtggccagtgcagayaccaggaaggccgcgctgccgcaagcctgg

SEQ ID NO: 509398 - DNA, 578 bp, Homo sapiens
ctgtgccaatgtgcattcagggcctgtctgaactgaaaattagcccrctggtcacattcatatgctggcttttttgtttccaaatatcactgatgtgccgcctgtcttaatagtgatcattcaatttagctaaagacaacgtgccctgcttccctgcagcctgtgattggttatgcacagcaacacatggcttatttatttattttttgttgtttgttttttctttgagaaggagtctcgctcagtcacccaggctggagtgcagtggcgtgatctgggctcactgcaacctccgcctgccaggttcaagcgatactcctgcctcagcttcctgagtagctgggattacaggggcctgccaccacgcccagctaatttttgtatttttagtagagatggggtttccccgtgttggtcaggctggtctcgaactcctgaccttgtgatctgcctgtcttagcctcccaaagtgctgggattacaagtatgagccactgcatccagcccacatggttctttacagagccctttttgaccgtattatgggggctgccaagtaattttcacttgaagagtca

SEQ ID NO: 509399 - DNA, 512 bp, Homo sapiens
tggagctgtgccaatgtgcattcagggcctgtctgaactgaaaattagcccactggtcacattcatatgctggcttttttgtttccaaatatcactgatgtgccgcctgtcttaatagtgatcattcaatttagctaaagacaacgtgccctgcttccctgcagcctgtgattggttatgcacagcaacacatggcttatttatttattttttgttgtttgttttttctttgagaaggagtctcgctcagtcacccaggctggagtgcagtggcgtgatctgggctcactgcaacctccgcctgccaggttcaagcgatactcctgcctcagcttcctgagtagctgggattacaggggcctgccaccacgcccagctaatttttgtatttttagtagagatggggtttccccgtgtyggtcaggctggtctcgaactcctgaccttgtgatctgcctgtcttagcctcccaaagtgctgggattacaagtatgagccactgcatccagccc

SEQ ID NO: 509400 - DNA, 619 bp, Homo sapiens
tgatgatgggtttcatgtgggggtgagagcaaggaaggagttccaagtttttgttctgagaagtgcagtggtgttgacaatccacagagatggaaccagagaggcttggagggctaccaagagctgagatgaacactcttggcttgctaacatcggctatcacaggatggaagaggaggagtgatagccctgctccatccagagcaagaggccactgcagggccacagagttcacactcatcattaaaatcaaaagaaaatgagcagagcacactgcactcctgggcaatctctgtctatggagcaggcatcctcctgtctctcatcttcttccctcacttcccctgccctgaaactctgagattagagatctttcttcaggttagctacactctacatggacgcttgctttctgtgatcacagagggatccctctaggattctttccttatagtaattcttagtggtgtctacaggtcactgctttctctccagtctgaygctgaggcattttggaatgtttcttcctcttacaccaaaataaatgaaggcaacttgtggatgatattgagtgaagatcacggaatgattcattatttaactgcaaatgctgaaaaca

SEQ ID NO: 509401 - DNA, 619 bp, Homo sapiens
tgatgatgggtttcatgtgggggtgagagcaaggaaggagttccaagtttttgttctgagaagtgcagtggtgttgacaatccacagagatggaaccagagaggcttggagggctaccaagagctgagatgaacactcttggcttgctaacatcggctatcacaggatggaagaggaggagtgatagccctgctccatccagagcaagaggccactgcagggccacagagttcacactcatcattaaaatcaaaagaaaatgagcagagcacactgcactcctgggcaatctctgtctatggagcaggcatcctcctgtctctcatcttcttccctcacttcccctgccctgaaactctgagattagagatctttcttcaggttagctacactctacatggacgcttgctttctgtgatcacagagggatccctctaggattctttccttatagtaattcttagtggtgtctacaggtcactgctttctctccagtctgatgctgaggcmttttggaatgtttcttcctcttacaccaaaataaatgaaggcaacttgtggatgatattgagtgaagatcacggaatgattcattatttaactgcaaatgctgaaaaca

SEQ ID NO: 509402 - DNA, 586 bp, Homo sapiens
tttgtctttaactttccgagtccagtgggcaaaagggagagttcttccgggttcctatacaagtgcaagatctcattcccccagaatgcaactgggtcatgtgacttccccaaccaatcaccacatccaggggatgagattacactgattggccagacctgtgacacatttgcaaccctgaaccaatcactgaggctgtggtggaggtgggagggaggaagatggaggtcgtctgctgattggccagcccttggtcatgtgtagtgacccctagtaggagtggacccagtccatgatggagaaggagggagggaaggattctctaggaggaaattgaagattttgctcctaaagaggaagcaacggataccaactcttaggcatgttgtgataacctccttgtctccatcccttccgcttgcaggtgaaggcagagtatgtgcatctcaaccayccgctcaccctcgtgaccagagagcgcgatttggccgtgaaggagaaacaccagctccaagccaagctggagaacctagaacaggtcctgaaggtaagctggctttctgcatttgggaccgcttctgctctt

SEQ ID NO: 509403 - DNA, 352 bp, Homo sapiens
agcactcaggtcttctgctcacaaygcatgggtgagacctggccgcatgggcctagctaatgaaggggtctaggaagttgtcttccctgtgagtggacagagggaaccaggcttggcaagcagtgggtgacggccacagtgcctagagcacaaggaggtggtggcagaggggttgtgagccctggggtgggcggtggggctgctcagggcttccgatgccctctctggagtccttgagaaaagccagggaccactgttcagtcttcctgtgctcccagccgtttgaactttgatgtgctgcagatggctggagcttgtgagacctcagaccagaaaggggaagctgcctgcg

SEQ ID NO: 509404 - DNA, 548 bp, Homo sapiens
ctgcttagttctctgcttgccattttccttcccgtcagaattggcaactctttcccttcttcacttctgaattccatgtgtgcctgcagggatgtgggtggaggctggaaagtgagctggaggggagcatgttgggggaacttgctggggatgggatttctgygtggacagccatgctccaggcctggatcagcctagagcgctttcaaaatgacccacatcccaaagtttggcagctcggctgtgtcatgctgacttggcttcctgcgtttctccacttgcaccctcctgccccactcctgcacccatgtccttggctacccctgtcactgaggaccagacacagccatcacccccccaggtgggggtcagcccaccctgccctgtcctagagtcacatctctgaacttcaaagactgttcagacccatcaccaatgtctaattagacccagctcagagaatcgctaatacatttatgcagctcactttctgatcacgtctatatctccagtaagcacacgcacctcacacttgcacacccacatgc

SEQ ID NO: 509405 - DNA, 244 bp, Homo sapiens
catcgtctctatgctccgagtcttttactttgttatttacaatatataaatataaaaatataatatayatgaagtatgcaataaatatagaataagtatagatacatagaataaatacatatatacctttttttgggatgaagccattgctatagggggcctgcagtgttgcttcactgatttctcaaaggctgccatgtctgctttgtggtctgaccacgttttggggcaggcgctgggcact

SEQ ID NO: 509406 - DNA, 618 bp, Homo sapiens
taaaaacatatcagtcctttacttgtctatcttaatagatgtctgtttttcaaatgaaactttctgaagctccttgctgcatgttcttctgaatctccctgtgcaggtctgtccaaagacctaacccaccgccatcagtaccacacatgctgtggtttgggaatgttgtggtttgcttcagactttgtctctgatcctcttatttggatgccatgggagaagttaagacaggaataagtagatygtttgtttcttttttcatttttacttttagaaaggctaagatgctcagaattggagctgtcataatccttgttttacaagagtttatcattgacccctgcatatcttttattttccttattaataaggaaatgataataaggaaataattatccttaataataagcccccttgagcccatctcccaatcctggaactaaaccatggcaatagccaccgttcacccatgcacaccaccccttcctgtctccattcacccatgcacactaccccttcctgtctccattcacccatgcacactaccccttcctgtctccattcacccatgcacactacccccttcctgtctgcattcacccatgcacaccacccctt

SEQ ID NO: 509407 - DNA, 618 bp, Homo sapiens
taaaaacatatcagtcctttacttgtctatcttaatagatgtctgtttttcaaatgaaactttctgaagctccttgctgcatgttcttctgaatctccctgtgcaggtctgtccaaagacctaacccaccgccatcagtaccacacatgctgtggtttgggaatgttgtggtttgcttcagactttgtctctgatcctcttatttggatgccatgggagaagttaagacaggaataagtagattgtttgtttcttttttcatttttacttttagaaaggctmagatgctcagaattggagctgtcataatccttgttttacaagagtttatcattgacccctgcatatcttttattttccttattaataaggaaatgataataaggaaataattatccttaataataagcccccttgagcccatctcccaatcctggaactaaaccatggcaatagccaccgttcacccatgcacaccaccccttcctgtctccattcacccatgcacactaccccttcctgtctccattcacccatgcacactaccccttcctgtctccattcacccatgcacactacccccttcctgtctgcattcacccatgcacaccacccctt

SEQ ID NO: 509408 - DNA, 411 bp, Homo sapiens
ccgcgcactccttgttgcatttaacccagagtcagtcctcctcttaggtcctggcacaggagtctgatcaaaacacccagcactcctctgaagcagggtgcctgtcagaagtgagtgcattgtgataaaataaacaaaatgctttttattctccagcttctcagattcaaataaaaaacgcattgggcttttttactcactgcaaaaaaacaaaacaaaaaaagcctcatgtgtttttcatgtgagtttctactgcctgatacrcaagacattctgggtcctcagcctctccccagctcctgggtaaagggactgcaaccggtggtgcttcgctcacagccacggccagaacgcatctctccagccccttctcccatggcccgtgagacagttctgttcgtcggatgcggt

SEQ ID NO: 509409 - DNA, 519 bp, Homo sapiens
tgtgatccatgctgggagcaggggggggtgtctagtcagtttcagtattgttctcccatgattgttttaggaaacattcagccgcaatttcagtcttttctatttcactgaaagcttttatatttggaaggaaaactacatcccgttcacaattcagtaaaacccagtggtgggtgtgatttggtggcccggtcaccaggctcttcaccaggctggcacttcagtgtctttgttctgtgcaggcaaaggggaggggctgtgagccggccctcaggcacacttagctgggaatcctgcaccccctgactcctcccaggatgggtctctgatcccagtagaatcctcttcagctctcagcaaatcaggttgaytgaaactctgttgaggttccaattccactcacatcactgacaacaaaagaaaaaatgccaccaactcaaagggtgtgaggtcagaaaggagggaagatgctgcatcgccggctttgaaggtggagcgcgaggccctgagcagcccttg

SEQ ID NO: 509410 - DNA, 563 bp, Homo sapiens
tgctttcccaagccctccctgagggcagatgcttctacttcaccccaggcagggatagggggctggtgtccttggttccccacaccaggcaccagggatatacccatttcttggagtcaaggcctggtcacctgttcacgtgcagacccagcagtatcttaaggcgggacgcgccttcggccatgggtatcatcgtgctaagactcagtttgttgaaattaataaggcagtcatcaatcaagaatgttctgayactaggggtcccctctctggcccctgcatttttaatccagagcagagcagggcaggggatgagtgaggggagcgagatggggggagtgctggaagtgaggaaggggtcctggggttcacgctgatggagtcttcggggttgagggtgcctccagtgatcagggctggaagagcagaccctgcctcctccactgagcaaataccgggccggtccctgctgcgttagggcctaacaaaccctccccacccacccaacgaaaactcaccctctgccctttggcatacacgccgtagccggtaacgtttgcgcc

SEQ ID NO: 509411 - DNA, 412 bp, Homo sapiens
agagtccccaaaaggtaaccactgttctgatttctagtcccatgcatgtgttttgcctgtttttctattctatgtaaatgtaataaaatatagatttttaatgtctggatatttatctcracattttatctaggacgcacccacatctgtgaaatagcagcccttcattactgtgtagtatcctcttgtataaataatctgagatttatctatttatgttcaactattattaaacattaggatgattccagtttgagaccattaaaaataatgctgcaaagaacattcttgagcacgttttcttggaggcacatgtacatgtttctcataattactcacctaggaatagaacagtggtgcctgcagaggtatgaacagagcaaagttcacccatgtcatagattttgtcttc

SEQ ID NO: 509412 - DNA, 577 bp, Homo sapiens
ctgtctcgtggaggctttacctcagcctctttataagtgaaatttatagccacaggcctcctgctggatgcggggctcascacctcccctatccccagggagggccatctgcctgctggcattctccactgaggactggagggtaaagctgcgtgtccccctaggagaaggcacccaccaagtagagtgtctaaggttatgttctctgtcagcagaggcaagggcagacctggaccctggtcccagccctgtcgtttacttgctgagcgccttcagccagtcactagacatctcactgaaatgctggtgacctttgcttagaacactattccaagaatggagagagggctgacctcaagcatctggcgaatgccagacacctccttccgtcccaggagttgacccctagctcactgctggggttgaataaagtgagactgtgcggtggtgcaggcagtccctccccagaggccttgggagggcctcgttagacccagtctcaccttttaaatccatttaaacccagttcgctttcgtgccttccgcttggagcctggttggaagcattagggctggc

SEQ ID NO: 509413 - DNA, 578 bp, Homo sapiens
ccccgaagtagcggaagaggacggagagtgctgtgggctgctacacaagcagggtgcagggccgtcccccagggccaggacggggctggccagagagcccaggcccggcaggccctacaggggcgacgaggcccctcggggctcctggttcccggtgaagcacaggggctcgggggccgtcccccacgtggaggacttccttctggaagacaggggctgtcggttcagccgctcggccasccggagcccggacagcggcctggactgtgggagtgaagaggacgagtcgcggtttggcttcggaaacaccgtggccgcgtgcagcccaggccctggtcactgtccctgcaggaggggcccgaggccgctgctggcccggcggcggacgctgacccggcagagcagcgtggaggaggactttggggagcaggtgggccctggtggcctcctcaggaacgacgacccccagcccggcccggagaggccgccccccaggaagcacggctggggcgagcccaccgagcaccaagattttcggggtgtctggaagaaaagcataaccatgcccgacagtaggg

SEQ ID NO: 509414 - DNA, 587 bp, Homo sapiens
cagctgtattgttggctgttaatcgtacagctagtgctattggttggatgaataggctaagtttcaatgattaccaatatagggataagtggaatcagtgtgcttgtggtaggaagtaggctacagaagctttagtcttaaagcrgaagcagtgactactactccagctcacaaaggaattgctatttctaagtttattgatagttgagtagttggtgtaaatgaatgggatagaagtccaagaagattagttgaaccaataaagagaatcagggaaattaacataagggatcaggtttgtcctttgatattatgcattgatactatttgtttcaatacaagttggattaatcactgttgaatagaggtcagtcagtcattgactgaacaattaggggtgggaaatataatataaaaatcccagtattttctgggctaaaatgattactatttatatcctgacaaggttttgccctgatacctacataacacttcagacccctacccactttaaagagagtatactctagatgctataattttaaactaattatagcttcaactacaaatggctttttagctaaacc

SEQ ID NO: 509415 - DNA, 539 bp, Homo sapiens
tattgttggctgttaatcgtacagctagtgctattggttggatgaataggctaagtttcaatgattaccaatatagggataagtggaatcagtgtgcttgtggtaggaagtaggctacagaagctttagtcttaaagcggaagcagtgactactactccagctcacaaaggaattgctatttctaagtttattgatagttgagtagttggtgtaaatgaatgggatagaagtccaagaagattagttgaaccaataaagagaatcagggaaattaacataagggatcaggtttgtcctttgatattatgcattgatactatttgtttcaatacaagttggattaatcactgttgaatagaggtcagtcagtcrttgactgaacaattaggggtgggaaatataatataaaaatcccagtattttctgggctaaaatgattactatttatatcctgacaaggttttgccctgatacctacataacacttcagacccctacccactttaaagagagtatactctagatgctataattttaa

SEQ ID NO: 509416 - DNA, 587 bp, Homo sapiens
cagctgtattgttggctgttaatcgtacagctagtgctattggttggatgaataggctaagtttcaatgattaccaatatagggataagtggaatcagtgtgcttgtggtaggaagtaggctacagaagctttagtcttaaagcggaagcagtgactactactccagctcacaaaggaattgctatttctaagtttattgatagttgagtagttggtgtaaatgaatgggatagaagtccaagaagattagttgaaccaataaagagaatcagggaaattaacataagggatcaggtttgtcctttgatattatgcattgatactatttgtttcaatacaagttggattaatcactgttgaatagaggtcagtcagtcattgactgaacaattaggggtgggaaatawaatataaaaatcccagtattttctgggctaaaatgattactatttatatcctgacaaggttttgccctgatacctacataacacttcagacccctacccactttaaagagagtatactctagatgctataattttaaactaattatagcttcaactacaaatggctttttagctaaacc

SEQ ID NO: 509417 - DNA, 508 bp, Homo sapiens
tttaatttttttaactaaatcttcatgagatgtaagatttatatattttcacatgccccaaaatatatttttcttttatgcctggtaataattggtctgggtaaggaaatctaggttccatgtcattctcaaagagctctgaaagtgcagatatcaaactcactgtcttaatttgggttcctcaagaaagcaggacctaagcaaaaatttaagtataggtagtttattttggtgttagacccaggaatcagaagtgagagagtggggagagtgaggttgttaagaaagaaaatgcaatgttagggtgctctatcaaagtagctgctatggacaactgggctcaattcctccagcatattctgagaagtgtacctactacctcccagatttttccgtctggagtataggacactggagtacttaatacagaggttaccactccacattgtttgttggtttctcttaaggtgcattaaatttctccttascactgccatttgttgttagt

SEQ ID NO: 509418 - DNA, 527 bp, Homo sapiens
cagctgtttaacatcttttctgtacttctcactytattccctgcagggaagaagaacaaacaacaaaccaattgcagtgtgtataagaaaataaaggctgggcacggtggcatatacctataatcccaacactttgggaggctgaggtgggcagatcacaaggtcaggatttcgagaccagcctggccaatatggtgaaacccagtctctactaaaaatacaaaaattagctaggtgtggtggcgggttcctgtagtcccagctactcgggaggctgaggcaggagaattgcttgaacctggaaggtggaggttacagtgagcaaagatcttgccactacactccagcctgggctacagagcgagactccatctcaaaaaaaaaaaaaaaaaaaagaaggaaaaaaaaagaaaaaaaaaaagaagaagaaaacagggagtcatgcaggctgtggaaacacaaagaaacacacagacacattgtggtttccccccttaaccccttaagtgattactagtttcacagta

SEQ ID NO: 509419 - DNA, 527 bp, Homo sapiens
cagctgtttaacatcttttctgtacttctcactttattccctgcagggaagaagaacaaacaacaaaccaattgcagtgtgtataagaaaataaaggctgggcacggtggcatatacctataatcccaacactttgggaggctgaggtgggcagatcacaaggtcaggatttcgagaccagcctggccaatatggkgaaacccagtctctactaaaaatacaaaaattagctaggtgtggtggcgggttcctgtagtcccagctactcgggaggctgaggcaggagaattgcttgaacctggaaggtggaggttacagtgagcaaagatcttgccactacactccagcctgggctacagagcgagactccatctcaaaaaaaaaaaaaaaaaaaagaaggaaaaaaaaagaaaaaaaaaaagaagaagaaaacagggagtcatgcaggctgtggaaacacaaagaaacacacagacacattgtggtttccccccttaaccccttaagtgattactagtttcacagta

SEQ ID NO: 509420 - DNA, 527 bp, Homo sapiens
cagctgtttaacatcttttctgtacttctcactttattccctgcagggaagaagaacaaacaacaaaccaattgcagtgtgtataagaaaataaaggctgggcacggtggcatatacctataatcccaacactttgggaggctgaggtgggcagatcacaaggtcaggatttcgagaccagcctggccaatatggtgaaacccagtctctactaaaaatacaaaaattagcyaggtgtggtggcgggttcctgtagtcccagctactcgggaggctgaggcaggagaattgcttgaacctggaaggtggaggttacagtgagcaaagatcttgccactacactccagcctgggctacagagcgagactccatctcaaaaaaaaaaaaaaaaaaaagaaggaaaaaaaaagaaaaaaaaaaagaagaagaaaacagggagtcatgcaggctgtggaaacacaaagaaacacacagacacattgtggtttccccccttaaccccttaagtgattactagtttcacagta

SEQ ID NO: 509421 - DNA, 604 bp, Homo sapiens
ctggcaatgctcatgagaaaacgccttgctcaggtttgaatggcctgagctcaggaaaggccctatgaggctgagtctgtttaaaatatctctctacttgaatcatcttggtaccagatttttcaaactcatggtgccttggatagcttcctctctctasaattaagtgtgtatgttggccagggcaggcgaggcaatggcaatcctggcttaactgattcctggaggaatgttatacctaattggataacaaagttgaaagaaacgactccataagaacaagacattgccttcaaataagttacctttccttaaggttaccttcatttatctggaagccatctttcaagttcttgaaagtagcttaggctgaggcttacagtccagaagaaatcctgcagcctattatagagaaacaaaatctggaggggagtgttagggtttaagagatgggaaagagccataaatactgccttgttcctctgctctggcttccttatctgggctgagaaataagacaaaagagtaaagcaaatagagccagaacactaccttttgattgacagtgacaagagtggaggacatggcttagtgagacagaaag

SEQ ID NO: 509422 - DNA, 627 bp, Homo sapiens
ctcctgaaccacacttgtccttcaggatcactgtgagaattttaccagctaagatgtagagtggccagctcagaatgtgatatattgtaagccctcaataaatagtagctccctggacccacccttccccacaaacttccccagttgcagcacagagtttaaaacctcccaggagccccataaactgtggccgaccaggactgaccagcttcagctctgggtgctctgtgcctctctccaatacacacagtgcttcattaaagaactcaaagcttatctggcccaaaagcaatgcttttatctaaaatcagaccacatgggcaacaagtgaagcagcaagcctatcatggcatttgggccaactggttttggctgccaagggagccctccttataggaggcggttcagaccgcaggccggctcacatacaacactggtgtacacggaggggttaattagcagtaaacagatgccatgattcacctctgtgctgttatttccccgtgtgcagctaaaactataatcactctgttctccgacaggatgtttgcgttcaagcyaaaactgcctcctctatccaacttgctgcagttcggttcagcacagggcaatgaggaacttggctcc

SEQ ID NO: 509423 - DNA, 576 bp, Homo sapiens
tgcctcttttggctccaagaaagtacagaacttctcaaagagctttggagccagaggttcagtcttttgagtgtgtacaagggtacttttgcttaactacaaaaaacaaaccccaattttggaaacagtaaaaaattaattccagccaaaattggagaataagatgggtaaatygaaccaggaaagaaatatcagtgggccaggtgcagtagttcatgcctataatcccagcactttggggggccgaggtgggcggatcatctgaggtcgggagttcaagaccagcctgaccaacatggagaaactccatctctactaaaaatacaaaattagccgtggtctggtggcgcatgcctgtaatcccagctactcaggaggctgaggcaggagaattgcttgaacccaggaggcagaggttgcagtgagccgagatcgtgacattgcacttcagcctgggcaataagagcggaactccatcagtgaagtctgtggaaagcagaatcgaaagatggcccctggtgcacatgcctgtatatcccctttccttgaggataagccagaattgtgaatatgata

SEQ ID NO: 509424 - DNA, 504 bp, Homo sapiens
ctggttctgaccagtcctcagaggctgagcactgagtgccttcatgtctctccttcaccttttgacagagggcctaattgtaattcattcaaatgttaagtctccatcccaaagtgaacacgagatgcacaaaacacacgtttgctcattacacatgcacacgtgtccccccttggtgaatattcatagctcctcccacacctgttgaatactatacttggccaacccattcagtataaatctctgttctaccctctcctccctgggatgccattaaaggtctctgcctgaggctgtgcttcccaagcctgtcaggccacactgcaggctgtagccctttataagaactaagctctcctttctaaatgtatagatctcatgattttttcagtgaacacagcagggcggggcagggragggttggaaatactttaaaggtatctatcccttttcacaatttctctcttcacctttttcaattaactaccagtcaagttaagcaag

SEQ ID NO: 509425 - DNA, 573 bp, Homo sapiens
tattatgtcaaaacatatctatccttctcctatcactgtgctactataatgtacttctttagggacatgaccatgccgtttaacttacatctctctcgctgtaccaaataagactcccctcacaatttactcagtaaatgtttgtggagtaagattttcactggcctcatttctccarctatcctgcttggcaactaatccacagtcatataggcctcttttcacttcttttagtttcttaaatttgggcctccgcacccccactccagctcatgctatttattctacttttaatgatatactgcctgctcgattcccattcccagctccaacattcacactcttcatcttgcccatctttcagaactcagcttcactatctcttaggtgaccttgaataagatcttaatacttttcctttccaacaaataacccagttttaattatctaattgattatgatatcacttattcatcactgtgtatcaactcatcccagattcaatggcttcaaacagagaaacaaaaaaatacattttactgcttacattcagtaggttggccaggtattaca

SEQ ID NO: 509426 - DNA, 526 bp, Homo sapiens
aaggctgtctttttatgcagttgaagcctcgcaggtagcagccctcagagtagacagyagtctttggtaaaagtttcactgtcaggactttgtaagtgttaacgttttcatctccttttcttgtgagttaatttttccaagatccagataagaataccttaataaaaagcctctgcatttgctatttactttactaatgaaagttttctctacagatgcaaatctcccccacaaaggatagcttccagagccatacttgtgtctgcagtccttctgaatagccatttcaaaatatgccagagaattatatttcgagatggcatattttaattttattctctctatatgattattaatcactttttatgtttaaaaaatgaaaagcaacataacaagattgtaagtaaatacattttaaaatcttttggaatacaaaaacttataactcaactttaaaaaaattaatttaaattcataaaatttaatcataacttaaagttatgatttaaacttaaagttaagtttt

SEQ ID NO: 509427 - DNA, 526 bp, Homo sapiens
aaggctgtctttttatgcagttgaagcctcgcaggtagcagccctcagagtagacagtagtctttggtaaaagtttcactgtcaggactttgtaagtgttaacgttttcatctccttttcttgtgagttaatttttccaagatccagataagaataccttaataaaaagcctctgcatttgctatttactttactaatgaaagttttctctacagatgcaaatctcccccacaaaggatagcttccagagccatacttgtgtctgcagtccttctgaatagccatttcaaaatatgccagagaattatatttcgagatggcatattttaattttattctctctatatgattattaatcactttttatgtttaaaaaatgaaaagcaacataacaagattgtaagtaartacattttaaaatcttttggaatacaaaaacttataactcaactttaaaaaaattaatttaaattcataaaatttaatcataacttaaagttatgatttaaacttaaagttaagtttt

SEQ ID NO: 509428 - DNA, 633 bp, Homo sapiens
catttaatctgttcgccatcaaatctgggaaagggatataatcgtgttttcaattagcttacctggatgacaaatatattcctgccttatcttctttataacagcagaactacttccttcacatgaacagggtaatttatatttgccaggatagtgactcctttacttcttyccccttgacatgcagaggccaaagtgttcaggcagtaggcctagttctatagctgtccccataagagggatcatgtagtatttgtctttctgtgactgacttatttctgttagcataatgtctttcatgtccatctatgttgccatatatggtaggatttcaactaaaatagtcaaaggtagaggacagaatgatggttagcaagggatggagaggggaaggtatgaggaatcattgttcaatgactataaagttacagttacccaagaggagtgatttcccgagctcttctgtacaacatagtgcctatagttaacaataaggtattgtgaacttaaaaatttgttaagatgatagatttcatgttaagtgttcttactattgttggtgcgccagttcaggttcttgactttgcagcacaaaagaatatgagagtgagttcaaagtaggagtaggccaag

SEQ ID NO: 509429 - DNA, 320 bp, Homo sapiens
gtaaacactataacaatcaattcaattaagcaagcatttaattaatgggtactatttatgtgctgggcattgagtttataatgataactaagatatatttttcttgctatgctccagcttaaaggagaggtttgaaatattttggatgaaggaaggttcaaggtgaaaatgtagaacaagaatgaaacaactgacacatctatcaaatggcccttagtgtaacttcccaatgggctctccttgcttgctgcccagttagagctgatttatcaagacagaggaattgcaatagagaaagrgtttaattcacgcagagccag

SEQ ID NO: 509430 - DNA, 551 bp, Homo sapiens
gggtgtgaatgaggacatacttgtatctctaataaaaatttttgacctctaggttaattatgtaacatatctcaattgttataaagatacaaggtcagagttgagtattttttttaatagtctagaagaagacattaaactagggttggtattagaaaagggtgagtatattttaatcaaaaatgccaaattacatacacatatatataattatatacatgtacayatatgtgtgtgtatacatatgtgtgtatatgtatatatatggaaagagagagacatgaagagtttgtgttttttgctatagtatatctttgtgatttagtcagaatatataagaaggtcattcaaactgagcttcagtggtaatataaatgagaaaatctgagttcctgaaagtaagtagaatgaagctttgtgttttaagaattttaggggaattttaatgtagtttgttaagaagattatgtttttctaacatttcacttgtgaaatccaatcagaaattgaggcctaaagtctatatagatccttagaataagatttttggc

SEQ ID NO: 509431 - DNA, 591 bp, Homo sapiens
ttaaaaaccaaagtcagcactagaataaaattagaagatgtagggtgtgaatgaggacatacttgtatctctaataaaaatttttgacctctaggttaattatgtaacatatctcaattgttataaagatacaaggtcagagttgagtattttttttaatagtctagaagaagacattaaactagggttggtattagaaaagggtgagtatattttaatcaaaaatgccaaattacatacacatatatataattatatacatgtacatatatgtgtgtgtatacatatgtgtgtatatgtatatatatggaaagagagagacatgaagagtttgtgttttttgctatagtrtatctttgtgatttagtcagaatatataagaaggtcattcaaactgagcttcagtggtaatataaatgagaaaatctgagttcctgaaagtaagtagaatgaagctttgtgttttaagaattttaggggaattttaatgtagtttgttaagaagattatgtttttctaacatttcacttgtgaaatccaatcagaaattgaggcctaaagtctatatagatccttagaataagatttttg

SEQ ID NO: 509432 - DNA, 517 bp, Homo sapiens
cttgggagaacggaaatgagaacaggttctggaagggggaattggacagaacaatccttccatcacaggaaggagagacagcattgaacaccaaayaaaggcgagtaaacaagaatatcaccattcctgggttgagataggggagcaaagacaagaatagcatggcttcaaactaaaggggttgcagggagtacctcatggtatacatcagaggatggagactcaaagaaagtgggtacaggtttatataatcacacttctgccttcattaattgtagcaaaggccaacaaaaggacaccatgtgccaggcactgtgctaactaagagctttaccaggattcttccattcaatcctcacaccaactcactgagaaggcactgttattctccctactatatagatggagaaactgaaattcaagaggctaagaaacctaacccacagcctgcagcctgagagaggaggagagctgaaattggaacccagctccatggaactccagagtgggatcatgc

SEQ ID NO: 509433 - DNA, 523 bp, Homo sapiens
ttatattacaaatgactgataatattgtgcctattagtatattttcttccacagtttattctatcccagttctcyttgagtgaacactttaacaattgtgctgctatcttaagctgggctgtctctgttccactaccaccagtgaggtgctctgccatctggccaacttatgatccagctctaaaatattagcatgaggcccactttctttgccaataaccattatcaactattatatgttgtttacctggaaagcagacattgaggtggaaattggcatgtggaaatgtattggggaatgcatatcagtgagggaaggaaggagtcagaattagactaaaggaaaacttagcttcaatgaagtcagaacaaggccttgtgaaactggaattacttttctgatttatctttagttggggaaaaggatagggaaaatacaactccaaataggccagtcactggttttaggctgaccctagaaagaatgtgtgatcttgtcagccatatctggaaagagctgcca

SEQ ID NO: 509434 - DNA, 575 bp, Homo sapiens
ctctgtactctctttaatcatcttcatcgtggtctatagctctattttccttccatttcacttttgcctgtgctgcttagagaggaagatgcatgcagaaaaactgatagatccccctcccctcacattttcccagatctttctattctacaagtttaaattcattccatcattcagacatttatttattcagtaagtatgtatttgacttctgtcatattcaagaccttagatgaggttctggggatatagagattagcaacaggtaatttatgcttttaataaatttatcttttaataggccagctaagatagcatcatgacaaggtagttgcctgtgacaagacccataacacagagacttaaaaatgtgggcttagagtcaagtagatacagatttggatcttgatttctctacttactagctaagtgacagtatacgggctaytaagctcctaaatacctactcccagatatcctcaaactttaattgtcttatctgtaaaatgggagtaatattgtaccttcttcatgaggattcaataaatataaggcctaagtcacaatgacacttt

SEQ ID NO: 509435 - DNA, 537 bp, Homo sapiens
aattccttacttaaaagtcataaacaaaatgaaatgattgttttaagccactacattttggggtaatttgttacatagccatggatgactggaacaaataattactatttagtgaagtcctttcacaaggtccagctcctgccctctttctaggttcctcttaacatcttcccaagctctccacacccagccacttaggacttccttcatttcgttaaaccttttgatttttacctctgggccttcacacatgctgttcacactgccggacttctcttttcttgtcctccttctccccttccacttagctgactcctgtttatccagggatgtgctggtaagtgattaacaacgggatttctagagaagaaagtccctatgtacggtgttcrtcaattcctatggtataaatattcctgccctggctggtttgaagataccagtgtgatgtcacagaacatagggtattgttatccatgattggcagttgtggaaactgaagcccagagcagttcagtcacttttctgggtagatcc

SEQ ID NO: 509436 - DNA, 537 bp, Homo sapiens
aattccttacttaaaagtcataaacaaaatgaaatgattgttttaagccactacattttggggtaatttgttacatagccatggatgactggaacaaataattactatttagtgaagtcctttcacaaggtccagctcctgccctctttctaggttcctcttaacatcttcccaagctctccacacccagccacttaggacttccttcatttcgttaaaccttttgatttttacctctgggccttcacacatgctgttcacactgccggacttctcttttcttgtcctccttctccccttccacttagctgactcctgtttatccagggatgtgctggtaagtgattaacaacgggatttctagagaagaaagtccctatgtacggtgttcgtcaattcctatggtataaatattcctgccctggctggtttgaagataccartgtgatgtcacagaacatagggtattgttatccatgattggcagttgtggaaactgaagcccagagcagttcagtcacttttctgggtagatcc

SEQ ID NO: 509437 - DNA, 598 bp, Homo sapiens
gtgggactcctgagaacatcctttcatctcccatcctgtttcctcatctctaaaatgtgggtaagaatccccatcttcaggagttactactgagacttcaatactaatgaataaatgaagatactttgtaaactcccagatattaggtaaatgcactgacttattatcaagaaggaaggacagcctttgtagaggttctagatcagccaggctcagaaatgttactacttcaggggcaatggcaagaacacatagactttgaattccakaaaaagaagaaaacatagaaaaagataggcttcattacttgaatatccagtaaatcaaagcataagtgcatcagcctgaacaatctatgtatctctggagagaactaaggtataggattgtcatttaaatatgtggaaggatatgacttggcatgggtcaaagagtaggtttatctgagaatcggaactggaagccaggactactggaacccacttcatgactctttctcctaaactacattacgtaggagatatgaaacagtagtagcatgagaaacagataaggacattgacatcgcattgctgctgaatggttgttgagtagtgat

SEQ ID NO: 509438 - DNA, 647 bp, Homo sapiens
cttttatcactgttttactgtgtgcagaaaacagtgataaaagatataaaatacaaacamtattatatatccactatatagtggcctcctctaaggtaaggtttccccaatggggatggtaggtggaagacagtaaggcagaaattttaggatttcagatggtattaggtactattacctttgaaaatctcctctttctccctgcagcataacacaaccagaaatgtaagcacccagagggcaggaatttttatgattgtatttactcctgacttccagtgtgtggacaagtgattggcaccgagtaagcattcaacaagtatttgatgagtgactgttgaataaatgatggctccatgcaagcatttctctttccttctttcctgttgaaaaataattgttataaagaaatccgtaaggtatattctatttcccaaagaaggatatactgtgtttaaaattaagcatcttacctaagtttacacagccagagaattactgaggccagatcccaccccagacttacagtttcttattctttctactaagttatactgccttgatgaaccttttaaatctagaggcatgggtctactcctgtgaacaaagacaagtctgtgtgaatctttctggtccttcaacttcca

SEQ ID NO: 509439 - DNA, 629 bp, Homo sapiens
tatggcatggaaggtggacctgactctggaccttcctatcatagaatcagtatagagaattcaattatattttttaaagyctgattatgcaaaacacttgtttcttaacaaaaaataagctaaaggtattttttagtgcattgctacatttgcatttttaaattatggtagttatttttattgcgttaagtaccttattctatctcagcgaagagtcgtggctgttttaagtaaacaagactgttacaagaataccctactcttcttccatggtgagtgcctgtattcaaaccacagtgccatggaaaataacttccccaacatttactctcttggccacaagtgtctgtttagagaagtgtctggcttggtctgaacaacacatccccaagcaactaagtggaaacccaggtcgataacatgagctaagatgaggattctaacatttgcgatgatggcccacactgaattttgataatctcaaaaaaacaaaaaaaaaacaaaaaaaaacacaagcaattccaattctggattcacatgtacacaaagatacatatgcaaggaagctcatcttaacattgtttgtaataaagaaaagctgaagctctccactataaaagagactcagt

SEQ ID NO: 509440 - DNA, 629 bp, Homo sapiens
tatggcatggaaggtggacctgactctggaccttcctatcatagaatcagtatagagaattcaattatattttttaaagtctgattatgcaaaacacttgtttcttaacaaaaaataagctaaaggtattttttagtgcattgctacatttgcatttttaaattatggtagwtatttttattgcgttaagtaccttattctatctcagcgaagagtcgtggctgttttaagtaaacaagactgttacaagaataccctactcttcttccatggtgagtgcctgtattcaaaccacagtgccatggaaaataacttccccaacatttactctcttggccacaagtgtctgtttagagaagtgtctggcttggtctgaacaacacatccccaagcaactaagtggaaacccaggtcgataacatgagctaagatgaggattctaacatttgcgatgatggcccacactgaattttgataatctcaaaaaaacaaaaaaaaaacaaaaaaaaacacaagcaattccaattctggattcacatgtacacaaagatacatatgcaaggaagctcatcttaacattgtttgtaataaagaaaagctgaagctctccactataaaagagactcagt

SEQ ID NO: 509441 - DNA, 474 bp, Homo sapiens
ttcttttcctgttttcctcccatagatcccgccttccatggacctttctgtgactctgttgttatagaatttgtctagcatcrtggtcatctgattttgttctttcttatctttcagtagcaggtgatcatttctgttctccacctatccttctaccaccctaattcgcaatattttttattcttccagatctttcacatccacaatattccttcaagataatgggatggggttgggatataatgggcgggaggtgccatttgaaaagaatccctcagagcctgattcatctcttcctctaggcttcagagtgctgcttctttctgggacattcccacctggaggtgttgccctaaactggtataagctgatttagatgtacagtgatggcagaggcagatttattttgatagcagaacttatcaggcaagctctttagaccccatttctactaatgttgaaatgtgggaatgt

SEQ ID NO: 509442 - DNA, 474 bp, Homo sapiens
ttcttttcctgttttcctcccatagatcccgccttccatggacctttctgtgactctgttgttatagaatttgtctagcatcgtggtcatctgattttgttctttcttatctttcagtagcaggtgatcatttctgttctccacctatccttctaccaccctaattcgcaatattttttattcttccagatctttcacatccacaatattccttcaagataatgggatggggttgggatataatgggcgggaggtgccatttgaaaagaatccctcagagcctgattcatctcytcctctaggcttcagagtgctgcttctttctgggacattcccacctggaggtgttgccctaaactggtataagctgatttagatgtacagtgatggcagaggcagatttattttgatagcagaacttatcaggcaagctctttagaccccatttctactaatgttgaaatgtgggaatgt

SEQ ID NO: 509443 - DNA, 461 bp, Homo sapiens
ctgactgatacagtcttgctctatgtaatttgaagttccacctttccatcttgggggactccacactctaactcctttcaggaataattgaaatatcactcagaatgaagcagactgctaaaattcatggcataccatatacaaaaaaaaaaaaaaaacaccaccaccaacaacagccagactcttgcttgcccctctcaactccttaaatcagccagagtcttgacccttcatcctctatgttaacagtgggctttccaaaaacatagacttggaataagttggggtttaatagtcttatgctataataccccagctaagtgattactcaactcatttgggtttcaagattgagaaactcattgttttttgaggtagcttcatctgtcttcaaagagctctaattgttaacaataacaaaaacaaygacaatagctcatttttaaaattgagagtttatg

SEQ ID NO: 509444 - DNA, 578 bp, Homo sapiens
gctggaggcaagtagcattccccacaccatccagtcttgatgcataatccggaacttggcataggaatagaatggtggtggaagttctgatctggctgactatgaggaacaagcggttaatctaatataaacaagttatatggcatttttaatttgagtatgaatacaagtctattttaaagttgtttgcctggtcactgccaggcatctgctagctaccgtgttttcagcttctttctctcacaaatttctaagctagaaatctacagataagattttgatattttgatattagggttcaaaggattattattaaacaatgcccagggagagacaggccatctttatgaagcagcagtttgggtgttgccttcygattctctttcaaattttacaacagagcacttgcaggctgggatgctgctgcttctcacagtgtaccttcagagaaagtatctctttccaagcctgtatatcattcttttcttctccaacaattcaggacttgtgataattttttggacatcaagcatatgtatgcagaactcttgcacattatgcaaaaggcaggactttca

SEQ ID NO: 509445 - DNA, 578 bp, Homo sapiens
gctggaggcaagtagcattccccacaccatccagtcttgatgcataatccggaacttggcataggaatagaatggtggtggaagttctgatctggctgactatgaggaacaagcggttaatctaatataaacaagttatatggcatttttaatttgagtatgaatacaagtctattttaaagttgtttgcctggtcactgccaggcatctgctagctaccgtgttttcagcttctttctctcacaaatttctaagctagaaatctacagataagattttgatattttgatattagggttcaaaggattattattaaacaatgcccagggagagacaggccatctttatgaagcagcagtttgggtgttgccttccgattctctttcaaattttacaacagagcacttgcaggctgggatgctgctgcttctcacagtgtaccttcagagaaagtatctctttccaagcctgtatatcattcttttcttctccaacaattcaggacttgtgataattttttggacatcaarcatatgtatgcagaactcttgcacattatgcaaaaggcaggactttca

SEQ ID NO: 509446 - DNA, 548 bp, Homo sapiens
tattttttaataaatattattgctaaactactatcccatttcttgaaaatacgaacatgtgctttagtttagagacagttaccttaagaaatgggcatttgggtcagcgctggcactatcataggatggtaatcgggttctaatgcaagtttgtaactaaacagaaattaaarggggaagtcattttctactactctacaaagaattaccagaattacataggggaaaacttacttgcccaaaagggactttttgaacttgttttgaacttaaaatcacttagaaacccattagaaaactggggtgaaataatagacatagaaatggaaatacccagaaaagcaagtgcaaatgactctgaaatgtagaaaaagctgctcaattcataataagagaaatgcagatttgtcttacactctgattgtctaaacctattattttgggagaggataaaaaatattagtaatacactaaccagtgtagaataaaggaaagaataaagtggataagctggtgagaataaaggaaaatagaccttctaatacaca

SEQ ID NO: 509447 - DNA, 699 bp, Homo sapiens
gctgaaaactcataatgctctgaggctgggattttcagtgagaatctctatatttagagtgcccgtcctgaccaatttgggtttcaggatgctcagtgattacttactctctgtctgtgtaataccatctgttttgtatattccagaaattactgaagctttctggcccattgattgttttttcccgtttctaatgaagccatgggtgttttttcctgctgtattaaaacataaacaattcataaatggcaccatttcacaaaatggacagaatacagttttcaacttttataggagacggggcagatttcttaaactacatctcacrgtggacaataacagactacagaaatgcctaaaatctatacatttccataaagatggagacattttgcataaaatctaattaatggctcatcaaattaatgtacattagctaatgtagattgcaattccaatattatctaagatcttacacttgtggataatttagtatatatttaaatgctgtttccaaaaaaagtggggaataagtaaagcttacagctttaatcatgatgatggggtaatttctttgataaatccaaatatcaaatggatttaatattacccttttggagaggatttttcattgtttccaaaacaacttgttttttctttaagacccctgaaagagaaggctatgagtgccttcaaaag

SEQ ID NO: 509448 - DNA, 601 bp, Homo sapiens
ctgaaaactcataatgctctgaggctgggattttcagtgagaatctctatatttagagtgcccgtcctgaccaatttgggtttcaggatgctcagtgattacttactctctgtctgtgtaataccatctgttttgtatattccagaaattactgaagctttctggcccattgattgttttttcccgtttctaatgaagccatgggtgttttttcctgctgtattaaaacataaacaattcataaatggcaccatttcacaaaatggacagaatacagttttcaacttttataggagacggggcagatttcttaaactacatctcacggtggacaataacagactacagaaatgcctaaaatctatacatttccataaagatggagacattttgcataaaatctaattaatggctcatcaaattaatgtacattagctaatgtagattgcaattccaatattatctaagatcttacacttgtgrataatttagtatatatttaaatgctgtttccaaaaaaagtggggaataagtaaagcttacagctttaatcatgatgatggggtaatttctttgataaatccaaatatcaaatggattt

SEQ ID NO: 509449 - DNA, 470 bp, Homo sapiens
caactcattgatcctttatttctttatctgtgattttggagatattaatgatacatatgtcataaggttgtgaatgaagcttgagtaggacaatgcatgtaaagagcttagtaagttgcttgactcaagataaattgcttgaaacctaaagcacagagtagtgtattttctgctacagkgttacaaagatgtttcttgacaaagtcagaattggaatgcaaacatatccataacaccaaatctgatgttcaaaattcatataccctatccagtacaaccttctcaggatctccttgctggctctcaatgcttgcttactgagttttaggaatcaaattctgtacaacctcaaacatttactacagtgtcatttctcctatcttccaggagcagagcttcatttccccttttacatttgtgtcctttttagtcatcactgccatcccaatttaattctgtcttcttatcac

SEQ ID NO: 509450 - DNA, 638 bp, Homo sapiens
gttgccaagagtatagcaacactgacaagactggatttcactatttcctctcctgtccatcaagtagagatgctagtgagcagtgaaacggtcataatgcaatcctagtgaaagaatgggaagctgcttggagcttcgagcatgggatctcatagaaaatgaaccatttttccctggataattagcacttggccaaaatgactgcttcatgtcccttctacttacctgcaatagactacaagatggcaatctgggagaggtcactttcagagtgctttggatactgtaaaaatacaatgtctataaaaggatatttgaataaacagccaggcatacagccttgttctcatttgctctgggaaattcatatgcatgttagctaaacagcaaagcaggcttatttgtctggtaytcaagtggtgcttgcctgccggactacctgccttcttcctttctccccctctctttcacttctgcattccttctttcctttctttttttttttaaatttcttattttttttttttgtgagggggcagggggaggttataccaatctaaactctttttgtatttggtacctgaaaaaagaatgaatgctcatgggttcacgccattctactgcctcagtctcccgag

SEQ ID NO: 509451 - DNA, 613 bp, Homo sapiens
gactggatttcactatttcctctcctgtccatcaagtagagatgctagtgagcagtgaaacggtcataatgcaatcctagtgaaagaatgggaagctgcttggagcttcgagcatgggatctcatagaaaatgaaccatttttccctggataattagcacttggccaaaatgactgcttcatgtcccttctacttacctgcaatagactacaagatggcaatctgggagaggtcactttcagagtgctttggatactgtaaaaatacaatgtctataaaaggatatttgaataaacagccaggcatacagccttgttctcatttgctctgggaaattcatatgcatgttagctaaacagcaaagcaggcttatttgtctggtactcaagtggtgcttgcctgcsggactacctgccttcttcctttctccccctctctttcacttctgcattccttctttcctttctttttttttttaaatttcttattttttttttttgtgagggggcagggggaggttataccaatctaaactctttttgtatttggtacctgaaaaaagaatgaatgctcatgggttcacgccattctactgcctcagtctcccgagcag

SEQ ID NO: 509452 - DNA, 638 bp, Homo sapiens
gttgccaagagtatagcaacactgacaagactggatttcactatttcctctcctgtccatcaagtagagatgctagtgagcagtgaaacggtcataatgcaatcctagtgaaagaatgggaagctgcttggagcttcgagcatgggatctcatagaaaatgaaccatttttccctggataattagcacttggccaaaatgactgcttcatgtcccttctacttacctgcaatagactacaagatggcaatctgggagaggtcactttcagagtgctttggatactgtaaaaatacaatgtctataaaaggatatttgaataaacagccaggcatacagccttgttctcatttgctctgggaaattcatatgcatgttagctaaacagcaaagcaggcttatttgtctggtactcaagtggtgcttgcctgccggactacctgccttcttcctttctccccctctctttcacttctgcattccttctttcctttctttttttttttaaatttcttattttttttttttgtgagggggcagggggaggttataccaatctaaactctttttgyatttggtacctgaaaaaagaatgaatgctcatgggttcacgccattctactgcctcagtctcccgag

SEQ ID NO: 509453 - DNA, 604 bp, Homo sapiens
acttgtaactgagctaacagttcagtttgacttgaagttaggtctttcttaggtcaaagagctgttggcaaaacwatctcagatctgtggcagcagatgtaacagggaccatgctaacagaaaaagaacttctataaggagcccttggggaggcacagctagctgctggcctggacatcttcatctgggctgcaggatgatggcctcccaggcccattggttctctctaattcaattagctctctttagcatacgtctttatgctggaatgctatacacataatataatggcaatatgaaaagaagccttcattcaaatgtgccacaagttggcaatggtgggagttgccatggcttccttatttaagttttggcaaatccatggccaggaatgactatggaagacattttgtcctatttctgttacttttcctatttcttacaatcgtactgtgatataagaatctcaggctggtcgacattccatgctgatttatatcactttgagtatgttctcagtttcaaaggtgttatacttactgcatatttcttaacctgagcttgattaaaaaaaaaaaaaaagtagagatatcctgcctcaagt

SEQ ID NO: 509454 - DNA, 558 bp, Homo sapiens
agaccatctgccatggaatacctaaaatagttagtagctggctctttagagaaagaatctttacatccttggtctataggatctttgaactgctaaagactttcttagcccctaggagttgtgggaaccygaagcagatgtccagggggccatgcaggagacttgcacacacagcaaaaagcaggccctagacccccttttagtcatttcccgtcctgctcactcctcaaaagaggacccttactcccaattgcataaagttcaatgtccagattcttaagattaaaagaatagctttcatctagagcatccagctattttgtgccaaatgattgttttgatttttttaaaaagagcttaattcttctggttttgtgcatttttattaatctctgaccagtattcaaaattttgggttggtcactgacttttgtgtaaatatgattaaagcaatggaccctcctcaggaaaatgtgcctacataatgcaaataacattttatacccaacttttgagggctgtagggagtagacaacattaagatttcagaacacatag

SEQ ID NO: 509455 - DNA, 475 bp, Homo sapiens
tcccattttgacatctttgaaattgatggtgtatcataacattgcatcttcgaactgatgacatcttaggttcagtaaaatatagtaactgatgcaatcctctaggcaacttcctgaggagatattattactacgtcttacacatgaggaaactaaggtatagagagatcttamgtaacttatccaggtgatgtagctcataaaaacgagagtttggatttgaaagcaagcagtctgactgtggattcaaattcttaattactatgagatattgtctcatgaactcatttaaatacaactcaagtgccatgtgagcaagcctgtttcataaggaactccctactatcagtttcatgagtgctacagcagtatgaaggcattaatatgcgtaaaaagaaaaattagtattgttttgtgtatgtttacagaaaagtgtatcatacgttgaaaatctattttgtgttttcactcacta

SEQ ID NO: 509456 - DNA, 475 bp, Homo sapiens
tcccattttgacatctttgaaattgatggtgtatcataacattgcatcttcgaactgatgacatcttaggttcagtaaaatatagtaactgatgcaatcctctaggcaacttcctgaggagatattattactacgtcttacacatgaggaaactaaggtatagagagatcttaagtaacttatccaggtgatgtagctcataaaaacgagagtttggatttgaaagcaagcagtctgactgtggattcaaattcttaattactatgagatattgtctcatgaactcatttaaatacaactcaagtgccatgtgagcaagcctgtttcataaggaactccctactatcagtttcatgagtgctacagcagtatgaaggcattaatatgcgtaaaaagaaaaattagtattgttttstgtatgtttacagaaaagtgtatcatacgttgaaaatctattttgtgttttcactcacta

SEQ ID NO: 509457 - DNA, 511 bp, Homo sapiens
cagccatctcaaacttcagcaaccaccatcctgttcagccagcaggcatcaacatcaaggcaagaccttccaccaacgraaagattatgactacgtggtgcttcagatgattgtaagcattttttagtaataaaatatgtttaaattgagatatgtacattgttgttttatacatgatgctattgcaaacttaatagactatagtacagtataaacataacttttatatgcactagaaaacaaaaaatgtgtgtgactctctttattgtgatatttgttttattgtggttgtttggaacttgaacttgcactaactctgagtcgtgcctgtacagaagcttgggaaacatcccagaacttgtaaatcaaaatttgcattttaacaagatcccctgattctcagacattatagtttgagaagcaatgctccggattctcaaacatgatagtctgagaaacagctagtaataatttagctttcaattttcattagaccatgtacatgagcagt

SEQ ID NO: 509458 - DNA, 658 bp, Homo sapiens
aaactaaaatatcaactaacatttgtattgaactatacttattcacaataaattctttgctgagtcgaataataatcaaatacttacttataccctaatattgtgacacaattgttagcaacaaaatttgatgaaaaaaatagtgaatttcacaagtttacgtagattttatgacaatatttttactgggaaaagagcaaatggagatataactccatttgtcaaatcatgcttaaattgcaatcagagatcagctatgcatacataaaccaagaaagaattatgtgagaatcaattggttataagacatttgcaatgaaaarttttatatattttactgttactttaagttgttacacaaattttatatcagtgaaaattataataaacatatatatatattatattagggttttccatggaaatagaacagggtgtgtctgtgtgtgtgtgtgtgtgtgtgtgtgtgtgtgtagaaagaaagagagaccgatttatttaaagaaattggctcacacaactgtgaaggctctgtgagtctgaaatctgcaggagttacagttatagtccaaaataattcctcctagctcagtggaggtcagtctttgtctattaaggtcttcagttaattggataaggtccacccatatgtgaagaa

SEQ ID NO: 509459 - DNA, 658 bp, Homo sapiens
aaactaaaatatcaactaacatttgtattgaactatacttattcacaataaattctttgctgagtcgaataataatcaaatacttacttataccctaatattgtgacacaattgttagcaacaaaatttgatgaaaaaaatagtgaatttcacaagtttacgtagattttatgacaatatttttactgggaaaagagcaaatggagatataactccatttgtcaaatcatgcttaaattgcaatcagagatcagctatgcatacataaaccaagaaagaattatgtgagaatcaattggttataagacatttgcaatgaaaagttttawatattttactgttactttaagttgttacacaaattttatatcagtgaaaattataataaacatatatatatattatattagggttttccatggaaatagaacagggtgtgtctgtgtgtgtgtgtgtgtgtgtgtgtgtgtgtgtagaaagaaagagagaccgatttatttaaagaaattggctcacacaactgtgaaggctctgtgagtctgaaatctgcaggagttacagttatagtccaaaataattcctcctagctcagtggaggtcagtctttgtctattaaggtcttcagttaattggataaggtccacccatatgtgaagaa

SEQ ID NO: 509460 - DNA, 658 bp, Homo sapiens
aaactaaaatatcaactaacatttgtattgaactatacttattcacaataaattctttgctgagtcgaataataatcaaatacttacttataccctaatattgtgacacaattgttagcaacaaaatttgatgaaaaaaatagtgaatttcacaagtttacgtagattttatgacaatatttttactgggaaaagagcaaatggagatataactccatttgtcaaatcatgcttaaattgcaatcagagatcagctatgcatacataaaccaagaaagaattatgtgagaatcaattggttataagacatttgcaatgaaaagttttatatattttaytgttactttaagttgttacacaaattttatatcagtgaaaattataataaacatatatatatattatattagggttttccatggaaatagaacagggtgtgtctgtgtgtgtgtgtgtgtgtgtgtgtgtgtgtgtagaaagaaagagagaccgatttatttaaagaaattggctcacacaactgtgaaggctctgtgagtctgaaatctgcaggagttacagttatagtccaaaataattcctcctagctcagtggaggtcagtctttgtctattaaggtcttcagttaattggataaggtccacccatatgtgaagaa

SEQ ID NO: 509461 - DNA, 524 bp, Homo sapiens
ccccatgatggactcaccaaggaacaaaaagacagccgggtttcatcagtgaggaaggagatgggaactcagtggctacccaggctccacgggccatgtgtgaagtggggaaaatcattgccttgcatgtcagggtttcccattgaacaatcttgtcatggctcccacaggcttggcattgctatcctggctaaacaacaccatctagaaggccttggttacctcccaaagggcagggccacctgggtctgagaggctcgtccaaggaagaacagagcctgccagtcctcactccaatcctccttcccagtgacagcaacagcagcggctctggctcatgratacccaccttgctgcaggctctgctgggtgcctcaggcaccctgagttctcttcaccagccagtgctacaggtggtatttggatgtggtcgccattttactaggggagctggtggttcagggaggggcagggcctcccaagctcacaagtctggtaggtggaatctggacccagggctcctg

SEQ ID NO: 509462 - DNA, 605 bp, Homo sapiens
ctgatgaggaacctgaggccaatgctaaggttaaagttaaggttaagtgatttgttccrtatagcagagcaagttaatggcacagtcaggaccagaaactagttctcttgactactactccaggatatcatagactttatatttctgtttccaatggccacgacttcccaggccctttgcaccctcagtttttgtaccaactaaccacatatcatacttgtgttctgttaaagaatggaagaaaattagtaactaattcctccttatccccacaaaccacctctacctagaaccaatgcagtctgccaaaaagcacagcattgataatgttagtcttcttttgaagaaaaacaacaaataaacaaacataaaagctttctcctaacccatccagatagtacgatatttatttgagtttagaaatattacttaaactctcctatggtgtacagtgtttttacagaacacgtataacttcccccaaagaacctgggaagactctaagagttgtgaatgttctctggtcagtggcactaagaaaggatgatacaaatacctcttaggattttaaaatcccaagtcagggacaatttttagaagtgtta

SEQ ID NO: 509463 - DNA, 622 bp, Homo sapiens
tatttctgctgataagctgagctcacaaaccctcccaatcattgcagctcatgaaccaaagcttataaagttaataactggtgaattttcaggtaactttaatcaatatgtagagacaaactcaggcttaaatgtaaaacacttttggccaagaattttgtaggctgtgtccaaatatttyagaccattcacaaaatggttcattttaactgtgtcacataactctgaaattaatagttctaataactgaaatagggcatagtagcaacagaatattttatttaatagtttctggtcctcaagtaaacccatcttccctagagaaaactattaagggtgctgttattatgatagcataattgaatggtcagaaaggatcagcttctattaataggcctgggtagaaatagtcataggctaagatgaaaaacttcatctacactgatcattaattgaagtaaatgacagataattctaattttaaaagatggagagtaaaaataataaagcctaatctaatctagagcaattgcttatgttgatcagtttcattacataattactgagttctctattttcttttgtttgcatagatcaggcttagtttataaagaaatcatag

SEQ ID NO: 509464 - DNA, 591 bp, Homo sapiens
atttttcttttctttttttggtatgttttgtagagacggggttttgtcatgttacccatgctggtcttgaactcctgggctcaagtgatctacccacctcggcctcccaaaatgctgggatttcaggcatgagattacatttctatgtactctttaataatccgtttttgtcatttaacattatattgtaggcatttttccacaagagataaaaagcttcatcatcatttttaatagttggacgataaaattttctttaaatgcattgttccagtatcatctatgtgttccagtaagtcagcataaagatataaaaacttaaagctgatctgaaaagtacaggtgctaggtgaaagatygaaatacgagataggggaatgctactgacaggatataaacaagagacaagacagaaagaagttaaggttttaatggccactgacaaccatagaagaggtgtaactctggtggtagatacaaagaaagaggttaggagagtgcagatatattatttttatgaccaggttcacaagcatgcattgattaattagtttcactgaatattcccagtagatgcgaaagagccaaatg

SEQ ID NO: 509465 - DNA, 591 bp, Homo sapiens
atttttcttttctttttttggtatgttttgtagagacggggttttgtcatgttacccatgctggtcttgaactcctgggctcaagtgatctacccacctcggcctcccaaaatgctgggatttcaggcatgagattacatttctatgtactctttaataatccgtttttgtcatttaacattatattgtaggcatttttccacaagagataaaaagcttcatcatcatttttaatagttggacgataaaattttctttaaatgcattgttccagtatcatctatgtgttccagtaagtcagcataaagatataaaaacttaaagctgatctgaaaagtacaggtgctaggtgaaagatcgaaatacgagataggggaatgctactgacaggatataaacaagagacaagacagaaagaagttaaggttttaatggccactgacaaccatagaagaggtgtaactctggtrgtagatacaaagaaagaggttaggagagtgcagatatattatttttatgaccaggttcacaagcatgcattgattaattagtttcactgaatattcccagtagatgcgaaagagccaaatg

SEQ ID NO: 509466 - DNA, 382 bp, Homo sapiens
tgctttcccgatatattcaaatacttttagattctttaaagcctaccgatgtgagaatttctctaaacccyagttgaagttaaaccttctcttattttatatgaatataaataaaagcagtaataaaattctatctttcaatgcaaaaagttgtatacttaacgctctcctcaacaagattgtgaagtttttgaagtcagaatacatttatgttcatcatgtcacatttagtactccaaaagctcggtgagtatcagctcaattaaacagttctataattctataagaaagaactagaattagaagagtatttacccaaagcatttattatgagacggacacagagagatgcctttttacagagagatttacagagagatgc

SEQ ID NO: 509467 - DNA, 619 bp, Homo sapiens
ctgggctgcaaagcaccagctcctgtcctccacaccatgctgtctttttattatgagtttgtgcctcattatttggaataaaatccttgattcaacgatattcagtgtagacccttcacacggggcaggacagatgaccccagttgtagcacgaaggcacagaatcagaactcaaagtgcagaaacagagcttaatgccaggaaccagttggtggctgggtgaggagggcaggagggagcacacaggagacaggtgcaaaaggattagaggggcatgagctaaatcacatgagataaatgggctcagcamcccacccacgtcctctgagcactcacaccccttgggaaataggggttgatggagtggtagcatcctttctgtgtattgccagaggtggaccctggaaccagactgctgggttcaactcccagctccataacttgccagttgtgtcactgtgggcaagtttctgaacctctcggtacctcttgggtttctgataagaagaaaagggggcaatgaactgtgcttgtccaaggggcttggtaagaggattaaatcacttattatttataaagtgctgagaacaatgcttggcccttagctgtgtgaaagtag

SEQ ID NO: 509468 - DNA, 619 bp, Homo sapiens
ctgggctgcaaagcaccagctcctgtcctccacaccatgctgtctttttattatgagtttgtgcctcattatttggaataaaatccttgattcaacgatattcagtgtagacccttcacacggggcaggacagatgaccccagttgtagcacgaaggcacagaatcagaactcaaagtgcagaaacagagcttaatgccaggaaccagttggtggctgggtgaggagggcaggagggagcacacaggagacaggtgcaaaaggattagaggggcatgagctaaatcacatgagataaatgggctcagcaacccacccacrtcctctgagcactcacaccccttgggaaataggggttgatggagtggtagcatcctttctgtgtattgccagaggtggaccctggaaccagactgctgggttcaactcccagctccataacttgccagttgtgtcactgtgggcaagtttctgaacctctcggtacctcttgggtttctgataagaagaaaagggggcaatgaactgtgcttgtccaaggggcttggtaagaggattaaatcacttattatttataaagtgctgagaacaatgcttggcccttagctgtgtgaaagtag

SEQ ID NO: 509469 - DNA, 504 bp, Homo sapiens
aatatttttagaagtcaatctggaggcatctactaaaattaaaaacaaacagaaaactaaagatacatacagatttttgacacagaaatcctggtcctagaaatcaatcacgtagaaataaaagaggacatcgctttgaatatatgtgcaagagtgtttactgcagcactatgcatagtggcaaaaaaagccaacaacaactaaaaacaatttgaatgaataccaacaggaaaattattgaatattttatgttatatagataccatggaataatatgttaaattaaaataatgggaagtagtgagctgagattacaccactgcactagccttggtgacagagccagactctctctctctctctgtctctctctctgtctctctctctctctmtatatatatacatatacatacacacacacacacacacaattttatatgtatatataatgtatgatgttgtaaaagttgacttggaggaatgtgttcaatgaaagcatgagag

SEQ ID NO: 509470 - DNA, 606 bp, Homo sapiens
acaatgtggaacatagtatctaatcatatgactattaggcagagaaatgaagaaaatatgtttgtttttgctggattattcagtgtggagaaataacaatctaccacactcattatagtttactctgctagtatccacatttttagattctggaagctacacaatatcaggaaagagttctgaacttcattagatagatggaaagtcctattgaaatttaattttgggttctaatatttccaaaaaatatgtacaataacgtgataacttgtgataatttttttttctagaattgacaatatggttgataatatgttcaatgcctacctcaatcttaagaagcaatcactttaagagtcacataattgcaaaataaaatacaataaagttccaggtatgcaaaataaagcctgatatatgtgatcacattttagatcaagatataggttgagtatcccttatccaaaatacttgggaccagaagagtttcagattttgaattttcaaaaaattttggaayatatatatattatacttaccagttgagcatccctaatccaaaaattcaaaatctgaaattatctaatgaatatttcctttcaacat

SEQ ID NO: 509471 - DNA, 630 bp, Homo sapiens
tctggtaggagtgacagagtagaattgccctaagatatgattctgagctaggttaggaagattgatttggtaggtaaggaggcagtgattgttagcccagagaaacaacacagggtaagaagttgagttgatgataaactcaactttcaacacctctcctctccccaggggttgaggggtggaactgaaagccccaactcttaatcacatggttggtttctctggcaaccagcctccatcctgagtttatccagaagccccaagccatcatytattaaaaagacacatcacttcagagatctccaaaattgtgaaagctgattgccaaggaagagggtaaagaccaaacatatatagctttatcaattttattatgcaacacaatgctttgagatacatatataataaaacggtttctacagtgaaacaaattaacatatcatctcatatactcatctttttcctctgaggcagagcagctattatctactaatttaataaaaatgttgaatacaatacactattattaaacatagccctcatgttgcacactatttattagacttgtccatcctacatgacttctatttcgcatcttttgatctacatctccctaattccttctcttcc

SEQ ID NO: 509472 - DNA, 620 bp, Homo sapiens
cctgactcaataccctagcactgagacccaagtcacagcgaaaacaacaggctacaattctcaaacgactaaatgctggcctggagtaatcattaaagagccaaaacccaggacwtgagcccaagagctacctattttgtcacataaggagcagttcaaatatacagagctcttaaaaaacatatctaataaagcaaactcaaaattaaacacattctagaaaagcgggcctggcctgagatcctatattgactgctccagcccaagctgaagctaatcctgctgtctcccatccacaaaattccttctagcttggctgggtcctccttcattgttgccctaactgggaaatggatgacaatggccagaaaggaggggaccagggaagcttcatttcctatagaaattttttcagggaattcaagatcgacacttagatgctaaggttagcttcagagctgccaaggctctggctgactggaattctttcagtcccatcacaccaagaacctgactgctacttggatagagaaatgaaaggacaggggaaggaggggcatactattaagatcaataagaagcatcgctgggcctatatagctaattagtctagttccttg

SEQ ID NO: 509473 - DNA, 575 bp, Homo sapiens
ttttataccaccttgaggttacagaaagaatgagggcttggagtgtggcaagacaggttatggtggtaaatcaggttatggtggtgagacagattatgagagagagagaagaggaggcccagctagcacaggtggtcctgtcakgtagatgaaacctcacaggtcgcagccctgagagagaatagatggaatatgtttctttctgaccttctaaggtgtcagactctcaattaatctttcctgtgtctggacaaggtagggcctcagagaaatgtctccacctcatcaatgcatattttctctacagatgcaaatctgccccacacagcttctctcagctattcttgtatttccagcccttctgaaaaccatctgaaatatgtcagagaagtatatttttgggtgaaatatttttgtttccttcataattttgccaaggcagcaggcataagctggaatttgtggtcaccccactcatggagtttttctgtgaatcaaaagaaaccttgcctgtaaagcacctaacagtgcctgacagtatgagctcaatcaagcttaactattatcatcatttt

SEQ ID NO: 509474 - DNA, 575 bp, Homo sapiens
ttttataccaccttgaggttacagaaagaatgagggcttggagtgtggcaagacaggttatggtggtaaatcaggttatggtggtgagacagattatgagagagagagaagaggaggcccagctagcacaggtggtcctgtcaggtagatgaaacctcacaggtcgcagccctgagagagaatagatggaatatgtttctttctgaccttctaaggtgtcagactctcaattaatctttcctgtgtctggacaaggtagggcctcagagaaatgyctccacctcatcaatgcatattttctctacagatgcaaatctgccccacacagcttctctcagctattcttgtatttccagcccttctgaaaaccatctgaaatatgtcagagaagtatatttttgggtgaaatatttttgtttccttcataattttgccaaggcagcaggcataagctggaatttgtggtcaccccactcatggagtttttctgtgaatcaaaagaaaccttgcctgtaaagcacctaacagtgcctgacagtatgagctcaatcaagcttaactattatcatcatttt

SEQ ID NO: 509475 - DNA, 598 bp, Homo sapiens
ggcacgcaccaccacgcccagcaaatttttgtatttttagtagaaacggggtttcaccatgttggccaggatggtctcgatcttctgacctcgtgatctgcccgcctggggctcccaaagtgctgggattacaggcrtgagccactgcacccacaaacaccttctttacaggaaaacactagcagaaaattagctaagaacttggacagatacttcacaaaaaaaagaaagaaatgagcaagcttttgtacacaacattattcactggttaaagaattctaaatcaaagtgacgtgccatttttagttccccagatagacagtgactacttccttcaggtcttgactctgaagtcactgtcagtgaggccttcctgttcatcctgtctaaaatttcaaaccctaacccctgcatttcctagttttcctccttagcacctgccatgaacacgctatgtattgaacttatttttctggtctattacgtctccccccttgaatataaaatccagtcttgtgtttgctatttattgtccctgtagtacctagaacagttccagatatagaagacactcaaattttttttgttgttgaatcac

SEQ ID NO: 509476 - DNA, 623 bp, Homo sapiens
tctgtcaatgtgacattcacagaagccctgcacatgtgctggctgagggggagagccagcctcaggcagacagaaggaagttcagccactgggcatgtgttagcatgggggatgtgtagcctagaagcttcctggctttcagttattattatttttttttaacttaaaaaaaaaaaaactccagataattcccatacttgttttttacctttaaggaatgtatttgccttggaggtgccattactgaattatattgacrcagttcattaaaaatctgcttagtataaaactgacttgggtctaaaaaaattaggattctactaaataaatgcatccttttttgttgcattgaaaaacattcttagtactgttattaatcttttcacacccccctaccctttgcttgtgtttctgatttactctgctgtgaagaaagttttcaaggtttgttacagtggaaaatgttttggaaaaagttctgggttgagggtaaggaatttagagcttaggaaatgaaatttggtgaacctgatgagctcatttgccattttgtacctcagttccacttttctggagctagaataactgttctttatatactagttaataaaatcaacaggtgt

SEQ ID NO: 509477 - DNA, 462 bp, Homo sapiens
gagaaaacataataaaacacaaattaagacacacacacagtggaaatagatggagtcaaatcatattcgtgacattcaaacaatatcacttttgaagattttaataaatataccttccttagcaatctgytactgatatagttagattttcagaaattttgttttaggaaaaattgagaatttcagaccttaaaatggattaatcaaatactcacttttggaggggtcagggaagataggagaaaatttccaatacattgttcagcagtctggggacgtgttagtcaatatctgtagtgactcagaatacagaagtgaggtggtgttttgagtatgctttatctctgtgcacaatggttccccttcttacaggttctgtttccagagaacaggaaatattctgtgctttctagattaactcacacttccaggtaggacttggtatctgaattgaatatatcc

SEQ ID NO: 509478 - DNA, 591 bp, Homo sapiens
  misc_feature (1)...(591): n = A,T,C or G
taatattttctagtgaagaattgatggatttcagagaagttccggggatgaacaatactgtattatcacttgtaaggtaatcttcctgggcagaagtctcttgaaatagtgaagagatgctaatgatggtagttgaatcgtaaagtcatattaacagtgacaataaatggtgtgtgcttgtgcgtgctttggatgattctcactgtgatagatgcagcaacatctctaacttcaagaatttcattaagtctagtggtagaggcaggtaagttatagaaaatattgagggtaagtattaagtgctttaagaaagtatgcttgggctgcagggagcattgtagggttctcagaggaaatgatccttgctcctttttggaatcattccaagcagagggaacagcaagttcatgtgtatataatgggggaaggataggagataanggttgtaatgtggckctatctaatggacctttatgccatactaaagagtttgtactttatcctatacaaattaggtaagggcaaaggaattaggtaagggcaaggtaaatttagttaatagaatataactagaagatttttagtaattag

SEQ ID NO: 509479 - DNA, 509 bp, Homo sapiens
tgttcagtgttatatttgtcatttgcatctgactaatagaatgcattgaaaagtaatgctgtgtcactaccaccacagtcaggctaaaaaagtcagcagcttccttgtggctttccttcttgagaaactcatcattggaaatyagccaccatgttgtgagtgcacatatagacagcacgtataggtgttttagctgacatccatagctaatccagaagatgcttggcacattatctctgccaagctttgtcaaatttcagaattctgggaaaatataaaatgggtattattttatgtcactaagttttgaagaggtttgttacatagcaaaaggtatctagacttttgtgaaatagaagctgagtgttttgttaagctctgttttctcttgctatggaaggagttttatcacttactgtaggaacaaaatacatatctacttattttattgttttgtaatttttaaaagatttggaatgaacttgatgtattgagtggatactgttttg

SEQ ID NO: 509480 - DNA, 509 bp, Homo sapiens
tgttcagtgttatatttgtcatttgcatctgactaatagaatgcattgaaaagtaatgctgtgtcactaccaccacagtcaggctaaaaaagtcagcagcttccttgtggctttccttcttgagaaactcatcattggaaattagccaccatgttgtgagtgcacatatagacagcacgtataggtgttttagctgacatccatagctaatccagaagatgcttggcacattatctctgccaagctttgtcaaatttcagaattctgggaaaatataaaatgggtattattttatgtcactaagttttgaagaggtttgttacatagcaaaaggtatctagacttttgtgaaatagaagctgagtgttttgttaagctctgttttctcttgctatggaaggagttttatcacttactgtaggaacaaaatacatatctacttattttattgttttgtaatttttaaaagatttggaatgaacttgawgtattgagtggatactgttttg

SEQ ID NO: 509481 - DNA, 438 bp, Homo sapiens
ttatcctcgggactttagtctcctgtaaaatgaaagggttgggtgagattgaaagtcagcaaatgcaaactcattttattggaagcggttgagatgccgtgagcggtggtagtaacaggatgaataaactcagcctctgccttcttcctgtagctgggacagccatgaaagcctccagtccaaatgcaaaggcaagtgggtaggacaggccttctgtggtcctcagtcagcctccttccttggccactcctgccaktgtgcagtggactcctgggcagaggccttctcagtaaggcaggagacccagtccagaagccagcctaagggaaaaccctaatagatatgcttccaagtaaaaaaataataataattctgtccagccaaatgacaagagactaggacaaaaatatttaaaattcacatggcagatacattttt

SEQ ID NO: 509482 - DNA, 647 bp, Homo sapiens
aaaaatagccaggacacggctgagtgggcctattgtaataagcacagtttacattccagttgtgcaaaagtacaaacaacagtgaagtgtagggactcttggaatgctagtgacattgatgatattcagtgtttatataagatctgtacaggttgggatatcctcagtgtaaacagtcttcccaagagtcctttccaaggcaacatggtacagtggcaagagacattctcagatggatctagttttaaatcccagctcagccactgccagatgtgtttccagcagtttgacccttagacctgggcaacaggagcccctcccctgggcactgcatgttagaagctcccattctggccctctgctggctactccagggcaaggaatctgaacgtccaaaggggcatgctccccaagagcctgggccccccactagaccacactcggggtactcagaagcctgcaatttcctgcccaaacagctccaaaccagcttccagggcctgagaccattcccagggtatggaggrtatggccaaaagtggctgttcatagcaggtgcagataagccagcattatctccaccatacttgtgaatatacccttgcctcaggttctgctgaactacttattatttgtcttggtctgtt

SEQ ID NO: 509483 - DNA, 653 bp, Homo sapiens
atgtttgttctgtgcaaagcaatatgtattgagggtgtgtatatatgggcatgggcgttgtatatttatatattttgagaggggaatgcaaaggtgaaaaaaaccctagtttctctcctcagaggaacctacaccttcatagataacatgagaaaccacacatattcaagggtgtgagctggggaaggtgctcattaatgctgaactaaatcagctattataaaaaatgctaatttaaagcaggtaactttctttttttcctaaactttcctcttagatcacagcttttaggataagactacacttttcttcacaaattaatataactgaagggaacattagattaatctagactccagcactgtttaatagaaatttctgagatcatgaaaatgttctttatctgtgctatccaatatggtactcaygtaactattgagcacttgaactgtgactagtaaaactaagaaagtgaattttaacttagtttaattttaattgattaaaaattaaatttaagtagctacatgtggctggtggatactatatgaacagcatggataaacaattgcctaagtcatgggtgacactttgaggatgtggcacacccactgcctccagaatggtatcttaaaaccctgcatctccccttg

SEQ ID NO: 509484 - DNA, 535 bp, Homo sapiens
tccactgcctactgccactattttcaaatttcggtcatttatagactaccttctcaatttttgctatatttgtgtagcacctcttttggtatattcttattttttttaaaaaagatcaactcaccatggtgcttttatattagcttcttcttaagcaatcttcctatctgtgtaattgcagatttcgtgttagttacacattttttctagtttgtataaaactagaaaatcagtacatatctactacaagtctttaaaacattgtttgtgtaccatgtaatgacacattggttcttaccagtggtacccatgttacccttgggaaatccctgctgggaagatgatgttcaaggctcctgaggatgtagcccctgactcccccttttctaccatctttttcaattgtcagggcatctgtcaggatgactgtcaattccagactgtggtatgcgtcctcttgcttccactcttgcctgaacaggttctgcrtctttaacactgcagtgccccaccccagatgggccttacggtacct

SEQ ID NO: 509485 - DNA, 564 bp, Homo sapiens
agagacatggttcctcattgtatcaagggatgattttgctcaatgaagcctgactctcagaggcggaggatggcatagcagttccaggttttgagttaggacagaaataggacaatgtccaggggmacaggggagccatctgcctccttaggctctttacttctgtctcattacctagttttgtgtcctgtgcacattcctgagagagatgggatggaccactgttggcttagattgctcaggatccactctctgtatctggaaacacctttgagggaagcacatggctgaagggaggtggggtatagctgaaccaaatgggaatttggttagggaggtcaagatggggaatggatgttggaaacaagtagcatctgtaacactgctcttttgtgtccttctttagaaacttacaaactctcaatattttattttttttaattaattaatttttttactttattttttgagacaggatcttactctgtcactcaggctggaatgcggtggtgcattcacagcttgttgtagccttgaccttctggactcaaacaatcctcctgc

SEQ ID NO: 509486 - DNA, 615 bp, Homo sapiens
tattgagcagtcactatatgccagggcctttacatgtttatttcatttaatcagcacagcaacgttatgaagtagtgttataccttcattctgtagaaaataataacaaagcatgtcaggcactttctaactttttgcatattttatgttatttaatccttataacaatgctatgaaatacaaattactatttccattttacagaagaagaaatttaagcatagagaatctgatttgcctaaggttgcatgtcaataacagattgggattcagacccaggtctgaatctaaagcttttattgactctmccacatccctgaatctctgcatatgccactcttgaatggactttgactaggctaattctacttgttcagatttcagcctagaaaaaccttccacgattgctgacgccacactattgatcttcttgtttccataatgtgtactcgtttctcatctttgtcataatatggttgcaagatatcaaacagactgctgacctgcctgtcttcctgagacaggagactgagtctgattatatatccaatctgagtgccttcccagtgcctgacacataatacccagtaaaagtttgttcaattctacttgttc

SEQ ID NO: 509487 - DNA, 590 bp, Homo sapiens
gtagttgtagaagctcttgtaggtgacttggtttcccagtgagggtgataatcagtgttttagtgaaagtccctttatggtaacttgaggtcaatggagtagagtttttcttaatagataaatgggaccaaagtgatgaagtgacttgctcaagttctcttagatgttgctgtggctaaaatttattcatctgtacccccaattttttttaattgaatgcatacttcagaccaggcactgactgctaatccaatgttttttgcttctccctgtcagtcacttttcttctgaactggaagtgttttgagggtatatgatgttayattcaaatggattggccattttgaagccagttacaactaaggcagagtgttcaccaaattgtggaaaacaaaagcagcaaacagatcaacttgaccagaaacattcgtgaaagaaagacttggtcaaatatttcaggttatggccacaggcaggagacaacctttccatctatgaggaaacccttgtcaagttgtacactggttttattgatcacagataaacacatagctaacatcataaacaacagtaaacagcaagacattcct

SEQ ID NO: 509488 - DNA, 625 bp, Homo sapiens
gaagtgtttcctaatggtcarcattctacttgataagcctagagatttcatcctaaacctagtaaatcagaatttgcaaaagagcagcttgggaacctgtgtagtttttgtttttgtttatcactgtgcaagtttcagaaacattgctagatgaaatggttgtcaaccctggctgcacattagaaccaactagaaagacttgtaaaaaaatactggtgtccagatctcacctcacatcaattaaatcagaatctctgaaggtggaactagacagctatcttttcaaatgttctccaggacattttgatggtatatgaatgacttgagagtcattgtctcagagaaatctccagtgtcaggatccaagttttcaccataactttttttgtagggccagcttctggctgggatgtgctaagcagttaaaggaacaaaggccagagaggagttggggtagattgctttgttacaatgtgttaccttggaggtatcaattacacagggccccttcatgccttcatactcagaaaatgtgggtaattcacctctccttccacaagttaaatgggagatgaattgagagcctctaggtagatcttggcggattcctcactggcttaccaca

SEQ ID NO: 509489 - DNA, 684 bp, Homo sapiens
ttcattagctaactacctcatctagattttcttcagataaaattatttttaaagtgattaaaaaagagaaagaacagaataccaaaagtaaaagcagaaacacttgccattttagattaccttaccagaaaagtattctaatatttgtaccaacaactattttcaattaaatctaataagcaaatataattccaaggatatgaaaaggaactgctaagataattgttctgaaagcactccaattaaagatgaaaatacataatgctttattttggcaaaagaatgatccagtggcacagacaagcagtgacttctgtaacatttaataatctgtagacaaaatgcaaatagcaacaacccccaaaacctctataatataaatcttaatcagaatataaaactgtgttmattttctcttatagaaaataaaacaaaaaataatcttcacatcacaacctacgttgtaaccatacgttttactatatgaacatctaattcattttaaaaattaatattaaaagtaattatagcaagggagcttttcgcaatttattcctggctaatattacattttaaaatatgtttttaaaacctaaagaataatttaaattataatactgacaaatattagactttgaaagtcatttattttttccaaaattctttattttttcaaatttcaaa

SEQ ID NO: 509490 - DNA, 684 bp, Homo sapiens
ttcattagctaactacctcatctagattttcttcagataaaattatttttaaagtgattaaaaaagagaaagaacagaataccaaaagtaaaagcagaaacacttgccattttagattaccttaccagaaaagtattctaatatttgtaccaacaactattttcaattaaatctaataagcaaatataattccaaggatatgaaaaggaactgctaagataattgttctgaaagcactccaattaaagatgaaaatacataatgctttattttggcaaaagaatgatccagtggcacagacaagcagtgacttctgtaacatttaataatctgtagacaaaatgcaaatagcaacaacccccaaaacctctataatataaatcttaatcagaatataaaactgtgttaattttctcttayagaaaataaaacaaaaaataatcttcacatcacaacctacgttgtaaccatacgttttactatatgaacatctaattcattttaaaaattaatattaaaagtaattatagcaagggagcttttcgcaatttattcctggctaatattacattttaaaatatgtttttaaaacctaaagaataatttaaattataatactgacaaatattagactttgaaagtcatttattttttccaaaattctttattttttcaaatttcaaa

SEQ ID NO: 509491 - DNA, 435 bp, Homo sapiens
ggccaacatggtgaaaccccatctctactaaaaatgcaaaaattagctaggcgtggttgcaggtgcctgtaatcccagctactagggagtctgaggcagaagaattgcttgaacccaggaggcggaggttgcagtgagccaagatcatgccattgcactctagcctgggcagcaaacgctaaactccatcttaagaaaaaaaaattaatgatatcttataattgtggacagccaggtcacagtcataacgtaattgtcattgcctgtgcatgcaaaaactcggtggcatgactggacaactggaaactttctgtgtctcactccaaagaccatttaaggaccatttgaggaargtctaaaatttctgcctattgtctgaaaacttattatttccactactgctattttcatgaccatccgttaagagcttaacag

SEQ ID NO: 509492 - DNA, 587 bp, Homo sapiens
ttttctctattatttttgatagttttagtcttatattttcaattttcttaacttttttctttattatctggcatgctgttaattatgtactttttatgtcagatattgtatttttaaatatactcatgctccctctagtttaacatagacaatatagttacaacacatatttgtattattgtttactaattctatcatttgtatcacttctaggactatttgtattgattgattatttttcttcactgcaagtcatgttttctttctttgttacaygcctggtaattctttattggctgacagaccttgtgattagcttgtttgagccctgaatttttttattcatttaaatatcattgagctatgttctaggtcatagtaaagttgcttttaaacaattttcactttagacttgctttaaagctttactaggaaatgcagaacagaaaattcattcatttataggtaaacttaacacattactcaagcaatacctttctaagtattctaaccatgccatgtatactacaaggtatttccactctggctgatggtaacatgatctattcccagtcctgtttgtgctc

SEQ ID NO: 509493 - DNA, 607 bp, Homo sapiens
tctcatgatgagatcatccgggattagagtaggccccagattgcagtcaccgtataagaggaaaagcagggggaagatttcacatggacacagaacagaaggccatgtggggatggaggcagagataggagggatgctgccccaagccaaagaacatctggagccaccagaagctggcagaggcaaggaagtatcctcccctggagccttcagagggagcacgacccttgatttcagagttctggcctccagaaccatgagagaataaattcctgttgttttaagccactcagtttgtgacagtttgttatggcagcgctggaaaacaaatacactccccattctggctcctacagsgtcctgctcacccatgtggggcacatggcatttatgtgattattgctggcatatgcatctgattagataacaagttatctgaggacaagaattgggtcttattcagctccatttcctcagactggagcagaatccaggcaccagacaggtcctctggatattgggctttgttcggtttcgttttgtttctcttacactatggaccagggcgccatgtggcttgagcttactcacagcatggcagcttcag

SEQ ID NO: 509494 - DNA, 604 bp, Homo sapiens
ctagccagcccaagcttccagcagccactctgtcaatctgctgtctctttcatcgcaggctaccactaacctcttcctgaaagcaggccacaggccaaatgcaggggctttatcagggcctgtgggcgtaagagcccatcagggaaactggaaacattcctcgctctgcaaatgaccatgtttggcctggctcctgtccccatcttctccccacatgacccaccctgacagtccagccagatggctcagacacctctcctccaattctgtcagcctccaaaaggagctgggaggcccctcggaggaccatctcttgtagcaggggaaactaaggcccagagagtgcatgaccctctctaaatcatagaaaagagggacttggtctctcttgtttatggtgtatccccagagcctagaactgtgcctgggacttccataacttctgcctcagtgtgatccacatagacygttccatagatttgcaaatagggactcagagaggtgaagtgactagtccagattcacacagcctttaagcatcagctcgggatttgaaccaaggactttttgaccccaaagcacaagatcacagcctcaaccagca

SEQ ID NO: 509495 - DNA, 623 bp, Homo sapiens
ctattgtctggcctcagtcgggacagggcrttaacacctaacaaggaggtggtcctggctgggtgacctggatctgctctccacacctccaagtctctttttccacttctggggcatgtggaccacccaacataccatgatggtgaaggagaataacctctgtggcacacctagaaaaacagccagcccttcatcaggtcacaaacaatgccagttgcccattattctcatttcacagatgagaaaactgagattcagattcagtgaagtgaccgagtgagcacgtgggtagaatcaggagctccaggctgggcttccagcttctcctcccttggttttccatggaatcctgtcacatatcatctggaagtaggtttcacttctagctctagcacttcctggctgtgtgacctcatagaggttacttacctctctgagcctcaggagcctcatctgtagcatctgtctcaaggagttgtgaggattcaatgaaacaaggctggtgaggtgcttgtcaccaccacagccactgcattaatagggaaaggggatttctttcacagggtgaaactgaaatgtgtttctactgctccctcagtgaagtccactgttttagggtccca

SEQ ID NO: 509496 - DNA, 623 bp, Homo sapiens
ctattgtctggcctcagtcgggacagggcattaacacctaacaaggaggtggtcctggctgggtgacctggatctgctctccacacctccaagtctctttttccacttctggggcatgtggaccacccaacataccatgatggtgaaggagaataacctctgtggcacacctagaaaaacagccagcccttcatcaggtcacaaacaatgccagttgcccattattctcatttcacagatgagaaaactgagattcagattcagtgaagtgaccgagtgagcacgtgggtagaatcaggagctccaggctgggcttccagcttctcctcccttggttttccatggaatcctgtcacatatcatctggaagtaggtttcacttctagctctagcacttcctggctgtgtgacctcatagaggttacttacctctctgagcctcaggagcctcatctgtagcawctgtctcaaggagttgtgaggattcaatgaaacaaggctggtgaggtgcttgtcaccaccacagccactgcattaatagggaaaggggatttctttcacagggtgaaactgaaatgtgtttctactgctccctcagtgaagtccactgttttagggtccca

SEQ ID NO: 509497 - DNA, 500 bp, Homo sapiens
acctctccagcctgattcctagtgcagtgccggggattgagacatggagacatgcagtagcacacaacacatgtctgttcaactggtgagtcaaatgagaacgatcttcctgccctccctctcccagtcccacacttctatgtgctctagaagcatcacttcattcctgatgcttgtcatgactaattctactgtaaagtgacagcagttaatcacaccttagagtcacataacaatatacagcttcctaaatgctcccacccacatcatgtcatttatatttcacaataatcctatgaagtagatatcactccccctccttgatcagcagaagaaagtgagagtcaaagacacaaaaatccctgctcacagcaaatagctggtatgtagcacagcagacttgcrtgtagatgttctgatgtaaagctcctgtttttaaagccgaatttcacttctaagtcagtatttttgctgcatatatatgccaatgcacagatgcc

SEQ ID NO: 509498 - DNA, 468 bp, Homo sapiens
agctggaagtgggcctgtgcccagctctggtggcagtgggccacctgtggctggtgccaagctcactgatggagatctctcattatgtacctacatcaatgatcagtaaagaacaagccataagaaacttttgggtctctgggaatgttatctttttactcctcatataacttcatggtgaactgttttgaaatttgacattaatttagaatttcttgcctgttctgatctctagtaggattctaggctggatgtctttggaattgaaatacttgttggcttctggttattttgggggtaatccataacagtctaccattcctggtgtttggttttagtgggctgtgaaaaaaatcatttgttcaacactgatgtcrtgatacaaggacgtgaagatgtgagtcattgtgacatcaccagccagaattgctgggattcagtgagatgactcacagtaagaggtcagtg

SEQ ID NO: 509499 - DNA, 602 bp, Homo sapiens
ctccaggctgtaatgagaaatctcccatgaggaacacggatgtttaaaggctaaggggtttcaaatgaaccaaacttctaaggacgcagcggccggaacttggtcctgtttgcaacacgcccctgctgccccaaactccaatgttaggttgtaggatggtaccatggtgggctctgggccacttcctggggccagggagctgccagctagtggtcgccagagtgattcagcacaactccttccagaascacacactggccacacccctccagggtgaaatctacctgtgtggtaggaggttgctctgggagcttggagcagcaacagcactttgtgaaaacggactgtggggtaggagacacagggttattgttttgttgaacacctctcccatatcccttcttctaggaacgagaacattttccccatgggaaatccattttttatagttaattggagctaactttcctatctaatggcagaggtatgcacataagattgaatcagagaggtccatcccacaggttatatgatcgggtcaatgctgggcacatgaccgaagccaggggagtcagtgtcttccttggaactcgatgcctgag

SEQ ID NO: 509500 - DNA, 602 bp, Homo sapiens
ctccaggctgtaatgagaaatctcccatgaggaacacggatgtttaaaggctaaggggtttcaaatgaaccaaacttctaaggacgcagcggccggaacttggtcctgtttgcaacacgcccctgctgccccaaactccaatgttaggttgtaggatggtaccatggtgggctctgggccacttcctggggccagggagctgccagctagtggtcgccagagtgattcagcacaactccttccagaaccacacactggccacacccctccagggtgaaatctacctgtgtggtaggaggttgctcygggagcttggagcagcaacagcactttgtgaaaacggactgtggggtaggagacacagggttattgttttgttgaacacctctcccatatcccttcttctaggaacgagaacattttccccatgggaaatccattttttatagttaattggagctaactttcctatctaatggcagaggtatgcacataagattgaatcagagaggtccatcccacaggttatatgatcgggtcaatgctgggcacatgaccgaagccaggggagtcagtgtcttccttggaactcgatgcctgag

SEQ ID NO: 509501 - DNA, 602 bp, Homo sapiens
ctccaggctgtaatgagaaatctcccatgaggaacacggatgtttaaaggctaaggggtttcaaatgaaccaaacttctaaggacgcagcggccggaacttggtcctgtttgcaacacgcccctgctgccccaaactccaatgttaggttgtaggatggtaccatggtgggctctgggccacttcctggggccagggagctgccagctagtggtcgccagagtgattcagcacaactccttccagaaccacacactggccacacccctccagggtgaaatctacctgtgtggtaggaggttgctctgggagcttggagcagcaacagcactttgtgaaaacggactgtggggtaggagacacagggttattgttttgttgaacacctctcccatatcccttcttctaggaacgagaacattttccccatgggaaatccattttttatagttaattggagctaactttcctatctaatggcagaggtatgcacataagattgaatcagagaggtccatcccacaggttatatgatcgggtcaatgctgggcacaygaccgaagccaggggagtcagtgtcttccttggaactcgatgcctgag

SEQ ID NO: 509502 - DNA, 548 bp, Homo sapiens
tctcaatggtatatctggctggccaggggcctggctgaggaagtcacctccgctcccaggactgcatttgtccgggatccatgcctcccgggaggatattgtgaaggattcacatccgcmctcccctccagatccaggcaggagtgcacagggactgtgggaagtgtgtcactctggcagagtcggggctcttgagtcagcatcttacacacagcaggacatcaacaaatacttgacaaatgagagaatggtgtggcagttgaggatctctgctcttcaaggcacagcccaagctctacacacacagaactacctgcacttgccctggttggccccactgtccctttgtgccctgagctgttgctgttctgtatactggaaatatccatcctcttccacccctggcaaaccactattccacggcaaccttgtcttcaaagcctcctagttggctgctttcctccaccccaacatatctggcccatgaccctcttacagcccgttttacagaccccaaggatttgagtaccttgctcactagtctaagc

SEQ ID NO: 509503 - DNA, 612 bp, Homo sapiens
ttatttcaatttgatgagtgcatacatccatttttacatgacacactaatgtcttgctcacagttttctgttatctataggaaggggagcttgatttgttaccttagttaattatccaaagtttgttggtagggttatggtgctttttggtggtaaattcactccattaataatagttgtaatccagcagcagctaacactcatgggttatattgcatgccaggccctgtgctaggagcctcaatatctcatttaaccctcacrtccacccgggaggaagggactatgatcatccctgctccaccagtgaggatactgtgtgtgtatgtggaactggttgaatatataaacaatccgtgctcttgggcacattatatggcctttattcctagctagggaattttttctatttaatgtttcttttaatgaaaactaatgtagaaatatcacttctaagtctgtcccttgttcaggggctttttcctagcccaatgtgtccgttgttccaactcagcttatcttccacacacctgtggacacttgtgatttacaaacttctgtggtagcttcctttgctttacaaagatatgttaaatggtgattatattgttg

SEQ ID NO: 509504 - DNA, 573 bp, Homo sapiens
ccagaacttgaccctgagctgaccagccgtgagcatgtttggaaggggtctgtagtgtcactcaaggcggtgcttgatagaaatgccaagcacttctttttctcgctgtcctttctagagcactgccaccagtaggttatttagcttgggaaaggtggtgtttytgtaagaaacctactgcccaggcactgcaaaccgccacctccctatactgcttggagctgagcaaatcaccacaaactgtaatacaatgatcctgtattcagacagatgaggctttccatgggaccacaactattttcagatgtgaaccattaaccagatctagtcaatcaagtctgtttactgcaaggttcaacttattaacaattaggcagactctttatgcttgcaaaaactacaaccaatggaatgtgatgttcatgggtatagttcatgtctgctatcattattcgtagatattggacaaagaaccttctctatggggcatcctctttttccaacttggctgcaggaatctttaaaagatgcttttaacagagtctgaacctatttcttaaacacttgcaacct

SEQ ID NO: 509505 - DNA, 675 bp, Homo sapiens
tggcaaatctaaaggaatttgcatttgtacaaaaggtaaaacactcatgaaatatctaaggaatggactatatatggtccacaaatccaattcctaaaacgaatattctgtgggctctttggaataaagctgattgctaacgtcaataaaattgtgtgctttttctctatgcccctcagcaaaagctttggagctttaattaccttttattaggctttccctacaggaaaaaaaaaatccactcctctacagacctatgtagctggttttcccatggggtcaagttaaccagtgtctctctggagacataaactcatgtggtctgtgtgctcacttttttgctgattttgaagtgtgtttgctgagttgaagctctaccacatttgtgtctttaagctcccaaccagcagacatggttgcagttaattcctacttgttaggaactgcatgatcagcatcagaaaaccttctgctctgaagacaaaatttaatatactaccctttggctacrtggtccacccatcagcaggctgagtcttccattgtcagggcatgagtatatgcaaacacattagacctgtctgtggccaaaaaggctgaccctcaatcagacacctccaatagaacagaatcagagtcctgaaatatgtattctgagctttgatgtgaggccaa

SEQ ID NO: 509506 - DNA, 675 bp, Homo sapiens
tggcaaatctaaaggaatttgcatttgtacaaaaggtaaaacactcatgaaatatctaaggaatggactatatatggtccacaaatccaattcctaaaacgaatattctgtgggctctttggaataaagctgattgctaacgtcaataaaattgtgtgctttttctctatgcccctcagcaaaagctttggagctttaattaccttttattaggctttccctacaggaaaaaaaaaatccactcctctacagacctatgtagctggttttcccatggggtcaagttaaccagtgtctctctggagacataaactcatgtggtctgtgtgctcacttttttgctgattttgaagtgtgtttgctgagttgaagctctaccacatttgtgtctttaagctcccaaccagcagacatggttgcagttaattcctacttgttaggaactgcatgatcagcatcagaaaaccttctgctctgaagacaaaatttaatatactaccctttggctacatsgtccacccatcagcaggctgagtcttccattgtcagggcatgagtatatgcaaacacattagacctgtctgtggccaaaaaggctgaccctcaatcagacacctccaatagaacagaatcagagtcctgaaatatgtattctgagctttgatgtgaggccaa

SEQ ID NO: 509507 - DNA, 619 bp, Homo sapiens
gcagctttacatcctttctggaacaagacagtaataatatatatacacacttatacttactaatrcttatcaattttaggcaggagacctacaggtaaaatacagaacaaccagattcattacacaaactctgtctgaaaagtctgactaaaggcttctccaaaacagtgtgcccagtaatcagatggctgtttcctgatcatcttctctacactgaaatctctcaatttagtgttttaaaataaatattttagattaagaaaatgtaaatattgtcgcttccaattccaatgaagacatcgccaatccatgaagagtggtgctgaagtaaagacagatacgtgtttgtgctcagacacgcacacacactcgtgtgtgcacacacgcataccatgtgcacataagcacacatgagcacgtgcacgcacacacacaatctgttacagaagaattactcaaagatgatccatagctttagtaaaacatcagaatggaaaaacaaacaaggaatttccaggagatcttgggagcacttcagggtatttctacatataagattatccactgtaacatgatttggatttgcagctcttcttcatgcaaagaactaacctgtggg

SEQ ID NO: 509508 - DNA, 619 bp, Homo sapiens
gcagctttacatcctttctggaacaagacagtaataatatatatacacacttatacttactaatacttatcaattttaggcaggagacctacaggtaaaatacagaacaaccagattcattacacaaactctgtctgaaaagtctgactaaaggcttctccaaaacagtgtgcccagtaatcagatggctgtttcctgatcatcttctctacactgaaatctctcaatttagtgttttaaaataaatattttagattaagaaaatgtaaatattgtcgcttccaattccaatgaagacatcgccaatccatgaagagtggtgctgaagtaaagacagatacgtgtttgtgctcagacacgcacacacactcgtgtgtgcacacacgcataccatgtgcacataagcacacatgagcacgtgcacrcacacacacaatctgttacagaagaattactcaaagatgatccatagctttagtaaaacatcagaatggaaaaacaaacaaggaatttccaggagatcttgggagcacttcagggtatttctacatataagattatccactgtaacatgatttggatttgcagctcttcttcatgcaaagaactaacctgtggg

SEQ ID NO: 509509 - DNA, 619 bp, Homo sapiens
cagcattttctacactgagctttctccctatggggataaagcaaattaactcccccagagctgccaccccagcctttaatgagtccaccatatcaggcacgtaagaacagtgtgtgtgtgtgtgtgtgtgtgtgtgtgtgtgtgtgtgtgtgtgtgtgtgtgtgtgtgtatgtatttcctgctgggcaccacagcagcaaaggtcttaagggagacagagggagacaaacaactcacagaacaacaacaaggtaccattccacaggagagaggcaagcagaggtatacaaaccaggagggtgggccactctgtctcagacatcgaggaacattttcatccagatgacacctgagctgctggaaaatgcaaataggaattttccaggcacagagaagtgctttggtgtccagatcccccagccccagcacctgatacacacaagggtgatcctggtttgggtcagagctcagtaaaaaacatcttctctgaacttttttttaaacagctttattcagatgaaatctgcacactataaattmactgacttaaatcatacagctcagtggttttcagggcaagaaaccggcaggattggcatctaaaccctgacctgacatt

SEQ ID NO: 509510 - DNA, 625 bp, Homo sapiens
ctgttgggacgccctgtggtctcaccagacgttcccgtttggatggttttctgatggttctgtctccaagcccaatggcccaaagtctgaggtttttagctttttaccactgcaaatgctttacatgccttctggccrgtatacagtttgtctttaaaataaccttattcttggaagtcagaaacccaggtttattgctttacaaggaccattttgtcatatataagctatatatgtttgtgaaaggaaatacagtgggaaaactatttgggtctcgttatgaatgtaggagggaggtagctttgataggcttgccagcagggggcttgtgctccacttcatcagataattaaaggagaggttttcaccctatgctgtccctgctactgaaaatttagtgtctcctctgcaccagacctcagacagggagtatcctcagagaccattcttccatctccattaaacaaatagaaccctgccctcccaagaaactgtgagttcctccatgttttttaaacagaacatgtgtgaatgttcagttgtattacatagtggaaggagttatgttctgctgatgattactttctctccacctactgcctaatcagatattcttcatgaatat

SEQ ID NO: 509511 - DNA, 555 bp, Homo sapiens
ctgttgggacgccctgtggtctcaccagacgttcccgtttggatggttttctgatggttctgtctccaagcccaatggcccaaagtctgaggtttttagctttttaccactgcaaatgctttacatgccttctggccagtatacagtttgtctttaaaataaccttattcttggaagtcagaaacccaggtttattgctttacaaggaccattttgtcatatataagctatatatgtttgtgaaaggaaatacagtgggaaaactatttgggtctcgttatgaatgtaggagggaggtagctttgataggcttgccagcagggggcttgtgctccacttcatcagataattaaargagaggttttcaccctatgctgtccctgctactgaaaatttagtgtctcctctgcaccagacctcagacagggagtatcctcagagaccattcttccatctccattaaacaaatagaaccctgccctcccaagaaactgtgagttcctccatgttttttaaacagaacatgtgtgaatgttcagttgtattacatagtgg

SEQ ID NO: 509512 - DNA, 534 bp, Homo sapiens
cagattactccttatcccagggcctggatagacatagatggagactccaagaatccagggttgaagagtcttttaagggagaggttgaaatatgggaactttttccagatastgactgacaagtagtatcatcaatgacataaaccatcagcaacgaggctcagcagaggaaaacagacggctccttgaatttatcaagctgttgtagtggtaggcatttcctaagtgatactgggctggctgaaagaactcagcctcatttcaaatgtgcataatatactccagactcaagggatgcagccctttatctcctataagattttacaaatccgtggagtcaaaggaaaaagagtctaacgttcaaatggcagaagaatttttaatcaagtagaaccttcctattgaggaggtcaccatccgaccccaacagctcatataagggcaagaggcatagcctttgggagaagcgctggcccaagcagcactgagggattcccactcggtgggtgcgaatcctggccaaggggatggtca

SEQ ID NO: 509513 - DNA, 534 bp, Homo sapiens
cagattactccttatcccagggcctggatagacatagatggagactccaagaatccagggttgaagagtcttttaagggagaggttgaaatatgggaactttttccagatactgactgacaagtagtatcatcaatgacataaaccatcagcaacgaggctcagcagaggaaaacagayggctccttgaatttatcaagctgttgtagtggtaggcatttcctaagtgatactgggctggctgaaagaactcagcctcatttcaaatgtgcataatatactccagactcaagggatgcagccctttatctcctataagattttacaaatccgtggagtcaaaggaaaaagagtctaacgttcaaatggcagaagaatttttaatcaagtagaaccttcctattgaggaggtcaccatccgaccccaacagctcatataagggcaagaggcatagcctttgggagaagcgctggcccaagcagcactgagggattcccactcggtgggtgcgaatcctggccaaggggatggtca

SEQ ID NO: 509514 - DNA, 651 bp, Homo sapiens
cctgtcctggattacagtgaacacagcaggaccctcatgggaatcactgcggatccctgagccctcagagaaccaaggttctgagatcaaagcacatttcatcttgaacgtggaaaacaaatttgatgataaattgagcccttggaattggaatgtccagatgcmcctggccctggctgttcaggctacagtttaaaaaaaaggtgtcagtcagaatggctgttattaaaaagtcaaaaaacaacagatgctggcaaggttgtggagaaaaaggaacacttatatactgctggtggagtgtaaattagttcaaccattgtggaaaacagtgcagtcgttcctcaaaggcctaaaacagaaattaccatttgacccagccaacccactactgggtaatacccaaagaaatataaatcattctatcataaagacacatgcactcatatgttcattgcagcactactcacaatagcaaagacatggactcaaactaaacgtccatcaatgatagactggataaagaaaatgtggtacatatacaccatggaatactatgcagccataaaaaagaatgagatcatgtcctttgcaggaacatggatggaactggaggctgttttcataagcaaattaattcaggaacagaaaacc

SEQ ID NO: 509515 - DNA, 651 bp, Homo sapiens
cctgtcctggattacagtgaacacagcaggaccctcatgggaatcactgcggatccctgagccctcagagaaccaaggttctgagatcaaagcacatttcatcttgaacgtggaaaacaaatttgatgataaattgagcccttggaattggaatgtccagatgcacctggccctggctgttcaggctacagtttaaaaaaaaggtgtcagtcagaatggctgttattaaaaagtcaaaaaacaacagatgctggcaaggttgtggagaaaaaggaacacttatatactgctggyggagtgtaaattagttcaaccattgtggaaaacagtgcagtcgttcctcaaaggcctaaaacagaaattaccatttgacccagccaacccactactgggtaatacccaaagaaatataaatcattctatcataaagacacatgcactcatatgttcattgcagcactactcacaatagcaaagacatggactcaaactaaacgtccatcaatgatagactggataaagaaaatgtggtacatatacaccatggaatactatgcagccataaaaaagaatgagatcatgtcctttgcaggaacatggatggaactggaggctgttttcataagcaaattaattcaggaacagaaaacc

SEQ ID NO: 509516 - DNA, 503 bp, Homo sapiens
ttttttttaaaagggccagtttgccagcataccattggctaatggatacataaaaagtagttcaagtgtaccagtaatcaaaaaaatacaaggagaaatgaggtctggacaaggtggaataagtacatttcaccctatttctcctgctaagtgcaacaaaaatgtctggacataaagtatgctggctagggatctcagaactcaaggaactacccagtggtgtgtttgtgtgtgtgtgttcttttatatatcttggcctgggctctggataggcccacaactggaaaascctgctatcttgagccaaaagactagagaaagagcagtccagaaacacagaagtgttttgaccatacctgaccttactccagctcaacacttgaaaaaagccatgcctccctcctgctcctcaccaggcatcatagcctagagactggcagatctctactttctatcacttcttgcaataacatgccacatcccttccctggaacagagactat

SEQ ID NO: 509517 - DNA, 453 bp, Homo sapiens
gggactacaggtgcacatcaccatgcccgactaatttttgtatttttagtagaaactgggtatcaccatgttgtccaggctggtctcgaactcctggcctcaagtgatctgcctgtcttagcctcccaaagttctgggattacaggcgtgagccactgcacctggccagttctrgtagttattaaaccatgcattggaagaccctgctggaatataagatgcagagcacagaaagaaaactaagtgaagaaagaattgtttcggagccttgtaaggaatactcacgtcctccttctccaagctgggctccctgaagttggcaatttcatcaaaacagtatccacttaaaagtacccttaactttttcttccaaagttacacagtagccccaagttctacaatgcccacttcatgttttcctgaggcaccctggagacgccaaaagcatttgag

SEQ ID NO: 509518 - DNA, 453 bp, Homo sapiens
gggactacaggtgcacatcaccatgcccgactaatttttgtatttttagtagaaactgggtatcaccatgttgtccaggctggtctcgaactcctggcctcaagtgatctgcctgtcttagcctcccaaagttctgggattacaggcgtgagccactgcacctggccagttctagtagttattaaaccatgcattggaagaccctgctggaatataagatgcagagcacagaaagaaaactaagtgaagaaagaattgtttcrgagccttgtaaggaatactcacgtcctccttctccaagctgggctccctgaagttggcaatttcatcaaaacagtatccacttaaaagtacccttaactttttcttccaaagttacacagtagccccaagttctacaatgcccacttcatgttttcctgaggcaccctggagacgccaaaagcatttgag

SEQ ID NO: 509519 - DNA, 598 bp, Homo sapiens
cctccaaccagggaaggcggggattcaggacaggccagtgctaggtggggagtgcacaggaggcctgccctgtgcctctgtgcggacagccgatgctgggcggagactgccacgtgmccggctctcatccttgctttctttccattcctcatccaactattcagagtcacatgatatggctgagaacagccagaagggtctatagttgaaagataaacccaactctgcaaaaatcgcaccgagacttcatcctaaaccaggtctacaggaatagatgggtgcaggcctgcaggagccttccaggagctctggcagggagggtctgtggccacccactcccccaggggaggctgggtcagaggcatctagtgaggtgggcactgccaccaacccccttcacagaaaggccggcacacccaggacacacagctcatgcagcagcagtgcccaggcttcaatcccatgtccccacttcgactcagtgtccccaagctcttctgcttggatcaataaatagtatcgcacaggggtggacagaaataacctaaaacaatgtttcctctagacctatggagttgaagtttctccagctctcact

SEQ ID NO: 509520 - DNA, 649 bp, Homo sapiens
gctggggagctagcatactgtccgagtccttgaaacttcctcactctgctaatgactgggcctggctaagggatgcagcctaaccagccaacgctccagggtgacaattttagaatgaatattggagaatgcaactgaagattgattctgagccagttctcattcccagacaatggtaaacattgtttttcctatagtttccaggaasattttctctccccgcttccttccttttcttccttttcttcttcctccctttaataaatatgtatgaagcaccatctagaagccgggccccaaacttggcacctgggagtcagcagtgaatgagacacagttcttgccttctagaagctctgactctggacagaaatgaagattgatgggaattttgtaatataaaaataaaaggctaactgtgagcaatggtgataaaggccacataagctattggctcaggcactgtggctgcacctaagggaggcaccccacccagttctggagcccagcggcggaagtgatgtttagactgagtccagaaagggacaagagggggcaaggcaaggagggaagattgcaaaagtcattagcaagtggctctttgtggctggagggagggctaagctgggagctgggcaatggccagagg

SEQ ID NO: 509521 - DNA, 649 bp, Homo sapiens
gctggggagctagcatactgtccgagtccttgaaacttcctcactctgctaatgactgggcctggctaagggatgcagcctaaccagccaacgctccagggtgacaattttagaatgaatattggagaatgcaactgaagattgattctgagccagttctcattcccagacaatggtaaacattgtttttcctatagtttccaggaacattttctctccccgcttccttccttttcttccttttctycttcctccctttaataaatatgtatgaagcaccatctagaagccgggccccaaacttggcacctgggagtcagcagtgaatgagacacagttcttgccttctagaagctctgactctggacagaaatgaagattgatgggaattttgtaatataaaaataaaaggctaactgtgagcaatggtgataaaggccacataagctattggctcaggcactgtggctgcacctaagggaggcaccccacccagttctggagcccagcggcggaagtgatgtttagactgagtccagaaagggacaagagggggcaaggcaaggagggaagattgcaaaagtcattagcaagtggctctttgtggctggagggagggctaagctgggagctgggcaatggccagagg

SEQ ID NO: 509522 - DNA, 649 bp, Homo sapiens
gctggggagctagcatactgtccgagtccttgaaacttcctcactctgctaatgactgggcctggctaagggatgcagcctaaccagccaacgctccagggtgacaattttagaatgaatattggagaatgcaactgaagattgattctgagccagttctcattcccagacaatggtaaacattgtttttcctatagtttccaggaacattttctctccccgcttccttccttttcttccttttcttcttcctccctttaataaatatgtatgaagcaccatctagaagccgggccccaaacttggcacctgggagtcagcagtgaatgagacacagttcttgccttstagaagctctgactctggacagaaatgaagattgatgggaattttgtaatataaaaataaaaggctaactgtgagcaatggtgataaaggccacataagctattggctcaggcactgtggctgcacctaagggaggcaccccacccagttctggagcccagcggcggaagtgatgtttagactgagtccagaaagggacaagagggggcaaggcaaggagggaagattgcaaaagtcattagcaagtggctctttgtggctggagggagggctaagctgggagctgggcaatggccagagg

SEQ ID NO: 509523 - DNA, 657 bp, Homo sapiens
tgagttgccacctacaattcaccactagagcagtcctcaactccagaggccaatgctggtggtaagyactgaactacagatggcacgactgatcatggtgacctacaggagggccttgcttggtggacccctctattgatggtctatcacactcctaggccaacctctatgcctcagactgaaaggactcagaacattttagcatccccaaacagatctttgccaaatccctccactctgcttcttcactctaaaatgggagcgggaaattgcctctgggttctgcgctttctctgggtttggccaattccaaggcacgggactaaaattagccctccctccacaggctgcctggatgaattcctctggcgctgtccctgaaggtgcatctgtcagcggcttatgagtctgtccagtcctgccttccacttgctggcaggtgcggagaagtgagccactgcagccactcgcccgtatcctttgggtgttttatgtgacttctgaaagtcacttgcattagctccagcttcaatcctcttcccagggggatgagacgttgtagtgctgctgtgtctgagaaatccaaagcatgttcactgctctggagatgagagttcattgagcagggacaggagactccaccagatcctttctaat

SEQ ID NO: 509524 - DNA, 557 bp, Homo sapiens
tcccaggcattccgtgttcctttgtcaccaagcctttgcccatgctggagcctctacctacagtgcccttcccagcctttttgacttgcttattcctgtgtcaccagcaagcctcacttcatgacacctcttctgcagacccaccaggacaacyatgttgtatgtgctacatcctcccttcaagcccttagtctatatatctgtctgctgctcttgttgatgagtttctacaggatgagcaccgtgattcctcatccctggatccctagggcttagcacagagccaggaaattattggcaacttagtaaaggtagaatatgagacaaggtctcactctgttacccaggctgcagtgctgtggcacaatcatggctcactgcagcctcgacctcctgggttcaagcaatcctcccacctcagcctcccgagtagctgggactacaggcacatgccaccaccaatcccagctaatacttcttatttttttgtagagacagggtctcactatattgcccaggctaggcttttatttttttaatacaagaaatatccccag

SEQ ID NO: 509525 - DNA, 604 bp, Homo sapiens
ttggtgaacacagctgcacagaggcaggtttgtagcttggtgggagcgtggtggagctacagtgcagagtggcrtgtgtgtgtgtgtgtgtgtgtgtgtgtgtgtgctggggaaggagcccactgagctgagaaagtaaggaaagtaggcagggcacttctcagggccttacctggcaggccaaggtgtttgtattttctgtgtgcagtgggagccactgaaggcttttgaggaagagaatggtaagattagagctgggctttaggagaatgggtttaatctttgtgtgacaaatggctcaaggccccacctgtctgaattccaaaaacccggctccctagtctgcatacgatttccttctgtagcctgcctgcctgtctgtcactgaatgtcactgtctctcaggggctgtaatcttccaaaagtcacggtccttgtagggcacgagcttctagtttttagtttgcagtcaaatgtctgcaaagcccatcccggggcatcctgaccttgttggagcctttcgtcacaatacaaggctggtatcatggtgttcttagggtctggaacttacagacctcccttttgagttttagaagccgcaaca

SEQ ID NO: 509526 - DNA, 537 bp, Homo sapiens
aacatttttcaaagcctcccaagtataggtaatgtttgttacagtggttagtctattctggctctatccttctgtaaccaccgaagggctggttaaaacattttrttgggccccatcccagtttttggtcccataggcctgaaggaaggggcatacaatttgcatttttatttatttattgaaacagagtttcgctcttgttgcccaggctggagtgtaatggcacaatctcggctgactgcaacctctgcctcccgggttcaagtgattctcctgcctcggtctcctgggtagctgggattacaggcgcccacaaccatgcccgggtcattttttgtatttttagtagagacagggtttcaccacattggccaggctggtctcgaactcctgacctcaggtgacccacccgccttggcttcccaaagtactgggattacaggcacgagccaccacacctggcctgaatttgcatcttttaacaagtgctgggggtaatgctgcagctgctgctggtctggggtgatgttgtggctg

SEQ ID NO: 509527 - DNA, 563 bp, Homo sapiens
tgagacctctcctggtacaggcttrcaggggggaaggcggaattgtacagggaaaaaaaacctcagactacagtcacaaattttacatgcacacctttgccagttatgagaattgtgttgcaaagaggaaggagtggagagtttaccagccaagggctggaggaccccaacactccagtttcttagaacattcattgcaggtactcttttatactaccaaagtcctcccaccccatcccccaccaaccacagcttccaggaatcactgagattcacagagaaaggaagtaaacacaattaagaacaaagttatgttgaaaagatatttcaatgcacatgttgcaaacaaggcgagtcccaggaatcattccgaagaaaaagacagaatgacactgaaatccatcatgatggttatcccatcatgatgggagtaaagcctttaagggagtaaagccttaaagatctccttgtcagatgagacttttagaacagacccgacattctgttgacttagaagagctgatgtcatcctcagagcccaggtgatacacacattcctggat

SEQ ID NO: 509528 - DNA, 473 bp, Homo sapiens
gggaaacaattatgccccattccctaccgcagtgatcttttcctgcatctcatctcagtgcaacatatttcaactgagcagcagcctcctagcagggaacagtaacttggcagtgtaggttattttaatgaacactttaaactaagtcttcaccatctgtyctgtttcctaattacaaacctacactcgtttgcagttgcaccattaaaagtgagatgctggcaaagtgctctaaatgcttgtctaggttgtcctcttgtttctgaactaagtttctcagttgtgatatcctgaagtccaaggcatttcatttgaggtgaggatgtgaaagaaattactgtatatacagtattcagatgtatggaattcatgtcttgattcttccctctctcttcctctccctgtctctttgctattctctcattacaaacagaaattctctttaagaaggattttacacttcaaattctcca

SEQ ID NO: 509529 - DNA, 594 bp, Homo sapiens
aaaagtgtgatccagagctaggaaaagtgtgatcttggatgcttgtcatctgggagcttgttagaggtgcaggatctcaggccccacccagaacctaaggatcagaatctacatttgaataaggtgcaggtttgttgaatatacgtccctagtttgagacaacctgctacaacctgaagcgtctatttgctcatgagcaagtgagggccagagagatggagccctggaccccacagctactcatgcaaaagctttagtaactgtgcttgctgtaacccacgcgtcttcttcccaccattgctagcctcactaaagattgcatttgtttctctgacatgatgacttcaggcaatgtatacaacttgctcctcctgttaacatttaattcaggcgtgaaaccaaacaacccaaaaatggaggaaggaaagagaagaaatggggctaaaaaagatctaaaaatgggacagaagcaggtgcctwtttcatcttctctttgattaaaaaaggtctgttagctcgaagcccacaggtatgtgactcagtgcagacgaggggaaactccgtgggaagttttggatctttcctattagaaga

SEQ ID NO: 509530 - DNA, 594 bp, Homo sapiens
aaaagtgtgatccagagctaggaaaagtgtgatcttggatgcttgtcatctgggagcttgttagaggtgcaggatctcaggccccacccagaacctaaggatcagaatctacatttgaataaggtgcaggtttgttgaatatacgtccctagtttgagacaacctgctacaacctgaagcgtctatttgctcatgagcaagtgagggccagagagatggagccctggaccccacagctactcatgcaaaagctttagtaactgtgcttgctgtaacccacgcgtcttcttcccaccattgctagcctcactaaagattgcatttgtttctctgacatgatgacttcaggcaatgtatacaacttgctcctcctgttaacatttaattcaggcgtgaaaccaaacaacccaaaaatggaggaaggaaagagaagaaatggggctaaaaaagatctaaaaatgggacagaagcaggtgcctatttcatcttctctttgattaaaaaaggtctgttagctcgaagcccacaggtatgtgactcagtgcagacgaggggaaactccgtgggaagttttggatctttcctrttagaaga

SEQ ID NO: 509531 - DNA, 484 bp, Homo sapiens
ggcttcctgttagggtctaccaatggaagccactagagggagattagacggcagtagatagcaattgccctagacccagtggttttttgcatgagacaattttatatattaagcccctgagatttarggattattactacagaaaaagcccatcctatcctaataaaatatgcaaaaaattaaaagtagaactttacacttcataccacgtataaagataaacctaaatgacaaagactatatagctttcagaagagaacacaggaaacatcctcatgatcttggggtatagaaggatttctcaaataagacataaaaaacataaatcaaaaagaaaaagcttgatagatttgacataaaaattaaaagctcctgtttatcaaaagacagaactaaaatagtgaaaagacaagccacagaagatatttgcaaaatatataacaaagaacttgtgtacatattttaaaatttgtatgaataagaa

SEQ ID NO: 509532 - DNA, 524 bp, Homo sapiens
tacttgccttgcaaacagaggaagggacttgagccaaggaatgcaggtgcctctagaagccagaaagggtgagaaattgcatcctcccctggagcctccagaaggaaccagccctgcctgccaatgccttgattttggcccagtgacacccattttggggttgtgaccttcagaactttaatccatgtgtgttgttggaagccaggaaatgcatggtaatttgtcacagcagccacaggaaactaatacagactcacacagcagagagtgacagaggctgyctgggagggtcctccttcatcgcagcccttccctgctgctcccctgtgcagaagatgctccatggaactgtcagtgattttgcttgccagattctctcttgattactcaaattaatattcacacacataccaagtctaagcactgctactatcaaggtcactgtgactaccacttaagtggctgagtctaaatgtccaccttgcagtcttctccttcctggacttttcagcagcagaggaccc

SEQ ID NO: 509533 - DNA, 445 bp, Homo sapiens
ctgactgagggacgccctgctctcctggaagcccactttgcgcagtcccgatacaggtcccgcagccgaggactgccggggacgcccacaggccaggcactgctgtgaggccaggaatcctccatcagcgcgcggagaaagcggtgtgaaggctccgctgtcgccctgggcccagcccgcgcgcctcgcacgttgtgcgtctaccccacagccaatcagtggctgcacaggcctctttagtagccaatcagcagcttcaggtgccyattacgcagcagatctgcgaggcagatggagctttcccccacggacacttgcctctgggagctgacgcacagccaatcaggagctgaaagtgcaagtccctccccgcaccttcaggcccagaggaatcctacgggcttgagccaatcagcagccgcgggcggtgccaggaacgtttggg

SEQ ID NO: 509534 - DNA, 445 bp, Homo sapiens
ctgactgagggacgccctgctctcctggaagcccactttgcgcagtcccgatacaggtcccgcagccgaggactgccggggacgcccacaggccaggcactgctgtgaggccaggaatcctccatcagcgcgcggagaaagcggtgtgaaggctccgctgtcgccctgggcccagcccgcgcgcctcgcacgttgtgcgtctaccccacagccaatcagtggctgcacaggcctctttagtagccaatcagcagcttcaggtgcctattacgcagcagatctgcgaggcagatggagctttcccccacggacacttgcctctgggagctgacgcacagccaatcaggagctgaaagtgcaagtccctccccgcaccttcaggcccagaggratcctacgggcttgagccaatcagcagccgcgggcggtgccaggaacgtttggg

SEQ ID NO: 509535 - DNA, 157 bp, Homo sapiens
cccacctccctgggccccaggactactcactcctcggtgctcataatcaccccayggccccaggaccacggcaccaacctgacctgtcaggtgaagttcgctggagctggtgtgactacggagagaaccatccagctcaacgtcacctgtaagtgct

SEQ ID NO: 509536 - DNA, 642 bp, Homo sapiens
agctggttccagacccccaccagtcctctagagtccaggccaatcagtgctaagggacgttcctctctcaacctggtatgtgcgggaagtcaaggcattaactaaggcacaaaatgactagtgctggaccccagggctggtcagaaggcaccctgtgtactcatgtttccggtcctgcacgcgaggcccctatcaccgagaaaacaagacacacgatgaagcccagcctctctattcccattcccaaacccatctctgacctatctccaagcccgatccctatcctctctcctattccttttctacattttttgtctcttctttcccaacactggcactctccctctccccagccttgtctgctctccctcccaaacagaggatgtatctttagtagaagcaaacaccaaacctgttacatagaggcttctatcctcaactcaaaacctctgctgcccaggattctcacacagctccactggatgtgattctcaaacaatctgcactttccagaattacaaagcataagaggaaataaccctccayaagtgaggacaaaacctaaacttcccactagagccctggaaggcctgcaagttctggcccttcaggagctcatccctcagtcaattccagtcacag

SEQ ID NO: 509537 - DNA, 495 bp, Homo sapiens
gggggcgtcccctgctcacaggccgagggcacagagcaggtcaggttcctggggtggccagattccagggtcctcgggatgaagatgctgggcctgtgggtcagggctggtgaggaaacggggatgcaggatcaggaaggggtgactgaggtacagccctgagggaagctcaggttctggtccgggtcctcccctgagtctgacaggcttcattcccaacccccttccaggacatgggtcccatcccaagccctgtcctgaggtccctttgaccttcccttgtggctgcttctgaagcctgtgcctcacctgtcacatgcacagagagctggggagatttgtaactgtatttggtacttcctctctccatccgaaagaagtatgaaccattatccctcctcctggcgtctacgatgctcagggagcagttgttcctactgggatccccaaggaggcggaatcwgccctgagtctcctcctgtacttcttgatcta

SEQ ID NO: 509538 - DNA, 458 bp, Homo sapiens
ctcgtgactgagtaggtccttctgcttaatgatttggtgctatattagaagcttattgttgctccacacctaaagactgttctccaaatagcttaccagtaataaagctgatgttttcttctccayctttctggctcctttgactctctcaattggttctgtgcttcagtgaggagaaggaaggatgcaaagtattacagtagctaaaagaaaagcatttttaaagcccaaaccataagctgtccgctaagatactgaatgaccagaaagtccagaaaatgaggaatactggttctgtaaaagttatggctaacttagggttaactcaaatttccttctaaaattcaatgaattattctaaaatatgtatgagttcaccactgataggctgttttttttttttccttctcacttcctcctcctccagacagactgggacaaaggataaacaccttttt

SEQ ID NO: 509539 - DNA, 657 bp, Homo sapiens
ctgctcgtgactgagtaggtccttctgcttaatgatttggtgctatattagaagcttattgttgctccacacctaaagactgttctccaaatagcttaccagtaataaagctgatgttttcttctccacctttctggctcctttgactctctcaattggttctgtgcttcagtgaggagaaggaaggatgcaaagtattacagtagctaaaagaaaagcatttttaaagcccaaacmataagctgtccgctaagatactgaatgaccagaaagtccagaaaatgaggaatactggttctgtaaaagttatggctaacttagggttaactcaaatttccttctaaaattcaatgaattattctaaaatatgtatgagttcaccactgataggctgttttttttttttccttctcacttcctcctcctccagacagactgggacaaaggataaacacctttttgcataatggcctgcaggagatgcccacaatatgattaatccaggcagtgcagcaagtctgtttactttgcatctctcacaccctgagaatggacagtgtaagaacctctgtctcttctccccttcctctctgcctccatcccaagatcccagctttagaatgaagcctggtgtccttcagcaggagacacaataga

SEQ ID NO: 509540 - DNA, 501 bp, Homo sapiens
ctcgtgactgagtaggtccttctgcttaatgatttggtgctatattagaagcttattgttgctccacacctaaagactgttctccaaatagcttaccagtaataaagctgatgttttcttctccacctttctggctcctttgactctctcaattggttctgtgcttcagtgaggagaaggaaggatgcaaagtattacagtagctaaaagaaaagcatttttaaagcccaaaccataagctgtcygctaagatactgaatgaccagaaagtccagaaaatgaggaatactggttctgtaaaagttatggctaacttagggttaactcaaatttccttctaaaattcaatgaattattctaaaatatgtatgagttcaccactgataggctgttttttttttttccttctcacttcctcctcctccagacagactgggacaaaggataaacacctttttgcataatggcctgcaggagatgcccacaatatgattaatccag

SEQ ID NO: 509541 - DNA, 512 bp, Homo sapiens
taactaagtaggtttagttactaagtagaatatttgtgtgtttattttcttattgcmaagcattgccaccgggggctttgtagccatcagtccttgcatggagttttctttttttttttctttcttttttttttttattatactttaagttttagggtacatgtgcacaacgtgcaggtttgttacatatgtatacatgtgccatgttggtttgctgcacccattaactcgtcatttacattaggtatatctcctaatactatccctcccctctccccccaccccacgacaggaccctggtctgtgatgttcctcttcctgtgtccagcgttctcttgttcattcccacctatgagtgacgaacaccttgcatgtagtttcttgagtaaagaggcatttcaccagatggatatatgtctgctttctctgctggtctcagttacacaaacttgcacctcactgtcagtccattcagctctcacaccagcaggtcattgctgtagagactgaaa

SEQ ID NO: 509542 - DNA, 647 bp, Homo sapiens
ctggttgctcactgcccaagacagctggtggggaattctgaagacaggtgtttccccatcggcatggtgctcaaggctctcgccattccaaatggatgatagcatctgcctgaggataccaacatgctctggggaagtttggtctcagctcaggtttgggaaaccagtggaaggctcaggggtgttggagccatatacaattgggtatggactcctcttgtcgcttcaaacatgaaggctccacctgacctcaggccttgtcccttcacttcagtagtctgagcctcaggctgcccttctataaacacgttccccattggtaatagtaccttaaagggccactgtgaggcttaaataagcaaatgtatgcaagtgtttatcccagccttacacagaggagacaccccaggaaatcatgtttatcatgattgtggcctttctgttctccctaaccttgcagaaatttagctatyactcaacagtgtgtggtgccaggtgctgtacaaaatatgcctgacctgtgcagcaagacttctgagaacacaggttgtcatcattattactgctgctgctgttgctatggcctctgtccccccgggtacctcatgaggaatggcaaggctctccagcctcaccttcacagagct

SEQ ID NO: 509543 - DNA, 540 bp, Homo sapiens
gtggggttctccaggtagcattttggacatggtttggttaggagagtagagaatggaaaatgagaaaaggaaatagtctgtaagaggggcttcttcattcaaagtattgattggctctgcattcctcatggtgggattcctttaatggactgatgtgtttcctgggaagtgggctcagagtgcgcaggttatgctctaacttttgtgtccaagatrtggaggcggagccatggcttgtgcctttgggatattggcagccttttatcttcacagggctcccatctgtttggcagctcaagaattgctctgtgcaactggcagtataatagttctcattttagaaaggtttcaggcctatttaatgctctgggaggccaaattcaaagctgaaagctccagggtgacccaacaaatgcctaattttccagaactaatctgtcctgctcaacttgtccccttttgtctccccggatcagcataactgtcaaagtcattctcatgttgtacaaaatgacaactgtaatcgcagaagagtggaac

SEQ ID NO: 509544 - DNA, 521 bp, Homo sapiens
ttttcagttaggttggacaataagtctcagattgttaatatacaatgaatagaaattaataatagctactgtagtaccatttcaggtctgagaacatttccyctattattatcatcatttctgggttttccattaaatataaatttggaaaagggatacttaatcaccatgttgtactgttctttgggctattacagaagaaacaagaatgtttagcacatttccaagggttggtagcagaactgcagccaggagagagctagtagagatatctgaatttaactttagactctgctattgcaggataggtaacctaggacaacaattcttgtactttctctggctgtctgtttctgcatctgtaaaataaagaggcatcttagtctattttgtgttgccaaaacagaataccacagactatgaaatttataaagaaaaaaaatatttctcatagttctggaggctgggaaatccaatatcaaggttccagcatcttgcaaggaccttcttgctgcatcatc

SEQ ID NO: 509545 - DNA, 498 bp, Homo sapiens
agaggctggagacagcacatgagtgttcagggatccttgggggtcaaaagagtcacctgagagaaaggaagagaggggaactgccgcagctcagtgaggggaacaccgcaggctctgcctctcttccccggctgtctgggaggagggtctggagtggagtccatgaggggctgggcggggctggggccctactttggagggaatwtggtaagcagactgtacagccaagcagacagtcctggaggttgagggcgtgacaaagaactgtagcatattctgtgtgtaaagacacctttgccttctgtcctgacccgcagacaggtgcttctcctgccctgccgtgcttctgccatttctggtggaaatagctcaaaagacccctgcttatccacagagcaggggcatttacccattacaaccccctggtgaagtgacacggttatgcccatttcacagacgaggaaattgaggcccagaaaggggcaggaaacttccaca

SEQ ID NO: 509546 - DNA, 501 bp, Homo sapiens
gatggtggacgctccgagtgctcaactcgggtcacctccttgggcaaagtgtcttgtctttaaaactggaaccaagcgagggtatgtccagtcctggcttcagctgggagtgtcctggaaggctctgcctgaccccacgttgaagttaggtttccccgactctaccctgtcacgtctccctgtggttttctgtgacagcacttgtcacataaatcaatgtctgttttatttgtaaaattatttgttcaatgtccaattctcctccacactgatagataggaggacagggatgtatccaaagggtttagcatactaccgagtgtataataagctctcagagtatgcatccaacaagtagttattaaggtcttccacatgcaacatattgttcttggtgttagcagactaaaatgatacacaggtggattgatggagagyttgttaaaataatacaagacgccaaactgggctatgtgactgcaatgcttcctattgctgctg

SEQ ID NO: 509547 - DNA, 501 bp, Homo sapiens
gatggtggacgctccgagtgctcaactcgggtcacctccttgggcaaagtgtcttgtctttaaaactggaaccaagcgagggtatgtccagtcctggcttcagctgggagtgtcctggaaggctctgcctgaccccacgttgaagttaggtttccccgactctaccctgtcacgtctccctgtggttttctgtgacagcacttgtcacataaatcaatgtctgttttatttgtaaaattatttgttcaatgtccaattctcctccacactgatagataggaggacagggatgtatccaaagggtttagcatactaccgagtgtataataagctctcagagtatgcatccaacaagtagttattaaggtcttccacatgcaacatattgttcttggtgttagcagactaaaatgatacacaggtggattgatggagagcttgttaaaataatacaagaygccaaactgggctatgtgactgcaatgcttcctattgctgctg

SEQ ID NO: 509548 - DNA, 668 bp, Homo sapiens
aaagccacccaacaagtgctttcctggttggagtgggacgtggagttctggcccaggatgaacatgactgagagaatgtgagagcagggtcctcgagtctattgcagacratgacatctgtgtcgagaagagtagatggatgtgtgctcttcttctgagacaggtaccaaatgacactgtaagaccatggcttggtgtatggcctcatgatagtttaaaagctaatgagggcacccttaggatgtgctgtaagtgactttgctgcagcaactttctttttattattattattatactttactttctagggtacatgtgcacaaatcaaatcaaaaccatctcacaccagttaggatggtgatcattaaaatgtcaggcaacaacagattctggagaggatgtggagaaattgtggttttgatttgcatttctctgatgaccagatgatgagcatttttttcctatgtctgttggctgcatagatgtcttcttttgagaagtgtctgttcatatcctatgcccactttttgatggggttgtttgtttttttcttgtaaagttgtttaagttctttgtagattctgatattagccctttgtcagatggatagattgcaaaaattttctcccattctgtaggttgcctgttcactctgatgttagtttctt

SEQ ID NO: 509549 - DNA, 495 bp, Homo sapiens
gatttatttggtgcccctcttcccctctcagcatgaccctggcgcagttctccctttcctgcctgcattaccttcctgtggctgctataataaattaccacacactgggtagcttaaaaatagaaatgtatcatcttgtagctctggagattggaagttcaaagtcaaggtgtctgcagggccrcgtttcctctaaaggtgctagagaaggaccctctctgccttgtccagctcccctggggcttccctggggctcctgatcctcttagctacaggactcatgtcaggctctgtcatcccacacctctcctctcctcataaagacataggaggagttagggcccaccctgtgacggtgaatactgagtgtcaacttgattggattgaaggatgcaaagtattgttcctgggtgtgtgtgtaagggtgttgccaaaggagattaacatttgagtcagtggactgggagaggctgagccatcctcaatctgggttgg

SEQ ID NO: 509550 - DNA, 553 bp, Homo sapiens
agactgaagggctccgcggtccccagggctgaaagcagwgcttattattattattttaataataagagggctggacactcacatagaacttgagtctcactaagtttggctttcaaacagcctcaccgattttatcatccccgttttctgatgaggatgctggcgtctgaaagtttgaaaaaagtagctccatcactgcacacaagcacctcacctagaagccagatccctccaccacagcctgaagttcgctcggcctgggctgctcctccctcactgctccgtctcctccaccaaaggtgtgaccagtccatccgtcggggtgcgttttgctttgcacatttcttggggaaaaaaattcttatttggttttgaaagtatcgttattatcgattttacagttttctcatacattttaaaaccattttttcccccaaactgttttgcaaacccgtggcaaggcggtaggccccgtgcctgtgtgcttgctgggtcactggcctggctgtgcccacggcctcctcctcgccccctcttcctgcctcctttaggc

SEQ ID NO: 509551 - DNA, 251 bp, Homo sapiens
ggcccaactatgcacactctctgcctatgggagccagcctgggcccaggtgaccagtgcccaagacctgccctggggaggtgctgttagaggggttagcttgttccacagggaaatcacagagtggccttctggttggatggagaagcgatgtttgcttcatttattaaaccatttctctaggttcaggttttgctctaaaccytttagccatgttattttattgaatcctcatagaggcgtgcaacgtca

SEQ ID NO: 509552 - DNA, 605 bp, Homo sapiens
actcgccttgacttaaatacagaacatttttaatgctgaagagcctaataacaaatagcttgagacagattggaaatagctttggatggaaaagtgaggcatattgattgccacttcttacgagccgtcttttttttccctctatccacacaatgcaaagccttgctgtttttaaatgtgaagtgtttctcccaagaaagcctgcaggcacctgtcctggctccagtgcttgctggctggaagttaggtgcagcctgctgctctgcgatggcygcgaggctcctgtgctgtctgcttgtgcatgtcttgatcacagagcacaagtctggggacaaggtgggcagagggttatcactgataggtgaggtgctggctgagtcccatcagaagcccgggactggagttagttgccagaggaggcagctcggtggagcaatccttaggaaatgatactgatttttcagcaaagcacaagactgtcgcaagcaggatggcctccacgcttgctcctatttacaaaaagtttgtcacaaaagtgaacaccattgcagaacgggaaagacgtgcagctctttccagacacatgctcctcagattgccccagt

SEQ ID NO: 509553 - DNA, 562 bp, Homo sapiens
gagcctaataacaaatagcttgagacagattggaaatagctttggatggaaaagtgaggcatattgattgccacttcttacgagccgtcttttttttccctctatccacacaatgcaaagccttgctgtttttaaatgtgaagtgtttctcccaagaaagcctgcaggcacctgtcctggctccagtgcttgctggctggaagttaggtgcagcctgctgctctgcgatggccgcgagsctcctgtgctgtctgcttgtgcatgtcttgatcacagagcacaagtctggggacaaggtgggcagagggttatcactgataggtgaggtgctggctgagtcccatcagaagcccgggactggagttagttgccagaggaggcagctcggtggagcaatccttaggaaatgatactgatttttcagcaaagcacaagactgtcgcaagcaggatggcctccacgcttgctcctatttacaaaaagtttgtcacaaaagtgaacaccattgcagaacgggaaagacgtgcagctctttccagacacatgctcctcagattgcccc

SEQ ID NO: 509554 - DNA, 605 bp, Homo sapiens
actcgccttgacttaaatacagaacatttttaatgctgaagagcctaataacaaatagcttgagacagattggaaatagctttggatggaaaagtgaggcatattgattgccacttcttacgagccgtcttttttttccctctatccacacaatgcaaagccttgctgtttttaaatgtgaagtgtttctcccaagaaagcctgcaggcacctgtcctggctccagtgcttgctggctggaagttaggtgcagcctgctgctctgcgatggccgcgaggctcctgtgctgtctgcttgtgcatgtcttgatcacagagcacaagtctggggacaaggtgggcagagggttatcactgataggtgaggtgctggctgagtcccatcagaagcccgggactggagttagttgccagaggaggcagctcggtggagcaatccttaggaaatgatrctgatttttcagcaaagcacaagactgtcgcaagcaggatggcctccacgcttgctcctatttacaaaaagtttgtcacaaaagtgaacaccattgcagaacgggaaagacgtgcagctctttccagacacatgctcctcagattgccccagt

SEQ ID NO: 509555 - DNA, 591 bp, Homo sapiens
tttaatttccgcagctctttgagtctcagtggtcccaagcgatgcccaggacttggtcaggaggagaggggctgtttttgggagtcagtgcttcccttggatttgcagtggcaggagtcccttcctcggtatattacatgctattccccaggacctcaaaatgaggttatcagggtgggccttaatccaatttgactagtgtccttacaagaagagattaggacacagacacacagagagaggtgaccctgtgaggacacagggaggagagagcatctgtgagccaaggagagacctcgggaggagtcagccctgccgaccgacaccctgatctcgaactccgggcctccaggactgcgggaagtgaagttggtgtggtctaagcccaggctgtggagcctattatggggctgtgttgcctgctcctgtgtttgagcctgcactgcacggagggtgtccaaggccctgcaacgagtcacaggttcatattgtgactgtgtcaccagccccatctgggagtggtcctgcttttgacccatcatgacttggtcwcctgagcaggagacaaagcacctgacttcaagtaaacag

SEQ ID NO: 509556 - DNA, 596 bp, Homo sapiens
tactgtgtcttgttactacatagtgctggtgaccatgggcaacagtgtatgagacatgtctgtagccttaggcctggtgctggcacagcaggtcctctgttcctggctaagtagcttcaaagctggctctcctggaggttctgcgagctgcctgatgtcctttaaatatattttcccctggaaccagctagggtgggttctatttgcaacagaccaagagagcacttttaaaatccttgaaattttatgcgaagtcccaggctttcatttgtatgtcatttagattttttttttcccctctgtttgtcctrttagtgtctctttgggatctccacatctatcaacggattgcttgcattgcttttaaaaactgttgtttacaatgacattcaacacttgtaaaagttatttgctgccaagaggaaactaaatgcattgtaattaaatttatttcaggctttgattactaagaagtgcagagatacatcattcacttgtgcttaatttaaaaagtattttggtcataatacataaattagttacctttgtagtttgcttataacccataagacactcaactggataaaaagctgctg

SEQ ID NO: 509557 - DNA, 647 bp, Homo sapiens
gaatgcctgtttttcactgtctagctcagttaccaggagtccctgtgaatgacacccacaggtccctcaaagaagtcagatttctcttggacctgataaagcaaacaaaatgtgacccaagcaggctgagttggacgggtcccttcttaccttcgccctctgccatgttgacattcttatctgatggcacaggctgggagttcaggatccacttagatggggtccgttcaggggataccagcgttcacatttttccttttaagaaagggtcttggcctgaatgttccccatccggacacaggctgcatgtctctgtgagtgtcaaagctgccatgaccatctcggtaacctactcttactccacaatgtctatattcactgcagggctctatgattagtccataatgtaaatgcctggcccaagacgtatggcctgagtttatccaaggcccaaacrattaccaaacattcctcttagatagaagacagatttctttcccttggcaaagatcttctactaagatatgttacaggatgttttacattctcttggtcttataataacaccacgcccaatccagtatttgatgcgtcggtggtcactcggaaggttgttattttaaaaatacttattgttctcagtctgc

SEQ ID NO: 509558 - DNA, 597 bp, Homo sapiens
cctttgctcagggctgtctgtgctgctcctcaccaggtgaggagtgaaggggaaagaagaaggagtcttgtgctcctttcagaggttggacagtgccatgacactgttcaaactgtttagtttctctggggcttctgcttggagtttaagagagacataatttattctgaagtttgccatggagagaatagcatctctattccaatgtagtcataatatatggtatcatcctgcctatttaaaaatatgtttggtagtaaaattttcagtcttattaaaattttagcccaaattcttttcctcctttcttgtttttccccaatcggaagattcggtcrgtatttcccccaggggaaacacaagaacattacctaagaactttgaaattattttcagagaattcaggtgctgctggttttgaagatgcctaaaggagtttccaatgttctccaacctcgtctatggtaaaataaattccaagtaagagattccttccaacaaaaagtaaccaaaatgtgtatttgccccatcttaggtaattaaactccctaacagacttgcagatttaggcaaaaagagtggtagaatataaaagct

SEQ ID NO: 509559 - DNA, 609 bp, Homo sapiens
cacttgcactgactttaatcctgaaaatattcaagggcgttaaatacttggctccttcaccactcttgaagtagcccaggcaaagcaatgggtaaatggccatcttcacattggtttagaagaattgtcttgggtcacacataaaatacastaacactaatgacagttgatgagctaaaaaaatatattgcaaaaaaaaatctcataatgttttaagaaagtttacgaatttgtgttgggctgcattcaaagccatcctgggccacatgacgcccatgggccatgggttggacaagcctggtttagatctttagatttttgtaaagacccactgccctgaggtggggtggggcgggggacgtgggcaggacagggtagaagccctgatttgtagcatttgcccactcctatggtgtaaatacttccatcatggctgatatcaagctaccaatgtgaagacacagtgagctctggtgagcaggtaaaaaccagctccagaacaccactgcatgaatatttattgtgcaactactctttgcaaaacacagagttagcaatgatgaagaaatacaaaaattaatcatccatagttttcaagaccccaacctt

SEQ ID NO: 509560 - DNA, 609 bp, Homo sapiens
cacttgcactgactttaatcctgaaaatattcaagggcgttaaatacttggctccttcaccactcttgaagtagcccaggcaaagcaatgggtaaatggccatcttcacattggtttagaagaattgtcttgggtcacacataaaatacagtaacactaatgacagttgatgagctaaaaaaatatattgcaaaaaaaaatctcataatgttttaagaaagtttacgaatttgtgttgggctgcattcaaagccatcctgggccacatgacgcccatgggccatgggttggacaagcctggtttagatctttagatttttgtaaagacccactgccctgaggtggggtggggcgggggacgtgggcaggacagggtagaagccctgatttgtagcatttgcccactcctatggtgtaaatacttccatcatggctgatatcaagctaccaatgtgaagacacagtgagctctggtgagcaggtaaaaaccagctccagaacaccactgcatgaatatttattgtgcaactactstttgcaaaacacagagttagcaatgatgaagaaatacaaaaattaatcatccatagttttcaagaccccaacctt

SEQ ID NO: 509561 - DNA, 559 bp, Homo sapiens
cctggctcctgctgcatctcttgtcagccctggccctgcatggaccacccacaccacttgtacctcctcagtaggccaagggactttattctccatgttttgacctatgctgtttcctcctcctcagctgctttctccagcatcgtttcccaaaataatgacctagtcacccttcaggattcaacggaagcattttggtgtcaatgaagtttttcctggtccaaaccgccctccaaccctctccttcaaagaactgatgcccttctcttttgtccttccactgggcctcatgtagctgtcacagcacaatcttctattatgcttattgtttgcacacctgccttagttgaccaggctgcaggctccttcagggcagggactatgycttatttcttatatccctatagcctactacaatgactagcacataataggtgctcagttaattgaccctagaaaagctgaaataacaaacgaatggctcaaaccactattgccaaagggagaaaaatctcccctcatcattattgtgcctgtttaatttctgttatatgaatta

SEQ ID NO: 509562 - DNA, 590 bp, Homo sapiens
gtgatgaacaccactgtggtgtgttccggtgtgctgctagtttcctctatttaagcaacaaaatgtgggtgcttgttcatgataaaatttggcaattcctgaatttaggtgaaagttagttcagagagttagttgcagattgaattaaacttttaaatcaaaagkttttttttaatttaaataactttctgaccatacctcttccctgttaacttcttttcaaggtatcttaccttgttttcctttctgcaatttattcatgagataaagtttcctttctctttttgcttaagcatttgggctcccattgacttaaagaagtccctgatagagagattttagaatgagcaataccagtgtttttcatgtcatcatggtggctctccacattttatgtggcaatgtctggaggattcacactgtatgattgacttggggccttggactgacccggctctgcaaatctcagttccaaggctgagttctgtatgtagagatgagttgctatgtgtccactttattagggctggtccagggctcctcaagggtagctacactgaggacagccctcctttgagtggatgagggtg

SEQ ID NO: 509563 - DNA, 606 bp, Homo sapiens
aggaggatattttgaagttagacattcgttattcaaacctgtcaattcagagcccattccacagagggcacaagtggcaaagtgtgagggagaatgggggaggaaggaaaaacataaataacgtggagtgttgtgtgctaggcaccttggcaggtactttacagatatcattcatacttcagcatgcccagagccagtgtgggctggtagaaagtactggactccagagccacagagacctggatgcagccattggctcctccactttgagcaaggtgaccctggacaagtgccagcctctctgtaacacctgaacgatcttacctggtttgcagggcattctggggattagagatgatgtatgraaagcctctggcacacagaagaaactcaacaaatagtaacctggttttaaaactaccgttcatacggaaaagcctatttcaactttgagagctaagagtttgttcttttggcagattagatgtagctcaactaacatgcacacgatccacagatattccagaagccctgcaggagacctctcattctcatgtggtccttacaggcctgtgaggcaccaggatcaggagtgttttggggtga

SEQ ID NO: 509564 - DNA, 580 bp, Homo sapiens
ggcaccttgatcttggacttctcagcctccagaatttttgaggaagaaaaaaaaatatgttctttataaatcaccagtctcaggtattctggcatagcagcaccaatggactaagagagaaatcattgctatcatttccattgacaacatccccaaggaagctgccttggaaaattgcatcccaacagatgctgggggactcctgtctaggatgcaggagaggagatgcctccggggctggaagcctgtgcagggtggcctctgaggcccccttctactctccagttctggaatgagttattcttcccatcatgggccctgtcttaggagagagagcaatgtgccacgttcagcctgccctcaaagcattgagggagctgctctcctccctctggttattggggaatcccarggtagccagaaggtagcctaagaagagagaaggaacacctaggcttttcttccctccttcttcctccccatcacactcatcaagactctccacgtaacaccagagcccagagttcaaaggaagtgggggaaccgttgttctagcactgagagggtgacaatgacagta

SEQ ID NO: 509565 - DNA, 396 bp, Homo sapiens
agagacaaatgtcttgttttcctcagtatcctggggaacaatgaacggtttytattttgctgccatgggccccgtcataaaccatcctgagtgctggggcttagaaaactcatgcttgcatgattgatttttcaggctgagtctccgtgcccagtgtgataggtgcttttcaggtaaattgccccatacctttccgcctggtggatgaccagccgagagctgggaccgtggctcactccaacatgttgaagagtcacagctatcaaaccgcagccctgcagagcacagccccagcttttcctggaaggcaattttcatttatctttgaggactcagatcactgagcccttttcatttccctcaactcttgcagcacttactttggtccaataccta

SEQ ID NO: 509566 - DNA, 481 bp, Homo sapiens
tgcacaaagatctatgtacaaagatgttcaacacagtactggttatgatagtgtaataattagagccatgtaaacttttgacaataagggcttaaataaatcatgatatattcattcaatggaatgccatacattattaaaatggtgatttggaactatgtttgtttgaatgaaaatatgtttgtactctatgggggaaatagaaacaagtaggatataaatggttccattttattatatacacacacacacacacggagatggagagagatggagagacagacacagagaaagtcttgaagcttatatatcaaaatgctattgtgttattggtgattatctttctgcgtgttgggaatacaactgatttcacatttatttgtatccattatttctaaatttttcaactatagatatatgatgtaataacatatgrtgtaataataatcatcatcatcatcataaaaaattaggactgatg

SEQ ID NO: 509567 - DNA, 481 bp, Homo sapiens
tgcacaaagatctatgtacaaagatgttcaacacagtactggttatgatagtgtaataattagagccatgtaaacttttgacaataagggcttaaataaatcatgatatattcattcaatggaatgccatacattattaaaatggtgatttggaactatgtttgtttgaatgaaaatatgtttgtactctatgggggaaatagaaacaagtaggatataaatggttccattttattatatacacacacacacacacggagatggagagagatggagagacagacacagagaaagtcttgaagcttatatatcaaaatgctattgtgttattggtgattatctttctgcgtgttgggaatacaactgatttcacatttatttgtatccattatttctaaatttttcaactatagatatatgatgtaataacatatggtgtaataataatmatcatcatcatcataaaaaattaggactgatg

SEQ ID NO: 509568 - DNA, 514 bp, Homo sapiens
tattaatcttgctagatattcacaggttcatagtgagccasctgtctagatctggatatctagtgagcaaataaattctttacctccgagttgatttttgttttattgatcgattgacacagtcttgctctgtcacccaggctggagcacaggctcaagcagatcctcctgcctcagcctctcaagtagctgggaccacaggcacgtgacaccacacctggctaattgtttgtatttttttgtagagacagagtctcaccatgttgcccaggctggcaaattgagttttatatgtgacgcagtcaaaggggcattttccttggcaataagaagccatttgatatgaactctccacaatagttgatgcatacattttataccagaattcaaatttgtaatcaataatgattacttgggtgtttatagctttggccaacattaaacaatatagtgatcaaagcttatacacataagtgacatataccatgatttaatgattttggttatccatcag

SEQ ID NO: 509569 - DNA, 539 bp, Homo sapiens
ctgtgactttctggatgcacttgtctctccagatttcagaggagcaggtttccctgcaaactcagttctctgatggtccaagaaaagtcattgattttgagcttgttcagctttttcctattgtaagggtggggatgatgacctctwactcttcacctgtcaaagctaaaactaaaagtccatttagattagagtattatctttcctggggaaaataccaaaaaattttcaagctctaatcatttttttttagcttcatgccctttggaccttttttgtgacattctaaattaacacaataatttaaaaagtcaagttattctcatagtaattacattttggattgatatctctctgagatttggggccattcaagtgtcattggtaagtacatttgcagaccatctctcaggatgggtggctcattctgcagggcttctgatttaaaagttttagaagagacattttctaatcccgtctccatgtgctagggaggtcatttgtatggataaggactgtctcatgcatgtttccccaaa

SEQ ID NO: 509570 - DNA, 624 bp, Homo sapiens
taacccacttctccatcaacacttctgccccaggcaactagaagagagagaaggaaggtggtgaaaagcagcttcatggttctgcctactgagctctgctctcccctctatacagcccagtcctcctagactctgggctgaccatgctacagagagcaagtgctgcatgctctgccttctgctttggtgcctccctatctcttcttatggtggtctccattcacacctgcaatcattgtttattctactgcttttttttttcttttaagaaagaaactgagatgataagcagcaactacttgacaagcaagtgttcraacacaatgctatggcaatctcctcaacatgcttgaaatatatgaaaagatagaaaatctcagcaaggaaatagacacaaagaagtagcaagtggacattttacaaatgaaaaatatgataactaaattttttaaattcagctaatgggctcaacatcaggagggagaggacagaggaaagaatcggtgaacttgaacacagaacaatagaaattgtctgatctgagcaaaagagagaaaatagactttaaaagatgaacagagccttaggtagctgtgggactgtaataaaagagcaaacattcat

SEQ ID NO: 509571 - DNA, 624 bp, Homo sapiens
taacccacttctccatcaacacttctgccccaggcaactagaagagagagaaggaaggtggtgaaaagcagcttcatggttctgcctactgagctctgctctcccctctatacagcccagtcctcctagactctgggctgaccatgctacagagagcaagtgctgcatgctctgccttctgctttggtgcctccctatctcttcttatggtggtctccattcacacctgcaatcattgtttattctactgcttttttttttcttttaagaaagaaactgagatgataagcagcaactacttgacaagcaagtgttcaaacacaatgctatggcaatctcctcaacatgcttgaaatatatgaaaagatagaaaatctcagcaaggaaatagacacaaagaagtagcaagtggacattttacaaatgaaaaatatgataactaaattttttaaattcagctratgggctcaacatcaggagggagaggacagaggaaagaatcggtgaacttgaacacagaacaatagaaattgtctgatctgagcaaaagagagaaaatagactttaaaagatgaacagagccttaggtagctgtgggactgtaataaaagagcaaacattcat

SEQ ID NO: 509572 - DNA, 378 bp, Homo sapiens
tgactttagagtgcaggtgaggacactccctggagagaagggctccagaggagagcatcaggacaggctcctgcagatgcagggtggtgggggcrggaatggattaggcagtgagagcaaggaggggcttcagcaaagaaggaggagaggaagagggagcaggtgacagaggagggaggggaccatctaaaggaagaggggggagtctgggaaagtcactttggggatcaacagagcaagcagtttcggtgcagtgagattggccaaaagccaactgcagggaaaatgtgcagagatggggaggaaggaaccagggcaaagtggggctagagaaaaaaggcaacttccccttccccaactacctaccacaagcctcca

SEQ ID NO: 509573 - DNA, 539 bp, Homo sapiens
agcaaagacctttgaaaagggccacagaactgggaccccaagtccggagctggatggggaaggagacaggaaggagtggggaagggaggaggggctgcacgtccacctgaactcaaccttcgacctgagtcccagtagctgccccatagggaaaggcgttcacagcacaagtgatatttcccactcagcatccacatgcagcctcagagagtatgagaatcaggaccagagatggagagaaacagcagacagtgacgatctcaggtcacggtgcgccacccccaccccccagcttccaccccagggttgctccctccatggcctccaggccctgcgtgcttaccctgaattttgggtcaacacctcccyggtgctgaggtttcgcccagggttcaccaccaggaagatgggaggtgtggctggatgtgtggtcctccttggggttgtaattgctgttggagatgaaaatgatgcatcagccgtgcctgggctcccagccatgcacagaacacccgtatggatgtcatacagaatcaccc

SEQ ID NO: 509574 - DNA, 616 bp, Homo sapiens
tcttctaaaaagaataaagtataaatcaattaagtcactatgctgtggttcagaaatgccatgctatggcacagttttcctttgcctctcaggtgactttcagatagtgtcaccctgacatttgcatggacagaatgatagctatgttgagatcctccagcgtctttcctgggtttctaaaaccttctttggctgaacgaagcatgccctaccaaaacatgagagacaaacaacagccaacaggttcctttctgatttttttttactgtactggtgaatgttatatactaatgattgattaatgttttttctgcttttggattttgcatgcaatctttaatatgttcactgtgccaaagtagagaaatcttgtgatgaacatctcatcaccctttatgcaagcmaggtgagaaattgcatttcaatgcctttctatgctattcctcaataccatattagcatctgtgtaattaataatacttcgagctctgtcaaaatgaaatcacttttattctttccccaaagagtatcatttattaactatgtatgatccccaaatacatttttctttactaatgtcactagtaactataccttttgaaatattaatccatct

SEQ ID NO: 509575 - DNA, 574 bp, Homo sapiens
tcaagttaactccagttacagtcccttctcagggtttctctcctgtcttttttcctggcctcattggctttgagattcataggaagcctaccaccaggtcaacatattgcatcctgtcctcatggttttctctgaggcctttcatccactgtgtctctaggtgtgtgattccagccttggtccctacttcagggttcataccacaccagtctgttctgatgactctcaatgtattgagtcaccttctccctccagccacccctccacatgcttgcaccacccaacaccctaagtcagacccttcctcagtytttgctctgttcccaaggcctctgcatcccacacccagagcttagggaggtaaaaaaaaaaagcttgagcccattgcctccctgcctccagcatcccaggggcatcatcctttcaccctgctagaaagacacaaaaaatgtcctcgaacgacctcaaggcactggctttgtagaaagaatgaggtgaaaagaaatgcaaaggatttacttttcactacaaattattttgtacactttttgaattttctaccattcatgtattt

SEQ ID NO: 509576 - DNA, 574 bp, Homo sapiens
tcaagttaactccagttacagtcccttctcagggtttctctcctgtcttttttcctggcctcattggctttgagattcataggaagcctaccaccaggtcaacatattgcatcctgtcctcatggttttctctgaggcctttcatccactgtgtctctaggtgtgtgattccagccttggtccctacttcagggttcataccacaccagtctgttctgatgactctcaatgtattgagtcaccttctccctccagccacccctccacatgcttgcaccacccaacaccctaagtcagacccttcctcagtctttgctctgttcccaaggcctctgcatcccacacccagagcttagggaggtaaaaaaaaaaagcttgagcccattgcctccctgcctccagcatcccaggggcatcatcctttcaccctgctagaaagacacaaaaaatgtcctcgaacsacctcaaggcactggctttgtagaaagaatgaggtgaaaagaaatgcaaaggatttacttttcactacaaattattttgtacactttttgaattttctaccattcatgtattt

SEQ ID NO: 509577 - DNA, 400 bp, Homo sapiens
cttttgagcaattcctggacagattgaggtgtgtaaaggaaaccatagtgcaagccacggggcagaagaaaagatgaaaaggtgcacactacagggaaccttaagccccgaggcgaggccaagggatctgggccatgataatgagcacctcctgtggagcaggtggaccggttgcccccagatccacccccacaacacacacacagagactacrgtagcaatcagcagtgggtctcaacaagtgctttccagctgaaacatgccatcagaagaaagagaactactgtctcaggaaggtttctaatggggagtagatacctgagagagggaacgtgtgtctcaagaacctctggcccttcatgacaagcataaaagaataaagaaaggaactttcacccag

SEQ ID NO: 509578 - DNA, 624 bp, Homo sapiens
actaacttgctgaactctagtgttacagagagcatggtttgggaacactttattagaacatgtaagatgatactactaaggtacaaatcagacaactgcaagcatgaccacaagggaggaattctggaagagttgagaatcattatttggtgtgtgtttccctgctgttaaggagctctgagttacagagtaattacaaggcagtagcayagttgcagttatcaaggaagtcattttcattcagatcattggtgtgaagcgaaacagcacatttgtatataaggcaaaaaaaaaaagtgtacatttctattgactccggcactgtgaaaacaatctgctaattttggtagtgcctatattagtattgctttatttttactaatattgatttaatttgtgattctgtatttcaaatactgcattctcttttagaaagtaagcagtcacgcagggcaattttgtgagtctcctaaagacaggttctgctggccgggctcacgcctgtaatcccagtactttgggaggccaaggcgggtggatcatctgaggtcagcagttcgagaccagtctggccaacatggcaaaaccccgtctctactaaaagtacaaaaattagctgggcat

SEQ ID NO: 509579 - DNA, 579 bp, Homo sapiens
ctttgaatttatataaagataacaatatatgaagttgttataaacaatatataaactttgtctggaaaggactgttagtcttttctcactgttacgtccctagcacctagaaaagtatctgtcatttaaagtgtttaatgaacaatttataaatgtgtgagaaacaaataatttttttcaatgtaaaacttttatctcttattttaaagaagaaattgtattaaactttcaaaagaaaatataagctcctataattgtgacagatgattgtgcatacaattagaaaataaacaatagttgtctcttacactgttttctgtaaaccaaataaaaaacaacactggtacttatttgaaccatcttgttggatagatmaagtacaaaaaccataaagaggagatcatttgagggctgcacttcactcagagggaaagattttttttcaagaaaattaatatgttttggttttattcaggttgctttttggtgaaaaacacttgcaggaagacttacacaatatccattgcaactactgcttcacttatgttcctttaccagaacttagaaacagaatactga

SEQ ID NO: 509580 - DNA, 594 bp, Homo sapiens
ctttaagcttatctccagcagtacctggatacttggtttagactgtcaaggctatatactaactaaccgactaactattcaactatgatgtgctgggtaaagttcaaaactttcctgttgatacccggtgtcaatttggtgctgtctttcaaacggtctaactgctttgtaagcctggcttgactacatagctagagaggcataaaaggcccctttgggaaagtctgtattgaactctcccaaaaccaatattcatcacagatattttgacagtttaatctagagattaaatacctcatgtttttattaaacacagttatatacttccgcaaatgttgccacatcactcacatatgatcactggagatacagaccctcattcttcttttgacttytgttttcttcattttaattttcttcatttttactgacaaacgattttaaaaatatttgcatacattccttgctttgaaaaaaaagagggttttaccatctaactttttgtaaatttgcatatcctatagattttctgtctcaaaacaatttgtcaaatttaaatatgctaaaatttgatcctaaaaatgttttaaataa

SEQ ID NO: 509581 - DNA, 586 bp, Homo sapiens
gcaaatgttgccacatcactcacatatgatcactggagatacagaccctcattcttcttttgacttctgttttcttcattttaattttcttcatttttactgacaaacgattttaaaaatatttgcatacattccttgctttgaaaaaaragagggttttaccatctaactttttgtaaatttgcatatcctatagattttctgtctcaaaacaatttgtcaaatttaaatatgctaaaatttgatcctaaaaatgttttaaataataatactatgaataaatttagtaactttcttctaaattttatgacaaactggttttctaccttgtaaaatatatcaattccaaggctgagctgagattcttttccccagcaaattattatattaatagtaaaataagtatgaattaatcaggtttcaaatattgatggatatattcatactccaaatatcagcagcacacaatatacctctgtaagaaacctgcacatgtaccctctgattcaaaaataaaaattgaaaagtaaaacaaatccaacatatttgaaaatattaaaaatatttttatcccaaggttatgggc

SEQ ID NO: 509582 - DNA, 472 bp, Homo sapiens
accctatcgggctagtgaagtggaattcgccatgtactgcatgcagtcatgtactgcagtgaccaatccgggtctaatttctttgatgatatcattgacggggtagcaggggagaggcaagtgcaagagaagaaacggggtgaaacccactgcagggaagcttgggctggggcaggatcggggagccagggtatggggcatggttgggactgaaacccttgttaacactggctttagcaaaagaaatgggcaccacaatcccagaggacttccagaagcttcctccctcccccgcacctgggcacagagccttacctcccctgcaccctggccctgtctctctatttggcaagactcccatgtcatctgctcctctttacttcgggtccctcttggcactggaaatactaagtgaacccagcagttrcacaggattctaggaatttctcctttccaacttcctgaactggtt

SEQ ID NO: 509583 - DNA, 505 bp, Homo sapiens
atccaagagatgtgtacagaattaccagaaatgtttcattaaatgattgtttcacttgaaatgtggttccccttgaaaaaccaccaatacattcttatggtcaaactaaatgatataaagaaagttataaggccgaggtgatcrgatcacctgagatcaggggttcgagaccaacctgaccaacatggagaaaccccatctctactaaaaatacagaattagccaggtgtggtggcgcatgcctgtaatcccagctactcgggaggctgaggcaggacaatcgcttgaacccaggaggcagaggttgtgatgaatcaagatcacaccattgcactccagcctgggcaacaagagtgagactccatcttaaaaaaaaaagttatagtggaaggaattttttctcatgtgtgttctgaaaatccacctcgtggttgaccatctgttagggccttgaattcacattggcacgtgagctaaagaggctggtggtataatggaaaataat

SEQ ID NO: 509584 - DNA, 505 bp, Homo sapiens
atccaagagatgtgtacagaattaccagaaatgtttcattaaatgattgtttcacttgaaatgtggttccccttgaaaaaccaccaatacattcttatggtcaaactaaatgatataaagaaagttataaggccgaggtgatcggatcacctgagatcaggggttcgagaccaacctgaccaacatggagaaaccccatctctactaaaaatacagaattagccaggtgtggtggcgcatgcctgtaatcccagctactcgggaggctgaggcaggacaatcrcttgaacccaggaggcagaggttgtgatgaatcaagatcacaccattgcactccagcctgggcaacaagagtgagactccatcttaaaaaaaaaagttatagtggaaggaattttttctcatgtgtgttctgaaaatccacctcgtggttgaccatctgttagggccttgaattcacattggcacgtgagctaaagaggctggtggtataatggaaaataat

SEQ ID NO: 509585 - DNA, 604 bp, Homo sapiens
ttatagagaggacctccttcactatagtcttcgagttcctgcatgactgacttaagcatctcttttacagactccaggggcacaggcaactaaaaataaaagacattaattaagggctttcatttgcaaaaaattccaaaagtaaaaactctaaaatgatatattttatcttatttacatttttgtcattttaataagcactttacactttaaataataatacacgtgaaagtgttttttaattatcttttttctttgtttttctgctgttttgtattattatttttatttttttgtctttattmtatttttttcttcatgaacacagaaaagtgttgtacaatctaacatcttctgattctaaagtccatgctctttctattacttctgttaaccatgataattgtagaggaatgttaacttggaaagcttttccaagtgaacaaaataagttactgatgttttctaactgattttcaatggtgacagaaatacagatgctacaatacaccagacaacataaatcctaataaaagagtagtaacacaaattaatcaacaaaacactcagaagactgaacataatttaacatcatcatgacaat

SEQ ID NO: 509586 - DNA, 508 bp, Homo sapiens
caaaggcacttatgagagccctgcaagggtagaaggaaaagagaaaaggaaaaaagtagaaagtcactttaaggactgaaagcctarctcccacaaaaaaagtgggctatggaataaaagagcaatgtgagctttggccaacagcctaactatacaccaaagcttataataactttgatttaatattacatcttgctctttacaaaattcatccaattttatatcaaaactgctccttataggaagcattatgtttcttcagttcactgcttgattcaatggccatctaactaccttaaagtttgtatcttagcaaaatcacaggtaatatgcaacagacctttaggattcatcccaagccaaaaacgggggaaaaaaatccacaaattccaagagcctaatataaggtaagtatatatcttctatcttcctcactatgctctcagctctttaagacagatccgtatcttcttcatctttatatccccacagcagtgtttttagaatc

SEQ ID NO: 509587 - DNA, 508 bp, Homo sapiens
caaaggcacttatgagagccctgcaagggtagaaggaaaagagaaaaggaaaaaagtagaaagtcactttaaggactgaaagcctagctcccacaaaaaaagtgggctatggaataaaagagcaatgtgagctttggccaacagcctaactatacaccaaagcttataataactttgatttaatattacatcttgctctttacaaaattcatccaattttatatcaaaactgctccttatagraagcattatgtttcttcagttcactgcttgattcaatggccatctaactaccttaaagtttgtatcttagcaaaatcacaggtaatatgcaacagacctttaggattcatcccaagccaaaaacgggggaaaaaaatccacaaattccaagagcctaatataaggtaagtatatatcttctatcttcctcactatgctctcagctctttaagacagatccgtatcttcttcatctttatatccccacagcagtgtttttagaatc

SEQ ID NO: 509588 - DNA, 508 bp, Homo sapiens
caaaggcacttatgagagccctgcaagggtagaaggaaaagagaaaaggaaaaaagtagaaagtcactttaaggactgaaagcctagctcccacaaaaaaagtgggctatggaataaaagagcaatgtgagctttggccaacagcctaactatacaccaaagcttataataactttgatttaatattacatcttgctctttacaaaattcatccaattttatatcaaaactgctccttataggaagcattatgtttcttcagttcactgcttgattcaatggccatctaactaccttaaagtttgtatcttagcaaaatcacaggtaatatgcaacagacctttaggattcatcccaagccaaaaaygggggaaaaaaatccacaaattccaagagcctaatataaggtaagtatatatcttctatcttcctcactatgctctcagctctttaagacagatccgtatcttcttcatctttatatccccacagcagtgtttttagaatc

SEQ ID NO: 509589 - DNA, 548 bp, Homo sapiens
ctttttttatatttttagtagagacagggttttactatgttggccaggctggtctcgaactcctgacctcacgatccgcccgcctcagcttaccaatgtgctgggattacaggcatgagccactatgcctggcctattatttgtaatctatattctaaattagttcttctaaatcctaatgtttctccaaatcctcactttggaagaaaagtaaaagcaaaaagcaaacacttaaacgtgaagcatgattttaaagtggcttacaataacgcaaccagagcaaatgaggtytaaagatctctgagggtgctcaaaaaccccttcaggggatccatgaagttaaaattacttttacaataataccaaaaaaaaatttatatattacatactcattttctcatgtatgtagagctgagtttttttgtttttgtttttggagacagaatctcactctgtcacaaggctggagtgcagtggcacaatcttggcttaatgcaacctctgactcccaggttcaagcgattcttctgcctcagcctcccgagcag

SEQ ID NO: 509590 - DNA, 529 bp, Homo sapiens
ctaagcacttattgtattttgctgaacgttaaaattatataaatgtactacagttgcctcaagatgttaaaaagtcagcttttcaaatctagtcacggcctactcatatgacagacccaatwcaaatgagcaaaattgaaaagttacacatacagacaacttctcaaccaccaggctgtttagtttaagttagaagtcagaagttctgagactctccttttacccaccttgagcaaccgcagcaagttttcccttttcttcagggctgagctgcaacatcgtatttataacaggaagaaggctctctctctcactacctggcttcaagaaaatgaactgcagcaagacgttcttcaagtgttccacgttagctgcagactcctcttgattcctttccaatcttcttatttcacttttgagaagctggtgttagagaaatgagttaaaaatgggctttaggagcttctgattaaatatggcagactgaactcatgtatttttcttctcttccccccaaatttcccccttc

SEQ ID NO: 509591 - DNA, 274 bp, Homo sapiens
gccactacatgtgaatactggcagacgttagtggctaaasataaacattagataaaacataggtcttcactgagcagacctgaaatagcagagcaatgaagtacattacaaatcagcatcccagtacattttaaaaaacaaaccaacaagggtgtcatgccaccagtcaaaaggtactttgcttaaactggcattctttaacattcatgttgtagtggtaagtacttcatttcatacagccacagttattaatactttcctaagggctaccagc

SEQ ID NO: 509592 - DNA, 591 bp, Homo sapiens
catatattgtacaaatcttaggggagaattagtgcttatgcattaaaatcaaatcatcttgcagcacaccgagaaaaaggttagacttttaaaataatttcaaagtcatgaaaagagcaaatatgctcaagaaagagcctagcaacgctcaatgaccaattccccttttatatagtttggtatctgaattagaatgccagaatctacaaattcctctgggtgwgggtgctgcattttgaggattttataacactgccatcaccaagctctcttttgttattcactttaaggagataatttacgggcaaccagggaacataaaccaaagtagatgtctatctagatatatagatacatctccatatcattgacaagataccttctggcctagtgtgagtacaatctatgggtgtggttggagagaacatgtgttccacctgaatggcagatcaagattattccttctcatctgctgcaatggctcagtgtgttaaggagaggagcgagacagcaagaactgcattcacttagtcatacagaccaaaaggaggaatgtcgcccagccctcttaactgacccagaacacagctc

SEQ ID NO: 509593 - DNA, 558 bp, Homo sapiens
aaagtagcacagctgaattaagagcatgagaaaatgtatacaattttgagtaataagaacagaaatcaaaagtaactattgtatgttatattttagtagagcaacactgaagaagaatgaaaacaagaaataatattaaatatgaacataaggagaagakaataatatttttaaaattttgagtttctaagtttacctgaaattttaattttggtttcttatgtaataccagagttattaggaagttattagctaataacactattttcagtgatattttaagtatttgtcctagaaaaatttctattttttaaaaatgtatatttaaaaatacattaaatgtgtatatatatcaatcatatgtatcgatttctgttttttttttgaattgcaaatgaaatctgtatttttgtgttcctggaaaaaaataaacttgactggatcgtaatatattattcatgctgtaattcaatgtatttgaatactttaagaatgttacatttatagttaacagacattgacctataaattttctttcatataatgatgctgtgagac

SEQ ID NO: 509594 - DNA, 321 bp, Homo sapiens
accactagccaatgacttctttagagatcttgtctttgggtrtttccagatactgtcctatacagtaacagatacattaaaaataatagttttaaaaatttattaatcacagctggaaaatacagtgaacctactgactacactggaaactggtaaagaaaggtaaacaagcaaacatttattctgcctttcccatatgaacagttacactgggcaaccaagtaagaggtgatggaaacttttctttttataaaacagtattccagataataaaataaaggagtaacacaactagaacattatcattttacaacccttaat

SEQ ID NO: 509595 - DNA, 349 bp, Homo sapiens
agtggggtctgaagagtttatgtttattggattttaatgacttagttaacaaaggtcattcctaaaagtaatagaaaactaagggtgtggaaacagaacggaaaagactgactcgagggttatttctagtagttccttggtgttgtccttagatacatgtttaatccttaaaagcaattatgaaggagtcttcctcataaccaatttactgatgctatattcaactatacttgtaaaatgttattttagacctctcagtaacaaaaggaacagggcttaaaatatgttagataatattgccataaacaatgtacwgttaacataatattgctgacagtataattgtaat

SEQ ID NO: 509596 - DNA, 593 bp, Homo sapiens
caggaatacccccagccctgtgagcacagagcactggtgtgagttgtttacttgttaatgagtttgcaccactgtctgcatgtaatgagtcattcaggtcattctgggatgatgttagyatgcacaaacccctcctttaatctggttggctagttcagaatagacaagttttaacactgcttccttctcccatcaagaagtaaagcccaggttctgaggaacagactccatctgcagaccatgtttggtgaacctgagctttgggaaagacacggcttcaagcctcaagtcgttttgccccttcctgtggctgacagcatcagaggtcaggatcacaatgaattttaccattttgatggggattttaaaacgtgactgtttaaaaaacgcttctttgaaaatttttttaatcttgatttatataagcatttatttcttgataagatttgaattataacctaattgatagacttaatattcttcggggctaagactacatgagaaaaaaatgttatacagattttttaaatgattcctgggcttaaggaaaaaattacttttaaatccttaccagtctcccagataattagtga

SEQ ID NO: 509597 - DNA, 593 bp, Homo sapiens
caggaatacccccagccctgtgagcacagagcactggtgtgagttgtttacttgttaatgagtttgcaccactgtctgcatgtaatgagtcattcaggtcattctgggatgatgttagcatgcacaaacccctcctttaatctggttggctagttcagaatagacaagttttaacactgcttccttctcccatcaagaagtaaagcccaggttctgaggaacagactccatctgsagaccatgtttggtgaacctgagctttgggaaagacacggcttcaagcctcaagtcgttttgccccttcctgtggctgacagcatcagaggtcaggatcacaatgaattttaccattttgatggggattttaaaacgtgactgtttaaaaaacgcttctttgaaaatttttttaatcttgatttatataagcatttatttcttgataagatttgaattataacctaattgatagacttaatattcttcggggctaagactacatgagaaaaaaatgttatacagattttttaaatgattcctgggcttaaggaaaaaattacttttaaatccttaccagtctcccagataattagtga

SEQ ID NO: 509598 - DNA, 593 bp, Homo sapiens
caggaatacccccagccctgtgagcacagagcactggtgtgagttgtttacttgttaatgagtttgcaccactgtctgcatgtaatgagtcattcaggtcattctgggatgatgttagcatgcacaaacccctcctttaatctggttggctagttcagaatagacaagttttaacactgcttccttctcccatcaagaagtaaagcccaggttctgaggaacagactccatctgcagaccatgtttggtgaacctgagctttgggaaagacacggcttcaagcctcaagtcgttttgccccttcctgtggctgacagcatcagaggtcaggatcacaatgaattttaccattttgatggggattttaaaacgtgactgtttaaaaaacgctkctttgaaaatttttttaatcttgatttatataagcatttatttcttgataagatttgaattataacctaattgatagacttaatattcttcggggctaagactacatgagaaaaaaatgttatacagattttttaaatgattcctgggcttaaggaaaaaattacttttaaatccttaccagtctcccagataattagtga

SEQ ID NO: 509599 - DNA, 551 bp, Homo sapiens
gggattaccttatcacaatacattattcttccaactacctcctttttgatgttactggaaaatatgtcatagacatgttacatttctacatgtcaaatactcagcaatacattatgcacayattatcattgagacggagtctccctctgtcgcccaggctggagtgcagtggcacaatctccgctcactgtaagctccatctcccggtttcatgccatttttctgcttcagcctcccgagtagctgggactacaggcgcccgccatcatgcccggctcattttttgtatttttagtagagatggggtttcactgtgttagccaggatggtctcgatcttctggtctcgtaatacgcctgcctcggcctcccaaagtgctgagattacaggcatgagccatcgtgcctggccgttatacacatattattttataaacaatttatgataaagagaaaacatgcatttatactgtcttttataatgttaatattacctataccagtgttttttaaaaaatgtgcattcaaatgactgtcttgtgtaacttgttt

SEQ ID NO: 509600 - DNA, 551 bp, Homo sapiens
gggattaccttatcacaatacattattcttccaactacctcctttttgatgttactggaaaatatgtcatagacatgttacatttctacatgtcaaatactcagcaatacattatgcacacattatcattgagacggagtctccctctgtcgcccaggctggagtgcagtggcacaatctccgctcactgtaagctccatctcccggtttcatgccatttttctgcttcagcctcccgagtagctgggactacaggcgcccgccatcatgcccrgctcattttttgtatttttagtagagatggggtttcactgtgttagccaggatggtctcgatcttctggtctcgtaatacgcctgcctcggcctcccaaagtgctgagattacaggcatgagccatcgtgcctggccgttatacacatattattttataaacaatttatgataaagagaaaacatgcatttatactgtcttttataatgttaatattacctataccagtgttttttaaaaaatgtgcattcaaatgactgtcttgtgtaacttgttt

SEQ ID NO: 509601 - DNA, 553 bp, Homo sapiens
ttgggaatggcaagatcaaaccttctcactttcaaatttatgaaaaatattgttttccgaacgaatgactttgggatcagaaagccatcattctaattgatggttccacgactacatgggctcacactcccaagaacaaaagtaaatcatcacaaaggtkcttcctgataattctagagaatggagaattactgtaacatctttctgattttaggagaggtagcagttccatgtttagcctaaatgctattttttctaaagctcagccaagagactccattataattttcaaacgtgcataacttaacttctcatattaaatactactatgcttaaattagtcaaaacattttccccatctacaactctatcttttcattgtaatcattttcacaaaagtgactgcagctaacagaccctaaaaggggaaaatctagggtaggttatctgatctagttagtttggaagacaggatctagagattatttaatatgaaataggtcacctgaaatgaagtgtttactgaaaacagcttggatcagcccagttttct

SEQ ID NO: 509602 - DNA, 553 bp, Homo sapiens
ttgggaatggcaagatcaaaccttctcactttcaaatttatgaaaaatattgttttccgaacgaatgactttgggatcagaaagccatcattctaattgatggttccacgactacatgggctcacactcccaagaacaaaagtaaatcatcacaaaggttcttcctgataattctagagaatggagaattactgtaacatctttctgattttaggagaggtagcagttccatgtttagcctaaatgctattttttctaaagctcagccaagagactccattataattttcaaacgtgcataacttaacttctcatattaaatactactatgcttaaattagtcaaaacattttccccatctacaactctatcttttcattgyaatcattttcacaaaagtgactgcagctaacagaccctaaaaggggaaaatctagggtaggttatctgatctagttagtttggaagacaggatctagagattatttaatatgaaataggtcacctgaaatgaagtgtttactgaaaacagcttggatcagcccagttttct

SEQ ID NO: 509603 - DNA, 397 bp, Homo sapiens
aaattttgaattgaaatactttaggtgacaagtaaaggcaactgtgaaaagcaacatttgattttagcggacagggtacctgtggaagaagactggttaggagtggaagtgaggtgtaaaggcactgaaatgtctgaggcagggacaatattcagtttctcttcctctatcacctagtgcaatgtacttgttaaacgtttgttgaatgagtgagaaggactttagagaaattgctttggatatagggatacactttactattggagaaaacacccgagatcagaaagttgctaatgagataggkgtgggggatgaatggtaaagacactgattgtacctttttggagttttctaccattgtgttttatttcttttcaccggcatgttcagtatgtta

SEQ ID NO: 509604 - DNA, 540 bp, Homo sapiens
gtagataaggaaaaatgtcttttttcacttttggagttatatatatagtgtctgtgggtttgtgtgtgggtgtgtagagttaccatgtacaaactgggtcattcagaatcactggaatcatagcagaagactagtagtaaattccatcctgagttataaatgctaatattccttcagttggtactggcttgcagcaatcccaaattttatattctgaaacatacttccaagtcagaataaaggtaacataaaggtaaccccatttttagaacttcaatatagagcagttttttcctcttttactccctctgctttctcctgaaaatatttttcccctctcaggcaaacaaacacaaattattcttttaaaaaataatattctgtggagtttttcaattccaaaatatttcaaatattaaaaatgcttgatgtgaatttgtcaccagctagaaattattgcwttggtaagtataacatttgggtgtgatgattttataggtgcaaaaagtctgaaatatttgaaaactgaggaaagggcca

SEQ ID NO: 509605 - DNA, 571 bp, Homo sapiens
cagaactccttgaagtttagacatcaggaactttgttttacatcaaagtgaataccaatgtacagttggtatgaatttcctaggtccaaaaacacagtggggacacaagaaaaaacrgcctcactgtaatgcatctgtaatgaatcagtcatctcatgtgaaacagtacactgtaaatttgaaaatataatctgtgctagaaaggctcaagctgtactgtaaattcaatctcatgctgtctaatgggaatttatcctggagatgagtacagtgtctgctgcctggctgtgtaattggatggagcaaggtctagctgcaaaaaaaaatctgcatttagatagccacatacatataagaagccaagatatcatatttttagagacaatataattctgcatgtgcagaaaactgtttaaatattaatattgcttttggtaccatactatgaacatcaattcctcatacctgtttttaaagcaataggagaactaaagtaaacatttgcttttgttttgttaaaaagaaatgcagtgttaatcactatgcttttaaaagtctgtaaaggctgcag

SEQ ID NO: 509606 - DNA, 652 bp, Homo sapiens
tagatgtgaagaagaaagcatctggacaagaacttgagagtaaagaagaaattgccgaaaacaaaagagtttgtaaattcagtaaaactctacacaaaagcagttgccttctcagtgagttgagrttaacacaaacatgaaagaattgtctcttgtcaactttatttggagaacccagccatccatgtgtgatttaatacttttaaaagtccagatgatgcaggagatacgtggagacatgggccagagcattcagttagctttcaaatttatttcctcacacatggacaaccattcagttcaaatgaaagcatagaagcacaacacatctacagatgtgtccaataaatgtttgctttggtttcagaggttttttttttcttgtttctcaactgatttaaaactggcatgctttaaaagaagtactcagttgtcttaaatttatagcagcagatcagatattatatcatccaacattagatacacataggacagtaccacacctgaatcaaaattcttaaatggcagacgcactaggaaatggtaaaataaactacatgtaaaggtattcttgaagagagctctccaaataaaaaggatgggaataaaataaactgtgttgaaagatgtttttctaaatgcatctaatgat

SEQ ID NO: 509607 - DNA, 594 bp, Homo sapiens
tgtgatgactagacagctctggttagttagagtctctttaacctattgctaagaagtattttgttgaagcatttattttagagttccttctttaccctcrtactacataatagagctgaaaagtaaaattggaatatatatttgggcaagagtaactcacttattcttacagtgattggtgatttttcatcttacagatcaaatagtgacccattcattttaaccaataatttcttgtaacttgcccactctcataaagctaggagattgcagaagcgatactagaatatagcactctcactttgttacagttgagcaggtaggtttttgttatgctctaatggattaactcaataacatgtttgtcctaaaccatcaaaatatattgctgttgatttataaagaataaaaagatagtccatttaattatacacattctctaatattattagatggacctatgtttgtagccaagcttctagaatctaatgcatgctatagctgtttgagcttcagggagacatctgatgagcaatggaaataataacagatattgaaggggagggtagatgaattttaacagagacacaatga

SEQ ID NO: 509608 - DNA, 696 bp, Homo sapiens
actttgttacagttgagcaggtaggtttttgttatgctctaatggattaactcaataacatgtttgtcctaaaccatcaaaatatattgctgttgatttataaagaataaaaagatagtccatttaattatacacattctctaatattattagatggacctatgtttgtagccaagcttctagaatctaatgcatgctatagctgtttgagcttcagggagacatctgatgagcaatggaaataataacagatattgaaggggagggtagatgaattttaacagagacacaatgattcagggaagggcagaacatatttattgaggatttcgaaaagtaacaggttttaaagtggcagaagtaattttgttctgattgccctaattcatctaaaaacrctaatttttgttaattcatgactccatctgatttttcacatgcaatttaattctagaaaatcattagcatcaccatttaaagcacttctttcttttgattagtattccagatgggattaataattttctaccctcacagcagaaacaaaaagatattttatcagctcattccacctgtcacgtatcacatcttgcataatttatgcccactgtcattgccaagtaaaacttaagcaaagttttaggttttgaagctaaatttttgaatcataattatttaataaatgttcgtaaaaac

SEQ ID NO: 509609 - DNA, 591 bp, Homo sapiens
aaatctttccactaccagcataaaggtgaggtctgggcagcccagaagcatgagtgtaaatacagacccaraagagtatagctcgatttcttcaagatcctattcagaggaccagaaacttccaggatttccttcttgtccattccaagtgtttgtgttcacttgacagttttcttagggatgtagttcaacctagattctctagagctgctttacatatttataattttataagaggtcacattcaggtctttaaacataatattttattatattaaaagttgcttagggggccaagggcatggtggctgacacctgtaatcccagcattttgagaggccaagtcaggaggatcacttgagcttaggagttcgagatcaacctaggcaacatggtaagacctcatctctacaaaatctagaaaaaatcagccaggcatggtggcgcacctgtagtcccagctactcagaaggctgaaatggaaggatcaggatggcttgagccaggaagttcgaggctgcagtgagctgggatcgcaccactgcactccactctggatgacacaaggagaccctgtctcaaaaacttaac

SEQ ID NO: 509610 - DNA, 557 bp, Homo sapiens
ctgtaaagagaaacaggattatatttcttttgacataagcatatttgagtatcaattaaaatgtrttatgtacaaaaattaggtaatgtagtataaaatattaaatctgttggcaaatgctaattaaattatggttaaagaatagttatttaactgaactcacatacttttccctgtctaaaatttcaagattgttgaggctggagaaacttcttttaaaaataataaatagaagtaccagagtactcagcttattgatgacaagttaaaataatccacaagtaaagaaaaaaggttattatagaaaaagggcaaatgagatgtttaactgtgtgtatttatttaaactatatttattcatggattactatatgtgaagcactgtgcaagaatatgatttaccagatttttccaattttgatttatcatatttacctggtgatgcttgcaggttgatctgcattttatgaaaaagattcctccaggtgctgaagcatcgaacatcttagtgggagaactggagttcttggatcgaacagtagttgcgtttgtcaggt

SEQ ID NO: 509611 - DNA, 515 bp, Homo sapiens
aatacaaactgaattatgcttttctcattttttagaataaggctatccattactaaaactgtaaaaaaaagaaaaagataaaaaaaagaaaggaaacacagaatattgactttagcacattaatttccaagcaatttacccaggaaccttgttttcttccatacttctaccatcagtgtgattccaaaatgcagatagccttttactctagtcctattcccacagcaaaacatgtatatttagggccccgttcccatatggctggtgccctttgtttgatgctacagctatctcaaaagctgttagtgcgcctcctcttccaaacattgaataccttagccaagttacttgatgaaaagttcaggtactgtatcaactgtagaatatatgtcctctatgaatctttggccttaactcaaaatatagcagattayataactccatgctttgattatggataaaatattctacaactatggaacagcacagccaggagaggcctcattttttaagag

SEQ ID NO: 509612 - DNA, 539 bp, Homo sapiens
aactaggcttggaggaattaggtgacttgccttagtaagcagttgtaagtgcaatgctgagatttactcctgtgctcttagccctgactctctcctgcctccttacactgcctttccctatcacatttgtggtaagtcctaggtcggatgctgggaaatgagaggggccaagacacacacagtccctgactacatggatctcacagtctagcccgtgtcaaatacagtagcttccaaactgttttgactctgacctacagaaagaaacacactgtactgggtatagttatttattatatgtgttattctccactctcctccaacaatataagaatttcacaaaacaaccctttgactatttgtacactttcatattttctattctattctattgtattttatttaacaaaatgatggttgacacctgctaaattgattttgggacccacaartgtgtggtattccacagttaaaaaatgctggtctaccaggcatcttactgtacaggctctccttctagctacaactccatgaatagg

SEQ ID NO: 509613 - DNA, 607 bp, Homo sapiens
ttgcagaggcctggagcgccctccccccgtgtcattccttgcagccttcatgggtcctgctcaccccacagccaaagcatgcactgggctgccctgtgggcacagaacgagcaccgttccaaggctgtcttcctggcaaccacagtctacatttatttgacatttgttcgggagtagctctgtgactgtgcttctgaaacacatcggtggacggcasggggcggggcggggggcgggcggtcgtggccattgctgctttcagataaactccctttcaaagcacagtggtaggagcaaatctaatagcccaccagcaaaacgttagttattttaaggcaagccggtcctcaaccatcctaataaacaaagaacaaggagctttggccactgtgcacagggaagcccggtgcttcagaaacaaacagatttgagcttttcactgatgaggtgcccaatacaaatttcagttcattattggatgacaccatacatggctctccaaagcttttttcttttcctgtctaaaacacaggactagcaaatcttgctcgtatctcaggtgtgtgagaatgctttcagctacagaagaaggaagctcaggtcaaat

SEQ ID NO: 509614 - DNA, 607 bp, Homo sapiens
ttgcagaggcctggagcgccctccccccgtgtcattccttgcagccttcatgggtcctgctcaccccacagccaaagcatgcactgggctgccctgtgggcacagaacgagcaccgttccaaggctgtcttcctggcaaccacagtctacatttatttgacatttgttcgggagtagctctgtgactgtgcttctgaaacacatcggtggacggcacggggsggggcggggggcgggcggtcgtggccattgctgctttcagataaactccctttcaaagcacagtggtaggagcaaatctaatagcccaccagcaaaacgttagttattttaaggcaagccggtcctcaaccatcctaataaacaaagaacaaggagctttggccactgtgcacagggaagcccggtgcttcagaaacaaacagatttgagcttttcactgatgaggtgcccaatacaaatttcagttcattattggatgacaccatacatggctctccaaagcttttttcttttcctgtctaaaacacaggactagcaaatcttgctcgtatctcaggtgtgtgagaatgctttcagctacagaagaaggaagctcaggtcaaat

SEQ ID NO: 509615 - DNA, 607 bp, Homo sapiens
ttgcagaggcctggagcgccctccccccgtgtcattccttgcagccttcatgggtcctgctcaccccacagccaaagcatgcactgggctgccctgtgggcacagaacgagcaccgttccaaggctgtcttcctggcaaccacagtctacatttatttgacatttgttcgggagtagctctgtgactgtgcttctgaaacacatcggtggacggcacggggcggggcggggggygggcggtcgtggccattgctgctttcagataaactccctttcaaagcacagtggtaggagcaaatctaatagcccaccagcaaaacgttagttattttaaggcaagccggtcctcaaccatcctaataaacaaagaacaaggagctttggccactgtgcacagggaagcccggtgcttcagaaacaaacagatttgagcttttcactgatgaggtgcccaatacaaatttcagttcattattggatgacaccatacatggctctccaaagcttttttcttttcctgtctaaaacacaggactagcaaatcttgctcgtatctcaggtgtgtgagaatgctttcagctacagaagaaggaagctcaggtcaaat

SEQ ID NO: 509616 - DNA, 596 bp, Homo sapiens
ctattatctgagagtctggagtgttgagatcaaccattattctgtttaaatcagttgtcttatgtcctcttggtagcttttttgggacgatagtaagtatccttgctacagtaaagccaggtttaatttctagctgttgaatcagtatcgctctaatgaaacttttttttttaccagcactcaaaaggctatgagaatggtacaaacagattgagactccagaagcaaatcttgaagagcgaaaagaacaagcctctggtaagtcacacacaacttccacttcctagaatgtcggagctgcaggaaaactcctttgagccacgtcggctctctgtccctctgcctatgtgacatgtgtcacaaacatccaggtcttaaaaaaattctgtctcattgtatttcttcagtaaaatttgagtttgcccttattggctttctttggattttacacttaaccagttcattcattcagcagctccgcacctttcaatgtcccaggcactattccaggtgttgggggcggtgctggtgtagacggaacgcaggcagagacatcccccaagcggtgccaagcrgcaggaagacaggctgagcag

SEQ ID NO: 509617 - DNA, 461 bp, Homo sapiens
tctttccctcaatgagcccaactccatctcccactggtcctggatgggyccccaggtgacacagaaatccctctttcctctgctcccagcgatgctcttctaactctgagcacagccatctcgcctgtcttcgctggcctgcgagagcctgcagcacctcacccacacccggccagcctttgcctcttcctgcctccagggctttatggcttcccctctgctcccgatggtgtcctgtcaccagcgtccttctcccacggatgggttcggtctccgtccggctcaggcctggcccctcctgctggtgctcactcactccctgctggcctcaccaagtcccagacttcaacaccatccattgggagccgacagccgagaggccgcctgccctgactctgcctgctcctcatgcacctgatgtctgatgagcagaccaagcccacccgcagcaaccccctccc

SEQ ID NO: 509618 - DNA, 623 bp, Homo sapiens
gacactattttaaaaatgttttacttctgagtgaaatgttgcattttattttactrgaagattcttatgtagtttaagtacattttacggtattgtcaaagagcatgagcaaaatatttaggaaagatgagaccatatttcttttatttatgacattgccacaaaaaatcaggtagatgaatttgtattaagtttttgtaccaatttcatatctaaaatttcaaagaattttattgcaacaaactctttcttaccattaactcaaaaaaattctgttttaaattgacttcattccataagtctctacactactaatttggccagaagttattttcaatcctaattgggaacaacaaagatccacatgatatcctttcaatttatgatgttgaagaaagttgaattgtaataatttgagtgtgcagtcaaagcaattttcaatactatgtatcactgtagaaacaagggagaatgtcttggttaactatttaagtggcttgagtatggcaattaaaatttcatctaagctcattttgatgaatcttgaaggtgacatttatttcttatgctctgaacatcgtaagttctgttgatttttatgggaagttttcaaggtcattttc

SEQ ID NO: 509619 - DNA, 436 bp, Homo sapiens
aattcaaatttctaagactctatttatctcttctcctcaataatgtttcttttttcttttgcttttttttagacrgggtcttgtgctctcacccaggctggagtgcagtggctggaacacagctcactacagccttgacctcttgaattcaagtgatcctcacacttcagcctccagagtagctttgatgacaggtgtgtgccaccaggcccagctacttttctttactttttgtagagacatggtcttgccatattacccaggctagtctcagatccctgggctcaagtatcctcctgcctccaactcccaaagtgctgggattataggcataagccaccatgcccagctaatgttttctatttaccatagcttttcacatatatatgttattatatatgtaatatacatatataatatagtatggatgtgtata

SEQ ID NO: 509620 - DNA, 436 bp, Homo sapiens
aattcaaatttctaagactctatttatctcttctcctcaataatgtttcttttttcttttgcttttttttagacagggtcttgtgctctcacccaggctggagtgcagtggctggaacacagctcactacagccttgacctcttgaattcaagtgatcctcacacttcagcctccagagtagctttgatgacaggtgtgtgccaccaggcccagctacttttctttactttttgtagagacatggtcttgccatattacccaggctagtctcagatccctgggctcaagtatcctcctgcctccamctcccaaagtgctgggattataggcataagccaccatgcccagctaatgttttctatttaccatagcttttcacatatatatgttattatatatgtaatatacatatataatatagtatggatgtgtata

SEQ ID NO: 509621 - DNA, 595 bp, Homo sapiens
aatcggaagtctttaaaatttttaatgtgattatttactcagcccaagacccccgacccacaagagatacacacaaacaccagaatagtcattatataaggcaagtgcaaactgacggttttttattttgtggaaaatgtgcctgtatcgaataaatagttacatatttgagttcagctttttattctctagaattaaatttctaatttactataataataatagctaatgtttattgaacgcataccrcatgccaaggattattgcattgctcttatgtattaactcatttactcataaccgcagattgaggcaggtagtcttgttatcccagttttacagatcaggaaactgaagcacagagaaactaagaaatttgcccaaattcttatacctgataagtagcagaactggaatttgaacccacacattctggcacttaatcattatataattacttttctatttggataaactttatcttaaaaattatggccaacagaatagctcttgaatatactgaaagtgaagaaaattctaattaaagcaattgtaaatgatggtaaacagagcctactgccttaaaataaaaggt

SEQ ID NO: 509622 - DNA, 622 bp, Homo sapiens
ctgacacattctatgtatttgtaacttagcaaccagagtgagcctttaaaaattatcagagagcgccactcctcttagtaaagcactaccccaccccagtcacgtagctttctgattcacaggagtaaaagccaaagtccttataatggcctaaaaatcgtacataatctgttccttttcagatttcattcactaccatcttcccccttctctctctgttccagttacaacagcttgctgcccccctcaaacacaactagcacgttcctgycccagggcctttgcacctgctttttcctgttagtgcaacaagcttgctccagatatctgaaaggctgactatctcgccaccttcagatgtgtgttctaatgtctctttatcaatgagagcttctttgtccaccctgggcatcttcttgcccttccctgctttattcttccccatggcagttactcacattggacactaaacacttgtttccttagctaggcattcttctcctaccctcacaacagtaggaatgtcctaaggttctgagaagactcctgtgctaggtttccagactcctgtcctctcacatttggtgctcatgcacctcttgttcattagtgcactccagag

SEQ ID NO: 509623 - DNA, 473 bp, Homo sapiens
gcttgctgcccccctcaaacacaactagcacgttcctgccccagggcctttgcacctgctttttcctgttagtgcaacaagcttgctccagatatctgaaaggctgactatctygccaccttcagatgtgtgttctaatgtctctttatcaatgagagcttctttgtccaccctgggcatcttcttgcccttccctgctttattcttccccatggcagttactcacattggacactaaacacttgtttccttagctaggcattcttctcctaccctcacaacagtaggaatgtcctaaggttctgagaagactcctgtgctaggtttccagactcctgtcctctcacatttggtgctcatgcacctcttgttcattagtgcactccagaggttaggacctagagtacgtggctgtccttcagaggagggaaagggattgcttaggagcagagaagggagctttggcctcgcag

SEQ ID NO: 509624 - DNA, 556 bp, Homo sapiens
tatgtcttttccaaaggcataaaattaatctgatttttaattatttttcccaatagcatataagcttcaatttagtttccacttagaatcaatattgacttaagttaccttagtagtttcaccattttaaaaagaagccatgtcacagccagcctcataaaattatggcctagttctcattaatattaatcaaaagcattaaacttaatttttctctttaagtttaggaaggtataaaaataggcagggaaaaaaaaaatacttcttccctgaatgaaattaggatcactaactggtggttagcatgttctacatgtcaattggaatgcactttctattctactactaataaacmgtttccatgggtactcaatcttatcattaatcctcaagtgtagttgtatgccttatgtaaacttcggggagggttagagtggcttcagcacagaaataaggacaccttgccatctttttatatgaaaaaccagcctgaccttcactgttcaactaggtatttagaagatatagaagcataagatctaccataaggtgaata

SEQ ID NO: 509625 - DNA, 648 bp, Homo sapiens
aacagggcctccctctttcacccagactggagtgcagtggtgtggtcatggctcactgcagcctctacctcctgggctcaagggatcctcctgcctcagcctcttgagtagctggcaatataggcccaagcctggctgatttttaaatttttttgtagaggtagtctcgctgtgtcacccaggctggtcgggatctcctgggctcaagcaatcctcccaccttagcctcacaaagtgcttagattacaggtgggagcaaccacayctggctaagtatattatttaaaaaacaattatctgccagccgggcatggtggctcaagtctgtaatcccaggactttgggaggccaaggcaggcagatcacttgaggtcaggagttcaagaccagcctgaccaacataatgaagccccttctctactaaaaatacaaaacttacccaagtgtggtggcagtcacctgtaatcccagctactcaggaggctgaggcaggagaatcgcttgaacctgggaggcggaggttgcagtgagctgagattgtgccactacagttcagcctgggggacagggttagattccatctaaaaaaaaaataaaattctatacttagtttattatttatactcaacgatacttgatatgaaccca

SEQ ID NO: 509626 - DNA, 308 bp, Homo sapiens
cttcagcatttcacaaaaggaggtcatgagggtaggtgggagcccaggtgagggaggaccctatcatcttggagtttaaactgtgtcctcagacacttgttggtttttagctggaaagtaacagaacagattaatgcttcagaaatccgctaggccaggtgcagtggctcatgcctgtaatcccaacactttgggaggctgaagcaagaggattgcttgagcctggcagtttgagactagcctaggcaacacagtgagacctygtctctacaaaaaaattaaaaattagccaggcatcctagcaagca

SEQ ID NO: 509627 - DNA, 420 bp, Homo sapiens
tttttgttctttttatatattatttatttaattttttgagatagcatctcactctgctgcccaggctggagygcagtggtgccatctaggctcactgcaacctctgcctccccggttcaatcaattctcctgcctcagtctcctgagtagctaagattacaggcatgagccaccttgcccggctaatttttgtatttttagtagtaggggtttctccatgctggtcaggctggtctcaaactcctgacctcaggtgatccgcccaccttggcctcctaaagtgctgggattacaggcgtgagggacggcacccggccttctttttatattttaaaagtaaacctccttttaaaatttttccatgtcactgaaatgatgttgaagagtgaatattctaagagctacacagagatttgtaaa

SEQ ID NO: 509628 - DNA, 389 bp, Homo sapiens
accaccagcagcaacaacaacaacagaacagaagctggaacacaaaaccaccaccaccacaatcaccagttgggggttgggggagggtggccgcgctcaaggccctcaggcccagtcccctcgggtttaaaaaagaaaacagcagactcattcctgtctgtaggcaggaaaaatccaatcaaagktctccattgctagaaagggaagtagaataaggagaagggcttattgatcttcttgtggtcgatcgagaccatacatgtagtaaaaaattaaattcagacagcaatactttctacactgttcaaaagcatcggagatcagacgcaccacactccatggggcttgtgcactagaaagaaaaggcaggccgagtgaggtggctcacg

SEQ ID NO: 509629 - DNA, 632 bp, Homo sapiens
aagtagatagatttcatacagaccacccagcaaagagtgctgggattcaccagagaagagatgggaagcaccagaagtaaggagagggttcaaggcagcttgcctggccagggactgcctgtgagccaggaatcttctatacgttggtaaacagactaagagtgaaaccccagggctcagcttttacaatcttggctataagagaaaccctcaactcattagctagcgccttgggtctgacatacggagctgcctgaagattgcacagagatgttgctccagaatgggaacccacacagaatctcacaggcaccctagcctagagcagcctcagccaggtgccatattgagagcctacatgctggggatctacagacatggctgttgccactgcactgcaccaaggagagrgacaggagcctgggcactcacacacacccctgggagggtccctaccaccctgcaatgggctgctgttgagactgagacatgagcggaccacacttcccacagtgcctgcccaagccacttgcctgggagggacgccaccctctctggtcccaggctcaaggtgccattttgagtttaatgctggttgcaccctgccctcaggcccagtttgagctgactca

SEQ ID NO: 509630 - DNA, 455 bp, Homo sapiens
  misc_feature (1)...(455): n = A,T,C or G
aactacaaaattgtaagataatgtttgtattgtttaaagcaaccacgtgtgtggcaatgtgttacagcaacaataagaaacgaatacaaggagataagattaatacatayacaatattagcagtttcatcgaatcagattatgtaattattatatgcttaaactgtgttgtttggatcaaaaattgaaaaggcaataggaagaaatccagagaaaggaaaaggtagtagctaacattcattgaacatgtacaacataccaggcactacaagatgccttagatttgacatttcattgggtcaatttcagtgctccagtaattgaataggaaaaatggaaaatagagaaagatatttgcctttgtataagaggcttacgtactcatcaggtatgattttaaatggaatntgggttgtgatgctctatgtttctattggtttgtcaaatattccattt

SEQ ID NO: 509631 - DNA, 622 bp, Homo sapiens
ctctacaacagggaagctcttaacctccctccctaaagaagggagtgatggacggttggggagtgagggttggtgtgtgagggctgggcaaaaaatcctggacccaagaatttaagagtttggctcttgcaggaggctggaagagaggagaattagctttttattctttagaatctcctacaactgtgggaaaatacataatacttaaatagctctatcaattsccctggacatgatttttattcatttcttgagaagagcagacccaagtcagatggtggagaggggccttggcagagtcatgcatctgggtcttcattgtaacattgctgttatttatagatatttgttgaataaatatacaaactacttcagtgatgtgggtttattatcacctcttactacctctcttgcttcacttggaaaacagaaatggtaattataccattgttctacctctcctggagaataattactgtaaagattttttttaaagtggaaaatgacaattttgaatgagtgcaaaaattggttactatggtagatagaatatggcctatgcccctatccccagattatagaaaaaagaagtaaaattgcaaatggaattaaggttgctaat

SEQ ID NO: 509632 - DNA, 616 bp, Homo sapiens
aaagctgcctgtagtcacctggaaattagagaggattaaaaataaagagcaaaaaaatttttctttcaaaaacaaygttcaaatgaactgacttgaagaaacatatcaaaaatagatatttgatttgagcctgcccctttattttggaagtcatttcgtttatacagttgggaaactcaaagatgaaacacaggtatactcagcctaatgtgatagagccgcggcctgtgctcctcaggtgtggtccactgaccagcgtctcagcatgccctgggagctggttaaacggtgcagaatctcaggccccactccagagaggcaggggctgaatctgcatttttgaccagatcccctggtgatttgtatgcacatcaaaatttgagaacccctgtttagtgaatatttggctaattttgagccaccctacatgatagtattggctaggaaagccagctgttctggaggaactgctgaaatgaggaggtagttcattgatgagtaccttcaagaagctcagcttcctatcactgactcatctagaatcctgcccaaactggtcaggagtaaatactaaaagtgagggaatggctggctgtggtggctcatgcctgtaatc

SEQ ID NO: 509633 - DNA, 535 bp, Homo sapiens
tgtaagctgaggcttagggaggctaataagcttgcccaagggcacacaggcacctgaaggtgggaatacttaaggttcactatggatcaattaggcatttataggctggtatggctgtctgattttcatctagcaaaattcagaatgtgtttcccttatacaaataaatggactctttggaatgtacactgccaacagattagtattaaatagttaatggtagaaayacttatgccaagtttttctccacaagacaagggactagcttgtaagagttattctctaagcagtctttaccaactggattctgccaagccctagggttccctggaagtgcagtgagtggggaagtagggcactgaaaggcagagctctcggttctgcacttcaaccacagcgccctttatgtaccgagcttccttacaaaactccatctgaacccagtgcgcaatagcaaaatgacaaactgggatcacattacggatgctcaacttatgatggggctacatcctgagaaacccagcacacgttgaaa

SEQ ID NO: 509634 - DNA, 535 bp, Homo sapiens
tgtaagctgaggcttagggaggctaataagcttgcccaagggcacacaggcacctgaaggtgggaatacttaaggttcactatggatcaattaggcatttataggctggtatggctgtctgattttcatctagcaaaattcagaatgtgtttcccttatacaaataaatggactctttggaatgtacactgccaacagattagtattaaatagttaatggtagaaatacttatgccaagtttttctccacaagacaagggactagcttgtaagagttattctctaagcagtctttaccaactggattctgccaagccctagggttccctggaagtgcagtgagtggggaagtagggcactgaaaggcagagctctcggttctgcacttcaaccacagcgccctttatgtaccgagcttccttacaaaactccatctgaacccagtgcgcaatagcaaaatgacaaactgggatcacattacggaygctcaacttatgatggggctacatcctgagaaacccagcacacgttgaaa

SEQ ID NO: 509635 - DNA, 543 bp, Homo sapiens
ccaaagattagagtctgaaagctcactctactgatttgcaaactttaacctaaagcaaatatgcttaattttattgtccttacatttattgcttctgagagacacctttttttttttttaaggcaaggtcttgctctgttgccccatgctgcagtgaggtggtgcaatcatagctcactacagcctcagcctcctgggctcaggtgatcctcccacttcagcctcctgagtagacatgagagtctccctgtgtggcccaggctgcctggcctcaagtgttccttccaccttggcctcccaaattgttgggactgtaggtgtgagccaccatgcttaggtggcagctttattttaaatgacctgtttgccccagatgtgttgaatttaaggataggctggaggttcagtcatttttatttattttcaaagaggtgttcagaattcacactctgtttttcttttrataactactgtggcttcctcctcatgctgactttctacacttgggaagagaatgtgggcaaggaagcttggagggaagcc

SEQ ID NO: 509636 - DNA, 202 bp, Homo sapiens
tgtcactgtgggaataatggtcttttttagccaccagagggtggctgcaggtgtggtctgaggtgccatcatcagttttcttcatgaggattggctttgtgtccagagtagtgtccggccacgactggcaccattttcccaggtttcatgaacttgcccatttctagggcygccctgacacttgccccccaggctgccgagg

SEQ ID NO: 509637 - DNA, 508 bp, Homo sapiens
cagatacaactgactcacctctccagctgggactgctccatgcacaaagagctacaccctcagtgaagggatggaccagaaaaaaaatctaccttgcaaaggagcctggagcctgcatgtaaacttgtttatttcyattttggttctagatggagggagaagtcttccctaagaatttataaccacaggttaaaattcactcaggtttgaggcttaaattcacattcctggcacagtcaaaaaacaaatcaacaaaaaaatctcaatgctgagaaaaatataaatgattccaggttgacagagcactcccaggtacctgacaaatgtcaaaacaaattctctctggaggaaaacatcctcaaactaaatatcactgaattccttcagatcaggaactgtgaaatatgagttcataataattttaaaaatcacaaatcgcacgaggaaacaaattaccactagtttcagtaggcagcaagaataaacagcagcaggagatctttaaaat

SEQ ID NO: 509638 - DNA, 615 bp, Homo sapiens
agcttttaaggccctctgtaatctgtcccaccattctagccagtttgatctcctttgtggtactgcatacaccctgatcattcctgcctctatgcttggcttttgctgttcccctgacaaatgagcctctttctgttccttctgctgttttaacttctagacccagctaaagttctctcctttcctggactacagcrattcctattgttctttcttcagaacttcccttagtaaccttttagagactgtaccataacatttagcagttactttgattatatatattatctttttgttatttgctgttatagaggagtctcttttctccaccaaaactgggagccctttcagaagagtatccatgttgtatactatacttctcaatcacccacataatctaccctagtgcagagcccatggtgcacactgaaaatgctttttagtggcttagtatgcataccatttcatttataccttttctctccagctaggttgaaaacttctcccaaactagattccgattctttttttaatctcccacaccacttagcacaaatattactaggatttaaatatctaagcttagccaaaattggagagcaactgacagattga

SEQ ID NO: 509639 - DNA, 506 bp, Homo sapiens
ctgcccatctatgattaattgaagtagaataggactgattattagggcagaaaattctggaattaggtctgttcactagaattaggggaaagagggcaggcacatatactagaagtctagacctagctatagatgttggaagttcagtctgcaggcaaaggaaggatgatgcggcagggtgacattggaccagaggatataatrtgtgtagggtgtgggaagtggagttcataccagaatggtatggggagatgatggcattgcttctgacaaggaagactcagaggctggtcctgcagatacttgctaacatccaaggaaggtcataataagacacagagaagatggcgacagcctctggttaccagaagaaggctcagacagaaagcagaccagccagggtgagcctgagaccccttggagcttcttcagcagttctgcctccaggccaggagctgcggagtagggagggaattgggagagaggaataaggggagataactatg

SEQ ID NO: 509640 - DNA, 418 bp, Homo sapiens
tgttacacagcagtaaataactaatacagaatgaaaaagagatataatgggatcatggggaacagggggaaagaacagctattgtgtagaaaccctttatctttttatggatgtgattatgttgcacatgacaatgctgaggtgagaggaggggtaccagggcagaaaggagcctgaattcgaagtggtcacccaaatatgagccccagacaacccaaggccagtaacagaagagtggaggcaagaactataaggccaatggtggtatgcaaatgtagcatccataaccaaasactgaactacagaaggatatctagaagtgggcaccaggagaccaaactgctgcagaatcagagatatgtctgagatcacagcagaaagagaggaagtagaaacgggattccgctgtgggccttct

SEQ ID NO: 509641 - DNA, 418 bp, Homo sapiens
tgttacacagcagtaaataactaatacagaatgaaaaagagatataatgggatcatggggaacagggggaaagaacagctattgtgtagaaaccctttatctttttatggatgtgattatgttgcacatgacaatgctgaggtgagaggaggggtaccagggcagaaaggagcctgaattcgaagtggtcacccaaatatgagccccagacaacccaaggccagtaacagaagagtggaggcaagaactataaggccaatggtggtatgcaaatgtagcatccataaccaaacactgaactacagaaggatatctagaagtgggcrccaggagaccaaactgctgcagaatcagagatatgtctgagatcacagcagaaagagaggaagtagaaacgggattccgctgtgggccttct

SEQ ID NO: 509642 - DNA, 644 bp, Homo sapiens
tgggtcttgctatgttgcccagattgctcttgaactcctgggctcaaggaatcctctcatttcagcctcttcaactgctggtattacaagcatgagccaccatatgggctggaagctgatttttaaaatactgagatcatatagatgacagcacctgaaaaatagacaacaccaagctttatgttaaaaggtgtgagggtatcaatatttttgtggctattggggaggaaaatattagtaaaaccagtgagttaaagctgttgctttaaactttggctttaattcaacaaatgttctctgtggtgatagtacgtatgtaaccatgctatgcccattcacagatgcagtagagggaagaatttctcaaagacaactgttctaagattgaaattaaactgtactgggtttgaaaagagaaagtccaggaattamcaaatatttcagatatcagataaaagagaatgccaggtatgtgatgataatcagcaatggttgttcacacaatatatcaaatcagtatttgaattagcttttgaattacgaggacaaatggatcaagtcttgactcattagtaggtaaatcttattaggctgaaatgtgttttcgcctgtttttccacaaggagattgcagatttgcaaacc

SEQ ID NO: 509643 - DNA, 644 bp, Homo sapiens
tgggtcttgctatgttgcccagattgctcttgaactcctgggctcaaggaatcctctcatttcagcctcttcaactgctggtattacaagcatgagccaccatatgggctggaagctgatttttaaaatactgagatcatatagatgacagcacctgaaaaatagacaacaccaagctttatgttaaaaggtgtgagggtatcaatatttttgtggctattggggaggaaaatattagtaaaaccagtgagttaaagctgttgctttaaactttggctttaattcaacaaatgttctctgtggtgatagtacgtatgtaaccatgctatgcccattcacagatgcagtagagggaagaatttctcaaagacaactgttctaagattgaaattaaactgtactgggtttgaaaagagaaagtccaggaattaccaaatatttyagatatcagataaaagagaatgccaggtatgtgatgataatcagcaatggttgttcacacaatatatcaaatcagtatttgaattagcttttgaattacgaggacaaatggatcaagtcttgactcattagtaggtaaatcttattaggctgaaatgtgttttcgcctgtttttccacaaggagattgcagatttgcaaacc

SEQ ID NO: 509644 - DNA, 644 bp, Homo sapiens
tgggtcttgctatgttgcccagattgctcttgaactcctgggctcaaggaatcctctcatttcagcctcttcaactgctggtattacaagcatgagccaccatatgggctggaagctgatttttaaaatactgagatcatatagatgacagcacctgaaaaatagacaacaccaagctttatgttaaaaggtgtgagggtatcaatatttttgtggctattggggaggaaaatattagtaaaaccagtgagttaaagctgttgctttaaactttggctttaattcaacaaatgttctctgtggtgatagtacgtatgtaaccatgctatgcccattcacagatgcagtagagggaagaatttctcaaagacaactgttctaagattgaaattaaactgtactgggtttgaaaagagaaagtccaggaattaccaaatatttcagatatcagataaaagagaatgccaggtatgygatgataatcagcaatggttgttcacacaatatatcaaatcagtatttgaattagcttttgaattacgaggacaaatggatcaagtcttgactcattagtaggtaaatcttattaggctgaaatgtgttttcgcctgtttttccacaaggagattgcagatttgcaaacc

SEQ ID NO: 509645 - DNA, 644 bp, Homo sapiens
tgggtcttgctatgttgcccagattgctcttgaactcctgggctcaaggaatcctctcatttcagcctcttcaactgctggtattacaagcatgagccaccatatgggctggaagctgatttttaaaatactgagatcatatagatgacagcacctgaaaaatagacaacaccaagctttatgttaaaaggtgtgagggtatcaatatttttgtggctattggggaggaaaatattagtaaaaccagtgagttaaagctgttgctttaaactttggctttaattcaacaaatgttctctgtggtgatagtacgtatgtaaccatgctatgcccattcacagatgcagtagagggaagaatttctcaaagacaactgttctaagattgaaattaaactgtactgggtttgaaaagagaaagtccaggaattaccaaatatttcagatatcagataaaagagaatgccaggtatgtgatgataatcagcaayggttgttcacacaatatatcaaatcagtatttgaattagcttttgaattacgaggacaaatggatcaagtcttgactcattagtaggtaaatcttattaggctgaaatgtgttttcgcctgtttttccacaaggagattgcagatttgcaaacc

SEQ ID NO: 509646 - DNA, 616 bp, Homo sapiens
acctgagagctaaataattctacaggactaaatatatattctggtactcaaggggaaaatgacatcatatagagtttaggtctattaaaacatatttgtagatgtgtaggtatgaaaaatgcttttagagatgggaagagaaaaaaactcatttgtttaacaagttctgatgggtgcttttcactaaaagagaaacatcatatgtttataacactcaggatgtaaattgcggtacatttcaaattacatgagaaactaaagaaaatatctgtttcgggtcactgaataattcattcttatttwgtgtttgtccctaatttctgtgattttatgaataattcagagcaatgattttacctttctctacagctgtatttggtaaatgtccacattatttttgttgcaaagatgcagccaagtttcttagaataggaacaatgtttagaatgtattttttccataatgaaaaatattatgaaaggggaaactaagatatagcttacagggttctctattgtgataactaaaacatacttagcctcaagtaaaactgacatcttgctaactgttggtggtgaaggagaaagaagacaacactgaaccagactggggaaag

SEQ ID NO: 509647 - DNA, 562 bp, Homo sapiens
ttctcagttacatttgattctttataggtaccattttctgcccctggccttgtttaaaattgaattgtgatggctcttcccctgacttatcttttaaagctattgtcayttacttcattttttttaggcttttactggaaaatttctggccgtaacactttcttataatttctatttctattccaggtttctgcttaagcacagtgttgcattaataagggtcaggcgaagtttcaacagcatttaatcttacactttaaatttttgttcacattttatggtcttgacacatttactgtaataaagggaaatcattaattcactaagaaacgtgtaaaaactatagttttgcttttgattaatttccacattcatcattactttgctactgatttaccatgcattgaagagactgagggtgcaaaacatgattttttttctttgtttaaaaagaactgtcttagaaaccaaatgaggctaaaaatgtacctgtgttttggctgtcaaaggggagaagattacttcttcttgaacgtgttttctgtctcatcctcatgtttcc

SEQ ID NO: 509648 - DNA, 562 bp, Homo sapiens
ttctcagttacatttgattctttataggtaccattttctgcccctggccttgtttaaaattgaattgtgatggctcttcccctgacttatcttttaaagctattgtcatttacttcattttttttaggcttttactggaaaatttctggcygtaacactttcttataatttctatttctattccaggtttctgcttaagcacagtgttgcattaataagggtcaggcgaagtttcaacagcatttaatcttacactttaaatttttgttcacattttatggtcttgacacatttactgtaataaagggaaatcattaattcactaagaaacgtgtaaaaactatagttttgcttttgattaatttccacattcatcattactttgctactgatttaccatgcattgaagagactgagggtgcaaaacatgattttttttctttgtttaaaaagaactgtcttagaaaccaaatgaggctaaaaatgtacctgtgttttggctgtcaaaggggagaagattacttcttcttgaacgtgttttctgtctcatcctcatgtttcc

SEQ ID NO: 509649 - DNA, 562 bp, Homo sapiens
ttctcagttacatttgattctttataggtaccattttctgcccctggccttgtttaaaattgaattgtgatggctcttcccctgacttatcttttaaagctattgtcatttacttcattttttttaggcttttactggaaaatttctggccgtaacactttcttataatttctatttctattccaggtttctgcttaagcacagtgttgcattaataagggtcaggcgaagtttcaacagcatttaatcttacactttaaatttttgttcacattttatggtcttgacacatttactgtaataaagggaaatcattaattcactaagaaacgtgtaaaaactatagttttgcttttgattaatttccacattcatcattactttgctactgatttaccatgcattgaagagactgagggtgcaaaacatgattttttttcttygtttaaaaagaactgtcttagaaaccaaatgaggctaaaaatgtacctgtgttttggctgtcaaaggggagaagattacttcttcttgaacgtgttttctgtctcatcctcatgtttcc

SEQ ID NO: 509650 - DNA, 650 bp, Homo sapiens
ctcatcaattttagtaggtatttttamattatatattagaaaaattgtgtacatataaataaacaaatatagtactgaagtttacttgctcaaatattattacttatagagatgtgcatccaaaaatgtttagaaactactgacaaactataagtaaataacctgtcaaagagttctcagaatccctctaagattgtaactgagtatgcctgtagcataatccttattaattttgctagaaaactcagttatgttcaaatataaataaatatacttatgtttaaatacagatacatcaataaatgcaatgactgtcatttcattccttcgtaaagcctttcattctcatctcttccttctctttgctgatcttcaaattctgaagcttctttaatgggattcctgttagcaagttctctcctttctgtgtcctccatacacaaatgtctgtggtttcttgataattatattccatgaacatattaatcatacctttgctcctaattttatatacaagttggaatccagactaagcttttttatttaaaaaaattacaatctcaaatcaataaatgcttctgccatatttttctctttcatttaagcatattgctataattacacttactgttcttttctcactaatttat

SEQ ID NO: 509651 - DNA, 650 bp, Homo sapiens
ctcatcaattttagtaggtatttttacattatatattagaaaaattgtgtacatataaataaacaaatatagtactgaagtttacttgctcaaatattattacttatagagatgtgcatccaaaaatgtttagaaactacygacaaactataagtaaataacctgtcaaagagttctcagaatccctctaagattgtaactgagtatgcctgtagcataatccttattaattttgctagaaaactcagttatgttcaaatataaataaatatacttatgtttaaatacagatacatcaataaatgcaatgactgtcatttcattccttcgtaaagcctttcattctcatctcttccttctctttgctgatcttcaaattctgaagcttctttaatgggattcctgttagcaagttctctcctttctgtgtcctccatacacaaatgtctgtggtttcttgataattatattccatgaacatattaatcatacctttgctcctaattttatatacaagttggaatccagactaagcttttttatttaaaaaaattacaatctcaaatcaataaatgcttctgccatatttttctctttcatttaagcatattgctataattacacttactgttcttttctcactaatttat

SEQ ID NO: 509652 - DNA, 650 bp, Homo sapiens
ctcatcaattttagtaggtatttttacattatatattagaaaaattgtgtacatataaataaacaaatatagtactgaagtttacttgctcaaatattattacttatagagatgtgcatccaaaaatgtttagaaactactgacaaactataagtaaataacctgtcaaagagttctcagaatccctctaagattgtaactgagtatgcctgtagcataatccttattaattttgctagaaaactcagttatgttcaaatataaataaatatacttatgtttaaatacagatacatcaataaatgcaatgactgtcatttcattccttcgtaaagcctttcattctcatctcttccttctctttgctgatcttcaaattctgaagcttctttaatgggattcctgttagcaagttctctcctttctgtgtcctccatacacaaatgtctgtggtttcttgataattatattccatgaacatattaatcatacctttgctcctaattttatatacaagttggaatccagactaagcttttttatttaaaaaaattacaatctcaaatcaataaatgcttctrccatatttttctctttcatttaagcatattgctataattacacttactgttcttttctcactaatttat

SEQ ID NO: 509653 - DNA, 626 bp, Homo sapiens
atgtatttatacatctgtaacttttatctacaaatatgtttccaagttctatggataatagatgagcaaatcaattacatatgaaggttatctaataaacattatcaaatttatttagacatcaacacttgcaggaagattttgrtataataaaatagacagacagatagatagatagatagatagatagatagatagatagatagatagatagataaggtagataggctagatagttcaacacaaaatgttaacataaaatatgacaaaggcattggaatagaaataaagcaaatatgttaaacataactgtagctttgagaaagcataaagcaagcctgaataaaaacttctactattccagatgaagagataattttatgaaacataaaaggatatgtctattgcttggaaaggattgtagtttttcttagcattcatgtctaagtgaaatttcttacacagatgtacacagaaaagcaatattattttctccaataagaacacagactagtgactcttgattgatcatccacagtgcattacactaagccattttacaaatgggctctcaaattttgacattagggaagtaagtcaatttgagccaagaatttcaataaagc

SEQ ID NO: 509654 - DNA, 626 bp, Homo sapiens
atgtatttatacatctgtaacttttatctacaaatatgtttccaagttctatggataatagatgagcaaatcaattacatatgaaggttatctaataaacattatcaaatttatttagacatcaacacttgcaggaagattttggtataataaaataracagacagatagatagatagatagatagatagatagatagatagatagatagatagataaggtagataggctagatagttcaacacaaaatgttaacataaaatatgacaaaggcattggaatagaaataaagcaaatatgttaaacataactgtagctttgagaaagcataaagcaagcctgaataaaaacttctactattccagatgaagagataattttatgaaacataaaaggatatgtctattgcttggaaaggattgtagtttttcttagcattcatgtctaagtgaaatttcttacacagatgtacacagaaaagcaatattattttctccaataagaacacagactagtgactcttgattgatcatccacagtgcattacactaagccattttacaaatgggctctcaaattttgacattagggaagtaagtcaatttgagccaagaatttcaataaagc

SEQ ID NO: 509655 - DNA, 247 bp, Homo sapiens
gtttagttgatgctttcaaatgctgcttctgatcaactcctttagctacaataaattgatgaggattttggcatgtggtattagagatggttmttttttcctcttatttgcattgttcaatgtagtaaatactagctgtatatggctacttcaattcaaattaattacaatgaaatatacttcaatattgaattttttagtcactgttggttcattattgaatatcttcagctaagatttcccatct

SEQ ID NO: 509656 - DNA, 247 bp, Homo sapiens
gtttagttgatgctttcaaatgctgcttctgatcaactcctttagctacaataaattgatgaggattttggcatgtggtattagagatggttcttttttcctcttatttgcattgttcaatgtagtaaatactagctrtatatggctacttcaattcaaattaattacaatgaaatatacttcaatattgaattttttagtcactgttggttcattattgaatatcttcagctaagatttcccatct

SEQ ID NO: 509657 - DNA, 247 bp, Homo sapiens
gtttagttgatgctttcaaatgctgcttctgatcaactcctttagctacaataaattgatgaggattttggcatgtggtattagagatggttcttttttcctcttatttgcattgttcaatgtagtaaatactagctgtatatggctacttcaattcaaattaattacaatgaaatatacttmaatattgaattttttagtcactgttggttcattattgaatatcttcagctaagatttcccatct

SEQ ID NO: 509658 - DNA, 599 bp, Homo sapiens
gcaaagttcaaaggaagaggccatataagacgattctcacttctgacaccaactgccagttcagggtttcccctgaacaccctcagtttcaagaatttactaaaaagactcacagaactcattgaatgccattgtacttacggtttataatagagaaagggtagaaattaggaccaattggagagacatatcatataaggtggaatctaggagattttgaatgttaagtttccattgtcttcaggacatactacctgtcattgttgtgcagcaataaacatggagtactaccgacctggggagctcacctgatgctaaaaagacactatttagagaatgaaaagacaaatgaaaggatgggataagatgaccttccacattaaggcrctggaaagaataaaaaactaaacctaaagcaagcagaaggaagaaaataaaaattagagaaattaataatttataataatatttgttagtgttgaataattgatattaattcttgactagcttttttaaaaagaaatattcacttcccaatttactctttggggccagtgttaccttgatacaaaaattagtccaaatatcatagaaaaata

SEQ ID NO: 509659 - DNA, 545 bp, Homo sapiens
tgttactcttacaaaacataggtgctcaaaaaataaacatgtgcatgaatatttacagcagtaatatttatacagtcaaaaagtggaaacaatccatgtgcttgttgactcataaatggacacccaatttccagctataacaaagaatgaagtacttatacatggtataatatgggtgaaatttgaaagcattatgttaaattcacagaaggacaaacattacttgattttattcacatgaaacatcaggaatcggcaaatcaattgggatataaatcagattagtggtcattagggctcagggaagcagaatagggtgtaacaacttaatgcataatgggcttttagaagggacatgatgaaattatcctggaacattgtgaatattctgaaagcaattgcattgtatgttttaaaatggttaagttattaattttatattatgtgatttttgccttagaaaacaawaaagagaaaatagccttactgtatatacaaaaaactcaagatgtgttacaaatttatatgtgaaatccaaaatactg

SEQ ID NO: 509660 - DNA, 657 bp, Homo sapiens
tgcagcatccctgtgtcagcataccagaacagggtacagaagtatggattcaaaatgagaatcaatagctcaataaccaatgtagtatactttctaaaacacagatcatctctcttccttaactttcacatccagtggcttctcattgcctgtaggataaagttcagattcctcaaattctggycaaaatagaatttttcagctcttttcccaatccttcgtttctattcttatcactgcccttatcctgcctcctaacttccagtcccttctgcaccatgacctttgctctgcagttcttgtttcattctcctgaagtatttcatccctccattgttttgcatctgttgcctcttctgccatcctttttattgacaaaatcctattcattctttaagagtcagctccttcattaaactgagagttctggacaaaattaatgacctgttcctctgtacttctatagattgtttgttcattcattcaaatcaagtgtgtatggactccttattatgtaatggacattgtgcaaagcactgtacaacaatgaacaaaacatccttggttcctgctatgtggagtaccctgaggaagtgacttttgaactggaattggaggtaacaagggggtaactaggcaaaggagggtgggttggag

SEQ ID NO: 509661 - DNA, 567 bp, Homo sapiens
gctgtgggcggacgctgactcacagactgtgttgctactcagagccttgccagcaccaactagctccagagagatgggatagggcagtgtcaatctggcctccaaggccctttctggctattatcccctgggacttgatgattcagtactgccacagatcctggatttgttggctaagcacacccatggagagaggcatgggagaatggaaaggtagctgtagcagagagaggagagtagcagtggtgccttagaggatgcttcctcttcctttgcaggatttcagtctcatgagagtgacccttctgtgtgtcgatgagtcrccagggaggggtttgcgaatgctgggtacaagtttacctgctgactgctgcccctttcagcaacctgttgccagtcatttgttaggaaccactgtgatctcttgtagctgaatcagacacccacaagagaccacagatacgccttgctctgccacgtagtggaaagaatgtctctcttctattttgagttacacttagattttttgctcgtggactctttcccccctgtgacttagacatgaaa

SEQ ID NO: 509662 - DNA, 611 bp, Homo sapiens
aaattcattgaactgtatacagaaaatggatacattttataatatgtaaatggtacccaaataaaactgttaaaatatatttgaacaggggatacaatggtcactggttgacttttagcttcctagtatgcctttcacygttattttggtaatagcagtgtaatcttttcctcattgacgaaagccaagggaagggcggttagtactctctgtttggaagaagggaaaatcttacttcaaactttcttaagaaataaagaagaggattaagttgttggcagtatttcaagccttccgtgggggaataagggaagtcccactggctatgattggtctaccttgggtcctgcgcctttccttgaaccacccatggtttctagggaaatatggtttaaatgactggtcaagagtaagtcacgtgccacttttggcaacttcaccagaaactgaccaactttgggttttctttctttggagagaggttgagtcctttgtcaattttattggcaatacttacaaaatgttggatagggacattttggatctataatgtaaagaaggatgatgtatgaggatatcaggaagccaaagggctggaccagggtggacgt

SEQ ID NO: 509663 - DNA, 587 bp, Homo sapiens
ctaacttctttcctgatcagagctctcctagagattggctttcttacaagattaaacaggacacaggtcagatgagagccacaagtttctctgccaatataaacaagtttcctgtgagagggacacctgatcagaggttggacacttagacattaggctgtccactatcataaagaagtatcctgtgaaaagcaccctgtaaacatccacaaccaccatccctgaagccccatcagcgcagggctagaatttatagtcattctccagagagacayctcaagaccaaatttgaagaaaatacgagacatgtcaattaatttgttgttcacaagttgtaaaattggcataaatgtttgaagtttacttaatacatacacaagggtggattcatagctttccttatattcatttgcattctacaactctgagtgtgaaatgagggatttcaatacagctaggaattcctggaattgtatataatctcgggcacacccaagcaagcatttaccccctactaacatcacccactatgtgcatcagcaagataattgagaagcagtctgataaagctgtcgtactattgtaaa

SEQ ID NO: 509664 - DNA, 587 bp, Homo sapiens
ctaacttctttcctgatcagagctctcctagagattggctttcttacaagattaaacaggacacaggtcagatgagagccacaagtttctctgccaatataaacaagtttcctgtgagagggacacctgatcagaggttggacacttagacattaggctgtccactatcataaagaagtatcctgtgaaaagcaccctgtaaacatccacaaccaccatccctgaagccccatcagcgcagggctagaatttatagtcattctccagagagacacctcaagaccaaatytgaagaaaatacgagacatgtcaattaatttgttgttcacaagttgtaaaattggcataaatgtttgaagtttacttaatacatacacaagggtggattcatagctttccttatattcatttgcattctacaactctgagtgtgaaatgagggatttcaatacagctaggaattcctggaattgtatataatctcgggcacacccaagcaagcatttaccccctactaacatcacccactatgtgcatcagcaagataattgagaagcagtctgataaagctgtcgtactattgtaaa

SEQ ID NO: 509665 - DNA, 518 bp, Homo sapiens
tactcacttgatgttgccctccagatgaacggagaggctgggatctgcagcagcgggctgggcagggggcaatttatttatttaacagaacctttactcatgccaggcacaattctaagtgcttttcaaattattattattttgttaggacaaggtcttgctctgtctgccagattgaagaaactcctgggctcaagcaatcctccatcctcagcctcctagtagctgggactacagggtgcgccaccacctggctaattttttaatattttatagagacaggggtcttgcygtgttgcccaggctggtcttgaactcctaagctcaagtgattctctcaccttggcctcccaaagtgctgcgattacaggcatgagccaccatgccgggtcgcttttcaaattttaactcagttaaatccccaccacaaccctatgaggttagaactgttattatctccattttaacatggggaaactgagacaaaagggctaagtaaattactcgagagcccacag

SEQ ID NO: 509666 - DNA, 518 bp, Homo sapiens
tactcacttgatgttgccctccagatgaacggagaggctgggatctgcagcagcgggctgggcagggggcaatttatttatttaacagaacctttactcatgccaggcacaattctaagtgcttttcaaattattattattttgttaggacaaggtcttgctctgtctgccagattgaagaaactcctgggctcaagcaatcctccatcctcagcctcctagtagctgggactacagggtgcgccaccacctggctaattttttaatattttatagagacaggggtcttgccgtgttgcccaggctggtcttgaactcctaagctcaagtgattctctcaccttggcctcccaaagtgctgcgattacaggcatgagccaccatgccgggtcrcttttcaaattttaactcagttaaatccccaccacaaccctatgaggttagaactgttattatctccattttaacatggggaaactgagacaaaagggctaagtaaattactcgagagcccacag

SEQ ID NO: 509667 - DNA, 553 bp, Homo sapiens
gagttgggattctaagcaggcagcctccacgttcctaaacattctgccatcccacccctttctgcttctgtaaatgggagttgttgggtccactctgaccctctcatttttctaatttggaaatggagggcttgagaggggtgacaccctgcccaaagtcccatagtccatgagtgtcctggcacccaggaggatccgcttctggcacccactgcctctcctttggggtcagattaacctcaggaagctggagaggaagcctgggaagggtttcctggccagttgatggagttacctctaaaaagctgctattgaccttgtatgtaccgagaagcacatagacacaaagaccttgtagagtgtggagaggaatcttccggaggctgggctcagggggtgcttggctggggagaccccttgctagaccatacagcacttgcagggtccagtctgtggttgcaagtgacagrgagcaacacaggcagaaaacacaggctttatggcaaggttgtggggtggatcagcgtgttggaggaaccactgaaccaccaca

SEQ ID NO: 509668 - DNA, 559 bp, Homo sapiens
ctgctgtcacccatggccaagcagagaggaagccggggagtaataccccacctctctctcctcctgctcgctgacctcctgcttcacctcttactcctattggttgaagtcaatcaggagccagatggcagagagcaaaggttgatgcagcctctgcaggtcagcctccagacacaggtcaggtctgagtactgggccgggtgcagaaggctggagaggaagcccgaggacaaacggaaactgcagcacagtcagaacaggcagcgtgcattttattctgaggtcaatgagaagccatggctgggtttaagccggggtgggatctgatctggattgtcttaccctctcaggctgctgtctggagggtggggaggtgcgtggcagtggaggctgccggagctattcgggttggtggtgatgggagcttgggcccggaggaagcagcaaggctggagaagagagcagggccttgtgttgatatctgaggtgaaactgacaggtggtggtggattgggtgcaagggagtcaggtcatgtgrtaaagaagcacgagggaccag

SEQ ID NO: 509669 - DNA, 637 bp, Homo sapiens
gcttgttttaatttttctcaagaactgccagccagtaatgctatatcactcaatcctatgcaacagttacagcaaccacgatgatgaaacggataatcaatggtaaagaatccattagagtgccaaagctggtctctatatcacaaaggatttcagcattagggctagagaaagaaaaattaatgaggttggactggaaaacaaatgagaagagagcagtgagtaaagggttactaggatatacttwgaaaatcagttgatgtctgtaaccacatttttttaaatgtccctacaagaatgaatttatttttaattaaaaaaaattttcttttggagacagggtcttgcaactaagttcctcaggctgaccttaactccttcgctcctaaggaatcctcctgcctcagcctccggaatagctgggactacaagtgcctgacaatcctggctgcaagcatttttgcagataacatcacagcaggaacaggaaggtacttgccttccagaagagtttcagaggatggatttttacaacttattttaacaattagtaaagaggcatttatttaactttcacagattacaaagcactgtcacatctttctacactggagcctcctgagagggggctaaagca

SEQ ID NO: 509670 - DNA, 514 bp, Homo sapiens
tgactttgtagagcagggcctattagtattgcattaccattcttaatgcatagccagtcagatttttcatttacttctgtaaaacatctttttcctcccattcttcatgatttcttgtaaagacttcagtatctagatatttttcttctaagtcaaacagacttctgatatgtcaaaaatacctttgtatgcttacagcattttaacactgaagcttttttttttctccaaggatggctatgatcttgatttttttttcaaccccttctcataataaagaaataaatacaaatacagaataaatcagagagcaaatcaacctggacaaataagaaggctaacatggattttggagggtggaagatgaaagtggcaataatggcaagaataagacgtacttcagatcaccaamtgaaacatgatcttccaatcagggaaaactgctgatcatggtgatttcctggaactcaatatgaaaggacatggactttggcggacaagccatcacggttcc

SEQ ID NO: 509671 - DNA, 606 bp, Homo sapiens
ctgatagtagtcatttattttgaattgataaataaacattctggttttatatatcagtttttaaagttatattttattttaattaacatataacaatgtattatttattttaataatgaaccttattaaattttatttttcattaattttaatataaatayggagtacagagtgatattttgatacatttattttgaaatgatcaaatcagagtagatagtatatccattacctcaaatgtttattaataatttatttgtggtaaaaacatttaaaatcctgtcttttagctgtcttgaggtatactctgtattattgtgaattgtagtaaacttgctgggcaatagaacaccagcttgcttactaggagagaaggcacggattaggctagtcttatgttcacctgacgatgacatttcttattttgaattaataaatttgcattctagttatatatgtcagtcctgatatgctttttatggagcacaaatattacaacttcaactgactctcagtcatcatcaacgagataatttgtgaacatgcccagtggtggctgaatctggccagcagctaaggtgggaacttgaagggacctctggaggt

SEQ ID NO: 509672 - DNA, 669 bp, Homo sapiens
gctgctgtacatgtctgatcagtcttcacgccttaagcaggcaaagagggaggaggaaaaaagaaggaagagctcctttttatccatattttccagagccccactgacagactgtgcaatttctgatttatgttgtgtgaaaagtgagctacagaatggctcacttcatttgcagcataatgtctttgaaaactgaaaaacagaagcatgagctctcagcaagtcagcaacatggtcttaaatttcaggcggagtgatcaattgtttaaatgtgcagcaaaaaaaaaaaaaawatatatatatatatatagggagagaatttcttatgttgataatattttactttatacatgtggttgatttagcatgtggtactctggccttaagaatttatttcttctctggacagtcttaccttggttaatgtccccaccatagatctgtttagttgttcatgttaaaggatttggaattcttgactctttttcctactcaaagcatctgcaccatatatcccatctcccccaaattctcacactcttctgcatcccatagattctgctttattttggcttttattagctcttgtctaaacaattttaataaccttttaacatgttttcactccagtttccccacaaaagccaattcttcacaaccactgataag

SEQ ID NO: 509673 - DNA, 552 bp, Homo sapiens
ctgatgtgtcagttcatttaaatgctgccattttgcttttgttggagatatacaacaatcacccccacagtgcagtgagtaagactttggcagttgctgctgtacatgtctgatcagtcttcacgccttaagcaggcaaagagggaggaggaaaaaagaaggaagagctcctttttatccatattttccagagccccactgacagactgtgcaatttctgatttatgttgtgtgaaaagtgagctacagaatggctcacttcatttgcagcataatgtctttgaaaactgaaaaacagaagcatgagctctcagcaagtcagcaacatggtcttaaatttcaggcggagtgatcaattgtttaaatgtgcagcaaaaaaaaaaaaaatatatatatatatatatagggagagaatttcttatgttgataatattttactttatacatgtggttgatttagcatrtggtactctggccttaagaatttatttcttctctggacagtcttaccttggttaatgtccccaccatagatctgtttagttgttcatg

SEQ ID NO: 509674 - DNA, 422 bp, Homo sapiens
gcaaaggagctatgagaagtaggaaacaggaagacaatgacctgtgcagcatgcgaactagtacagagctccctcaatgccacattgcttttggttcctaacatcgtgtgttttcacctcaatgcctgaaatacacgttcccctccttttgcatacctttcattcatcctcttagtctacactcagttgccctttcctgtaggaagactttccacttttcttaggctgcatttcagggccattcttttcccctcatgactatctctccaattttacatggcctataagaccatctcctccagttaactatgaatgattcaggagccttgaatgggctcttaaaactgtgccttgaataggtttctactcaagtagcctakcagagctcaataactacagtagacatttcaatggtacccaat

SEQ ID NO: 509675 - DNA, 510 bp, Homo sapiens
catcctccaccctggtaatcccttgcctagaaaccacgaggtgtatatgtgactcacacctgtccacagctaattgggccaggagctgtcaactggtctgagatgaaagaggcagtgatttggcctgacccaaaaagatgagctgggtctctctctcctttcctctttggaatttagatgatcagaaatgatgccatgagatatattaaaggccrtggagattgaatccagaaggagccagagttatgaggagggagacattgtaaggggcattagagaggagagcaagtaacaattacgtagagagatatagttattcaatgagagaaaaaaatcatgagccccaagagaaaaatagatcaactcattggtagggctctcctgactttggtactttttccagtaccagttctagtcccatgtatctgcataatttgtttcttttgattgcagtagcttgaatgagtctccattctttgcaactgaaagagatctaaccaaaattgtggc

SEQ ID NO: 509676 - DNA, 525 bp, Homo sapiens
tgaagattacacagtaagtttattgaaaaggggggaatgatagtattgtattaattctaaattttgtatgattgaccaagagggaaaattcaatgattagttaacaaagtaacaagaagcttgagagctccctgaaataaagcagtctagttcaaaaaaaagaaaaactcgaattttggggggattaatttttgtattccaaagttgttaatagatgttatggaatatgtagaaaggaaacacaatctattctcattatttgtgattttacatttatgaattgcccactcactaaaatattttgtaatctccaaatcaatgctcacagtgctttcacgcccaacccacatgtttctaactaaggtccaataaggccttctctgccttcatggttsaactctcacattgtaaataagtgtccttttcatggtctttctagtgccaggtgttttgcatcattttgctttctgctggtgatttctctattttaagtggcttgatttcagctcccaagcatagtgagga

SEQ ID NO: 509677 - DNA, 630 bp, Homo sapiens
tgcaaaggctgccagcgtgtatgctcagggcaaacaggaaaagggttaactacagaatagagaaaaaactaaaagtcgtcaccacacccagatagactttccatctattcttctgagggcagctctgagagatcgcctgggacactttatctgcataataagacaacctttgttcacaatgcagttccactcctcaccttctcataacttgtaagtcccattccaattccaaagagaatcatttacaaagcattggttggtcttctggatccattcattccctctaaaaattatttactagccctctaacaattgcctacaacacgccctccactgctgctcccatttccctcttccttgaagaagatatttaagccccaaccatctggcctgtttggagtctcatatttgagtgacttccatgttcatattcatgctaatacatttgttatgttttttttcctgttaatttgtatattgtcattcattttaggggatcttcaaagaaggtagaagggaagccttctctccatctctacgctacaaaatatgttattgagaattctgtcgtacttcatgcttattrataaagtcttaggtcattattaactttttttctggataaatttc

SEQ ID NO: 509678 - DNA, 554 bp, Homo sapiens
tagtggatatatatttatcatgcattccctgcctggagaaattatgttactaatagtgtgacatgtttaacattgagcccttattacctcccttgcttttctgattctgtgattggcaatgcttttctgtcaccaaatctggttggaactattgccgtcaaaacctcagttataaaaaggttaaaaatgggccaactttgtgacaccaattttccaattagaaatatgcaggtcacctctgtttatcttccccctctgctcaatacatactctgcctggctgtctcaccttacttttgtttttatgtttatttctttctgtraaaacttttcttcctcctacctctctctcctctctctctctttctctgtcacgccacacacacacacacacacacacacacacacacacatatcacatctgggtaattatacctaaagcattttctactcttttgaacagttgttaaacataaaaaggtaagttagaaaaaagagtaaagtcaatagggttattttaatttggaaaaaaaaaatagttctggagacagaaat

SEQ ID NO: 509679 - DNA, 545 bp, Homo sapiens
atatttatcatgcattccctgcctggagaaattatgttactaatagtgtgacatgtttaacattgagcccttattacctcccttgcttttctgattctgtgattggcaatgcttttctgtcaccaaatctggttggaactattgccgtcaaaacctcagttataaaaaggttaaaaatgggccaactttgtgacaccaattttccaattagaaatatgcaggtcacctctgtttatcttccccctctgctcaatacatactctgcctggctgtctcaccttacttttgtttttatgtttatttctttctgtgaaaacttttcttcctcctacctctctctcctctctctctctttctctgtcacgccacacacacacacacacacacacacacacacacacatatcacatctgggtaattatacctaaagcattttctactcttttgaacagttgttaaacataaaaaggtaagttagaaaaaagagtaaagtcaatagggttattttaatttggaawaaaaaaatagttctggagacagaaatg

SEQ ID NO: 509680 - DNA, 727 bp, Homo sapiens
ggttttgttttagagcctgaagttgggtagtattagcagactggcagcactttcattcatctttccagggtgttaacttccaactcgaatattggcacttaaatttccacaccctgttaagcaaactgcttaaaacaaaacattcagctctcgtcaatgaaattcaaggatactcctacagtgatattaatctacagaacaagagaagccttttaaaatttgcgatgccttttatagttttctctccctcaggatcccatttcacatacatctcactggctttggcagtggtgacccaaagtctggcagcttgagaaaagtagccccaactttaaccaggcttcagcatttccccctccacaccataacgcaaccccattatggatgttttaactggatacttttatgttctgagaagtttcacaactattgccaaatttattgccatgactgtccagaggattaatatatttggcagtatcattcttgttcactccctgccttaaaataattttttaaaagtaaatgaacgagcacaaatcccagaggagttacgtgacatctaaaaggtcaaataacttctaagtagtgggtggaacttgatctaagaccaggtctcccagatttctagcctaaagagcttttgggctacacagcctgttttctgcaggaataccatgtcwtgtgttctgccactgggcaacatgaattctcttattgagggctt

SEQ ID NO: 509681 - DNA, 217 bp, Homo sapiens
tgcccctaaggataactgctatcctcatttatagccccaaagactagttttgactgyttttgtgcttcgtaaaatgaaccgtctacagcttgtactcttttgcatctggcttctttctctcaggccaagttattttgtaggagagtttcaatcagggccaaatctacagtacaatgtcttgaagaaactctgcacttggcatatttttttttttctg

SEQ ID NO: 509682 - DNA, 622 bp, Homo sapiens
cctggatatgcaataaataaaagcaaagggtaaaggtgagayctggctgcccaggagctcagttggctgaacgcttaaaagagctaaggtatttaatttaattcacctggtgaaaggcagggatttcagcagttctgtctagaagtttctcatccactcttaaaaaaaaaaaaaaagccaaaagcccaaaagagttccctaagggccctgggaaaaagcaagaaataaataggaccatcaactctagctgccaatgaatttttaaagtctggtttgcaattacctataaaaaccagactatcagagcattctcaggtaatattcgaggtaaaagagtattcttggggcctcagaggtctgatttcttcagttttgtcttcatggtttctcccctaggtcctttgaaataccagcatggttcatgcagagaagaaacagtgtgataaacaaaagagcatgtgtctggggtcaaggatatctgtatttctaagcccgctctgccttttcctagctaggtagttctgggcaagttatcaaattctcttagcccgagtttcattatctgcagaagggaatgatcatttggtgttttgtgggctgcaatcccagaaagcctaaggct

SEQ ID NO: 509683 - DNA, 622 bp, Homo sapiens
cctggatatgcaataaataaaagcaaagggtaaaggtgagatctggctgcccaggagctcagttggctgaacgcttaaaagagctaaggtatttaatttaattcacctggtgaaaggcagggatttcagcagttctgtctagaagtttctcatccaytcttaaaaaaaaaaaaaaagccaaaagcccaaaagagttccctaagggccctgggaaaaagcaagaaataaataggaccatcaactctagctgccaatgaatttttaaagtctggtttgcaattacctataaaaaccagactatcagagcattctcaggtaatattcgaggtaaaagagtattcttggggcctcagaggtctgatttcttcagttttgtcttcatggtttctcccctaggtcctttgaaataccagcatggttcatgcagagaagaaacagtgtgataaacaaaagagcatgtgtctggggtcaaggatatctgtatttctaagcccgctctgccttttcctagctaggtagttctgggcaagttatcaaattctcttagcccgagtttcattatctgcagaagggaatgatcatttggtgttttgtgggctgcaatcccagaaagcctaaggct

SEQ ID NO: 509684 - DNA, 653 bp, Homo sapiens
ggcctgagaactggcaagcaaggagggagaaacaacttatataaggccccaaagtaccacaaaccagaatctccaatgactgaggcaggagaaaagaaacatccagaagaaagcaactttgttcttcctccacctcttcattctagtcagcccctcaacagatgagtgatgccaacacacattgataagggccggtcttcttttctcagttcaccaattcaaagtctcatctctcccagggcaccctcacagacacactcggaaataatgttttaccagctatctggacatcccttaacccagccaagttgacacataaaactaaccactgcagttggagaattgaaatagaattgagtctgacccttagctctgggccctaaactatacatataattttcagcagatcccattaacctctacagcataaggaaaaagccataattcctcagtagggcatacaggtaggaagcttagaacagtcctggcataattataaagagaatcctttttcattcacaaaagtgttccattttggacaatcatctgtatggtccccctcagaaggcaccgggcctggtacctggcacagtgactgamccatggtagaaggggctcctgcagggcttaggagtgtgggctctgtagtccag

SEQ ID NO: 509685 - DNA, 541 bp, Homo sapiens
aggaccaggacccgcagcacggcggcctgctgggtgcatgctcagtgggacagcttgggtaccctcaagctgagtcacaggggcaaagtatgtttgcgccacccacatcccaccagagtccgcggtggggctggagccccaggtcgccagggcggcgtgggaaaccgaagacagggcacctccacttcygaagctccgggtcctcagaggcctccgggtcaagcacatatgcaagccatccaggcgcctcccaaccgctccatgagccggggcgctcatctacgctcacccccagccagtaaacccccagccaataaaccccagagtcccagcaaaaggcacaatttttcctagatccggcgccactggggaagctgaaggacgtggaagagcccgctccgctggaagcactcctcagccaggaagaacagcgggctgtgctggaggagctttaggacgcggggttggggctgggtaggggcagggcggtggcctctctttcacggtgaacttctgactcggtatggagaggcgtgtcttc

SEQ ID NO: 509686 - DNA, 541 bp, Homo sapiens
aggaccaggacccgcagcacggcggcctgctgggtgcatgctcagtgggacagcttgggtaccctcaagctgagtcacaggggcaaagtatgtttgcgccacccacatcccaccagagtccgcggtggggctggagccccaggtcgccagggcggcgtgggaaaccgaagacagggcacctccacttccgaagctccrggtcctcagaggcctccgggtcaagcacatatgcaagccatccaggcgcctcccaaccgctccatgagccggggcgctcatctacgctcacccccagccagtaaacccccagccaataaaccccagagtcccagcaaaaggcacaatttttcctagatccggcgccactggggaagctgaaggacgtggaagagcccgctccgctggaagcactcctcagccaggaagaacagcgggctgtgctggaggagctttaggacgcggggttggggctgggtaggggcagggcggtggcctctctttcacggtgaacttctgactcggtatggagaggcgtgtcttc

SEQ ID NO: 509687 - DNA, 541 bp, Homo sapiens
aggaccaggacccgcagcacggcggcctgctgggtgcatgctcagtgggacagcttgggtaccctcaagctgagtcacaggggcaaagtatgtttgcgccacccacatcccaccagagtccgcggtggggctggagccccaggtcgccagggcggcgtgggaaaccgaagacagggcacctccacttccgaagctccgggtcctcagaggcctccgggtcaagcacatatgcaagccatccaggcgcctcccaaccgctccatgagccggggcgctcatctacgctcacccccagccagtaaacccccagccaataaaccccagartcccagcaaaaggcacaatttttcctagatccggcgccactggggaagctgaaggacgtggaagagcccgctccgctggaagcactcctcagccaggaagaacagcgggctgtgctggaggagctttaggacgcggggttggggctgggtaggggcagggcggtggcctctctttcacggtgaacttctgactcggtatggagaggcgtgtcttc

SEQ ID NO: 509688 - DNA, 541 bp, Homo sapiens
aggaccaggacccgcagcacggcggcctgctgggtgcatgctcagtgggacagcttgggtaccctcaagctgagtcacaggggcaaagtatgtttgcgccacccacatcccaccagagtccgcggtggggctggagccccaggtcgccagggcggcgtgggaaaccgaagacagggcacctccacttccgaagctccgggtcctcagaggcctccgggtcaagcacatatgcaagccatccaggcgcctcccaaccgctccatgagccggggcgctcatctacgctcacccccagccagtaaacccccagccaataaaccccagagtyccagcaaaaggcacaatttttcctagatccggcgccactggggaagctgaaggacgtggaagagcccgctccgctggaagcactcctcagccaggaagaacagcgggctgtgctggaggagctttaggacgcggggttggggctgggtaggggcagggcggtggcctctctttcacggtgaacttctgactcggtatggagaggcgtgtcttc

SEQ ID NO: 509689 - DNA, 335 bp, Homo sapiens
atcagtgccactggtcatgaggaggacatgtgacatattattatgcaatcatttctactacagaaaaatcttcaaattattcttacaaatggctattttayctttccagagataaaatacactatttttgttaagttggagatattgttaatcaatggaatttctaaatagttatatagaattcaatagagtcaccaaggttgtttttaatttttggtatccttcattatgagctttaagttatatgaataagcttccacttactagacacacactaactctggtccttcccaggacccatcttctgctcgaataaatgcatagaaatgcaaata

SEQ ID NO: 509690 - DNA, 335 bp, Homo sapiens
atcagtgccactggtcatgaggaggacatgtgacatattattatgcaatcatttctactacagaaaaatcttcaaattattcttacaaatggctattttatctttccagagataaaatacactatttttgttaagttggagatattgttaatcaatggaayttctaaatagttatatagaattcaatagagtcaccaaggttgtttttaatttttggtatccttcattatgagctttaagttatatgaataagcttccacttactagacacacactaactctggtccttcccaggacccatcttctgctcgaataaatgcatagaaatgcaaata

SEQ ID NO: 509691 - DNA, 596 bp, Homo sapiens
aaaaaaaatttctaaagttaaaaaaagatgatgtataagtttgcaatcattttttaaaaatgagaaatttgatgataatctcaaagatatttgcagagagaaacagaaaggcagagacagaaattgtagaaagggaggtttgagaatatagccatgccgttaacaactaatcaggactggagccagaggatagaaggctgtagggggaagttttgtggaaaaagaaggagtcaatagattacatggtattattaaaaactggaaaaaacacatggctcaaaaaaaaagacaagtttagattttattttattgtgataagaacacaacatgagcattaacatatttttaagtgtgcaatacattattgttcactataaatctgatgttttataacatatctctacagcttattcattttgcttaaatgaaaatttatgggggtagttttyccccataggattgttttgtaacgatagtaaattctaggaagaaaatcacgatccaaatatgagacaactgaaaatatgatcatttaaatttgtaattgtattaatagcataagaaaagagaatccattggtggtgttcttactgttg

SEQ ID NO: 509692 - DNA, 563 bp, Homo sapiens
accatactcaaaagcaaagaaagcctcattgtgaaactgaaccagaagagaaataaaaaacagcaagtggggcaaaggctgtggctgtctgagtaccacatctgtcagttgaggaatgttcaagggtaaaaggactagagaaaaggacatgcttgaaattggggagtaaaataaggcatcttcaacccagaaaggaagctgtataaagctgtaacaggtcactgactgggaccaatgcctatatgaattgagctgcatttctaagaaaaggaaggactctacgtcgcatccaaagtctgggccaagctacccagatactcgagtatctggaattgaaaatattcacaattaccctgcagcccaggggtaacattcttccaggacagctcattatctggcctgaaggccccaggcagaaagtgatgtgtagtcaacttaaaacttcacayacgaaaaatggtggggagagaaagacaaggaaaggcagagacagagagattgtagtaaactcccaaccaagaaatgtctgaaaattattattaaaaatgaatgctcaaaagaca

SEQ ID NO: 509693 - DNA, 563 bp, Homo sapiens
accatactcaaaagcaaagaaagcctcattgtgaaactgaaccagaagagaaataaaaaacagcaagtggggcaaaggctgtggctgtctgagtaccacatctgtcagttgaggaatgttcaagggtaaaaggactagagaaaaggacatgcttgaaattggggagtaaaataaggcatcttcaacccagaaaggaagctgtataaagctgtaacaggtcactgactgggaccaatgcctatatgaattgagctgcatttctaagaaaaggaaggactctacgtcgcatccaaagtctgggccaagctacccagatactcgagtatctggaattgaaaatattcacaattaccctgcagcccaggggtaacattcttccaggacagctcattatctggcctgaaggccccaggcagaaagtgatgtgtagtcaacttaaaacttcacacacgaaaaatggtggggagagaaagacaaggaaaggcagagacagagagattgtagtaaactcccaaccaagaaatgtctgaaaatkattattaaaaatgaatgctcaaaagaca

SEQ ID NO: 509694 - DNA, 490 bp, Homo sapiens
tcttaggggaaatacaggggctaccagagaaacaggtgactggctacggctgtggtaaaagtggaaagtattttccrgtgctctttttccccttgctcttcaccgcatggattcctcccacagccacgagctcagagctctcctgctttaaggtataaagaaaaactaggagaatgctggttttcaagtctggctctgtctccactgtgttgagtcatatggtaagttattttctggcttccatattacttatatgatggaggagggagaatgaaacatctctcacattgatttgaaggcaaaatggtagcacatatgtgaacaagtctgacaggaagctggctctcagtagtgtatgctaagtgaattaataattgataaatgccacatgtttattggccatgcaagaatggttatgcaagacgcaaagccctgaagtaagtccgcaacaatggaaacagaggaaggtagatttcactgacattgacaa

SEQ ID NO: 509695 - DNA, 490 bp, Homo sapiens
tcttaggggaaatacaggggctaccagagaaacaggtgactggctacggctgtggtaaaagtggaaagtattttccggtgctctttttccccttgctcttcaccgcatggattcctcccacagccacgagctcagagctctcctgctttaaggtataaagaaaaactaggagaatgctggttttcaagtctggctcygtctccactgtgttgagtcatatggtaagttattttctggcttccatattacttatatgatggaggagggagaatgaaacatctctcacattgatttgaaggcaaaatggtagcacatatgtgaacaagtctgacaggaagctggctctcagtagtgtatgctaagtgaattaataattgataaatgccacatgtttattggccatgcaagaatggttatgcaagacgcaaagccctgaagtaagtccgcaacaatggaaacagaggaaggtagatttcactgacattgacaa

SEQ ID NO: 509696 - DNA, 609 bp, Homo sapiens
ccacgtattctacctattagggacataacaccataggttggtcattaatttagagcggctaaatgtgtttttgagggtggtgtctstcctcacagggtacatctctgccctggtttctcagtgcgccatgagtgggccatggattgctcaatcaggccaaaagtttctgcgtagttaggatgacagtagactactgtaaattcaattagtatcttcaatagctatatgacttgaagaattatatactttttgaaaaataaagcctctgggaccagaagatcccaaagtcatgtgtccactgccatatcttctttgttataaaatgggctctttcccggctgaaatgagagtacctgctttcagtacaacgatcccagccgccgaggggtcatcgaagatcctgccttgattcgttggacctatccaagatcagcaaatgtctatccaaatttcagacccactcctaaaaactcactcttgggaactctgtgtggatttaggcccctcttcttctggtattacattttcaaaactgacagagataggaaagaaaaacttatccgggaaggaaaattggatggaacatttaacctttcatattaagtctgg

SEQ ID NO: 509697 - DNA, 609 bp, Homo sapiens
ccacgtattctacctattagggacataacaccataggttggtcattaatttagagcggctaaatgtgtttttgagggtggtgtctgtcctcacagggtacatctctgccctggtttctcagtgcgccatgagtgggccatggattgctcaatcaggccaaaagtttctgcgtagttaggatgacagtagactactgtaaattcaattagtatcttcaatagctatatgacttgaagaattatatactttttgaaaaataaagcctctgggaccagaagatcccaaagtcatgtgtccactgccatatcttctttgttataaaatgggctctttcccggctgaaatgagagtacctgctttcagtacaacgawcccagccgccgaggggtcatcgaagatcctgccttgattcgttggacctatccaagatcagcaaatgtctatccaaatttcagacccactcctaaaaactcactcttgggaactctgtgtggatttaggcccctcttcttctggtattacattttcaaaactgacagagataggaaagaaaaacttatccgggaaggaaaattggatggaacatttaacctttcatattaagtctgg

SEQ ID NO: 509698 - DNA, 609 bp, Homo sapiens
ccacgtattctacctattagggacataacaccataggttggtcattaatttagagcggctaaatgtgtttttgagggtggtgtctgtcctcacagggtacatctctgccctggtttctcagtgcgccatgagtgggccatggattgctcaatcaggccaaaagtttctgcgtagttaggatgacagtagactactgtaaattcaattagtatcttcaatagctatatgacttgaagaattatatactttttgaaaaataaagcctctgggaccagaagatcccaaagtcatgtgtccactgccatatcttctttgttataaaatgggctctttcccggctgaaatgagagtacctgctttcagtacaacgatcccagcygccgaggggtcatcgaagatcctgccttgattcgttggacctatccaagatcagcaaatgtctatccaaatttcagacccactcctaaaaactcactcttgggaactctgtgtggatttaggcccctcttcttctggtattacattttcaaaactgacagagataggaaagaaaaacttatccgggaaggaaaattggatggaacatttaacctttcatattaagtctgg

SEQ ID NO: 509699 - DNA, 627 bp, Homo sapiens
gtactaaaaatggtaactgcttataagtcaaccaccaggtcaaagatggcttactcaaaaaatgtcacaagaaaaaaaacatcaaatcaaagtgaccagcctcactgcctagcaaccaactcactcactcattcacacagaaggcaaaattgaaaggtagctgggacgcccataggaagaaaacagttaggatgatgcaggggagactgatacaaggctgttattctaatcatcccataacagagacagagtcacagctagggaattattcaggaattaggaaaagttacttctggtaaacaaactcccacatactgggttaaaatttctttggaactttatttatcatgaccctaggagctctagtcatatatgcaaatggataaacaacaaagctataaaagcagagggttttaattttgcttttattttttaaataatagcaacaagsaactttagtaagaataacatagtaaaactagacctgtaaaagtcatcaaaagcaaacatgacaggaatagcataaagtaatttgtgaaagctagtattatcaaagcactgacagaagaaaaagaatgatgctaaaaaatacaaaacacttctttcaataccataccttatcaatgg

SEQ ID NO: 509700 - DNA, 521 bp, Homo sapiens
caataaccactcaagcagagttaactatgattaccactacattccctcatgctgatattaaacactactcccagaaacatgaaatgagaaaatttttacttatggaacaagtcctctctctgcctgagaggaattgttttaaggcawcaaataatagacaaaatttacagaaataatcaatatacataacatgcttatcaataagaaacatatcttatatacgcacaaagtttaaaaggctcttaggagaaaagtctggagtactctgaaggctaaggtagcaaatactatgtgccagtgactacagatatagtcatagtacgtacatgactagcacatatgaacaaagtttaatgaaaaaacctaagaaacgcatagataagtgaatattaccttgaataacaacccaaatattatttgctaatcactataaaacaactgggaaacccattacatgttcatatatgtatgtaggctttctcgggcacattggcccatgcctataatcccagtacttcggg

SEQ ID NO: 509701 - DNA, 561 bp, Homo sapiens
ggatttaggcaagttacttaacccgcctctgctcagtctttaagattatgatgatgaaaactggatcaagcacagtgtctggaacacagtaagagctcagtaattgttagttttggtattatagtattttcctagaatggaagatcactttcattatggggttccagaaaagattattgatgacccaattacttgtctaaggctctccaggtaattctaatcatcttaaatgcactatggtcacaggcagattaakttttcacaatgcttaactatttttattgacacagtgttacaattacagataaagatcattcacactacagctccatgccttaagagtactctcagtcagggactaaatggtcccatcattttttttttttttaataaaccacatctacttccaaagttgtatgtcttacctttcatttcttccatgatttcgggtgtttaagaaaggattggattctttgcatccagtggagaagtgagcaaagcaacatgcttttctgaggttggccaaaatgctagctccccccaggtttgcacccagcttcc

SEQ ID NO: 509702 - DNA, 281 bp, Homo sapiens
aggagactgctaacagaatgccaagtacattaaattaagtttataatattattgggtaagttttcatcatgaccttaactttctcatttatccttcccaatatatcttggtttacaccagcgatttagtagtatagatgcaaattcataccctaccttctgaattatttggcaacaggcccttactttcatcccatttgagctccaaactgtrgaagcagatcatatattccaggtccatcagtatcactgacaggctgttcagctgatccgccagccaga

SEQ ID NO: 509703 - DNA, 465 bp, Homo sapiens
attaagatattggtcagttataaaattcataacttcccttgaattaataatcttttgtcttcattctcatgatatagccctggcatagaaatttttcataaataaaacctaaacctagattatctatcatctatctatctatctatctacctatttatttttttgagacagtctcaccctgttgccaggctggagtgcaatggcgtgatctcggctcactgcaacctccgactccctggttcaagcgattctcctgcctcagtctcccgagtaactgggattacaggcacgcaccaccacgcccagctaattkttgtatttttagtacagacagggtttcaccatgttggccaggattgtcttcatctcctgacctcgtgatccacccaccttggcctcccaaagtgttgggattacaggcatgaaccaccccgcctggccaaacctagattattttaagagcct

SEQ ID NO: 509704 - DNA, 597 bp, Homo sapiens
taaagtgggtcaccttgcaattctatagcatttctatggcctggagacagcctgcaaaagggagcctacgttaaagttagtgattggggttgttgtgagctgctagagtgacatgaggaagaagtgtccaagaggacctttacacaatgcaatctgttttgcagatagtcttgactattttgaggctatccgacctaasctaaatgcctctacaaagtagaacaggagagttgcttggaagtctaagatttctcaccatatatttatatacgtgaagaagaatagttaggatgccctgaagaagtcatgcccattccttttttttttgagatggagttttgctctgtcgcccaggctggagtgcagtggtgtgatctcggctcgctgcaacctccgcctcccgggttcaagtgattctcctgcctcagcctcccaagtagctgggactacaggtgcccgccaccacgcccagctaattttttgtatctttagtagagacggggtttcaccatgttagccaggatggtcttgatctcctgacctcattatccgcccgcctcagcctcccaaagtggtgggattacaggcgtgagccac

SEQ ID NO: 509705 - DNA, 614 bp, Homo sapiens
tgctaaagtgggtcaccttgcaattctatagcatttctatggcctggagacagcctgcaaaagggagcctacgttaaagttagtgattggggttgttgtgagctgctagagtgacatgaggaagaagtgtccaagaggacctttacacaatgcaatctgttttgcagatagtcttgactattttgaggctatccgacctaacctaaatgcctctacaaagtagaacaggagagttgcttggaagtctaagatttctcaccatatatttatatacgtgaagaagaatagttaggatgccctgaagaagtcatgcccattccttttttttttgagatggagttttgctctgtcgcccaggctggagtgcagtggtgtgatctcggctcgctgcaacctccgcctcccgggttcaagtgattctcctgcctcagcctcccaagtagctgggactacaggtgcccgccaccacgcccagctaattttttgtatctttagtagagacgkggtttcaccatgttagccaggatggtcttgatctcctgacctcattatccgcccgcctcagcctcccaaagtggtgggattacaggcgtgagccacggtgcccagcccac

SEQ ID NO: 509706 - DNA, 476 bp, Homo sapiens
agaaagggtaggagagtctccagattattctattgttccttccccaggcagacagcaggagctatctgggaggaggagggagaaagggcccggggttgttgggctgggcctgtgcccagacagatggtctctccacgcatcacctctctctccttctgtctctctgcacccacacacagcaccacactagtacccactgcagatgcaaagaatcagggctctgtccagcatagattgggccctttggggaatggcatttttataaatcctggtgttttcttgccttagtcccaatccaaaaccatcaggcaccagctcagggctcacaggctcagggctgagagaaattaagctggacccaaaccaagccagcaagtggytcgactttcataataataagggtcctccaccagcccccaccccctaccagatgtgctgcctccctggccagtccagagtggcagaaaatgacagca

SEQ ID NO: 509707 - DNA, 632 bp, Homo sapiens
gccacttaaaatattaaagaagactgtagtttccatcttggacactttctctgaaggacactagttgccatgtagtgacacagacctcgtggagaagctygcatggcaaagaactgagacttaccaccagaaacatgagtgagtctggaagtggatcaaaccccagttgagctttgagagactgcagcatgggctgacaccttgagtgcagccttacaagaaccctgggccagaaccacccagctaggctaagctgcttctagattcccaacccacagaaactgagataataaatgtttgctgttttgaaccaccaagcaagggttttattatctatgaccttgctcttacctgcaggacgtgtctggaatgtcagaactatattctggctttccttggtttattagtccattttgcatggctataaaggaatacctgaggctgggtaatttattaaaaaaaaaaaaagaagaagaagttgtttatttggctcgtggttctgcagactatacaagcatggcaccagcatctgtctggcttccagtgagacctcaggaagctgttactcattgtggaaggtgaagtgagagcaagtatgtcacatggtgagagagggagcaagaaagatgaca

SEQ ID NO: 509708 - DNA, 580 bp, Homo sapiens
atttctgttgggtatatacttagcatcaaaactgccaggtcacagtatgctcaactttgttgactactactaaatattttcccaaagaaatagtactactggccaggcatggtggctcacgcctgtaatcctagcactttgggaggctgaggagagaggatcacttgagtttaggagtttgaaaccagactgggcaacatggtgagacctcatctctgtatttatctataatttttaaaatgtaaaaaaaaattttttaaaaagaaatagtactaatttaccatttgtttgcttgtttgttttactcaaacatctagcaaccattaaatgactcactcctttactgacaaacacaattagagacacaggattaaaaacaaagataaggctgagacatagcacctgatccccaggtccatggacacacatgtaaataaataacctwattcagttggcaaaatgtgttaatgtatcttatctgatcttcataataaccacaagagattaagtcaaccatcattaactctcttgcttctgcaaggatagggataccagtaaggtggtttcccaaggccacaca

SEQ ID NO: 509709 - DNA, 637 bp, Homo sapiens
gaaaattcactaattcctccacattttagctcaagctttgccttattgtaatgtttatagatttttgatggtcctgcatgtggctaagttctctgagatacatttataggaaggaaactaatttgttgtatgatgcttgttcggcatactatctccttaaatctacataataactgtaagacagatatcatttccccacattcccagaggagcatatggaggatccgagatgcgcagacactggcttcaaaccacatgatcaggatgtgaatccagtctccctactcccatcaggaatctttcacccactccactctccctcattctgaggccccctcagctactggtataaacctaatgacaaccacagtgagggaaaaaacgtgtatttataaacacattcayactaaagattatggttacatatatagagcttttagggtcaattgcagtttgaaagcagacgagagagaaggaaaagcattctcattccggaatagcaagtcttacctgggtggaattccaggtatccagtgggtggggagctttactaggggttggggaggtaggaaggacctactaggtcacatcattgcggcttgccactcaccctaccctttcccaaggtgaccccgac

SEQ ID NO: 509710 - DNA, 590 bp, Homo sapiens
gactaagtgtatctttcataacgatgagtatttgaagtgctttgtgaagtccttcctcagacattgcctcattgaaccctcactaggaccttatgagctagggggcattctgttacccctatttttcgactgaggagaatgctgttgttgcaggcgttcactgacatgccccacgtcctacagcaccaccacaagtttcatactggtgttagcctgaagtctacatttgagttcccactgaatggcctgagctctgccttcttcattgaaattgaaagaacctctcttcctgggacaactcttcaaataattcggaatcatatactttttagtataggttttgtttctaaatatagtcatagcactttctgacctgtttttgataatgcagcaaagcttatccttttgctttcttggagggaataatattcaaaaagtctcagaataagctgagtagtatcttrtcacttgcataatgcagctctatggtgtcattcagacaactcttgtggcatttgggtacattaggcaaaagcaggactgtctaaaaggaaattcttaatgtgggaatgtattaaagagtgtataca

SEQ ID NO: 509711 - DNA, 526 bp, Homo sapiens
ccacccagctaatccaggatgatctcctcatctcaaaatccttaaagtgaccacacctacaaagtcctttttaccacatacagtgacatattcacaagacttggatattaggacatggacattttcaggcagagacaggtcattattcagcctatgatatcaggaaaagctgcatatatcgcttagcgcgctctctctctctctctctctctmtatatatatatatatatacacatagcatatatatacatatttcttttatttaccccaaccataatccaatgaagttaaaccagatatatcatcattatctaactcaatttaagaagtgctaattaatacaattagaaaaaaataaatacaaataaaaaaccttctgaaaaggagaaaaacgaccaacattttaggttgtgtttgcttatctgcaaaacttaagaaactgaaaaatattagtgtgataaaaagaaaataataaattgactggatacaaaattaatattgccatcatgtaaataaataacaacca

SEQ ID NO: 509712 - DNA, 526 bp, Homo sapiens
ccacccagctaatccaggatgatctcctcatctcaaaatccttaaagtgaccacacctacaaagtcctttttaccacatacagtgacatattcacaagacttggatattaggacatggacattttcaggcagagacaggtcattattcagcctatgatatcaggaaaagctgcatatatcgcttagcgcgctctctctctctctctctctctctatatatatatatatatacacatagcatatatatacatatttcttttatttmccccaaccataatccaatgaagttaaaccagatatatcatcattatctaactcaatttaagaagtgctaattaatacaattagaaaaaaataaatacaaataaaaaaccttctgaaaaggagaaaaacgaccaacattttaggttgtgtttgcttatctgcaaaacttaagaaactgaaaaatattagtgtgataaaaagaaaataataaattgactggatacaaaattaatattgccatcatgtaaataaataacaacca

SEQ ID NO: 509713 - DNA, 577 bp, Homo sapiens
cataatattccttttaaaccaaaacctaaaataactcatattttagagtatttggcttaccatgtggcatctcaatttgagctaccaaagatcctgttagatcccattgcctcctgcttataataaatcatcaaatatcagtacctccagtgtttccttggcctgagatacagtgtattttcttggttgaaagagattcaagctgggaattctagaattgctacacccgtttatgttccatatatttcacagttactccctgcggcgttttcttctgtagtgctaactgcataaatcagatttatatttgaaaatacagttgctacactgaagaacctattattttaaacctctctttttaaagtaagcgtgacccttataactcttttggtgaattcaagagtgctagcacaactttagggaaactacagaattgaaaatctgactttgcttatcatctaatctttttccttcatgctgctgtcactttcttaaaacctttctctctctctttctctctctaattygattgattgataaaatacgcatagaaaaaaagagcatacacacaatgaat

SEQ ID NO: 509714 - DNA, 508 bp, Homo sapiens
gctgctgagaggaagtcacaagtgcaagggatttacttggtgagagggaggaagagaaggcagggagaggcttcagaccatgatacagggccaacacctttgaaagcatatagggaagaaaagaggaccgaagagggaaagcctcagatatcattatacctctgcagaagccttgacttgtccaacagggagctctggtgcaatgactgtagaagaggcgtgcttctgcttgaaactcacccatgtcttctcatctgatgcaaaataaaatatgaagtctaccatggcttacaagccctctacaaacagacccctaatatatttcttatgtcatctcctactgctcttcctcctgactcttcctcttctcagtgagtcttggacacccaagcatactcctacctcagtgtctttccacttgttgttccctgtgcctggaatgtccttctctcagattttggcatggcttgctckctttcttcaagtctctgcttaaatatcaccttct

SEQ ID NO: 509715 - DNA, 589 bp, Homo sapiens
cagtatactccctcccttaaatttgagcaaaaaggatcccatgcttagagcaatgtttctcaaattgttctcagaacagcagcatcagtattacctacagacttgttagaaatgcaaattcttagaacacaacccagacctagtcagtcagaaatccagcgtgttttaataartcctccagataattctaattaatcttaaagtttgggaggcaatgcattgtgggccctagtctggtcctcttctagcagtgctcctcctcatagaatgagaagtccacagggccaagggaggtattccccccagccccctacttccacagaagtggtgcctctccattccagatccctttcttggtacttggaacctgagaactcactgcccaagtggcctcaagtctgcttccagggtctgccttctctaagtctgtcccgcaaattggcctggccacaattcacagagttgccaagagagagctgagaagagtggaatcacgtaaatgaagatgtctgtccacacctgtgaagacaagaccccaccgcactgagggagctgggggagggaagcaaagggagcttgtccctgagta

SEQ ID NO: 509716 - DNA, 589 bp, Homo sapiens
cagtatactccctcccttaaatttgagcaaaaaggatcccatgcttagagcaatgtttctcaaattgttctcagaacagcagcatcagtattacctacagacttgttagaaatgcaaattcttagaacacaacccagacctagtcagtcagaaatccagcgtgttttaataaatcctccagataattctaattaatcttaaagtttgggaggcaatgcattgtgggccctagtctggtcctcttctagcagtgctcctcctcatagaatgagaagtccacagggccaagggaggtattccccccagccccctacttccacagaagtgktgcctctccattccagatccctttcttggtacttggaacctgagaactcactgcccaagtggcctcaagtctgcttccagggtctgccttctctaagtctgtcccgcaaattggcctggccacaattcacagagttgccaagagagagctgagaagagtggaatcacgtaaatgaagatgtctgtccacacctgtgaagacaagaccccaccgcactgagggagctgggggagggaagcaaagggagcttgtccctgagta

SEQ ID NO: 509717 - DNA, 526 bp, Homo sapiens
ctgtagatgatggtagtaagaagtataaatagattataacagtggacaagaggaaaatgctggataggaggcaggactaagttrcagttcccactgggatggatagagcagtgtgtggagatttacatcatgaacttttgctccaagaactattgcaggaagataccaggaaagccaagaaaatccacacactgtttgaaggaagcagattgctcctataggacctggaagacagcctaaatactgtgagtgcccaaagtgtgacagtgggaaagggtgattgtctacctctgaacacacaccctcactggggaacctgaaggttcagatcatgagagaaggatttgaccttacctggagctgagataatttagagagctgagagaaatacaggggtagagaaagcagtgggaagtgtcctgtgggctctctcggtccccagggaagccatttctgactttgctgagaggagtccttggggagggcttccagaggaactaagacaacaggcagaaggaaacctcca

SEQ ID NO: 509718 - DNA, 526 bp, Homo sapiens
ctgtagatgatggtagtaagaagtataaatagattataacagtggacaagaggaaaatgctggataggaggcaggactaagttacagttcccactgggatggatagagcagtgtgtggagatttacatcatgaacttttgctccaagaactattgcaggaagataccaggaaagccaagaaaatccacacactgtttgaaggaagcagattgctcctataggacctggaagacagcctaaatactgtgagtgcccaaagtgtgacagtgggaaagggtgattgtctacctctgaacacacaccctcactggggaacctgaaggttcagatcatgagagaaggatttgaccttacctggagctgagataatttagagagctgagagaaatacaggggtagagaaagcagtgggaagtgtcctgtgggctctctcggtccccagggaagccatttctgactttgctsagaggagtccttggggagggcttccagaggaactaagacaacaggcagaaggaaacctcca

SEQ ID NO: 509719 - DNA, 571 bp, Homo sapiens
tttaaaggagcaggcttaattgtctggaaaggcaatggggagaaaagagaactgttgtacctgagatgggagagaacaatagctccctaggcaagaaaaagttacatatttgcaaaagccaagttccagtgaaggagaataggtacagggattgctctgagaagtygtttgggagactggagaatttgctgtacatgaagactacaatgagttgtgtttaagagtctggtgctttggaatcagaaagtttgagtttaaatctttattgtgtgatttggtacatttatgaactttgccagcttatgtaacttctttggtggaaattcctgagaacacaagggaagagtgtgggaagtaaggtaggagtggagagccagatgagttcaaggaggtacagtgcattactggggatgacagaacaacagaaaggtggccaggtgggcttacactgtggccactgactgatgaaaacagtaataagcagccttgtgtatgatttcaacagtctatttgagaagggtgattactgggtctaatggctagagggcttagtgcacaaatacttggatga

SEQ ID NO: 509720 - DNA, 571 bp, Homo sapiens
tttaaaggagcaggcttaattgtctggaaaggcaatggggagaaaagagaactgttgtacctgagatgggagagaacaatagctccctaggcaagaaaaagttacatatttgcaaaagccaagttccagtgaaggagaataggtacagggattgctctgagaagtcgtttgggagactggagaatttgctgtacatgaagactacaatgagttgtgtttaagagtctggtgctttggaatcagaaagtttgagtttaaatctttattgtgtgatttggtacatttatgaactttgccagcttatgtaacttctttggtggaaattcctgagaacacaagggaagagtgtgggaagtaaggtaggagtggagagccagatgagttcaaggaggtacagtgcattactggggatgacagaacaacagaaaggtggccaggtgggcttacactgtggccactgactgatgaaaacagtaataagcagccttgtgtatgatttcaacagtctatttgagaagggtgattactgggtctaatggctagaggrcttagtgcacaaatacttggatga

SEQ ID NO: 509721 - DNA, 543 bp, Homo sapiens
tttagactgaattaaaagaaaaagtataccatacaaaatgtcaaagaaagtagagagaatcaaaaatgtgtaagaaaaaaacaacaaaaaaaatagaaatacaaaataaagataattggtgtttcctaaaagacaatagagtaaaagaaaaaataaacatcaaagatacatgctaatcataaccaactatatttagaacaaaaaaattaaaaagttattttttaccagataatagaattttgtgtgtttttgttasttttcccctatttaaatgtcatacttttttacaatgttaaaaaactcttcatggttataaaaagcaaagtcttaacttgaagcctgagcaccttgctccaagatgttctgaggactctatcaaaagcaaatcagatcattgtaaaatgacagtgacttcaataaaagtagtctttgttcagtgctgagatagcgttcctggatcggccacgcaatttcttctctaaaataataaagattttgaaatgttattgtcaaactcagtttttcttccaaaatagatgcagc

SEQ ID NO: 509722 - DNA, 543 bp, Homo sapiens
tttagactgaattaaaagaaaaagtataccatacaaaatgtcaaagaaagtagagagaatcaaaaatgtgtaagaaaaaaacaacaaaaaaaatagaaatacaaaataaagataattggtgtttcctaaaagacaatagagtaaaagaaaaaataaacatcaaagatacatgctaatcataaccaactatatttagaacaaaaaaattaaaaagttattttttaccagataatagaattttgtgtgtttttgttagttttcccctatttaaatgtcatacttttttacaatgttaaaaaactcttcatggttataaaaagcaaagtcttaacttgaagcctgagcaccttgctccaagatgttctgaggactctatcaaaagcaaatcagatcattgtaaaatgacagtgacttcaataaaagtagtctttgttcagtgctgagatagygttcctggatcggccacgcaatttcttctctaaaataataaagattttgaaatgttattgtcaaactcagtttttcttccaaaatagatgcagc

SEQ ID NO: 509723 - DNA, 543 bp, Homo sapiens
tttagactgaattaaaagaaaaagtataccatacaaaatgtcaaagaaagtagagagaatcaaaaatgtgtaagaaaaaaacaacaaaaaaaatagaaatacaaaataaagataattggtgtttcctaaaagacaatagagtaaaagaaaaaataaacatcaaagatacatgctaatcataaccaactatatttagaacaaaaaaattaaaaagttattttttaccagataatagaattttgtgtgtttttgttagttttcccctatttaaatgtcatacttttttacaatgttaaaaaactcttcatggttataaaaagcaaagtcttaacttgaagcctgagcaccttgctccaagatgttctgaggactctatcaaaagcaaatcagatcattgtaaaatgacagtgacttcaataaaagtagtctttgttcagtgctgagatagcgttcctggatcggccacgcaatttcttctytaaaataataaagattttgaaatgttattgtcaaactcagtttttcttccaaaatagatgcagc

SEQ ID NO: 509724 - DNA, 631 bp, Homo sapiens
tgctagcttgccctcttgtagccaaacaaagactgccaaatgtactgaagacaaattggaagcctctcctgcttccaaaaacttccaaagtcacaaaacatgtaacatttagagactgactcagtgtttcctcttttatcctataaaactgattttacgttctatgcctttggaactgctgaaacaaaagagacaatagatgggtttccttacaagaagtttatgaacaaacaacctgggttaattttatcttgaacttagttttgtctttgacatcagagaggacacaaaatagaaggcagactggggatgaacaagaggctggattaaaggcaagaagacaactgaggactccattgcggtaatccaagcaagtgarggaaggagagagaaagaagaagagcagagagggagggagaaaggacagaggggcctaagtcaaggcagtggcaataggggttaaaagatacagagaaattggaaaggaaccaaagggggagaattaaaacaagtttctgatttctgaatcagaggtttaacattccctgaatcaatagggtaaccagattgtggcctatacccaaataatccaattaagcttttaaaacaatggttgaggaaaatactatag

SEQ ID NO: 509725 - DNA, 476 bp, Homo sapiens
cctttcaattagttgagaaggtggaggctgcctgctaagtcaggtttgggatgcactgaggctctaccagtggatgtggtgtataatgagcggggcccattgccgagcagttggttctgcagcacgcagttgagggaatcgaataccacagggctcctgcccccatctgcatcccctctcttccttggcttgctgcatccaataccattcccatcagcacaaaaaaaaagaaatacacaatgaaagatgagacacacacctgyctgctttaactctgggttttaaaaaggggctctcctaacagggagccaaggcatcggagtgacacagagaggtcaggcaagtgaaggccatagtccttgaaggcctgaccccaagaagggtacccttcatccatggtttagccttggcagatcacagcccttctcattttacaacctgggagccgggtgatgatgcattgaaagggtggtgac

SEQ ID NO: 509726 - DNA, 442 bp, Homo sapiens
gcataatccctttgccttcttacctaatttccattgtttatatatttttttcatggtggtggttgktcctatgtttctatgaataatggtctttttagattcagcaggcacttattgattgcttactatgtgaagaacatttacaaatcttttttttcttcaaacattatttacttagccatcccattaactcaaaatgtttaatagtattattttttaaaaattctctgtaaagaaattttggcttagagaacttttaagtgacttactacactcagaaagtgataacagaatttgaatttagtcttctgagcctatgttgagtgttttctcactgatccagagatactcgtatttaccatttctatatgacataaactttgacaaaacactgggaattactgccaaacggatgaaagactccagatttggttttacccca

SEQ ID NO: 509727 - DNA, 665 bp, Homo sapiens
gctgtgggtgggttctaagtattatattcccatttacaaattctctttatacaagtttggagtcctaattcttttgtaaactcatagctttttttaaaaaaattatgattttcattgattcttatcygtatcagacttgtttatccttttctttttaaaactaaattattaaaaataataattacgtaagaaataaaataacaataacaaaaacaatagataacacttaaatactcatgtctcaccaccattccattgaatatccttcactttggaaggccaaggcatgtattgggcattatggattattgtcactatagctgtgtacatgcatgagttttttcagggtttttgcctaaggcagaattgctgggcatatgtatgtgaattttcaactttctgcataggcagtaccaaattgtttttcaaggttgttttatctagttagacttccccagtgctgtttgcattgatgcacaattccataaaacttgatatttttttacctttcagattttcccccttttgggtgtgaaatggtgccttattattgtttttgtttgcagattgtctcctctcacttttgtatctccagatcctagcagagttatatcaagattccattggcaatattgagtaatttattcattgaatgggtaaataaa

SEQ ID NO: 509728 - DNA, 665 bp, Homo sapiens
gctgtgggtgggttctaagtattatattcccatttacaaattctctttatacaagtttggagtcctaattcttttgtaaactcatagctttttttaaaaaaattatgattttcattgattcttatctgtatcagacttgtttatccttttctttttaaaactaaattattaaaaataataattacgtaasaaataaaataacaataacaaaaacaatagataacacttaaatactcatgtctcaccaccattccattgaatatccttcactttggaaggccaaggcatgtattgggcattatggattattgtcactatagctgtgtacatgcatgagttttttcagggtttttgcctaaggcagaattgctgggcatatgtatgtgaattttcaactttctgcataggcagtaccaaattgtttttcaaggttgttttatctagttagacttccccagtgctgtttgcattgatgcacaattccataaaacttgatatttttttacctttcagattttcccccttttgggtgtgaaatggtgccttattattgtttttgtttgcagattgtctcctctcacttttgtatctccagatcctagcagagttatatcaagattccattggcaatattgagtaatttattcattgaatgggtaaataaa

SEQ ID NO: 509729 - DNA, 665 bp, Homo sapiens
gctgtgggtgggttctaagtattatattcccatttacaaattctctttatacaagtttggagtcctaattcttttgtaaactcatagctttttttaaaaaaattatgattttcattgattcttatctgtatcagacttgtttatccttttctttttaaaactaaattattaaaaataataattacgtaagaaataaaataacaataacaaaaacaatagataacacttaaatactcatgtctcaccaccattccattgaatatccttcactttggaaggccaaggcatgtattgggcattatggattattgtcactatagctgtgtacatgcatgagttttttcagggtttttgcctaaggcagaattgctgggcatatgtatgtgaattttcaactttctgcataggcagtaccaaattgtttttcaaggttgttttatctagttagacttccccagtgctgtttgcattgatgcacaattccataaaacttgatatttttttacctttcagattttcccccttttgggtgtgaaatggtgccttattattgtttttgtttgcagattgtctcctctcacytttgtatctccagatcctagcagagttatatcaagattccattggcaatattgagtaatttattcattgaatgggtaaataaa

SEQ ID NO: 509730 - DNA, 617 bp, Homo sapiens
atttctttgcagaattgcgctctatctagtgctgtctgttgctttgccccagatcacacatttgtttagctcttgcctcctttcctcttctgctattccyactcctgagagaatccacttccttaataaatcacttgtacaaaaaatcatctctgtatctgtactccgatgaatctgatctaaagtagtgtctctcagatctccatccaaaggccacttactcagaacagactttcctgatgcccccaaaaagatcatgttccctataataagttgcttttgtgacaaccatcatttaactataggaattatatttttattgatgcataatagttatacatattttcagggtacatgtgacattttgacacattcatacactgtgtaataatcaagtctggggcaattgggatatccattatttcaaatatgtatctttttgtgcagggaacactttggttattctcttctagctattttaaaatatgcagtagattactgttaactattgtcaccctaccgaactatcaaacactagatcttatttcttctatcaaactgtaatttcacacccactaaccagcctattttcattctcccctcccttctatgcttct

SEQ ID NO: 509731 - DNA, 617 bp, Homo sapiens
atttctttgcagaattgcgctctatctagtgctgtctgttgctttgccccagatcacacatttgtttagctcttgcctcctttcctcttctgctattcctactcctgagagaatccacttccttaataaatcacttgtacaaaaaatcatctctgtatctgtactccgatgaatctgatctaaagtagtgtctctcagatctccatycaaaggccacttactcagaacagactttcctgatgcccccaaaaagatcatgttccctataataagttgcttttgtgacaaccatcatttaactataggaattatatttttattgatgcataatagttatacatattttcagggtacatgtgacattttgacacattcatacactgtgtaataatcaagtctggggcaattgggatatccattatttcaaatatgtatctttttgtgcagggaacactttggttattctcttctagctattttaaaatatgcagtagattactgttaactattgtcaccctaccgaactatcaaacactagatcttatttcttctatcaaactgtaatttcacacccactaaccagcctattttcattctcccctcccttctatgcttct

SEQ ID NO: 509732 - DNA, 617 bp, Homo sapiens
atttctttgcagaattgcgctctatctagtgctgtctgttgctttgccccagatcacacatttgtttagctcttgcctcctttcctcttctgctattcctactcctgagagaatccacttccttaataaatcacttgtacaaaaaatcatctctgtatctgtactccgatgaatctgatctaaagtagtgtctctcagatctccatccaaaggccacttactcagaacagactttcctgatgcccccaaaaagatcatgttccctataataagttgcttttgtgacaaccatmatttaactataggaattatatttttattgatgcataatagttatacatattttcagggtacatgtgacattttgacacattcatacactgtgtaataatcaagtctggggcaattgggatatccattatttcaaatatgtatctttttgtgcagggaacactttggttattctcttctagctattttaaaatatgcagtagattactgttaactattgtcaccctaccgaactatcaaacactagatcttatttcttctatcaaactgtaatttcacacccactaaccagcctattttcattctcccctcccttctatgcttct

SEQ ID NO: 509733 - DNA, 661 bp, Homo sapiens
ttaattaaaatgtcttttaagtcttatgttttatcttcaagagtaaggcaacatttttatcacagtcttgtaacatagaagtatcttcaatgtaaaagtaattttaaataaatcaacattaaatttcaggaagatgtaccatatttgttcttgacttcaagaatcagataatatataaattataacctgcagtgtattgtcatttataaattaaattaaaagatcattaggtaaggatataactttacttattgtttaaactctatggaattatagtatatatgcaataaaatccatagatcttattataggtatataatttaatgaattattcatagtaaacacactattgtaaccactaccaaattaaatatatgatagtttatcataattgcaaaagtatcttccgtgcaagtttccagttgttatcaaccctaaagataactactgttctcaattcttacaccataaactagctttgcctaaatagatactgtacattaaaagttttttcaccaygtactcttttgaatacatcttttttcattgcatttcatgcctgtgagaattattcattattgagcctcttgattttctccattactgtgtagtatttcatgacttcgttgcataatgtatttattcattttactcctgatag

SEQ ID NO: 509734 - DNA, 661 bp, Homo sapiens
ttaattaaaatgtcttttaagtcttatgttttatcttcaagagtaaggcaacatttttatcacagtcttgtaacatagaagtatcttcaatgtaaaagtaattttaaataaatcaacattaaatttcaggaagatgtaccatatttgttcttgacttcaagaatcagataatatataaattataacctgcagtgtattgtcatttataaattaaattaaaagatcattaggtaaggatataactttacttattgtttaaactctatggaattatagtatatatgcaataaaatccatagatcttattataggtatataatttaatgaattattcatagtaaacacactattgtaaccactaccaaattaaatatatgatagtttatcataattgcaaaagtatcttccgtgcaagtttccagttgttatcaaccctaaagataactactgttctcaattcttacaccataaactagctttgcctaaatagatactgtacattaaaagttttttcaccatgtactcttttgaatacatcttttttcattgcatttcatgcctgtgagaattattcattattgagcctcttgattttctccattactgtgtagtatttcatgacttcgttgcataatgtrtttattcattttactcctgatag

SEQ ID NO: 509735 - DNA, 550 bp, Homo sapiens
ttttttaatcaataaagcacctatatttttctttcttttaaatgctcagctttcctcttgacattttaaaagtgagtttggtgcttatgattgataataataacttttacattagccatctttcatcacttgatttgtctattttcttatggttttatcctttgatctcatttagcatttgggtgcgttttattgatcttatcctgtggtcaatttgcattcaaagtttkcattcagtttagtagaagcacttgtaatattgaatattaaggaggagtttcaggggccaatgtatgagttatctgttcaaactgcctacaacaaatccatagaggattaagtggaaattattcacatatactaattaaaagttatttaaatacttaatgattttgagaaaatattgctaaaatgaaatctttttacaatatatttctaggcccagctctatgagaaggagatctttgtgctcattatgcacagtgagggagaagaaatataggaggaagtatcagtccctctctacatgcagtccatactttcatttcta

SEQ ID NO: 509736 - DNA, 618 bp, Homo sapiens
accctcttgtgtgtctcaatttctctctccagaggtctataatctctgagaggactcaaaatgccaggtgatcagcctttatatgcatttcctggataagcctttttttaattaatttttttttgggatttccctgtagggcagctgcatgtcacagggatcaaccccccagacactcccacgaggcccctggtcacccagggcgacctttcagctgggagaaagatatgcctatttcttttgagctgagaaaactcagtctctcattgacctatgcaaacaacagttcagttgctcatagaaawgtgcacagacaagccaaatggagattaattttgggagaaaaaagcgatagagatgactctttagaatgcatctcagaactagaattaggatccttaaacaacaacttcctaggagagaaaaaaaaaaacagctaagaccaatttctgtaaactatgcacaaccacccctactttgtagctctcatctgccattacaagtgccaaggtcaaatcctctcacagtattaagtaatctctggtacccccaaagtcaaagagcccagattattcaatgtaggaaaacagaggtttagacctaagaagaatctcccca

SEQ ID NO: 509737 - DNA, 538 bp, Homo sapiens
tactgtatcacacatctgagctgaaattaactcttacctgtattatgacaatagcttcttaatgttttcattctttcacccttgtcctcacagcactgatgactgaccataagtaaggttctatgtttccccttaaccraacaatcaaatggcttcccatggcacttgcaatagaagtcaaattccatacagtgatctaaagggtccagtgaaatttcctcacttctctaatgacatattctactgatttcttatttcaaccttcttttgatttcttatctataatgagtctgttcttcatggaacatccttccttaacatctctataggctcttttcagcactttcatcaggtgttaacagttccttgcctgacaagtaccattctgtattccccttatcttgtttctcaccatttatttatacattcctcacccttttgcacattcaattgttttgtttgctggtttattttttttttcatgctagaatataagctctctgagggctataaatcctagacctagtggagcatattg

SEQ ID NO: 509738 - DNA, 655 bp, Homo sapiens
ctgcaccatttcatctctaggtaaatgactgtggaaccaacacttggatgtaattaccaaacaatttccatgctaaaccactcactgtctttactttttctaaaacattggacttacctgtagctgcagggatccatatatgagacattctactttgtgttatatcttaacgtgaatttctcttcctgttgtggagtcttggattgtatagctatggtcatttaaaaaaatcaatccatcaatgcataagaatgctgacttttttttaaccaaaattgyttttatacattctcattttcagacaacaaagttgtagcacatataggttctttaacttgcccaacactacacagtcctctgtggcaggaccacaatcacaacttaggcatcatactccacagtgtatccttctactcaccctgccattggtgtcagtcagggtgaataagttatgctgcagtaacaattaggctcaaaatctcagtggattaaagcaaaaagtctttcttgctcatattatatgtgaattttagggcacgcaggggcctgctccacagttgcctcacccaaggcctctactatctttaactaaatgagaaagggatgtgggaaattgaacactggtttaatgctacccagatgtgccaaatatcat

SEQ ID NO: 509739 - DNA, 655 bp, Homo sapiens
ctgcaccatttcatctctaggtaaatgactgtggaaccaacacttggatgtaattaccaaacaatttccatgctaaaccactcactgtctttactttttctaaaacattggacttacctgtagctgcagggatccatatatgagacattctactttgtgttatatcttaacgtgaatttctcttcctgttgtggagtcttggattgtatagctatggtcatttaaaaaaatcaatccatcaatgcataagaatgctgacttttttttaaccaaaattgtttttatacattctcattttcagacaacaaagttgtagcacatataggttctttaacttgcccaacactacacagtcctctgtggcaggaccacaatcacaacttaggcatcatactccacagtgtatccttctactcaccytgccattggtgtcagtcagggtgaataagttatgctgcagtaacaattaggctcaaaatctcagtggattaaagcaaaaagtctttcttgctcatattatatgtgaattttagggcacgcaggggcctgctccacagttgcctcacccaaggcctctactatctttaactaaatgagaaagggatgtgggaaattgaacactggtttaatgctacccagatgtgccaaatatcat

SEQ ID NO: 509740 - DNA, 655 bp, Homo sapiens
ctgcaccatttcatctctaggtaaatgactgtggaaccaacacttggatgtaattaccaaacaatttccatgctaaaccactcactgtctttactttttctaaaacattggacttacctgtagctgcagggatccatatatgagacattctactttgtgttatatcttaacgtgaatttctcttcctgttgtggagtcttggattgtatagctatggtcatttaaaaaaatcaatccatcaatgcataagaatgctgacttttttttaaccaaaattgtttttatacattctcattttcagacaacaaagttgtagcacatataggttctttaacttgcccaacactacacagtcctctgtggcaggaccacaatcacaacttaggcatcatactccacagtgtatccttctactcaccctgccattggtgtcartcagggtgaataagttatgctgcagtaacaattaggctcaaaatctcagtggattaaagcaaaaagtctttcttgctcatattatatgtgaattttagggcacgcaggggcctgctccacagttgcctcacccaaggcctctactatctttaactaaatgagaaagggatgtgggaaattgaacactggtttaatgctacccagatgtgccaaatatcat

SEQ ID NO: 509741 - DNA, 275 bp, Homo sapiens
acaggcgcccgccagctaattttttgtgtttttttagtagagacagggtttcactgtgttaggcaggatggtctcaatctcctgacctcgtgatctgcccaccttggcctcccaaagtgctgggattacaggcgtgagccaccacgcctggccttccttccccaaattttaccttatagtgctgtctgcagtgcatgaatatcactttttcrgttttgctttattttaccaaaaatattttaatcatattttttaaaatataaaagttcactctg

SEQ ID NO: 509742 - DNA, 558 bp, Homo sapiens
cttttataagatggttacactacttctgaggctgtatacttttatatgacaggagcttagattagtagtaaatataaattgcaacctctaggggaggacactggatgaggagcctcagttttttgctgtctgtggccagaggctgcatgcagttatttcccatgttggcttctctcccatggcagaatgtgtcatcaaagccaccatgacagagagcttgcagcaagacaggtatcataatcttaggtaacatgattacccaagtgacatcctatcaggttgtagtcttctgatatatcaaagcaagtttcagtttctccccaaagtcacaaggaaaggattagatattctaattaagctstgaggatcattgtgcaccatctgagagttcacctgccaacgtcaggtcttgcttaatctgggacaggttctcagtcctcactttgtgagaaaacaggtcacatagtttgtaaaatgtatcaaaatccagatttctctgaatgtttctcataattttactgagcaatatagagagagacatgtaattatctatttgtg

SEQ ID NO: 509743 - DNA, 531 bp, Homo sapiens
aagcctggtttaatgccttcatttgtaactcttttcacttcttcaagctgtcaatccccctccttccccaccacaagttatataaactgataccattacctgatacaagtacaattgaagttatattgttttcttaacataaacactgaaagaatccacgtatttgtttcatwtgaggctaagacccctctgaggagtgggagagaaaggctctcacaggcaagcttcttggcagtgttgcacatgatcttatgcatctgcctcttccacaacctggtctctgaggatccttccatccaacagtggcttaaccactcactcctttggctccctctattctgaggcagcctctaccatagaatccctaatagtttcgtctgtatctctacctcttcctgcagattggcagctccctaaatgcagggttctattttgttttttccatttgctactgtatctccaatttgtagcctaattctgggtgcacagtagatgctcaataagtatttgttaactgaataaaagagcatc

SEQ ID NO: 509744 - DNA, 612 bp, Homo sapiens
tgagctataaaaatgggagcttggttttggcaaattgtgaagcaggtaaagattgcctgcaatattccctcccttttcctctccctacacacctccacttctcccctctaccaaaagcctattcttcacatggctatctgggtctctgtgcgctcaagtcacaatggaaactaaagttccattgctraagtactggctgatgcttgagagatgtgtggagggtgcctgtggcttaggtctatgcagagatgcctgtggcgcccttacatagataaataggaggggaaatagctttggcccagttagggtggggttggatgtaggtggagtttcttgctgggaatagggaaggaggacttagaaactcaaatgctaaaattttagacctatgcaagctagtaaaagagctgtctttgaaccctttaaagcacaagatgtagagtattgcctgaaagcacagaatagattactacaactaggaggaaagaatcacttggttgggacaatcaatggccctggtacccagccccagggcactacatttaattttcagaattaaaccaaacattttcagagattcagaatcaccttgatatttttcatgtctagttt

SEQ ID NO: 509745 - DNA, 612 bp, Homo sapiens
tgagctataaaaatgggagcttggttttggcaaattgtgaagcaggtaaagattgcctgcaatattccctcccttttcctctccctacacacctccacttctcccctctaccaaaagcctattcttcacatggctatctgggtctctgtgcgctcaagtcacaatggaaactaaagttccattgctgaagtactggctgatgcttgagagatgtgtggagggtrcctgtggcttaggtctatgcagagatgcctgtggcgcccttacatagataaataggaggggaaatagctttggcccagttagggtggggttggatgtaggtggagtttcttgctgggaatagggaaggaggacttagaaactcaaatgctaaaattttagacctatgcaagctagtaaaagagctgtctttgaaccctttaaagcacaagatgtagagtattgcctgaaagcacagaatagattactacaactaggaggaaagaatcacttggttgggacaatcaatggccctggtacccagccccagggcactacatttaattttcagaattaaaccaaacattttcagagattcagaatcaccttgatatttttcatgtctagttt

SEQ ID NO: 509746 - DNA, 519 bp, Homo sapiens
cccttttcctctccctacacacctccacttctcccctctaccaaaagcctattcttcacatggctatctgggtctctgtgcgctcaagtcacaatggaaactaaagttccattgctgaagtactggctgatgcttgagagatgtgtggagggtgcctgtggcttaggtctatgcagagatgcctgtggsgcccttacatagataaataggaggggaaatagctttggcccagttagggtggggttggatgtaggtggagtttcttgctgggaatagggaaggaggacttagaaactcaaatgctaaaattttagacctatgcaagctagtaaaagagctgtctttgaaccctttaaagcacaagatgtagagtattgcctgaaagcacagaatagattactacaactaggaggaaagaatcacttggttgggacaatcaatggccctggtacccagccccagggcactacatttaattttcagaattaaaccaaacattttcagagattcagaatcacc

SEQ ID NO: 509747 - DNA, 519 bp, Homo sapiens
cccttttcctctccctacacacctccacttctcccctctaccaaaagcctattcttcacatggctatctgggtctctgtgcgctcaagtcacaatggaaactaaagttccattgctgaagtactggctgatgcttgagagatgtgtggagggtgcctgtggcttaggtctatgcagagatgcctgtggcscccttacatagataaataggaggggaaatagctttggcccagttagggtggggttggatgtaggtggagtttcttgctgggaatagggaaggaggacttagaaactcaaatgctaaaattttagacctatgcaagctagtaaaagagctgtctttgaaccctttaaagcacaagatgtagagtattgcctgaaagcacagaatagattactacaactaggaggaaagaatcacttggttgggacaatcaatggccctggtacccagccccagggcactacatttaattttcagaattaaaccaaacattttcagagattcagaatcacc

SEQ ID NO: 509748 - DNA, 586 bp, Homo sapiens
ctgacccatgaggaaagaagtcatttgatcttcttctcaagtggcttgtgtttcctggaggctgcrggagccacaggagtttacacttttgctaggactcatcatctgacatagttcaatagtagctctaagaccttcctttgtttctggatgttaataacccaaatcagtagagaaaagagatgttggctacaatgttaccttttcttatgcatttgtttacccaaataatgtagaacatcactttataaggaagagttttttattttttacaatatcctgttacactggaaatcactgcagttttctccatctttgtatcaccagctccaacacactgagtacatgataagtgctccataaatgtcagtgaccaccatcttattactggacataaaggaaaaatgagtgcaatttaaatgtttgttgtaaaatgtagtttgcattcctaaaaaaaaacaataaacaaaaaactttcttttaaagtggggaagtcaaccttccacttaaaaccaaacccaacaaaagttcaaacaagtttttaaaactgtatgcagttgcaacattcctcaaacgtactgagtgg

SEQ ID NO: 509749 - DNA, 588 bp, Homo sapiens
gattaactcagcaactcaatcacattgtcaaagacccacgttctccccatgtttatactctttcatctgaatttctagagactgaaaaaagacagtgtaacagttagggttctctgagaaacagaactagaaggacataygtatcattccaagtaattggcttaggtgatttggggagctggcaagtccaaaatccagtgtgagttggcaggctggaaactctcaggcaggagctgatgctgcagtcttgaggcaaagtttctcattcctcatggaggcttcatttttgctcttaaagccattcaaactgattggatgaagcccacccagattatgaaagataaccctctctacttaaagtcaagtgcttgtagatggtaagcacatctataaaataccttcacagtcagacctagattagtgtttaattgaaccaccagatactatagactagccaacttgacacataaaactaaccatcgcagacagttccttccttatacgaatctttctaagagcaaagaacctttcccagaagccccccaccagacttcctctcagttttcattggccagtgctgggatttgt

SEQ ID NO: 509750 - DNA, 588 bp, Homo sapiens
gattaactcagcaactcaatcacattgtcaaagacccacgttctccccatgtttatactctttcatctgaatttctagagactgaaaaaagacagtgtaacagttagggttctctgagaaacagaactagaaggacatacgtatcattccaagtaattggcttaggtgatttggggagctggcaagtccaaaatccagtgtgagttggcaggctggaaactctcaggcaggagctgatgctgcagtcttgaggcaaagtttctcattcctcatggaggcttcatttttgctcttaaagccattcaaactgattggatgaagcccacccagattatgaaagataaccctctctacttaaagtcaagtgcttgtagatggtaagcacatctataaaataccttcacagtcagacctagattagtgtttaattgaaccaccagatactatagactagccaacttgacacataaaactaaccatcgcagacagttccttccttatacgaatctttctaagagcaaagaacytttcccagaagccccccaccagacttcctctcagttttcattggccagtgctgggatttgt

SEQ ID NO: 509751 - DNA, 659 bp, Homo sapiens
ttctcacaggaatgttaataccaagttttcctggggtgacaaacactgttgggctgggttctgaagagccaactttcttggccaagctgaataagatggggagacagaattatttaaatatattggccagaagcaaaataggaccacaaattcacaaagtaaagagagtatcagcaggaactacgtagaacacctgtgaaggtccagtctaatgaacatgaaaatggttggtgtgtgtaaatcaccctttcgttcagttgagtatatgagtaggcrtagcttaaatgattggaggaggtgtggttatctctttagttttccatattctgttacttctatctggaaataatcttcttctacatctacttgacccatgctttttattgtagctttgttttacgttttttatctcttgtaaccatttccaaatctttctggaaatttccttcaagagcactgttgttcatacccagttttacttctgctcccatcatattttattcattcctatactatagcacttactatacaatattgtagatattgattttctttcatgacttttcaagtgcattgagaatgccctaattgcaaagactatgtcttcttcatttctgcatctcaagcagtaactcaacacctggtatatcctaggaaat

SEQ ID NO: 509752 - DNA, 581 bp, Homo sapiens
attcccagttattcaaacttcatgcctcttggagctctaagatttttgtatattcctctagaaagcaatgcttcaacaaatcatgagatcatatagcacaaagaggcccttgagaaagcctttggtccagcggttgattgtgtatatttatttcttggagtcacttgtgtttatatccatatatttatgttggtgctgtcttcccattatcccagaaggtctgtaaggacttgccttgccctgttccttctttttttttttttaaactccccaaagtccaatagcatactctaaaccagtgttggactcatttctcagagcagtctgttaaaaattcctatcatgccagataactagggagaatttacaagggtagcaaaaaccctggccctctcccckctaataaatatacatccaaagtacaggtcacttcgcaagccactggatacatttttaagtgtctcaagatgttctaattttgcttccaacacgggtttcacattgctgttggtcaattcatgtggttacaaagaaggtgcattttcaaatagcaatcgttagaggcgtgggtgagaggacat

SEQ ID NO: 509753 - DNA, 512 bp, Homo sapiens
aattagctagtgcttagggcaaagttataactattaacagcagattatattttctttacccaatttttgctttgtgaaaacaagttttaagattccctttcaatcagaactctgggtatataattgtgatgtatcaataaaatataaagctttttgtttggcaagtattttttaatgctatatcttaagtcagagcaataagaaagtttatgatatttaaagtcagttttataaaatattatatataaacacataagttaaatatatataatttatactgtcaaataataaaaatcatataatcaaatacacaaaaattttatcttcctaagtagttctgtaaattatgagagatattcatatatgtaattttagatatgcttgcataaatggaaatrtgaacatatctataatttgcatagtacaaatgattgccttgagttaatagttgacaattcatcaatatatatttgagaaattagtatttgcccacataggcattaacattgcca

SEQ ID NO: 509754 - DNA, 623 bp, Homo sapiens
tccctcttaaaattaaaagtttaatttttatacatagtaraagtgcaagcaagtcattcactcattttataaatattatttttacaactaataccttgtttaaaaatatagagaagactttgacaacaactcttcgttgtccagttatctttggtattacttgagctggcatcacttgcatgttaagcatggataaaattgacgactcaaaataattgcaatagtcttccgtatgttctcctaatgagcttgcttggttttcttctaactttaatatatctccttaggaaatgctacagaacagtttgaaccaaataaaatcagaaatttcttccaaaaaggaaaataaaatatttcttggctttacatttttgataactatgcttttcattatgcagcctaggaaagcctaagaaatagccttttatttgtatactttgtaaaggaatcactgcatttatttggaattgctatctggataatattgattttgtttaatttactccttttgacacagattgctacttgtttactaaagtccctgttccttcttcacagtattagaaacatataccctacctccccagatagggattattacatttccagacacccttgcagct

SEQ ID NO: 509755 - DNA, 623 bp, Homo sapiens
tccctcttaaaattaaaagtttaatttttatacatagtagaagtgcaagcaagtcattcactcattttataaatattatttttacaactaataccttgtttaaaaatatagagaagactttgacaacaactcttmgttgtccagttatctttggtattacttgagctggcatcacttgcatgttaagcatggataaaattgacgactcaaaataattgcaatagtcttccgtatgttctcctaatgagcttgcttggttttcttctaactttaatatatctccttaggaaatgctacagaacagtttgaaccaaataaaatcagaaatttcttccaaaaaggaaaataaaatatttcttggctttacatttttgataactatgcttttcattatgcagcctaggaaagcctaagaaatagccttttatttgtatactttgtaaaggaatcactgcatttatttggaattgctatctggataatattgattttgtttaatttactccttttgacacagattgctacttgtttactaaagtccctgttccttcttcacagtattagaaacatataccctacctccccagatagggattattacatttccagacacccttgcagct

SEQ ID NO: 509756 - DNA, 395 bp, Homo sapiens
aaataaatggcagattagaattttaaaattatgtttctagctccagaactcaccatcttatccaccaaactatactaatttccctaaacttatacctactgtcccattctgggcatgatataaattactttaatattaataaaatatattagwcagtattaaattaatctatagtatgttatatattatataatatatattattatatacctcataaatctttattatgcatctatttataatatattgttaatagtaatacaatttagtaaaatattcactttaatattttttgaaataagaaaactgcaaaactagaatgttctcagaaagataattttcccttccatgtgcaagatatccaaatcagtgtgtcaaatgttctttgtgtaaat

SEQ ID NO: 509757 - DNA, 506 bp, Homo sapiens
caacgaatctcctctatacaaccatcctaatcagtaagaacgttattctcttgaatggatgggtctacaaacacagttatcagttatyctgatgataaaatcatgagctaaaaataaaattaagattgctctgggtaagaactgttggttagcatattttcaatggcaatctctttttttatatacccaatgaagctacatatagacagtatcaagtgaccatatatttaactacaactcaaggtatattttttcaatttactgaaaatggtgatatatttaggactctgaagccatcaataattccctgccactcctgagctattatggccactgcacccaagagcttaggtctgatcctccagtcttcgctcatgcatctttcccattggcagcaatgcttaacaaaattaggtggttattatactatttaagaagctttcgttggtgaaaaccatacaacgtggaattttgtagtagttcttatatcagtgggcaaaaacaac

SEQ ID NO: 509758 - DNA, 353 bp, Homo sapiens
  misc_feature (1)...(353): n = A,T,C or G
gctgattcttaacttcatttttcctctgaggggtcaggaacaaaagtaacactttctatgctttacaatctgtgaaggtgaccatgactcggtctcctgagtcaataacctctacccagtaagagatcnaggcatcagacagtactcacaaggcaggcgagaaacctagaggctctggaggacaacttagagkatacaaaaaggagtgttttggggctagtccatcatttgaagacaggagctcattgtattgaatcaggacagagtcatctgctcccacacccaatatgaagttaatactcctacctgctacttcaagagtcacctgaggctcttccatctctcgatagcta

SEQ ID NO: 509759 - DNA, 353 bp, Homo sapiens
  misc_feature (1)...(353): n = A,T,C or G
gctgattcttaacttcatttttcctctgaggggtcaggaacaaaagtaacactttctatgctttacaatctgtgaaggtgaccatgactcggtctcctgagtcaataacctctacccagtaagagatcnaggcatcagacagtactcacaaggcaggcgagaaacctagaggctctggaggacaacttagagtatacaaaaaggagtgttttggggctagtccatcatttgaagacaggagctcattgtattgaatcaggacagagtcatctgctcccacacccaatatgaagttaatacycctacctgctacttcaagagtcacctgaggctcttccatctctcgatagcta

SEQ ID NO: 509760 - DNA, 223 bp, Homo sapiens
aaataatcatttcactatacattgattgggcttccttaaccaaatctgagmaactactataataataatgctggtggtaatccatgatactctcaaatttttccctttaagaaatatataatccatgtaactctagcaaatatgttacattgcacactttcttaacaaggaatggctgttttcaggccttattaggaaaacaaagaaacaaacaatggcagtt

SEQ ID NO: 509761 - DNA, 223 bp, Homo sapiens
aaataatcatttcactatacattgattgggcttccttaaccaaatctgagaaactrctataataataatgctggtggtaatccatgatactctcaaatttttccctttaagaaatatataatccatgtaactctagcaaatatgttacattgcacactttcttaacaaggaatggctgttttcaggccttattaggaaaacaaagaaacaaacaatggcagtt

SEQ ID NO: 509762 - DNA, 223 bp, Homo sapiens
aaataatcatttcactatacattgattgggcttccttaaccaaatctgagaaactactataataataatgctggtggtaatccatgatactctcaaatttttccctttaagaaatatataatccatgtaactctagcaaatatgttacaytgcacactttcttaacaaggaatggctgttttcaggccttattaggaaaacaaagaaacaaacaatggcagtt

SEQ ID NO: 509763 - DNA, 615 bp, Homo sapiens
accaagacttaaaaccttgttctctcaacattaatgatckatttagagagcctccatttttacagaaaagatatacaaacaccaatgaaaataaatatgaaattatatgacatacaattatattgttgaaagactgaataaataaatgaactaagctgtaagaaaaaaagatgatgatattaaatgatatagaagtaaaaacctgggctggtatagcataattaatgtatcagtaaagtatgtaccttttagaagtggcaggaagacagcatagagagtgagacctgaccaaaagctttaaggaaaattctatacccttaaatgagattaaagtggactcaggaaaacatgcgccacaagaatggagggacaaatgttccagacgggccaaatctcagagcatctctaccttctccaggaggaaaggggaggcaaagcagcaggcagaagacagcacggccaggtcagcacagggcacgccaggccaagccaggtggtctccatcgtacaggtagtgatgagccactgccaggtgggctttattcattagtttgttttgtttcctttactaacgaagacacatgatcaaagttgaccttagtaagtgttgctgca

SEQ ID NO: 509764 - DNA, 552 bp, Homo sapiens
tttttacagaaaagatatacaaacaccaatgaaaataaatatgaaattatatgacatacaattatattgttgaaagactgaataaataaatgaactaagctgtaagaaaaaaagatgatgatattaaatgatatagaagtaaaaacctgggctggtatagcataattaatgtatcagtaaagtatgtaccttttagaagtggcaggaagacagcatagagagtgagacctgaccaaaagctttaaggaaaattctatacccttaaatgagattaaagtggactcaggaaaacatgcgccacaagaatggarggacaaatgttccagacgggccaaatctcagagcatctctaccttctccaggaggaaaggggaggcaaagcagcaggcagaagacagcacggccaggtcagcacagggcacgccaggccaagccaggtggtctccatcgtacaggtagtgatgagccactgccaggtgggctttattcattagtttgttttgtttcctttactaacgaagacacatgatcaaagttgaccttagtaagtgt

SEQ ID NO: 509765 - DNA, 615 bp, Homo sapiens
accaagacttaaaaccttgttctctcaacattaatgatcgatttagagagcctccatttttacagaaaagatatacaaacaccaatgaaaataaatatgaaattatatgacatacaattatattgttgaaagactgaataaataaatgaactaagctgtaagaaaaaaagatgatgatattaaatgatatagaagtaaaaacctgggctggtatagcataattaatgtatcagtaaagtatgtaccttttagaagtggcaggaagacagcatagagagtgagacctgaccaaaagctttaaggaaaattctatacccttaaatgagattaaagtggactcaggaaaacatgcgccacaagaatggagggacaaatgttccagacgggccaaatctcagagcatctctaccttctccaggaggaaaggggaggcaaagcagcaggcagaagacagcacrgccaggtcagcacagggcacgccaggccaagccaggtggtctccatcgtacaggtagtgatgagccactgccaggtgggctttattcattagtttgttttgtttcctttactaacgaagacacatgatcaaagttgaccttagtaagtgttgctgca

SEQ ID NO: 509766 - DNA, 580 bp, Homo sapiens
cattaatgatcgatttagagagcctccatttttacagaaaagatatacaaacaccaatgaaaataaatatgaaattatatgacatacaattatattgttgaaagactgaataaataaatgaactaagctgtaagaaaaaaagatgatgatattaaatgatatagaagtaaaaacctgggctggtatagcataattaatgtatcagtaaagtatgtaccttttagaagtggcaggaagacagcatagagagtgagacctgaccaaaagctttaaggaaaattctatacccttaaatgagattaaagtggactcaggaaaacatgcgccacaagaatggagggacaaatgttccagacgggccaaatctcagagcatctctaccttctccaggaggaaaggggaggcaaagcagcaggcagaagacagcacggccaggtcagcacagggcacgccaggccaagccaggtggkctccatcgtacaggtagtgatgagccactgccaggtgggctttattcattagtttgttttgtttcctttactaacgaagacacatgatcaaagttgaccttagtaagtgt

SEQ ID NO: 509767 - DNA, 260 bp, Homo sapiens
tggaaacaaagtacttagcagggcttgaaaacaccaaaactctgagaccactgaccttcaaaaacttcaacagccctgagtgaaaagtccaaacacatttatctaccattcaaagaccctttattgtctgtcctctgcgcatctcagtagtctctttttaccacactgtctatatactgcatgagycatttatatgaaactatctgacactccaaggcatcttatactatatattcaatcatgtatccctagtaattagc

SEQ ID NO: 509768 - DNA, 632 bp, Homo sapiens
gaataaaatgattagcataacacctataaaagtttttgagaaaattcaaaatttgatgataaaakttaagataatgctgcacagtcaagacatgatggaaatgtcaacagaggctgagcttctttcccattcatgaagaggacacagaaagatggtcataccgaggatgcacaacaggaaattttgatgaaaagcccttaaaaatacccattctccaagactactaatatattttgtatgggtaatgaaacctggccaacagaatcagaggtaattaatcattgtgtgtccttactgtaaatgaagaacagaatgagcaattatagcactgtgtggagtaattactaagaatattaaagaggtaagaatggcttggccttacaaaaattcagtcaacaaatctgaagaaaaatattccctcaatgcccatttacaatcatttgactaaaagcaaggagataaatacctatttattgtgatttggaagacaaggaaaagtcacaaaacaactttgatcatacagtaaataaaattttaattataatataacttcttaatgatcttttataaaggagtcatctttaatcctcaaggtatgcaaatattttaaaagatttctatgaaagtatagc

SEQ ID NO: 509769 - DNA, 614 bp, Homo sapiens
gcataacacctataaaagtttttgagaaaattcaaaatttgatgataaaagttaagataatgctgcacagtcaagacatgatggaaatgtcaacagaggctgagcttctttcccattcatgaagaggacacagaaagatggtcataccgaggatgcacaacaggaaattttgatgaaaagcccttaaaaatacccattctccaagactactaatatattttgtatgggtaatgaaacctggccaacagaatcagaggtaattaatcattgtgtgtccttactgtaaatgaagaacagaatgagcaatyatagcactgtgtggagtaattactaagaatattaaagaggtaagaatggcttggccttacaaaaattcagtcaacaaatctgaagaaaaatattccctcaatgcccatttacaatcatttgactaaaagcaaggagataaatacctatttattgtgatttggaagacaaggaaaagtcacaaaacaactttgatcatacagtaaataaaattttaattataatataacttcttaatgatcttttataaaggagtcatctttaatcctcaaggtatgcaaatattttaaaagatttctatgaaagta

SEQ ID NO: 509770 - DNA, 524 bp, Homo sapiens
ctgtttgatttatgcattatgcagaaactaagaaaacagagttatatgtaacyttgcaatgagaagtgcacccaccaaaaaaaaaaaaaaaaaaatcccaaaacattgtttcaaaaagaagtggtatgaagcatcttagtgtttcatgaatattgaagaatagtgcaattattgaaatttggcatttaaaaaatgtttttaaattattaggaagctaccgtgacctgtttactaaatcctcaattctttctctctcagtttttcttactataaaatttacttttcaagccagagaatttttctttctgacaagacgtagatctatattgcgctgtcaagatgcagcttttgcatctctgctgccatgtggatagaataactttctttcctcaagaagtggacaagccctcatagggactgattttctgtgaagtagtgagacttaatctttgggaccttcacttacatcacttacataggacctttcaatactcagggagggcccttggcaataagttcttctg

SEQ ID NO: 509771 - DNA, 623 bp, Homo sapiens
gcaaagttggttgccactctttctcttccccggacccccagtcagtacgcagcttcttgttaaatcatttttgctctctattttttaatttactacctctatctgatcatcccactactcagcaatgatgagaaaagtcacaaaagcttcgagcccccagaacattgcaaggcattgctgcttatgagcatgacaactacctttgcagaatgtttgccccatcagaggtctgaatgagcctgagccagtgtggagaccctccttccctcaacgctgtacccatcctcattgcaatcaagccttgcttactggtggtgcttaagtttgggtactaccttttaattacattggggttaaaactctgttttttatgtaayctttttgtttggtttttctttccataattttcagtttatttaaacaaataaagcaggaaaaaattatttttgctgtgctatattttactgaaggctccgaggcaattttacttctggagtaatataattctccagtcctcttctttactgtttagcctatttcttaaattattggtagtcatacgagtatactggctaagtacatgggtactgtggtaaaattacatgagggttgaatgaactttt

SEQ ID NO: 509772 - DNA, 589 bp, Homo sapiens
actggagttacacagagccacatatgtagtatttatcttgcttttgtatttatatgaggttgacgttgtcaaagaaggcttttttctttttctctttttctctcctccatacagagtcaggatcaaaataggaatgtcttcttatagtctggttctcagagcagggtattttttcctaatttactccctgaacagattgcctttcaggagtctcccttataagtaaagttytctgctatgagctcttaccttgtgatgaaccaactttgtcatctgcccctccccccctaacctaacctctaggctaccagagacttcatttctctgttctgaagtaacggaagtgggaagataaattgaaagtcctttcagtgtaatatttacatttgaatggagctgcacaatgtagatgaagctccctagactatccatgaactgcttttgggcttcaattctctatgattgtatgctcatctctttaatgggatttattgcttttcacatttttcaggcattgttttcaaaggatgactattagtaatttttgttatgtttaattataactttttctagcttaatcttaaagcca

SEQ ID NO: 509773 - DNA, 563 bp, Homo sapiens
caaagaaggcttttttctttttctctttttctctcctccatacagagtcaggatcaaaataggaatgtcttcttatagtctggttctcagagcagggtattttttcctaatttactccctgaacagattgcctttcaggagtctcccttataagtaaagttctctgctatgagctcttaccttgtgatgaaccaactttgtcatctgcccytccccccctaacctaacctctaggctaccagagacttcatttctctgttctgaagtaacggaagtgggaagataaattgaaagtcctttcagtgtaatatttacatttgaatggagctgcacaatgtagatgaagctccctagactatccatgaactgcttttgggcttcaattctctatgattgtatgctcatctctttaatgggatttattgcttttcacatttttcaggcattgttttcaaaggatgactattagtaatttttgttatgtttaattataactttttctagcttaatcttaaagccatacagaatggtgtcagctccatgaaatgccatctggagatgac

SEQ ID NO: 509774 - DNA, 563 bp, Homo sapiens
caaagaaggcttttttctttttctctttttctctcctccatacagagtcaggatcaaaataggaatgtcttcttatagtctggttctcagagcagggtattttttcctaatttactccctgaacagattgcctttcaggagtctcccttataagtaaagttctctgctatgagctcttaccttgtgatgaaccaactttgtcatctgcccctccccccctaacctaacctctaggctaccagagacttcatttctctgttctgaagtaacggaagtgggaagataaattgaaagtcctttcagtgtaatatttacatttgaatggagctgcacaatgtagatgaagctccctagactatccatgaactgcttttgggcttcaattctctatgattgtatgctcatctctttaatgrgatttattgcttttcacatttttcaggcattgttttcaaaggatgactattagtaatttttgttatgtttaattataactttttctagcttaatcttaaagccatacagaatggtgtcagctccatgaaatgccatctggagatgac

SEQ ID NO: 509775 - DNA, 490 bp, Homo sapiens
tttttctctactcatcttgtcaggtatgacacaaagctctcatcctgaagggttttctccctttcccttgctcctacttctacattagatgtgtttcttattaagctgcattctcttccaagatattgttggaattcattttacttccattttttcatctcttctgtcagtcaagaggaaaacagataaaaaggctgctcttagaacaaattcaaaatctcacagttttgaactcacttactgttcatctcctcctgaggattttctacttgatggacagtaatcatagtctaggacccaataacagaaccgactgaaatttttaccaaacctttctctaattttactattctaactgtctaacatataatttttctggacacaagcttttaacctattttatacccttcacaacatagttttattttttaaatattgtttcatattaataaaaygaaaattagtgagcctgtaaattttgaattatttc

SEQ ID NO: 509776 - DNA, 631 bp, Homo sapiens
agtgattaattaataaaatcaggaaataggccaagctaaattatatttcactgtaatattcattgccctgaaagaacaattttttttttttttttttttttttttttgtacacaagtctcgctctgtcaccaggctagagtgcagtggcgtgatctcggctcattgcaacttccgacttccgagttcaagctattctcctgcctcagccccccgagtagctgggattacaggcatgtgccaccatgtccagctaatttttgtatttttagtagagacagggtttcaccatgttggccaggatggtcttgatcccctgaccttgtaatccgcccaccttggtctcccaaagtkctgggattacaggcgtgatccactgcgcccggccaagacacaagctactaagggagagagaaaggtaaatgagggagcagagcatttaggactttacatctgaagtacctatagattccaggagcatatccatataatatagagtgtccaaacgtcccggatctccaaggggttttgtgggtcaagtagggccatcaaggagtagctgatacactctattttcacataccagtttttcagagttgaccgtcactattttatattcaaggacaaagactt

SEQ ID NO: 509777 - DNA, 570 bp, Homo sapiens
catactgttctccaatgaattcatttttcaggaattataattttctgataattcagtgatccaggacctcatctcaagcaagagcggcccctgaaaagccatttgctgttcataaatatcacatgtcaaygcctatgcaactttaataaaagagctatggatcaaagcctttgctatgtgattattaacctttattaattacacaggattacatttggctatctagtgtttccaacttataagacagtaaaaactagcaaattagaaaatgtgtacagaggaagatacaggaagcacatagataaaaaacaataagaaatcacagaggacagtatgacagtagagatgagagagaaaactaaatcaaaagaaccaacaaaagatataacatcctagagcaatttagagaagaagacaatcagcttaaaattcgaatggccactgaggaagtctgcattacatcacaggacaatgcacaattttgatgatgaaggatcctaattatgcccaagagaattaaatataatttttagcattttcatcaattaggcctgagaagacacaatgcac

SEQ ID NO: 509778 - DNA, 570 bp, Homo sapiens
catactgttctccaatgaattcatttttcaggaattataattttctgataattcagtgatccaggacctcatctcaagcaagagcggcccctgaaaagccatttgctgttcataaatatcacatgtcaacgcctatgcaactttaataaaagagctatggatcaaagcctttgctatgtgattattaacctttattaattacacaggattacatttggctatctagtgtttccaacttataagacagtaaaaactagcaaattagaaaatgtgtacagaggaagatacaggaagcacatagataaaaaacaataagaaatcacagaggacagtatgacagtagagatgagagagaaaactaaatcaaargaaccaacaaaagatataacatcctagagcaatttagagaagaagacaatcagcttaaaattcgaatggccactgaggaagtctgcattacatcacaggacaatgcacaattttgatgatgaaggatcctaattatgcccaagagaattaaatataatttttagcattttcatcaattaggcctgagaagacacaatgcac

SEQ ID NO: 509779 - DNA, 557 bp, Homo sapiens
cattttcagtgacccaaatatacagcttgttccctctgtggcacctaagaaagtagaatcctggatataagtagaaattgtctcagcagatatcaacagtaacaataataactactaacttttactgagtacttacactgtgccaggcattgtrcaattgcttttatgtattaattcaggtacttcttacacaacccatgaatatcacaaaatctttttgtagacaaggacactgaagcttagaaagtttctatatgtcttgtcaaaatccacaaaactagaaagtggaagatcagaattcaaacacagatttctgattccgaaccccaatatagactcattttaaatgtgatgagaataatggagttcaggaagtaagcatctggcctgaatgaaagctccatgaaagaagagatctttgttatgatgaagccattgagacatagagaagtgcctttcacgtagctggcaatcaaaagaatattaattgaataaatctaaaatttgccattttgcagaattcaatataactggaagggaaggatggagaatgggta

SEQ ID NO: 509780 - DNA, 557 bp, Homo sapiens
cattttcagtgacccaaatatacagcttgttccctctgtggcacctaagaaagtagaatcctggatataagtagaaattgtctcagcagatatcaacagtaacaataataactactaacttttactgagtacttacactgtgccaggcattgtacaattgcttttatgtattaattcaggtacttcttacacaacccatgaatatcacaaaatctttttgtagacaaggacactgaagcttagaaagtttctatatgtcttgtcaaaatccacaaaactagaaagtggaagatcagaattcaaacacagatttctgattccgaaccccaatatagactcattttaaatgtgatgagaataatggagttcaggaagtaagcatctggcctgaatgaaagctccatgaaagaagagatctttgttatgatgaagccattgagacatagagaagtgcctttcacgtagctggcaatcaaaagaatattaattgaataaatctaaaatttgccattttgcagaattcartataactggaagggaaggatggagaatgggta

SEQ ID NO: 509781 - DNA, 650 bp, Homo sapiens
cccagccaaacttcaacaagttattatggcagttaaataagatatcatatgtaagaacatttagcatagcctatgctatgtaataggcatttattactttgtgggcatttttccatcttggacagaatttctgtttgtttcctttttatgttgtattttatgcctgtaaagtacaaagtggcatattggacctatggagagttcaatgaattttgcttgtttgtttgttgttactagttaaattgacagtggcttttagatgcttaggagactcaatactcttgtcttccttatgaatataagacgatctttatattagcaatctttttctttgctttgagttttacatcaaaggtgatgtaaactcaatgacatagatttacctttataattcctttaattgaaaacactttacaaacatgttgcttaatttaatatatttctgccatctagaatatgataggtttcaatctcgatcaatackttccatattatatacatgtttatacatgatatacatataaattcatataacttttccttcaccagcattttaaagaatgtgtaagtgtgtactagacaagattcctttacattagctctgcttttaaattgtgaacacatttcattagtaactcgtatattttttt

SEQ ID NO: 509782 - DNA, 598 bp, Homo sapiens
gcaataacattcaccaacaaatgcttgctggtggattcaatgtgtygatgggtttgaagactgtgacaaggctacgggaggactctatagtacaaccaaagctatatttggataaagccaactgcaaactaatgaaacacccagggtatccctgctagagttccagatggtcatggtgacgtggaatagttacgaccatttcatgaaagatgaggtttaaaagggctacaagcactaaagcaagttttttgtttgtttgtttttgtttttttgccatatatgattcaagagaccaaatttaacactttctccagatggtgctggaaccaattcaaatcaggttaaggacaaaaggcttttcctcaaaaagttattgtgaagtattttgtaagtcttttaacttgatacaactgcaaccccattggaactgaactgaaaatattcaaggtaaaggttgtttttatttcttgagccttttgatgcttcatcctccactagaatgtcatctgagtgcctttatttaataaaacacccaaatcattaagcctagagcagtcccacagccccaggatgcctcattctcagataacaaaagcag

SEQ ID NO: 509783 - DNA, 507 bp, Homo sapiens
aacgtagatctacagaaattacatgaaatatgccacaaagagctagaaatttaatgataaaagacattaagagatttggaagatatagtaagttccaatatgcttctaatcacagttttaataagcaatactcatgagaaagtgagagagaaattatgcaaataaaaattgctgaaatttttctataactggtaaaaagcatgaatgtttggattcagaagttcctcagttcctaagcagaataaataaatccaagaaatgctggtgaatcaggtagttgcaaagcatagacaataatattaataaaaattttcaatattttatgtttaaatttttatgtaccattttcagggratttttttctctatgcattaacctactgaacacctctatgagaacatttattgccacttaaaacatttaagaatttattttaaaatgctcagaaatgtgatatagcaaaaataacaataaagccatattcaggaaactttgggtttgaaagct

SEQ ID NO: 509784 - DNA, 557 bp, Homo sapiens
ctgtcttccaatctacattctatgagtatcctaaaaccccaaacgatgagaccatactgtcataaattctagatatattcaacttagatttttttttttttttttgagacaggatctcactcatttcacccaatgtcaaggtcatggcttactgcagcctcgacttccagagctcaggtgatcttcccactgcagccacccaagtagttaggactacaggtgtgtgccaccgtgccaggctaatgttttatattttttgtagagatggggttttgycaggttacccagactggtgttgaactcctggtctaaagctatcctcctcacttggcctcccaaaatgctgggattacaggcatgactcatcatggccagcctcaatttagatcctatccaactcccttttattgtatgtgggaactaaggtcctaagattgataagaaattgatgaatatctgaaagtaatttcctggcagagctcaacttgagtgcaggtcattagatacccaggtaagtggtctctctactgatttccttggacacaagatgacatttc

SEQ ID NO: 509785 - DNA, 615 bp, Homo sapiens
  misc_feature (1)...(615): n = A,T,C or G
atacaataatgctaaaagtacacagcagaaaagtcactgcatcttctgactcttttaggtgaagttattgtcccttgcagtgaggctctgcactttctccatagaactgacagaattcacagcaaggaccatcagcaaaccctgttagggtcagatgcttactgatatctctcaagagtagagggagagggcccccaggaatgctttcgtggcacccccccaataccttctgaaagaccatccaggctttcctctgagcagatgtaactaatcagatccacagatgccaatgcttcaattacttggaaatcatagtattaaatcagtctcgtgaaggactgaatamttggatttcttttccaaggtacgaataatttaaatttgctcagaaagattctaagggattagtgcaaagaggtgaataatagcccaaagactcctttaaaaagaaataacccctggaacattttaaattgcagtaaaaattctgtaagagatagttctttgagaaagaagaatctgaagaataagattcagtcaatgagttttcaccagagtggtatttgtgtntcaatcactgttattaaaatttgctctattctnnnnnnnnnnnnn

SEQ ID NO: 509786 - DNA, 509 bp, Homo sapiens
  misc_feature (1)...(509): n = A,T,C or G
aaatggttattcttagtacagtgtctgctccactttgttttttctgacattcaccttctctaccatcaaacattsagatattctttctgcctcttcaattcctatacaattgcagtcaactccttacatctccctgccttcagtttctcccaccaagcctaacacaccagtagccaaaactntcttttttttttttttttttgagacggagtctcactctgtcatccaggctggagtacagtggagcgatctcaggttactgcaacatctgcctcccgtgttcaagaaattctcctgcctcaggctcccgagtagctgggattacaggtgtacaccgccacacccggctactttttgtatttttagtagagacagggttttgccatgttggccaggctggtctcgaactcctgacctcaagtgatctgtcagatttggcctcccaaagtgttgggattacaggcatgagcaccgtgcctggcccaaagctttcttcttcatacacatta

SEQ ID NO: 509787 - DNA, 381 bp, Homo sapiens
aaagctctccctttcccacttccgcagtttgggcactcacagtatttgtggtgtcttccgggtcctgcagaaacagtctgcttccttagagggtctgtaggtcctcttaggattcctgatttattcctgtaatcgttctggagctaaaatacactatgcgaacccccgcacactgctctgtctgtcagagtcagagcttcaatctagttctgcatgccgtccgccatgatgracccaaagtgaatggcacatatatttgaaaaaaaaaacacaatgatttctcttcactcatgacatgattatctattataaactttcagtgtttttttttttctaaaaaatgtcctaaaactaataagagaataataagatcacaagtta

SEQ ID NO: 509788 - DNA, 609 bp, Homo sapiens
gtatgttctactgtcttactggacttcacttataaaacataagttcagaataaaattatttagaatttcaagatgatgacagtacactgctaaatcaatataggaaccttctgagcaaggaaacttgtgcaactgcatrggtcacagtcctatgaacttgtcctgcctgcatcatatcatcagtgcaagtctctattggtgtgcatagatctataaatagtcctatctataaatacaactattaggatatacatatatagatctataaatagtcctatttatagatatttctatctacctatctataaataagactatttatagatctatatatagtatatatgactatttatagatctatatatagatctataattaagactatttatagatctatatcaacctatatctggcacatatcgatgtgccagaggaacttcattcacatgactcaagtcttctcacctttactaaattgattttttctccagtatttgataacttaatgaagaacaccatcctcacttcaagtattgacttagaaatctgcagctagtcagccgggtgcggtggctcacgcctgtaatcccagcaccttgggaggccgag

SEQ ID NO: 509789 - DNA, 609 bp, Homo sapiens
gtatgttctactgtcttactggacttcacttataaaacataagttcagaataaaattatttagaatttcaagatgatgacagtacactgctaaatcaatataggaaccttctgagcaaggaaacttgtgcaactgcataggtcacagtcctatgaacttgtcctgcctgcatcatatcatcagtgcaagtctctattggtgtgcatagatctataaatagtcctatctataaatacaactattaggatatacatatatagatctataaatagtcctatttatagatatttctatctacctatctataaataagactatttatagatctatatatagtatatatgactatttatagatctatatatagatctataattaagactatttatagatctatatcaacctatatctggcacatatcgatgtgccagaggracttcattcacatgactcaagtcttctcacctttactaaattgattttttctccagtatttgataacttaatgaagaacaccatcctcacttcaagtattgacttagaaatctgcagctagtcagccgggtgcggtggctcacgcctgtaatcccagcaccttgggaggccgag

SEQ ID NO: 509790 - DNA, 482 bp, Homo sapiens
gaagaagaggtttaatgcaggttgggtgagtggaggatatatagagcattgaaaattgatagcattattgatatagtcatcaatgacagatgcttggaaaagctttgggtagggcatgatacagtttaaaaaaaataatgtgaaccatggtaaatttagtctttgggaaattcattaaatggacctaataagattcacctggttcytggaacgatggcccaacaatgagaaggcaatctctgatcatttaccttagtgactctcaatcctggcaatgcagtaggaaaacctggggagctttcaaaaacagaaatgcctgggtccccttccacatgaactgaatgaatagctttagggaaggtttcagggcttccacgttttaaaggcttttccacgttttaaaccttagagaaggtttcagggcttccacgttttaaacattaaagtttaatgtgcagcctgtttgagaaccattgctttat

SEQ ID NO: 509791 - DNA, 616 bp, Homo sapiens
tggaaattatgtaaaaaaaaatgctttcatagtaaattgtggtggtccatggtaaaaccaaattgccttcagtgggatgaaattttggttgatttagcccatactataaacattttgrttttcaagtataattaaagaaagtgaactggttttctcaaaagtcatttcaatacttttttactggaatatagaaactggagatgcacaatttactattctcagtccctgggtagctacagttacagattagttttggaaaatcaaatacactcatataatactttggtttatacttgagtaatgagaggagaaggaatatttttgggacatgtaaatttttggcaaagatcatgatgttgacccccttcgggctctgaaccactgtggtattccaaaaagtcatttttggaagcctagccaagacagtttttcttcagcattcctagcaattctacaaactgtgtttattctcattactaaactttttcacttttccaagagcggaatctcttgttcgcaattccctacatccaagaatatatcaaaatccagggatatataaagatactgatatttagaaaatctataaattaacgagaacactaaatacagtaag

SEQ ID NO: 509792 - DNA, 616 bp, Homo sapiens
tggaaattatgtaaaaaaaaatgctttcatagtaaattgtggtggtccatggtaaaaccaaattgccttcagtgggatgaaattttggttgatttagcccatactataaacattttgattttcaagtataattaaagaaagtgaactggttttctcaaaagtcatttcaatacttttttactggaatatagaaactggagatgcacaatttactattctcagtccctgggtagctacagttacagattagttttggaaaatcaaatacactcatataatactttggtttatacttgagtaatgagaggagaaggaatatttttgggacatgtaaatttttggcaaagatcatgatgttgacccccttcgggctctgaaccactgtggtattccaaaaagtcatttttggaarcctagccaagacagtttttcttcagcattcctagcaattctacaaactgtgtttattctcattactaaactttttcacttttccaagagcggaatctcttgttcgcaattccctacatccaagaatatatcaaaatccagggatatataaagatactgatatttagaaaatctataaattaacgagaacactaaatacagtaag

SEQ ID NO: 509793 - DNA, 683 bp, Homo sapiens
gctgcgtgctgaagttaaacacaaatattacaagagattagtggaatacatatatttccagtaatataaaacaataaaataaatatggatattacttaaagctcctgtgtctgccaagcttatttcagtggatgctatttatgatggttgtttttataaccattactataatgctacttaattataatggttattatgtaaattttatgtaaatcagagtgattactatggaaattgaaggtaaattttatgtgtattctattaacaatgctttgaatgaggatgtaggttagtcatgagagaattatttgagattagctttaaagaatgaaaaaggagagtttctagtgaagtctccaaaawtgtgtatgtacccagatagtaataaatataaagacttaggtcattatatttcattttttgattaaaaaatgggctgagtatattgttatacttcctgtgactggatgttaacttataagtctagaaattttgaattcaggaaatggaaattttactgtcttatttttatgggattgtaatttcctattattcatgaaaatgccatgaattgattttgagtgtgaatttaaaaatacatacaaatgcctatgtatgcatatattcattttagtatataaataattgataaatggtatattatacatgtattatgctatata

SEQ ID NO: 509794 - DNA, 583 bp, Homo sapiens
ccccacccccagccctgccccatccattccattactattgagttacagtggcacgtggaacagagaaatgaggagctggaatgtgaacagccacagggcttagggaggagagaggacttttcacagacagctttttttttctttttttttaatgagatggagtctcactgtgtcgcccaggctggagtacagtggcgtgasgtggctcactgcaacctctgcctcctggtttcaaatgattctcctgcctcaggctcccaagtagctgggattacaggtactcaccaccatgcccagctaattttttgtatttttagtcgacacggggtttcaccatgttggccaggctggtctcaactcctggcctcaagtgatccacccgcctgggcctcccaaagtgttgggattacaggcgtgagccactgcgcccagccttcagagacagtttcctaacctgaatctttttcatagggcttgaaggctcttatgccaaagaaaacaataaacaactctttaaacaaaaatccaccaacaggatttctccaccagtcaaagaaatagcagcaaagttatacaacagagc

SEQ ID NO: 509795 - DNA, 583 bp, Homo sapiens
ccccacccccagccctgccccatccattccattactattgagttacagtggcacgtggaacagagaaatgaggagctggaatgtgaacagccacagggcttagggaggagagaggacttttcacagacagctttttttttctttttttttaatgagatggagtctcactgtgtcgcccaggctggagtacagtggcgtgacstggctcactgcaacctctgcctcctggtttcaaatgattctcctgcctcaggctcccaagtagctgggattacaggtactcaccaccatgcccagctaattttttgtatttttagtcgacacggggtttcaccatgttggccaggctggtctcaactcctggcctcaagtgatccacccgcctgggcctcccaaagtgttgggattacaggcgtgagccactgcgcccagccttcagagacagtttcctaacctgaatctttttcatagggcttgaaggctcttatgccaaagaaaacaataaacaactctttaaacaaaaatccaccaacaggatttctccaccagtcaaagaaatagcagcaaagttatacaacagagc

SEQ ID NO: 509796 - DNA, 602 bp, Homo sapiens
gcaataaattgtggtttgtttattttagtttttaaccttttagactactttgtgatcggcaggagattgtgtgtgtgtgtgtgtgtgtgtgtgtgtctaggttgcagagtgaggatctggtcagtgattgacacttgttttcaaagtgttcaccatgaattttttttcttaaataccatttttctcagtgagctttgaaccatgatgtcaccaaagacaaagtgtttctcaggcttttcttagtgaaagatactttccwaaggtagtttatagcaagatttggggattaaaaaaaagagttgaatttatggcctgaagagtcattataaccttttacctatagctaacatttacatacctcaggtcaaataaatttagatgtatgcttaatgttctaaaagctctttgttccttgctcatccttggccggaccagagaagttattgataatcaggtgttgctttctttgtggtaggacatcaccatgttctcatagagtcctgttaggaagcagaggacggactgctgtgtgtcactgtggagagaaaaagaccttgtgacgtccctgtcatcacaggattctagtatcttgttatgccaga

SEQ ID NO: 509797 - DNA, 602 bp, Homo sapiens
gcaataaattgtggtttgtttattttagtttttaaccttttagactactttgtgatcggcaggagattgtgtgtgtgtgtgtgtgtgtgtgtgtgtctaggttgcagagtgaggatctggtcagtgattgacacttgttttcaaagtgttcaccatgaattttttttcttaaataccatttttctcagtgagctttgaaccatgatgtcaccaaagacaaagtgtttctcaggcttttcttagtgaaagatactttcctaaggtagtttatagcaagatttggggattaaaaaaaagagttgaatttatggcctgaagagtcattataaccttttacctatagctaacatttacatacctcaggtcaaataaatttagatgtrtgcttaatgttctaaaagctctttgttccttgctcatccttggccggaccagagaagttattgataatcaggtgttgctttctttgtggtaggacatcaccatgttctcatagagtcctgttaggaagcagaggacggactgctgtgtgtcactgtggagagaaaaagaccttgtgacgtccctgtcatcacaggattctagtatcttgttatgccaga

SEQ ID NO: 509798 - DNA, 509 bp, Homo sapiens
ttaggcagtgctcagagtcgagctggcctggggcgtggccccacaggcttgtgatcagtgggctccggttctcacttcttgtctttgagttctcaggcttctcccctctcctgttgtaagagttgagctagcagggkccgcctctacccttggctgctgcttccaaaccatgtgggtttcctatgtcatgaaagcttttcttcatcacgtgctaatgacttcctgttccacaggcgtaacactttctaatgtttcattcatctatctgagtttttcctgctttaagtgcctcttctatgtctgtgcaacattcattaatttctcagtatttcccccttgcagattattccttctttgtctgcatcatagacacacgcctctctttatagcactttctatatcccacatgctgccacttatctaacacattgggagagaaaggtgcagacaaggtgtgcaggaggtggatgtgatgttgtggttggttggttgacattttctagatgatg

SEQ ID NO: 509799 - DNA, 492 bp, Homo sapiens
aagtgatcttacaaccatttttatggattcaaagacagaggcctggagacattatgcactttgtcaatgtttggamagttttatgcagtagtgtgaggattttaaaccaagtgtctgagacaccaaagccatgttttcttccagtacattttatgatctccaaaaattataagaggcaatgatagatagttccagaggccgcattcattgtgggcatcagtgatgttttttgagttcactgatcatgtggtttcagtgtgaagggggcatatcaattacatataagtgtggtttgcacaagggtcaaggttattaatagcctcatcaataaagtgaatgaatttaattttacttaatccaatatgactcaattcagttcaagctaaaattactttttgagcaccaattacatagtcaatcgtctgctgggtccctgtgctgaggacagaaaaaagtaaaggcctgaattttgcccttcagaatctcatagtc

SEQ ID NO: 509800 - DNA, 324 bp, Homo sapiens
agtccgacttcaacgtgttagcctcaggctcayggatagaagctcctccaattaaccctggctgcagccaagcagcattctgtggctttaaccaagatcctcatgttcttcagaaaagaaagagaattctgaaaatcgtatttgaattgtattcattattgatctcttttcaaactaatatgcaatatgtatatttacattatgatatcataaatatggacatgttagagaacatcaatgatttcaattatgggaatgattttatcaattgatttatataatcaattgatatcattaatataccaattgattgatgcagaataa

SEQ ID NO: 509801 - DNA, 324 bp, Homo sapiens
agtccgacttcaacgtgttagcctcaggctcacggatagaagctcctccaattaaccctggctgcagccaagcagcattctgtggctttaaccaagatcctcatgttcttcagaaaagaaagagaattctgaaaatygtatttgaattgtattcattattgatctcttttcaaactaatatgcaatatgtatatttacattatgatatcataaatatggacatgttagagaacatcaatgatttcaattatgggaatgattttatcaattgatttatataatcaattgatatcattaatataccaattgattgatgcagaataa

SEQ ID NO: 509802 - DNA, 583 bp, Homo sapiens
ctgccatgtgagatgtgcctttcaccttccaccatgattctgaggtctcccaaggcatgtggaactgtaaatccagaaaacctctttcttttgtaaattgtccagtctggggtatgtctttatcagcagtgtgaaaatggactaatacagtagtaaattttattttctaatattgaatcatcactttatctggaataaaggtaagttggtcatgatgaactcggtcttctatgtaggtttggttttctagtattgtgtttagaactgttatattctacattttatacaaytattgataataatacagtgttaaagacggccttaaggaataagttgaatattattacttatatttgcatgatgtagactagaaatatgtttcccttcagacaaggaaacaaaaaagtgatttaatacaaggttctgaaaagtgttacctcaaattgagtaaggcaataagtgggcacagagaagtatcatgtagagctgaaattcttatgttgggttgcacggcttctttatgctgttaataaacaagcagatgaaaattacgtgacaaattttaatttcaacctatttaaaa

SEQ ID NO: 509803 - DNA, 510 bp, Homo sapiens
aaaagttgttttgttttgtttaccccatcactttccaaaaagtttatgacaaattttcatattttccagaagtatagtttcattgaattcgctttagggaagtttaggctagacagcatgatttttactatgcatatgttagacttaaaagtaatagagtatcattaccccagctatgttagaaatataagccacatagagaataaaatgaggttgattctagaaaaagaacatatttattttgggatttagaaaacagacttataatcaaataacaaaaatatcatgggctcatgaccctgcatgtatttttacaagatatatcacctctcacagaataggactatgtaggaaagcatcattatgatttagtgaaaatccagaatttcaggccatyattaatataatgtaatgttattacttgcactttttggaatcacagtgcaaataaaagcaacattggggaaacattttttctttttacctaagctagcaatatgaaaacataat

SEQ ID NO: 509804 - DNA, 666 bp, Homo sapiens
gcttcggcctcccaaagtgctgggatttacaggcatgagccaccgtgcctagcctagctaggcttcttgaagtcttccttgcacaaatatagcttaggagtcgatcagggatgtggacagagatttttwataaaatattgggctccaaattatggctctctctttatataggttttttgttgttgttttgttttgcttttcaactgtggttttaccccaatgtctgtccactcatcctttaagccagtaagactgagcttactctggaaaatttttgaaaaagttaggatattcaccttcaccgttcctttattgcactgtagactgacatggagtgtctgcttacctttaagtgtttgccaatgccttctagtacttgttatttattctttgtccagaggttttggttactatctgagggaggattggctcaataggagttactcctacattttaaaaatctgggcacctttccttaaaattgataatgaagtgaatgtattgataaaatttgtaacatttaaacatcttccactaactaagcaaatatttcttggtcaggatatctcactatttaaataaccataaaatatgatttcatattgtattgtttatttaagatatctgtattaggtattatttaagatattatcgtgttttaacatg

SEQ ID NO: 509805 - DNA, 608 bp, Homo sapiens
acatcatataatctaatacatttttatatctgatttctgagcctaattcttctaactgatgtctctgcctactcctggtgattattgtacatttttgtaattttaaattttagatagctaactcatatttagcagatgttaattcccccaaattattaaaggatgtattgaggctgatttttcttgcatatagtcttgccaggcatcctaaatatctggaaacaattttatttctcaatttaatattttccaaaataaaaatgatatgcattcaaattcattttaaagaaggtatacaattttgatttttgaaagaaggctctatattttactaatatggtgtgaaggatgagattttttaaaaagctcctacttgttcccctttaacttgaaggtagatttgttttttctcccagtcttccacattttataacatctattttacttaggtatctcagtattcactctccacttcacttgccctgacagttctgttgtctgtttatggtactacaaacattataatccaaagcttgctttattcattagtttgagaaaatttttctaatgtcctcagtgctttyaaactatgctagcacctttctttc

SEQ ID NO: 509806 - DNA, 613 bp, Homo sapiens
tcttagatcttcttctatgtgttgccttcatccttttttgatggtaaggatgactgtagaatctccaagtctcatagctgcataccaatgttggggattgaccaggggaaaggtataaagagacctctggaaagtggcggctccagtgaacattcctagcctcatttctacctgagtaccagaagtcaggaagggcaagatgctctatgctcattaaggctgggtgaaaggagcatgggaaattgcacactagctcttaaagttctgcatgattgttacacacattactactacttacatactgtttgccagagaaagtcacttggtaccctacaagggagaaaggtgtaatccttaccacatgtttaggagaaaaacaccrggatatttatgaacagtcctaattatttctatagaacccaaaaggacttaataaataatatgatttttgaacttaaaaattagaaaagtgaattgaaaaattgtgtttacaactgaactgatttagtagtgagaaaaacacagtaggagaaatattttgcttcatagaattagaaacagtaaaaatatgaggcacttgaagaacagatccaagatagttatttataagtaa

SEQ ID NO: 509807 - DNA, 566 bp, Homo sapiens
cctcagatacctaaacatacatccaaaattaaatctattgtcactcttccctaaaactgtcttctaatctgttattttctgtcttatttggtggcaaaaatatatacctgtcacttgaatagaaaccagtcttctctattcctttttcttcctacactctatccacatctaaacagtggtctccaaactattgtgaacttgcaycctaatagtaaaaaatgttaatcaggcacttcaaaatgagttcatttagttattatttacatgcattatcaatcaatgtattaaatataagaaaactctatttattaagataaaagaagttctaatatttatttcctataactactatatagtcattctactccattttggagatccctgaaataattattaaatcctgctaattccacatctaaatatttgtttaattgatttccttctttcatttcctgcctttttcctttcccctgctctggttcagaaacttgttgtttcttgactgggggattcctgctccaaacgcctcacttcatggtggttcctgactttgcgtgtgtctttcc

SEQ ID NO: 509808 - DNA, 549 bp, Homo sapiens
atgggagtgtgtgagtggggacgggtcctggtgaaagctagagcctgctccaccatccccctccccaccgtaggaacctgttccaaacctgtacctttctcatcaaataaaggtgatacccagcttcttcctagattgtttgtgtgtttaaaataattccagacttagaagttgtaaactcagctgggcacagtggctcatgcctgtaatcacagcactttgggaggctgaagtcggtggatcacttgaggtcaggagtttgagaccagcctggacaacatggcgaaaccccatctctactaaaaatacaaaaattagccaagtgggatggtgcacatctgtagttccagctactcrggaggctgaggcaggagaattgcttgaacctgggagatggaggttgcaatgagcccagattgtgctactgcactccagcctgggcaaaagaacaagaccccatctctaaataaataaataaataaataaatagaagttacaaaactcatataaagagtttctgtatactcttcacccagattccccaaatgt

SEQ ID NO: 509809 - DNA, 648 bp, Homo sapiens
gcctcaacgtacctgagagggaatttgcagaagcaggtgtctttgtcagtagtatttatcgcgtgcctactgttcacaacatcccactgtgattttcaagtaagctacttattttctcaaagtttttgttttggccgggcgcggtggctcacgcctgtaatcccagcactttgggaggccgaggcgggcggatcactaggtcaggagatcgagaccatcctggctaacacggtgaaaacccgtctctactaaaaaatacgaaaaattagctgggcatggtggtgggtgtcctgtagtcccagccactcgggaggctgaggcaggagaatggcatgaacccgggaggcagagcttgcagtgagctgagatcgcgccactgcactccagcctggatgacagagcgagacttcgtctcaaaaaaaaaaatgtttttgtttcttcatcaataaaggaggtcaatagtaagcacttcccactctgtgatgactggatttgaattttctagcaccgtgcccagttcagcaagagctaaatacattgacgctaaactgatcattggtcccattttgcagatgatggcactaaggcccagagacgtcaaatgrcctgcccaaggtcacacaggacttgacccaggccctctgagtt

SEQ ID NO: 509810 - DNA, 614 bp, Homo sapiens
ctgctgaaatagttcaagaaatcgaaaatatagagaagactaggatgcgtcttgaagctagtaaactcaatgaaagtgtatgttaatgggctatttcagtatatggatagaaatgaagaaagtttaataccctacaaaaattaaagcaagccattattaaatttrttcatttactaacacatttccacttagtgtattatgatttacttgcaactcattttaggacaatatttgattgtacttagcagtcttctagcacaaaatgcaatccaaagtagagtttgttcatgagctagagttctatagaaaatgcctgtgcctgtgcatcaggcagctttgatattggtcctttctctgctggttgtgtttgataagctacctctaaggacctctaagctactgctagggacctctatgatccctttttagctctggcattctgcaactctatgattatacttatggaaatgttaagtaattataagaggataaattaagtaatttgaggatggaatattctcttgagctttggagggaatcagagacctaaaattcttcactgttgccttccactagcttgatgccccaaacttgaagacaggataccagtgaag

SEQ ID NO: 509811 - DNA, 635 bp, Homo sapiens
tctcttgtatctttattgtctatatcccgtctcccaacatgttggagtataaactccctgggagtcaggtcttggctgagaaacactgcatgaaaggcccaaaggctccatttgaacccagctgtgtggccttgggcaagtcccttcacttgtcagtttcacctgtgacaaacagggatggtcacctttctgtggtttgtagactggacaaggccaggtgatggtcagagatcaggaggacagtggcatctctctgtgtccttcaaggtcccagtgcccagcacagtggcctgaatccagcaggtgctccatgcacacctccctgtgctggctgcagggcaggatggctggacagaaatgccgctggtattggagacacaggccaggcagggtggctgaggccccaacaggacaagccatgccttgccatttccacagcagcctggtgagggtcaccagaagctagtggaggaagaagggtcctagctctctcctttggaagagtgggatcctcatggtgccagcacaccccytgtgaagatcatttgttgactgcacactgagtcttcagtagttactcagaaactcagttaaattcgatcatttgttgcctgcacactgagtctttagtagtt

SEQ ID NO: 509812 - DNA, 654 bp, Homo sapiens
tggagaaaatgatgtggcaaggtgataaaataaacaaaattgatccccgtctaaatttactttgtttcttctcctattacaataattacttttctggactaataaaatacacagaatagcctgggtgcggtggctcaygcctgtaatcccagcatcccagcatgttgggaggccgagacgggtggatcacgaggtcaagagatcgagtccatcctggccaacatggtgaaaccccatctctactaaaaatacaaaaattaactgggcatggtggcgtgcacctgtagtccccgctactcaggaggccgaggcaggagaatcacttcaacatgagaggcagaggtttcagtgagccgagatcgtgccactgaactccaacctggcaacagagtgagactctaactcaaaaataaaaaataaaataaaatatacaggatatttataacatatgttactgcactcttagaaggatagataagagatgcacagacacctcaacagctactgagacccaaatacctctaacagaatatctaaggggcccttccatgaggataccggcatcactccccaaggattcaagtagacgaagtgtcattgattgtttaacgagggccctgtgacaaaaggttttcatggttccatttgacattt

SEQ ID NO: 509813 - DNA, 654 bp, Homo sapiens
tggagaaaatgatgtggcaaggtgataaaataaacaaaattgatccccgtctaaatttactttgtttcttctcctattacaataattacttttctggactaataaaatacacagaatagcctgggtgcggtggctcacgcctgtaatcccagcatcccagcatgttgggaggccgagacgggtggatcacgaggtcaagagatcgagtccatcctggccaacatggtgaaaccccatctctactaaaaatacaaaaattaactgggcatggtggcgtgcacctgtagtccccgctactcaggaggccgaggcaggagaatcacttcaacatgagaggcagaggtttcagtgagccragatcgtgccactgaactccaacctggcaacagagtgagactctaactcaaaaataaaaaataaaataaaatatacaggatatttataacatatgttactgcactcttagaaggatagataagagatgcacagacacctcaacagctactgagacccaaatacctctaacagaatatctaaggggcccttccatgaggataccggcatcactccccaaggattcaagtagacgaagtgtcattgattgtttaacgagggccctgtgacaaaaggttttcatggttccatttgacattt

SEQ ID NO: 509814 - DNA, 654 bp, Homo sapiens
tggagaaaatgatgtggcaaggtgataaaataaacaaaattgatccccgtctaaatttactttgtttcttctcctattacaataattacttttctggactaataaaatacacagaatagcctgggtgcggtggctcacgcctgtaatcccagcatcccagcatgttgggaggccgagacgggtggatcacgaggtcaagagatcgagtccatcctggccaacatggtgaaaccccatctctactaaaaatacaaaaattaactgggcatggtggcgtgcacctgtagtccccgctactcaggaggccgaggcaggagaatcacttcaacatgagaggcagaggtttcagtgagccgagatcgtgccactgaactccaacctggcaacagagtgagactctaactcaaaaataaaaaataaaataaaatatacaggatatttataacatatgttactgcactcttagaaggatagataagagatgcacagacacctcaacagctactgagacccaaatacctctaacagaatatctaaggggcccttccatgaggataccggcatcactccccaaggattcaagtagaygaagtgtcattgattgtttaacgagggccctgtgacaaaaggttttcatggttccatttgacattt

SEQ ID NO: 509815 - DNA, 604 bp, Homo sapiens
tcattattgctaacaacacgtgcaagccrctactcagggccagaccctcaagtccacagagatgaacacgactcctgccctggggaatttgtggtttatggttcaggagttaatggattcaggtagaacagcctgaggcaggcccatccaggtaaaggcatcccccaggaggaagcctcctgattattcactcctgttggaaattgaggaagttggaagggtcctaggcagggagcggtgatgagggaaagggcccagaaggtctcagtagctggggaaagagctgcatggagagaggcatgggaggtgtggaaaggaagcccagagctgggtgccgattagggactctgaccagccagaccctccaagaccacgccccactggcctggaacctgagagactgagtgtctgctcactggctgtgtcccctgagcaggctccacagtatctctaagccccaggtcgtcaccaagtaagtgggagacatgacccagatgaggatgaatgcacacagaatgataccccacagagggtaaaggttattgtacaatcaggagcgggaggaagcggcgtctggaatgcctgaagatgtgaggcacccatg

SEQ ID NO: 509816 - DNA, 604 bp, Homo sapiens
tcattattgctaacaacacgtgcaagccgctactcagggccagaccctcaagtccacagagatgaacacgactcctgccctggggaatttgtggtttatggttcaggagttaatggattcaggtagaacagcctgaggcaggcccatccaggtaaaggcatcccccaggaggaagcctcctgattattcactcctgttggaaattgaggaagttggaagggtcctaggcagggagcggtgatgagggaaagggcccagaaggtctcagtagctggggaaagagctgcatggagagaggcatgggaggtgtggaaaggaagcccagagctgggtgccgattagggactctgaccagccagaccctccaagaccacrccccactggcctggaacctgagagactgagtgtctgctcactggctgtgtcccctgagcaggctccacagtatctctaagccccaggtcgtcaccaagtaagtgggagacatgacccagatgaggatgaatgcacacagaatgataccccacagagggtaaaggttattgtacaatcaggagcgggaggaagcggcgtctggaatgcctgaagatgtgaggcacccatg

SEQ ID NO: 509817 - DNA, 590 bp, Homo sapiens
tgaataatatttgggttgaagcagccaccactaccctgtggagacgaggtgccatgttagatccgggccaaatgaccactgccagcctccctttcagcatggctgaaatgtcccctggagactgtcacttttcttcagcatggagcagcgtccagtggtcagcaggcaggtggacaccatgcttcccacctaccaccagctctctgcatccttgacagtgacagaactgagtgtcatcccccagggagcctcaggtgagtccaggagctcaaagcagcttcttagaaagaaaggccagcacacggcctacagtcatcctttggtgacaaataaggagtgtccaatatctgcccttgaggaaccaggaagcaggctctggagcccctacaagccagggaaccaggatcactgggcatgccagggactggtggctggtggtgtccacccaggggcccccacgccctcccacccttcttctcaccgctgcctcatyctaaactcttcagcaggagcgcggtccttcactcagacaccggcagaatgttctggctgtgagagtcgcctgtgaggccagaggagtggatggagcg

SEQ ID NO: 509818 - DNA, 555 bp, Homo sapiens
agatcaaggtcctcccagaggaatggaggggaaatcgaaggcaagcagagtagctgcctccactcctgagaccccaggactctctctgcagtgtctggcctgacatcggccagagggatttgcaggagtggagctggccctacatcccaaataggctgaacaggaaccacggcccctcctcttctggaagttggaggaagagtgggaatgcagtttgtactgctctaaataagaactggttccactcccagctcaaccctcctccgctgttagactcatggtgagagggccccctctaggagtctttagtcccgggagttaaacaacattgccctacatcttctaagagcagtcccagcccaagcgctaaggatgcaccctctaaggaagagcctctcagctctgagtcatggaaagggcaatagctctgcaactgtggctgcaaatatttccttgaaggacactgaaccatgcagagacatgtgctgtgacagccaatgtatgtctttgtggcagaatgcactcrtgtcactcctgtaaacctgtgtacacatg

SEQ ID NO: 509819 - DNA, 573 bp, Homo sapiens
tgtctttgggaacctggaatcagcagaggcctgggtcacttcccccatggcttctaagcctccaaaggcccacagcatgcggttcacactctgaggtyggcaccagccctggaccaggccctggctcctcgccagcctccctcctgccattctcctgtctcctgacctccctctgtacctggggacaactcaaaccaagcactattctgcaaaggtatctcggtccctgaccccagccctggacaggcactgcactgggcaggtgctgggtgccccaggagtgtctccccgtgagtacgtagtgagtgcatggggacagtgcaagcccctggggcacctgcgcaggaggcaggtggagacggtggtttgctcatcagcccttgaagtaaatgtggaggtccatctctgggtaggaagagaagaggtttaaacaggacagtttgaagcggtaaatgatggaatgcgatgacggagcagagtgatcaccctccttctcccccagccagatgtcttatgtgggagagaggattacacccctgggtgagttactgccaactgtacttccaagcagat

SEQ ID NO: 509820 - DNA, 634 bp, Homo sapiens
atcacccatctcacagagagtccaagggtaagcaacttgctcaagtgctgaggtcacatggctgtcctccatctgcacaggtgtgaggagaaggaatttctgtgtcttatttccacagtgaaaaggaaccagagccagtaggaagggttttggatgctggtagataaaagtgaccaagaattgcatagctcctccagggttttctggattctacaaaaccgtaatcttgacccctgcgcatagaaaccaggatatagacattttttctggcggtctttcctcctttccctcctgtatgtagaaggatggggagggagctccttaaatgggactctaaatcattctccatcccaacttctctagaatgtgacctatatcagaagtcctctccacctccctgaccctctccctgctcagtggccctttactccccraggatgcacacatccaggactttctcaccttacaagaaattcttcctgggccagggctccattgattacccccttgccttcctcctctcctctcacagctatctcaatttcacattcgagtagatttgcctttccaacttcctcccattgccccagcaggctggctcccgtcctgtgctccttactgtggctgccccctc

SEQ ID NO: 509821 - DNA, 577 bp, Homo sapiens
cctttcccttaggcctcagccctagtgtagtagataaaattatagaatatagagagaacaggtgacattgagaaccttggagtgttaaatttcaggacatggaagtctgtgagtcaaacacattgaaactgtcaattctgtaggaggaacttaaagaacccactcttccttgttttctgtagccctatggctcttctctgcaaccatgattataaaagcaataaaagaaaggttttcttttttctcaattcagaaagccagttagaggccaaactgatcagtggccttttattttgagactctaaatgaaaaatttagtctcaaacaaatgcaaaacaaatagattggtgggggcctctttttctaaagattgggtgttccattttccttgaatattattaattgtgttgagtagaagagagtcatcagagaattaaaagtrcatctgagttttctgagaaattctatttattctgagaagaaaaaaaaacatcaaaccactaaattaagtgcttacaaacagctcaatgacaaaaacaaaaggcagcagggttgcgactttgtaattgcctattct

SEQ ID NO: 509822 - DNA, 640 bp, Homo sapiens
gatattacgagaccaatgtgagaacaacacttgagctattgaaatgcagcttgcctttctgtgagcagccaggtttgtcacttagcagtgattgaaaccttaggtgttgcagtgctaccagtggccatgccctgaaggtgtcaaactgagagcctactagaggccaagtccaccaacatgcaaggggctcctgagtctattttagaaatctctttctgatctcactaacagaaagcgccaatacactcaatttccaaaaagtaagactcatctctcatttatcacagggatcaaatgcattggcttttgttcattgtaattagtgactttccttgtttgtcttttcttgcagatgccccctgagaggtctgggatattcacccatggtcaatcaaygcttatgaggcacagcaagaatcagtgtggcagatattaaagactcaggtaagtgagtgggtcagatcagatccatatactgtatttcaattatcctccttcatgctgggtgtttcaagtgcaggaaacttggaaggccattcttttcaggctaccacgcatgtttcaatgataatggcatgcaacaaagagtctgcttagaatacccacttttgagacagcagacacagaagcagcagcatca

SEQ ID NO: 509823 - DNA, 361 bp, Homo sapiens
agtttaggttcctgctgaaagaatgagatggacctttgtttcttcttctgctcctcaactccctgcaagaaccaggactgtgcattttgacgggcaggctcttacccctggcaggccacagagggcatgcagagcctttctgygtgtgttttctgggcagtcagataaagaccccctgtccaggcctttgtttaggatatttggcccatggaggaacgaggctggaatcacctgggaggggcagaggcttcgactggaaggaggagtgacctgaactccaggttctgggcctacactttgttcccatgcagcaccctgttagtggtgactggggcctggaagtcaggggccttggtggcca

SEQ ID NO: 509824 - DNA, 361 bp, Homo sapiens
agtttaggttcctgctgaaagaatgagatggacctttgtttcttcttctgctcctcaactccctgcaagaaccaggactgtgcattttgacgggcaggctcttacccctggcaggccacagagggcatgcagagcctttctgcgtgtgttttctgggcagtcagataaagaccccctgtccaggcctttgtttaggatatttggcccatggaggaacgaggctggaatcacctgggaggggcagaggcttcgactggaaggaggagtgacctgaactccaggttctgggsctacactttgttcccatgcagcaccctgttagtggtgactggggcctggaagtcaggggccttggtggcca

SEQ ID NO: 509825 - DNA, 545 bp, Homo sapiens
taacagttatgttatttagtttccctctagatttccaggaagcccagaggtagccttagtttgggttctcctaaaagtaaatgctgagatacacattctagtgcaaataatttattttggaggggaccccaggaarcactcatagaggattgggaatatgagatagggaagccaaacagtttaccatgtaggccactgtagctcagtccctccaaggacctctggggctgttatagactgtcagttatcccaatcttggaggagaaagctgatgtgtttatttcccaactccccattcgttattggtgatgggctgcttccaggggcattcaccctttggcatttccagtttgcattgtgtgtgtccaaacacacccccatgatagaagtctgcaaatattggcagtcatctctttgactcttagttttggatattcatggtctctcagttattctccccaaccccaaccattgtacccttccatagtaagagttttcagtggacatggagctacctaaccagaaactaccttttctaacttccc

SEQ ID NO: 509826 - DNA, 493 bp, Homo sapiens
gcattacatagtaattcttttaaaaatataattamcttcatatgtataaaaataacttcattacctttgtatccccatctcacaggtactttgtacacggtagacaaaataaaagttcaataatgtacaatggctgaaaacgtttcctattccaaaggatacctaatttgaatagaatgaacttactacaaataagaacacttcctgatcttgtatgggtttcccatagcaaccaactcagtgacatcacagaaactcagtaaatatttcagtatgagaaagaggtatgggaacaatttgcaaggactgaaaggatcatttcattaatgctaaccatctctccactttataaataattcgaacaaattcagatctaatatatgtacatcttttaaaaccttggatcgtttatggatttaaaagcattatactgcaatagggaagctttaacatctctacaagatgacaaaaagaataaacagttttacaccag

SEQ ID NO: 509827 - DNA, 493 bp, Homo sapiens
gcattacatagtaattcttttaaaaatataattaccttcatatgtataaaaataacttcattacctttgtatccccatctcacaggtactttgtacacggtagacaaaataaaagttcaataatgtacaatggctgaaaacgtttcctattccaaaggatacctaatttgaatagaatgaacttactacaaataagaacacttcctgatcttgtatgggtttcccatagcaaccaactcagtgacatcacagaaactcagtaaatatttcagtatgagaaagaggtatgggaacaatttgcaaggactgaaaggatcatttcattaatgctaaccatctctccactttawaaataattcgaacaaattcagatctaatatatgtacatcttttaaaaccttggatcgtttatggatttaaaagcattatactgcaatagggaagctttaacatctctacaagatgacaaaaagaataaacagttttacaccag

SEQ ID NO: 509828 - DNA, 483 bp, Homo sapiens
attagctttggtttcctagtttgtactacaactcttcttcattctcgctaaccgaaagagaaaaagcatatgaaagcatttgcataggagatgtgtgtgtgtgtgtgtaaatgtgtcrcctgtggaagtgggtcccaatttttccactactgttccattcactggaacacaatcgtggggccacagctcagtggggctagggaatgtagtccctggctggtggccacttctcagagataacattatggaaaaaggaaacacaaacttttttggtctctgacacagctgtcaaacaggacaataatatctcacaagaatgagaaacaatgtacatgtcagtgttttgtgaaacagtagttcttagtttctgtattttgcaagtcaacagaatgagctccttttgtcctctatgtagcagtcttaaaatgcttaaagtcaaccatcatatgtcatttgagtacttttttctcctggttaaatgcc

SEQ ID NO: 509829 - DNA, 443 bp, Homo sapiens
taattagctttggtttcctagtttgtactacaactcttcttcattctcgctaaccgaaagagaaaaagcatatgaaagcatttgcataggagatgtgtgtgtgtgtgtgtaaatgtgtcgcctgtggaagtgggtcccaatttttccactactgttccattcactggaacacaatcgtggggccacagctcagtggggctagggaatgtagtccctggctggtggccacttctcagagataacattatggaaaaaggaaacacaaacttttttggtctctgacacagctgtcaaacaggacaataatatctcacaagaatgagaarcaatgtacatgtcagtgttttgtgaaacagtagttcttagtttctgtattttgcaagtcaacagaatgagctccttttgtcctctatgtagcagtcttaaaatgcttaaagtcaacc

SEQ ID NO: 509830 - DNA, 485 bp, Homo sapiens
tttaatttgttaaagtatttgtctgctaatatcaatatctggttaccatgtttttattttgggtcacattttcctgtttcacatgtctagagagttttgattatgtgctgtacttgtgtgtgatacattttgtagggttatgaattatgttacctttctttaaaagttatgagctttgttctggcaggcaattaaattactaaaggatcttgaacctgttaggcttgtttcagtactttgttaggagtaggtatcctcttctagctttatttgtaattttagggcagggctccttttcaaggstgtagttcttatttttaagatgttgcttttctggaatcttatttaactgaatgccagaggggctcagcaagaactctctacttttattgagttggaactactccatctacccacatatgacctctgatatctgatatctccagttaccttagtcctaaagcagctatctcccgttacctctt

SEQ ID NO: 509831 - DNA, 612 bp, Homo sapiens
tgttactgttatcctcattgggcatcccactgatgtcatctggctaagagccagggaccataatctctgtaaggcaatcttggaagaggtttagggaggaaggattcggtcctgtagaaraatgttgtgagtctgagctgtgcagaagagaggataagccgcctgggcagagttgcctcctgtcaccagaagtattcaaataaggagagtctcccacatgcccagagtgtaacaagaggggacgagacattgaatggtggcgtcactctcagtgaccacagagactgaagtcaggactctggcatcctgggaggtggaggcaggactctgcctggcaccttgtgctcctgagtcctgggacagacatgtctgagccatgttccattcagatggtgagcactgatcccggcctccgacacagcacctctcagttgcccagggtctcctagattcattcagcaaatactcattgaacacccaccatgtgccagggggctgagatatggctatgaggaagatagataagagaccctaccctctgggagctgacattgcaaaggaggaaacagaggactgagaaagtaaactcatccacaagaggctctcacagtg

SEQ ID NO: 509832 - DNA, 612 bp, Homo sapiens
tgttactgttatcctcattgggcatcccactgatgtcatctggctaagagccagggaccataatctctgtaaggcaatcttggaagaggtttagggaggaaggattcggtcctgtagaagaatgttgtgartctgagctgtgcagaagagaggataagccgcctgggcagagttgcctcctgtcaccagaagtattcaaataaggagagtctcccacatgcccagagtgtaacaagaggggacgagacattgaatggtggcgtcactctcagtgaccacagagactgaagtcaggactctggcatcctgggaggtggaggcaggactctgcctggcaccttgtgctcctgagtcctgggacagacatgtctgagccatgttccattcagatggtgagcactgatcccggcctccgacacagcacctctcagttgcccagggtctcctagattcattcagcaaatactcattgaacacccaccatgtgccagggggctgagatatggctatgaggaagatagataagagaccctaccctctgggagctgacattgcaaaggaggaaacagaggactgagaaagtaaactcatccacaagaggctctcacagtg

SEQ ID NO: 509833 - DNA, 612 bp, Homo sapiens
tgttactgttatcctcattgggcatcccactgatgtcatctggctaagagccagggaccataatctctgtaaggcaatcttggaagaggtttagggaggaaggattcggtcctgtagaagaatgttgtgagtctgagctgtgcagaagagaggataagccgcctgggcagagttgcctcctgtcaccagaagtattcarataaggagagtctcccacatgcccagagtgtaacaagaggggacgagacattgaatggtggcgtcactctcagtgaccacagagactgaagtcaggactctggcatcctgggaggtggaggcaggactctgcctggcaccttgtgctcctgagtcctgggacagacatgtctgagccatgttccattcagatggtgagcactgatcccggcctccgacacagcacctctcagttgcccagggtctcctagattcattcagcaaatactcattgaacacccaccatgtgccagggggctgagatatggctatgaggaagatagataagagaccctaccctctgggagctgacattgcaaaggaggaaacagaggactgagaaagtaaactcatccacaagaggctctcacagtg

SEQ ID NO: 509834 - DNA, 612 bp, Homo sapiens
tgttactgttatcctcattgggcatcccactgatgtcatctggctaagagccagggaccataatctctgtaaggcaatcttggaagaggtttagggaggaaggattcggtcctgtagaagaatgttgtgagtctgagctgtgcagaagagaggataagccgcctgggcagagttgcctcctgtcaccagaagtattcaaataaggagagtctcccacatgcccagagtgtaacaagaggggacgagacattgaatggtggcgtcactctcagtgrccacagagactgaagtcaggactctggcatcctgggaggtggaggcaggactctgcctggcaccttgtgctcctgagtcctgggacagacatgtctgagccatgttccattcagatggtgagcactgatcccggcctccgacacagcacctctcagttgcccagggtctcctagattcattcagcaaatactcattgaacacccaccatgtgccagggggctgagatatggctatgaggaagatagataagagaccctaccctctgggagctgacattgcaaaggaggaaacagaggactgagaaagtaaactcatccacaagaggctctcacagtg

SEQ ID NO: 509835 - DNA, 189 bp, Homo sapiens
ctggactggcaggtctagcacagcctcacacacctctgccagttggttagctgatgtytggggtggtgccgtgtctccctccctccagcaggctagcctgggcttgatcctagggcagtggatgacactctatttcccgtgagagtagagcatgcagggcctcccaaagcctaggtttgtaatgggtac

SEQ ID NO: 509836 - DNA, 653 bp, Homo sapiens
cacttatacagttaagcacacgcaacatcaaggacccagacgctctgctcctggtgtctgtgccagggaagtcctcacgacagcccgtaacacaaccagtacaaggatgcccatgtcaagtgttatttgtggaaaggggttgcggacagcctgggtgtccatcactgggggggargatgaggaaaatctggggccatgctacatgcaggagctgtcagaaacaatagactggatacacacacagcagcatgagctggacacaccaacacacagaagtgtggaggaacacagcactaagggagaaaaggaagaagccaaatcagttctactatacaaatttaaactatcacacataaaataacaatgcatactttgcaagaacacatgacagcaaaaaacacactgatgagatgaaactgtcagctatgcagatggaggtggtggatgggaatggagaaagaagatgaaaggaaataaaatattaataaataaataaaacaagagccttgcaaagaggataataagagccatgccaagaaatgagacgtgtaattaacccaagcgtttgcccctgaggtctaaagtgacattcctaagtcaagtttatacagaatgcctagacattcgtgctgagggcaacaagtaacagatga

SEQ ID NO: 509837 - DNA, 653 bp, Homo sapiens
cacttatacagttaagcacacgcaacatcaaggacccagacgctctgctcctggtgtctgtgccagggaagtcctcacgacagcccgtaacacaaccagtacaaggatgcccatgtcaagtgttatttgtggaaaggggttgcggacagcctgggtgtccatcactgggggggaggatgaggaaaatctggggccatgctacatgcaggagctgtcagaaacaatagactggatacacacacagcagcatgagctggacacaccaacacacagaagtgtggaggaacacagcactaagggagaaaaggaagaagccaaatcagttctactatacaaatttaaactatcacacataaaataacaatgcatactttgcaagaacacatgacagcaaaaaacacactgatgagatgaaactgtcagctatgcagatggaggtggtggatgggartggagaaagaagatgaaaggaaataaaatattaataaataaataaaacaagagccttgcaaagaggataataagagccatgccaagaaatgagacgtgtaattaacccaagcgtttgcccctgaggtctaaagtgacattcctaagtcaagtttatacagaatgcctagacattcgtgctgagggcaacaagtaacagatga

SEQ ID NO: 509838 - DNA, 277 bp, Homo sapiens
gcaccaaggtgggatctgggtgagttcagagcccaggcacgagggctcagaatctcagctcggccttgctgagtgcttgggcgattcacttcgtctcccagagccccagtttcctcagctcaaactgagatccccagggagttgaaacaagcaagcattcttgagactgtgtgtttccttgcctgttcttcctgccaggcagtaaaggggcaggattgggtctgtccctgactcgacccccggaacagggcytgcggtgcttagtaggcgcttggta

SEQ ID NO: 509839 - DNA, 643 bp, Homo sapiens
acagctgaggggaatttgctatggtataaatcacaccttgaatctcacccatatctgatttaaataagactctggacattggacttttgaatyggtgatgaaatgagttaagactttggggctcttgagatggaattgatgtattttgaatgcgagatggacataaagttgaggggccaggaatgaaatcatatagttaaatgcgtcttccaaaagttcatgtgttagagacttaacccctctgccttcatgaatggatagtgttacaatcactggagtgggttaggctttgttataaaagtgagccgtctctggctctcttgctcttgccatctcaccgtgtgattccctctgtcagtcatgttgtgatgcggcaagaaggccttcaccagatgccatgccatggtcttggacttccagaatcataagataaataacgtttttttcctttatatattaccaagtctgtggtattctgttatagcaacagaaaacaaactaaaacagtaaaagaagtaagacatgagacatataaagaagatctctcatttgagacagaattgatcaatgtcgttagtcacaaatagaaaaatacccagtaagctcagaaacagaaatgatgcctgatatctgggttgaaatg

SEQ ID NO: 509840 - DNA, 643 bp, Homo sapiens
acagctgaggggaatttgctatggtataaatcacaccttgaatctcacccatatctgatttaaataagactctggacattggacttttgaatcggtgatgaaatgagttaagactttggggctcttgagatggaattgatgtattttgaatgcgagatggacataaagttgaggggccaggaatgaaatcatatagttaaatgcrtcttccaaaagttcatgtgttagagacttaacccctctgccttcatgaatggatagtgttacaatcactggagtgggttaggctttgttataaaagtgagccgtctctggctctcttgctcttgccatctcaccgtgtgattccctctgtcagtcatgttgtgatgcggcaagaaggccttcaccagatgccatgccatggtcttggacttccagaatcataagataaataacgtttttttcctttatatattaccaagtctgtggtattctgttatagcaacagaaaacaaactaaaacagtaaaagaagtaagacatgagacatataaagaagatctctcatttgagacagaattgatcaatgtcgttagtcacaaatagaaaaatacccagtaagctcagaaacagaaatgatgcctgatatctgggttgaaatg

SEQ ID NO: 509841 - DNA, 546 bp, Homo sapiens
gctgggtgtactcatacaggtctaccttctatgaggctccacccagggaaacttgcaccaacaattctggcttccccctttcttgaactaccagcaccagctacctatgtcacataactgaggattctgttcatacgctcctgtgacattctgcttccagcagaactaaaagcacaccgagcaccaggagacctgactccagcgtcagccctgctgctatctggctggggtacacacrctattccttctcctgggtcttttttttttttttttttttgagacggagtctcgctctgtcgcccaggctggagtacagtggcacgatcttggctcactgcaaacccctcctcccaggttcacgccattctcctgcctcagcctcccgagtagctgggactacaggcgcctgccaccatgcctggctaattttttgttttttcttttataaaatagggctggcccaggagcactcaccgtctcccttttgagtttttcccgcttgcggatcaattccacgagcagccgagctcgctccaagtcatgccg

SEQ ID NO: 509842 - DNA, 624 bp, Homo sapiens
atgggcccaggttgcacaactcagggtcccttctaagacctctgaagtcacccaccccaaattcttccccatccattcctagtacatagttttccaaaatctccctataggtagcctgtttcatctttcggggactttgatgattaagaaatattttgggtcaaggtgtgggccaaggtatgtctccctgtaacttttaccattggtcaagttctgtcctctgaggcctcctgtgacaagtctgycctctcttccctgtggaaacccaccaggccttcggtgacaacaggcaaggccttatgaagtcttcttctgggtaaggaactctgttttttctgatggcatggttttcggctatcttactctcctggcctgtaaattctccacattgccaaacacgacatgagacttgggggataaaagatgtaggtttgagtagtgtgtccaccaatgggctctattgcataacacagctaaattgaagtttttatttagggcggataaaatgttgaatataaacttataaataatgaagtgctgcataaaggattgttattactactacagctactctatattgctactaaaaataacaattacccctactaaatcaagaacacaatg

SEQ ID NO: 509843 - DNA, 583 bp, Homo sapiens
actggatgtgattgctgtagtctttcatgattgatttaggagctgggagaggcctggctaggagttggaggatccctgggaagatgaagattaggtcttacgtgagcctcagccctctcmtctgtaaaatgggagtaatgatggtaattatgctgatgttacctattctgactggagtaaggattaaagtacttgtctggaggaaggcacttcatggttaaaacatgaaaagagaagtgcacagtgtttttattacagggaaacaccaaagagctggaaaggaatgagggctggagagatggagctgccctgaggactctgggaggtcatcctgggggcagaactttgacagttgctgcccgaggtgggacagggatgctgggaagatgtgacgatgtgcacaagtgtgtcatgttcaagatggttctaagccctggccaattccatacatgctcttttcctttctcatccatagaggttttggcaaaggcatacttgggagtgttgatatagctgacactgcagcaccctcagtttacaggtgtgagaagagtgaggctcccacagtctcacttggacaggt

SEQ ID NO: 509844 - DNA, 583 bp, Homo sapiens
actggatgtgattgctgtagtctttcatgattgatttaggagctgggagaggcctggctaggagttggaggatccctgggaagatgaagattaggtcttacgtgagcctcagccctctcatctgtaaaatgggagtaatgatggtaattatgctgatgttacctattctgactggagtaaggattaaagtacttgtctggaggaaggcacttcatggttaaaacatgaaaagagaagtgcacagtgtttttattacagggaaacaccaaagagctggaaaggaatgagggctggagagatggagctgccctgaggactctgggaggtcatcctgggggcagaactttgacagttgctgcccgaggtgggacagggatgctgggaagatgtgacgatgtgcayaagtgtgtcatgttcaagatggttctaagccctggccaattccatacatgctcttttcctttctcatccatagaggttttggcaaaggcatacttgggagtgttgatatagctgacactgcagcaccctcagtttacaggtgtgagaagagtgaggctcccacagtctcacttggacaggt

SEQ ID NO: 509845 - DNA, 600 bp, Homo sapiens
tggcttctcagcattccatggggaacaaactgtaccggtggctgcagccagccattttgcatattcataaactttatctcagggaagactccacacaagagatgcwtttgtgcaaatgtagtcatgcttataggaaaatttaaaggatctcaaccatccggatgatggagtataattttcacaatataagcttcatgagatcagcgacctcatctgttttgtccattgctatatctcaagggcctagaatgtaaatagtgcatactagacaaccattcagtacatgacagttatttttagtaagagataaatttaccagttattaagctctaattctactattttcgaggattgacaactgcattgaacagttatctcaaaacaacctattgcctgggaatttggagttacatgcctttttcctagtcctaatacaaattatctgtgaatgtggacccacaacttagctttcctgtactccaatggtctcatttttaaactaaggggatttggccggatgattgctttgttagttttgggaaacacaaccataaccaggcttcattttatcaaacaggtagaatttataaggatatggag

SEQ ID NO: 509846 - DNA, 600 bp, Homo sapiens
tggcttctcagcattccatggggaacaaactgtaccggtggctgcagccagccattttgcatattcataaactttatctcagggaagactccacacaagagatgcttttgtgcaaatgtagtcatgcttataggaaaatttaaaggatctcaaccatccggatgatggagtataattttcacaatataagcttcatgagatcagcgacctcatctgttttgtccattgctatatctcaagggcctagaatgtaaatagtgcatactagacaaccattcagtacatgacagttatttttagtaagagataaatttaccagttattaagctctaattctactattttcgaggattgacaactgcattgaacagttatctcaaaacaacctattgcctgggaatttggagttacatgcctttttcctagtcctaatacaaattatctgtgaatgtggacccacaacttagctttcctgtactccaatggtctcatttttaaactaaggggatttggccggatgattgctttgttagttktgggaaacacaaccataaccaggcttcattttatcaaacaggtagaatttataaggatatggag

SEQ ID NO: 509847 - DNA, 484 bp, Homo sapiens
tttcctcatcttcccttactctaactccatttttttattagtgttaaaattatgatgttgatttcacattatacatgtttatagcctttatattgcgttctataaaaatccttctcagagtcatttgttgttatttctatatttaaataaatccaaatgctaattgcaagcgagtttatcatggtgtctttattgttgagcttttgtcttgatttaccacctaactgattggatttgttgtccagcaggttgactctttccaaaaaagactgttacracgtttcctgaatattttgtattggagaatttctgcctactgtctggttttttttttttttttttttaagacggagtctcactctgtcatccaggctggagtgcaaaggcatgagatcggctcactgcaaccccgcctcctgggttcaagggattctcctgcctcagcctaccaggtagctgggattacacatgtgtgccccatgcc

SEQ ID NO: 509848 - DNA, 484 bp, Homo sapiens
tttcctcatcttcccttactctaactccatttttttattagtgttaaaattatgatgttgatttcacattatacatgtttatagcctttatattgcgttctataaaaatccttctcagagtcatttgttgttatttctatatttaaataaatccaaatgctaattgcaagcgagtttatcatggtgtctttattgttgagcttttgtcttgatttaccacctaactgattggatttgttgtccagcaggttgactctttccaaaaaagactgttacaacgtttcctgaatattttgtattggagaatttctgcctactgtctggttttttttttttttttttttaagacggagtctcactctgtcatccaggctggagtgcaaaggcatgagatcggctcactgcaaccccgcctcctgggttcaagsgattctcctgcctcagcctaccaggtagctgggattacacatgtgtgccccatgcc

SEQ ID NO: 509849 - DNA, 527 bp, Homo sapiens
tgggtcagtaggcaagaaaacagcaatcaaaataagatgacagaaagggctaaaggaagccaagataaagctaagatcgaagcccacatgattccagaaaaaaaaaaatgatgtcatttatgataagagagttctggctctagcaattacattggggaaagtyaccttacctctctgatttccttacctgcaaaatgaagagtttcacaggaataaaaccagatgatctcccagtttgaggagacccttgagagcactcatcctaacctccagctaatatggaaggcccagtgtgaatggccaccgtgactcaagtgaaagagaatctcttacttggcgagaaaccttgttccattaagataaagttctaataggtgataatttcacatttgagcagcacattacggtttagaaaagggtctcactgacattacctttgatagtcatgtgatcgtatagtagaaggaaaagattgtttttaataatcctcattttatgcatcaggaaattaagatttaaagagggta

SEQ ID NO: 509850 - DNA, 309 bp, Homo sapiens
tttttaaaaatatcttttagacatgtttaatgctaatttgcagtttcttgtgtataattaattaccaggggatccataaacatggctgtatacagaaatcaaacaaaaccttaaaaaaaaatacaaattcctgagtctcattaaagtatgcagaatcggaccacctaggtctgtggattgagcagttcatttataccacatttggtaactcctatgtggtaaatatagggaaagggactagaaaattagatawattgtcacaggcagaggcggtcatagaatcttcctagacatggtgacctttggttg

SEQ ID NO: 509851 - DNA, 624 bp, Homo sapiens
ctggtgagactgagttgcagtaagaataggattctaattagttttctatccattttcttatgtatctaaaaaatgataagtagatataaagtatgatataaagtagaccagtggttcttccatttctgggggactctttcaaaatayagatagaaagtcctactcctttgaaattcagatcaacaaacataatggatttggaggggagccaggagggaggaaggttgttaagggcccaggtcaatatgcagttttatttgtctgattctgtgcgcactgtctgccttcagttgatagaagtagctgtcacctttcagatgcgtgtctattggatagttatcacagaaagagaccttaactagggtccattagcctccaggggatccttgagatgggctttgggaatctgagaaacccctgaaattgagtgcaatacattgtagtggctgagtatgtttcacagattctcgaatcagactccaaaatgttaagacccaagaagatactctagagtacatttagcaactttgatctttatcaaaagcaaccttttccctaaacttggcattaataacaattgacttttcagctataccttcaaaatcagacctgttaatatattac

SEQ ID NO: 509852 - DNA, 659 bp, Homo sapiens
tgtacctaagaaactcctgatcaacactatatgcatagaaaggtacacaccaatttattcagtgagttatttcttcatgtcattggtcttcgttctattcttatttctttttgacatttctccaaatgtacttgtgtgtgtgtgaatacatacaagtaagactggtcttcagcaatgtggcaggcaaaagccttctctctgtggacttactgttcatttttgtgtctgtacttcaacctgaacaccaccgggatcaactactccctaaaaatctgcttccttgaactgtaccccttctggtatttctggatgcatatggaaaactccatcatgtgtgttgtccaggcccttccccactacaggacagtttcttgttgtaaaaaaatatatataactacaatctaagtcattctggagactgttagattcaagctggaattcatacactttaatggtggccttttgaaaagaccgttaaccaaaagcagtgctaatgccttcaatatgcatttgtgtattctttgtaygcataaagaatctcccagagagccagttaaaaatgaggactataggattccgtggcctttcccaaactttctgattacatagatttggggacggggtgcaggcatatgcattagaatgttgcaccctgggtt

SEQ ID NO: 509853 - DNA, 644 bp, Homo sapiens
ctgcaatgcttcagttaggctggcctattctgctccctgccttcttagctcttttttcctcaatgggattcattcatcttactctccccttgaagccttgctaaatgattggctttcaaatccctaactcacatggtgtgctaatggatgttaatggcttccccttgtatttaaattttaaatggagactcctatatatacactggaaaccaaaggaataaatatttartagtgtgaattgcagggaaagtggtgaaagatgtttcagagccagtgttcccctccactattcctaatcagattaaaccctgcctgtaaggttgattctttaaacgataggtaaacacctttctcaaatttgtaggcttaagactcatcatggggaatttctttaaaaggctggctttgggacctgtccccagagactcttttttggtaggtttaaggtagagcccaggaatccatgtttttaagaagtaacacaagtgattctatggcaggtggtgttaaaaggacgttttaagaaataaccactacctgaaaggatattggaacactcctagggaaggaacagaatgcaagtcttagatttcttatatatgtttacctttgctcaaatgtcaaaataattaaaaagacttatt

SEQ ID NO: 509854 - DNA, 611 bp, Homo sapiens
ctggcctattctgctccctgccttcttagctcttttttcctcaatgggattcattcatcttactctccccttgaagccttgctaaatgattggctttcaaatccctaactcacatggtgtgctaatggatgttaatggcttccccttgtatttaaattttaaatggagactcctatatatacactggaaaccaaaggaataaatatttaatagtgtgaattgcarggaaagtggtgaaagatgtttcagagccagtgttcccctccactattcctaatcagattaaaccctgcctgtaaggttgattctttaaacgataggtaaacacctttctcaaatttgtaggcttaagactcatcatggggaatttctttaaaaggctggctttgggacctgtccccagagactcttttttggtaggtttaaggtagagcccaggaatccatgtttttaagaagtaacacaagtgattctatggcaggtggtgttaaaaggacgttttaagaaataaccactacctgaaaggatattggaacactcctagggaaggaacagaatgcaagtcttagatttcttatatatgtttacctttgctcaaatgtcaaaataat

SEQ ID NO: 509855 - DNA, 611 bp, Homo sapiens
ctggcctattctgctccctgccttcttagctcttttttcctcaatgggattcattcatcttactctccccttgaagccttgctaaatgattggctttcaaatccctaactcacatggtgtgctaatggatgttaatggcttccccttgtatttaaattttaaatggagactcctatatatacactggaaaccaaaggaataaatatttaatagtgtgaattgcagggaaagtggtgaaagatgtttcagagccagtgttcccctccactattcctaatcagattaaaccctgcctgtaargttgattctttaaacgataggtaaacacctttctcaaatttgtaggcttaagactcatcatggggaatttctttaaaaggctggctttgggacctgtccccagagactcttttttggtaggtttaaggtagagcccaggaatccatgtttttaagaagtaacacaagtgattctatggcaggtggtgttaaaaggacgttttaagaaataaccactacctgaaaggatattggaacactcctagggaaggaacagaatgcaagtcttagatttcttatatatgtttacctttgctcaaatgtcaaaataat

SEQ ID NO: 509856 - DNA, 644 bp, Homo sapiens
ctgcaatgcttcagttaggctggcctattctgctccctgccttcttagctcttttttcctcaatgggattcattcatcttactctccccttgaagccttgctaaatgattggctttcaaatccctaactcacatggtgtgctaatggatgttaatggcttccccttgtatttaaattttaaatggagactcctatatatacactggaaaccaaaggaataaatatttaatagtgtgaattgcagggaaagtggtgaaagatgtttcagagccagtgttcccctccactattcctaatcagattaaaccctgcctgtaaggttgattctttaaacgataggtaaacacctttctcaaatttgtaggcttaagactcatcatggggaatttctttaaaaggctggctttgggacctgtccccagagactcttttttggtaggtttaaggtagagcccaggaatccatgtttttaagaagtaacacaagtgattctatggcaggtggtgwtaaaaggacgttttaagaaataaccactacctgaaaggatattggaacactcctagggaaggaacagaatgcaagtcttagatttcttatatatgtttacctttgctcaaatgtcaaaataattaaaaagacttatt

SEQ ID NO: 509857 - DNA, 644 bp, Homo sapiens
ctgcaatgcttcagttaggctggcctattctgctccctgccttcttagctcttttttcctcaatgggattcattcatcttactctccccttgaagccttgctaaatgattggctttcaaatccctaactcacatggtgtgctaatggatgttaatggcttccccttgtatttaaattttaaatggagactcctatatatacactggaaaccaaaggaataaatatttaatagtgtgaattgcagggaaagtggtgaaagatgtttcagagccagtgttcccctccactattcctaatcagattaaaccctgcctgtaaggttgattctttaaacgataggtaaacacctttctcaaatttgtaggcttaagactcatcatggggaatttctttaaaaggctggctttgggacctgtccccagagactcttttttggtaggtttaaggtagagcccaggaatccatgtttttaagaagtaacacaagtgattctatggcaggtggtgttaaaaggacgttttaagaaataaccactacctgaaaggatattggaacactcctagggaaggaacagaatgcaagtcttagatttcttatatatgtttacctttkctcaaatgtcaaaataattaaaaagacttatt

SEQ ID NO: 509858 - DNA, 627 bp, Homo sapiens
gggctgagtctctgccctattcagtacgagctgccacataccagacacaaatcaatatgccctactccccctcagtcaagagattcaaggtattccaataattaagcatcaatgtgtgtgcagaaaaggcaatatctccaatgattagtgttaaatttaattaactacctctaaaataaaatgacacataaactttgtaattaagaataattcttaattaagaaacatttgacagataggcaggaaaaagaaacaggatggaaaacggctgattaagatggggaattaagcacctcattgaagatattagcatgtcctgttttgtgtttatttaattttcagaacattcagtgaactgaaattcaaaacagatatatagggggcatttcaacagaacacatgtgcactttttcagtttaatgtaaaaatgtacctttgtagctaaaatgacagctgyacttttaccccttgatcatccaagcaaagaaaaggaaccagttgggtggggagttacctcatctgttgactttctagggcaagagaaaagccatgcagtcctacagacttaatgtgggcctgcttcgtaagacatacagctcttttcctatcattggcatttgatgaagt

SEQ ID NO: 509859 - DNA, 617 bp, Homo sapiens
tttttttgttcaattggaaatcaaaatgcatataaagaagatactttaaatgcttacatcccagttcctcaacaagaggagaaataattatctgtgctcctatgtggcataacggattattaggcatcacattcattatttcccttaactaaaaattaatgatgctattacaaattatttttattttcaattttaaataataattacagctaaatacattgtatttctcaaaagcaggcatatagattctcaaaagcgggcatatagaattagcacagggttttgcacatttaagaaagagaagaaaactatgcaatgcatyacagaaaataaagcaatttgttttaacagtggtttgggaagtggcagttaattaatttaacaaagatttataaagcacctactgtgttcttgactctgttctcctcttgagaatgagatgaaggccccacttcctgtcccatgatgctgacagatcatggggcctccattaccgcagaaagagaagggctaggcctggttcccacaaagcaggtagagagcgcagcagaggctgcacttaaccctgctgggaggagatcaagaagagtttctccaaggaagtccaattactgaaa

SEQ ID NO: 509860 - DNA, 633 bp, Homo sapiens
tggctcagctcactcactgggctttattcactatagccttatgatacctaagactgtcagtgtggttcaatttcccaccttatgttcrgctgttaatgttgaagtttcaatgcatctctataactgtccttagaaaaatgaccttttcaagttaagaataggaaaaataggttttaaaaacctaaagacaatggattaaatgagaaaagaaaaaaagctgtcacctaatcaccggtttcaatatctgaaggaggaaagtacgaacaaaagcaggtgttctaaatggagtcttaagaagagaaatacaaaattcagaaatgtttccatgcattattagctttgaccaagggagatggtactctgctgggctgaaagcattggctacattcaactctcagagctcagtgaatgaatatcctctgggctctgactccatttccatcaaggcaccctgtattacaatttcccctggcctcagatttgctacagtgagaatgtaccaagcaataaccagaatgccaattaaagaattgtcattctagtttatatactcattttttaggtatttagttagtgtgactcagttctcacaaggttgacaaatcctagactcacgtgtgaaatctaaatcag

SEQ ID NO: 509861 - DNA, 644 bp, Homo sapiens
tatgagagcacaggactactgacacactactgtgctagggggttactcttcccactaaccacactgcttcttccttcatcattagctaaactcccccaaactggaaagaaccataaaccacaaactctctttattcaaaatgaaaataaacatcaaattattattatacttcggaaacttctattccttcaggcayatcctcactttttatctcctaacccacctggatgaatgttcattgaggtgctacaagtcaaatatggctttttcttgctttctggatattagggtaaatcagcctagataaaaactgctaggtctttgctttttcactaacttttaatggcagccatttagctgtataccagtacattacctctctttggttcattgccatttactcctccacttcagtcaatcactgaagcacaagtcagtaacatttagtaagtggccaaagatatatactcacacatctgtacagatatgctcacatatatgtacaataataatcaattctgcattgtccatagtagctaaaaactagaaaacctacatgccaattaataggcaattaaagttcaattattactaattatttaaagtcagctcataaagaatgaactccacaatattttaattag

SEQ ID NO: 509862 - DNA, 163 bp, Homo sapiens
ctgcggtgtcactgtccttttctgtgtcaagaaaggaaaggaaaatggcagagagaaaaaggagaagagaaaggaaaagaaggttgacagaagcagcccccaggagtttccaagacatggaaagggcagaaasaaatttagggcattataaaaagatatttca

SEQ ID NO: 509863 - DNA, 638 bp, Homo sapiens
gctgggagactgcaggccacctgctacacagctcatagccatcaagtccccacaaaccctccacccaaagtcatgttcagtactttgatgatgagtttacaactgctgttctgatttactaaggaggcatttattaaagagtgaaacaaaggtttgctttgccatgtcagaactgtaagatggcaaacagagaaaaacaattttgccttagagtaaattacttcaagataagattttcacaaaatccactggatttattcttattggcagtattcaagcacggttaaacaccttgatggaggacgtaccctgaatgaattgcacaaccaaaactagattccaagtatcctagtttatacggtgcaggattttttggctcctacatgagagtaagcaatggaaatggcttctgtgcttgtaaatttactgtcagaccttaatagtcaacaaaagaagtatacatttggggtttttttcccctctatggtataaatatatttaaaactttgaaattctagcaggttgaacatattattaatacctaagggagagttgaacaccctacattgactacacctttgaataatttagaaaatgattgctttactaacttgyacatatagtggtttccctgtcat

SEQ ID NO: 509864 - DNA, 313 bp, Homo sapiens
tcatttcctgcaactgcagcatggtaaatcattatttgatttgaaattaatttcaaataatcattatttgaaattaagagagctgtactctttgctgggccccaagcacccgctgtggccttccaactatccagctaactcttaacactctccgcaggcctcttcctctctcttgcttttttactattcagcttaaagatttcaagtgagcaactcttcatcagggtaaatttggggacccattctaaagaatccagctcrgtaatttaaaaaatactgtctattcttctcttttgaactaacaaaataaata

SEQ ID NO: 509865 - DNA, 598 bp, Homo sapiens
tttaccattgtttaaagcaatagcaaaacttttaggtaaataggttcagtaggaagtcagaaaattcagctatggtcaaaattataagttcatgggttacctttttataaagtggttgtccaaaacagattctaaatttaattaagcctttaggagggttttattctaatctactacttaaaattttaaaacatgacttttccccctttttacaaaaattttagcttctactctttcaggtataagaggtatgcctctccaaattaagtttataataagaaacgcaaaagaaccaatccaaattctttgattatgttaaaattatatctaatattacttaatggcacattggttgaagcttggcaaactttttatgagttgttgtactaacattagttttaacatgatttsatccaattgttacattattttgtaaatgccatacaaattttgaacatttttgaattcgaatttttatccaatatattatcattatccttctactaaattaaattgaataaagaaatatactcaattttcataaattgtactttagatgatatactacctcctactttaaggttatttctatgaactg

SEQ ID NO: 509866 - DNA, 595 bp, Homo sapiens
gtccttatcatgtgggtactttgtctatcttgacagggtggactgcatatcttgacatattgtgaaacttcttctaagttctcttaacccatcatatgaaaaaccataccttcccaatccctgggcatttaacaatgtgatggggctgttctacaaggagtgcactctgagttccagttgatagaaatacagtgtttggaatgtagaaggggacggtgctagtctatgctgcttagatcacacctcaaacacaacttttacttcaggacattgataaaataaaatagtgtctgtgttcagaggattgtgtctccaccattaggaactagggatttgggcttagggagaatatgattgctgccttcacgttgggaaaggctgtcagagggaagacagattaggctcactgtttgctgccctccaaagccaaactaggrtcagtgggtggaagctacagggaggtggactggggctctgtggaaagcagagctttccacattatgagatcagttcatgctggagtgagctgccccgggaggtaggaaactcccaggtaccagagatatgcaagcaaagactgagccacgctttggca

SEQ ID NO: 509867 - DNA, 623 bp, Homo sapiens
atgcccatcaccttatcttcatgtcattgaattcttcacaatcagctcctgctcagccaagcaaatagtgctacctcaagcagcaaaatatccctattcttctcactttggtttggctacagcctggattttttgctctaatgttatgaaaacctcaatatagcaaagaaatgagattttcctcttctctgagacttgacaaaagctattcttcctgctcatatgtactggccaccacttttcaattacaaactactgtcatctacataagcttatrtaattctcaaaacttcttgaattaaacatgatttctacttttcagagggaaactgaattctgagaggttaaatacaatgccccaagtatacacaaccattacatcaagtcagaacttgatttcaacttcaggcctcttgatttcaaattctaggagctttcctttatgtgaggagttggaacactttcacactttctgtaaataactagatagtaaatattttcagctttgcagcccatagggtttctgttgcaactactcaactctgccctttagagagaaagcagtcataaacaatatgtaaacaaatgtctgtgttctgataaaactttatttaaaaaccagg

SEQ ID NO: 509868 - DNA, 564 bp, Homo sapiens
tgcaggctgctgactttctacttagctactgaatttccacattttgtacttttactctagatcaggatttagcaaactatagcctacaggccaaatctggtgcatcacttgggcctggaagcctaatatatttactgtctggacctttgtagagaaagcttgctgacctgtgttctagatatctttaaatgaaaatgacagggagagagagagagagaggagaagaagacagacagagasgcagagagagggagagaagcaagagagaaagaaagaaagaaaaagaaaagaaaaggaaaagaaaagaaaggaaggaaggaaaagaaagaaagagacagaatcgattttatgagcaaagaagatccaaccaggttactagagagtactagatagttagctgctactgtatttaagttcatgcttaagacaatgtgctatagaacttttcacctcaccctggaccagaccagtgccagaatagggttacagttggtatccctgatatcattcaagacttaaatagcaacttacttatctcagtaactctgtatcttttattggttg

SEQ ID NO: 509869 - DNA, 564 bp, Homo sapiens
tgcaggctgctgactttctacttagctactgaatttccacattttgtacttttactctagatcaggatttagcaaactatagcctacaggccaaatctggtgcatcacttgggcctggaagcctaatatatttactgtctggacctttgtagagaaagcttgctgacctgtgttctagatatctttaaatgaaaatgacagggagagagagagagagaggagaagaagacagacagagacgcagagagagggagagaagcaagagagaaagaaagaaagaaaaagaaaagaaaaggaaaagaaaagaaaggaaggaaggaaaagaaagaaagagacaraatcgattttatgagcaaagaagatccaaccaggttactagagagtactagatagttagctgctactgtatttaagttcatgcttaagacaatgtgctatagaacttttcacctcaccctggaccagaccagtgccagaatagggttacagttggtatccctgatatcattcaagacttaaatagcaacttacttatctcagtaactctgtatcttttattggttg

SEQ ID NO: 509870 - DNA, 626 bp, Homo sapiens
aaaaggggttgagttattgatttgattctcagtttggtcacttttggtgtatagcagtgctactgatttgtgcacatagattttgtatactgaaactttactgaattcacttatcaggtctaggagctttttggatgagtctttagggttttctaggtatacagtcatatcattggtgaacagcaacagtcttacttcctctttaccaatttggatgccctttatttctttctcttgtctgattactctggctagaacttcaactactacgttgaatagatgtggtgaaagtgggcagccttgtattgttccatttctcaggggaaatactttcaacttttccctgttcagtataakgttggctatgggtttgtcataaatggcttttattaccttaaggtatgtctgttctatcccttaatcaaatttttaaaatatcttcacagcaacctctagactggtgtttgaccaaacaacttggcaccatagcctagctgagttgacatataaagttaccattgcaactgacatactcatttttttctactctagaatatatttgcattcagtagatgaaaacatttaatgctgttatgcttatcaaatatttgacttgtattactccc

SEQ ID NO: 509871 - DNA, 582 bp, Homo sapiens
ttaattttcttaattttcttcagtttaggtcatacttacagattatttttgaatccatagattttttgtgaaatgtttaagtggtatagttaaatgtatcagtttcattcagaatactattatgttggtcaagatttcctggcctactttaatgatttttatctctatatatctttcttgataattttctgaaatatttaygttggtatttataaaaggaaataaatcatatagctaaatctattactaaaagccaatgaggtggcacctctattgatttgggcaaatgcattgcacttgccatccaacacactattctttcataatttaaaaaattcctccattcattcatttattcattccttcaaaaaatatttatcaagcaccaaataaatattcagaagatactgttctaaatcagggacctcacagaggaagaggacatggtattagacaaagtacatgtctgcaaccattctttgtggcaataaagtggtcccagaatgaactgacatcccaaacccttcaaaaaggccagaaagttagctgtagttttagctgcatgatcttcattaaactcac

SEQ ID NO: 509872 - DNA, 615 bp, Homo sapiens
ataaatgaatttcaaagcagagatgagatattcttataaattatccaagattatacattggagccttttcatttcttctccagacagtgaatatgagaacacaccactgagtaatatcatgtcctttcaaagctaccttctrcctgtaaggtgagaagcctggggttgctgtcctaagttagcagggctggaggcagagcagacaccaaatggaatcatgtggctattttgctgatgcttaaaatctactgcattctccaaatcaaactgcggcatcaaagcgttggagaaactgacttaattcaaaaacatgtctagggcatctaaacttattgtctctgagtttcacttgttttttgtcttttttgttcctgggaagtcaattatgtctcatgggttgggactttgaacaggaaagtggtgtgtcagcgtgcagtcatttgtgaatacttactcgcccactcatcaaacacttagtgagcatctcctttgggatatgccctgtggattctgcatcctgtcccccatggggactttgctaggggctgccacacagagtctctttaggcaattatatctgtttctgcaaatctttaggccatcagagggtcagga

SEQ ID NO: 509873 - DNA, 615 bp, Homo sapiens
ataaatgaatttcaaagcagagatgagatattcttataaattatccaagattatacattggagccttttcatttcttctccagacagtgaatatgagaacacaccactgagtaatatcatgtcctttcaaagctaccttctgcctgtaaggtgagaagcctggggttgctgtcctaagttagcagggctggaggcagagcagacaccaaatggaatcatgtggctattttgctgatgcttaaaatctactgcattctccaaatcaaactgyggcatcaaagcgttggagaaactgacttaattcaaaaacatgtctagggcatctaaacttattgtctctgagtttcacttgttttttgtcttttttgttcctgggaagtcaattatgtctcatgggttgggactttgaacaggaaagtggtgtgtcagcgtgcagtcatttgtgaatacttactcgcccactcatcaaacacttagtgagcatctcctttgggatatgccctgtggattctgcatcctgtcccccatggggactttgctaggggctgccacacagagtctctttaggcaattatatctgtttctgcaaatctttaggccatcagagggtcagga

SEQ ID NO: 509874 - DNA, 615 bp, Homo sapiens
ataaatgaatttcaaagcagagatgagatattcttataaattatccaagattatacattggagccttttcatttcttctccagacagtgaatatgagaacacaccactgagtaatatcatgtcctttcaaagctaccttctgcctgtaaggtgagaagcctggggttgctgtcctaagttagcagggctggaggcagagcagacaccaaatggaatcatgtggctattttgctgatgcttaaaatctactgcattctccaaatcaaactgcggcatcaaagcgttggagaaactgacttaattcaaaaacatgtctagggcatctaaacttattgtctctgagtttcacttgttttttgtcttttttgttcctgggaagtcaattatgtctcatgggttgggactttgaasaggaaagtggtgtgtcagcgtgcagtcatttgtgaatacttactcgcccactcatcaaacacttagtgagcatctcctttgggatatgccctgtggattctgcatcctgtcccccatggggactttgctaggggctgccacacagagtctctttaggcaattatatctgtttctgcaaatctttaggccatcagagggtcagga

SEQ ID NO: 509875 - DNA, 536 bp, Homo sapiens
tgtcctctcagagggcagatcctcatgctcttggtgactttcctttgaattctggacacttttattatacctgtagggcaactggtaggtaaaatttacagactgggagtaatctacatttttgctttgtgtatcattgatcttttcttctttttttctttacctcttccttttctgtttttgagttaggaaatgctagagatgaaaccccaaactatctcttgacaagaagttttcaaacagcaatgcaatasgagagcaagattctaggccaagaaacatgataaaatttaaattcactataagcgtgctgcaaactgacttccttctcagcccttctcacttagaaaacctccatgaagcctttgaggtgagccttgcttcaggctgcccctgttcccaccctcacctgtttaagtccctctatctgatgctgaggcccatctaagtctactattagtatatcatcgtccttctcttgcttcatggctggggatttacgtctcacattttccttcaatgttgtgtttttaatg

SEQ ID NO: 509876 - DNA, 536 bp, Homo sapiens
tgtcctctcagagggcagatcctcatgctcttggtgactttcctttgaattctggacacttttattatacctgtagggcaactggtaggtaaaatttacagactgggagtaatctacatttttgctttgtgtatcattgatcttttcttctttttttctttacctcttccttttctgtttttgagttaggaaatgctagagatgaaaccccaaactatctcttgacaagaagttttcaaacagcaatgcaataggagagcaagattctaggccaagaaacatgataaaatttaaattcactataagcgtgctgcaaactgacttccttctcagcccttctcacttagaaaacctccatgaagcctttgargtgagccttgcttcaggctgcccctgttcccaccctcacctgtttaagtccctctatctgatgctgaggcccatctaagtctactattagtatatcatcgtccttctcttgcttcatggctggggatttacgtctcacattttccttcaatgttgtgtttttaatg

SEQ ID NO: 509877 - DNA, 591 bp, Homo sapiens
tgtctcaagcaggtcctcttaaacttaatggaaaagttaattcctgtgttgttcaaactattcttttggttaatgggagcaaaggaagcatatctctccctccgtttatttcttaaaacaactgaaaaccaaaagaaaaatcaatgtasaaagaaaaaaactccactaattttgttaaaagtaaacaccattaaaaattctaaaccaaactttgaagactagttgttagtgacataacaatttaacctctcttcaaaatgcggtgagagtagatgcagacacctgagcaaatatggcaagtgaaacacatacagagacttattttcccacctgaaactataacatgatggcaaatggcttattgaagtgatataaaaggaaaacagcaacatttttgaaaataggaagtccatgaatggctggtaactgacttagcttaccaaaaagtacaaaattgtaagcagcggggaaatctgattctgcaaaatgttcataaattggttgcatgggatacctctgaaagtagaagtaaaggtagggctaaaacccaggaagactggttggaagactgttcccaatgcccactccatc

SEQ ID NO: 509878 - DNA, 591 bp, Homo sapiens
tgtctcaagcaggtcctcttaaacttaatggaaaagttaattcctgtgttgttcaaactattcttttggttaatgggagcaaaggaagcatatctctccctccgtttatttcttaaaacaactgaaaaccaaaagaaaaatcaatgtacaaagaaaaaaactccactaattttgttaaaagtaaacaccattaaaaattctaaaccaaactttgaagactagttgttagtgacataacaatttaacctctcttcaaaatgcggtgagagtagatgcagacacctgagcaaatatggcaagtgaaacacatacagagacttattttcccacctgaaactataacatgatggcaaatggcttattgaagtgatataaaaggaaaacagcaacatttttgaaaataggaartccatgaatggctggtaactgacttagcttaccaaaaagtacaaaattgtaagcagcggggaaatctgattctgcaaaatgttcataaattggttgcatgggatacctctgaaagtagaagtaaaggtagggctaaaacccaggaagactggttggaagactgttcccaatgcccactccatc

SEQ ID NO: 509879 - DNA, 511 bp, Homo sapiens
accggagcttatattgctgattcacataattatgagctaaatacatggatgatattttcaaacaccgcttttgagggtggtttgttatgtagcaatagctaattgataaagtacagaatataattctatctagccccagtttagcaaataatacagtaaggaaggtgggtagcataaaaacaccaygtttcttatgtttgaaaaatgaagggattttgacaggaagtagagaatgaacatggcataaaaaactccactctgaatacttcacatttgtgtttgggagtgctaatgaagtaaacagagacccaggtagaacataccaggaggacagtaatcacagtctttaagagaaaaaggcaataagaaacccattcttaaggatcctgtatttcctaaaatcttgtatttagccatgttagagaaatagtacttatgacctggtagctgtaaccgcctaaaagaattttattgaatgtgcttctgtgaatggcatctcaggatccatggt

SEQ ID NO: 509880 - DNA, 545 bp, Homo sapiens
acccgcctcaaactcccaaagggctgggattacaggtgtgagccacaatgccccgctgggtgcaaaatttaaggagacactctcaaggttgtgcaagtgcagctctgcatttgcataccctgagagtgagcatccatttttttgtgccctgtgttccctatttgttacaccataatcctggccctattcacatactcagtgtgtgaaaggaaatagggggcagattgtggggacctacaatctcaggctgtgggtttctgattttattggaaaaatcatgaattcaaagtactttatgacaaaggtggttaaacactgatttgcattaactatttgtggtgagagacaggactagctggatttcctaggctgactaagaatccctaagcctagctgggaaggtgaccgcttccacmtttaaacacagggcttgcaacttagctcacaccggaccaatcaggtagtaaagagggctcactaaaatgctaattagtcaaaaacaggaggtaaagaaataaccaatcatctattgcctgagagcacag

SEQ ID NO: 509881 - DNA, 543 bp, Homo sapiens
gaattggctggggttcattttcaaacgcacattcatcaacccaactcagacctgctgcatcagagtttttgaagttgaaggctagactctacatttttaacaagcatttttgtgacttttatacgactaaatttccagaacactggcttttgtgggaagcgagtgtttggagagggtagggaattgctgccagagctgaacattaccctatagctggtgttattttaccatrctttttttttttttttttttttggatggagtctcgttctgtcacccaggctggagtgcagtggcgtgatctcagctcactgcaaccactgcctcctgggttcaagcgattctcctgcctcagcctcccaagtagctgggactactggcacgtgccaccacgcccggctacttttttgtatttttagtagagatgggctttcaccgtgttagccaggatggtctcaatctcctaaccccatgatctgcccacctctgcctcccaaagtgctgagattacaggtgtgagccatcgcacccggcctccatgagt

SEQ ID NO: 509882 - DNA, 543 bp, Homo sapiens
gaattggctggggttcattttcaaacgcacattcatcaacccaactcagacctgctgcatcagagtttttgaagttgaaggctagactctacatttttaacaagcatttttgtgacttttatacgactaaatttccagaacactggcttttgtgggaagcgagtgtttggagagggtagggaattgctgccagagctgaacattaccctatagctggtgttattttaccatactttttttttttttttttttttggatggagtctcgttctgtcacccaggctggagtgcagtggcgtgatctcagctcactgcaaccmctgcctcctgggttcaagcgattctcctgcctcagcctcccaagtagctgggactactggcacgtgccaccacgcccggctacttttttgtatttttagtagagatgggctttcaccgtgttagccaggatggtctcaatctcctaaccccatgatctgcccacctctgcctcccaaagtgctgagattacaggtgtgagccatcgcacccggcctccatgagt

SEQ ID NO: 509883 - DNA, 592 bp, Homo sapiens
  misc_feature (1)...(592): n = A,T,C or G
gtaactacaactgtatattacattgacttctattaaagctatctttaaagttgtcttctcttatctcctaggttttgtgttctgagatgatgaaaagtcaggattcatttagatcccagcatgctacaagagtttacattaggccttaatgwttgacatggaatgaattcagtaatattcatataagagggaagtgcctttctccttccctgagtgaggagactgagagtgtgggggtgtggaggggagcacagcacaactgcaaaccaaacccaattccttgtttgtttcagtcatgagggacttagagaaatgaatggcgtacattttaaagaccatttcacgttgattgtgttcacattgattattctaaggccaaaatgtattgaaggggttagtagagtcagaaagacctggacttgaatatcagctctagcatgtactagctgggacacctcaagcttggtttacattttgaaaaagtaggaccaataatactaccctttcttccccaactcttcattaaaaaaaaaaattaaagcctgtagancagtagaagttgcnnnnnnnnnnnnnnnnnnnnnnnnnnnnn

SEQ ID NO: 509884 - DNA, 615 bp, Homo sapiens
caacttacagcacactaaatcagaaaggttggcctgtaaaaccatttatgtaattcctctgcttttgttttggggaatcttccaaaagacgtgtctagagaatcagatataatttgagcagagtatgctaacgtggcttcaacaatgattttacttttctcgtaattttgtactcaacaatcattttttccagtgatgtgtcatgctgtcccagttgactgtctggccatattttgccctggtgtttgctatagcaaaaagtgcagctataaaattatcttcttcagcttgatgttaatttcratgaaatcttccaagatgtatcttttttcacctctaaatctatgtgataacaaaagatcaaacagttctcgatcatattttgaatgggaaatattggtatcataaaataattcaagagccttattttagctacttatttctttctagttagtcatcataacaaataaccagcgaatgtactttttttctccccttcctctccataaaaagtatgtcacttgcacaacttcaagttaggaaatgggaagggtcagggaaatctcacacaatcctacccagtttgatcacacattacctccaacagctagcctt

SEQ ID NO: 509885 - DNA, 507 bp, Homo sapiens
tgcttgtgcatctctctcaagctccactttccactgaattggaaaagatttgaatttttggttgataatctgccacacccttgctttgcctcatctttccaggcactctctttgttaaaggagatccagattaatcagtgctttagttggtgcaggtatttagatttgtgttaaagctccaaatgcaatccaaaaagcaaaatgacatgtttatgtgtcctggttaacatcagtgaagtcagggaagtatgggaagaaatgtgtggctagataacaatgaggacagcagttcctggatggcataataggattcagaagtgtatgcatttcacctagttcagaccctgtattaagaaatgctttgaccccgtattaggaaatgctttgacaggaggtagaaaaataggatctgggacacagaawgcaaaggatcctagtgcaaaacctccatattcgaggtagtgaagaatcgtaaatcagaatatctggagaatgaattctctaggt

SEQ ID NO: 509886 - DNA, 598 bp, Homo sapiens
tggggtttcttatatatgccctcataacttcagagacggcacagctctaatgaacactcacttctagttcactcacaggcattttctggatacaaacaagtcctcaaaaagaattttggtcgtcttacaaatttgtgaacattgtatttaattcatgtgttttaatccaccaatggagaaacatagtctgttttatatttcctgtagattataaacatgccaagttttaagtacaaagatgcgtcacctagtggctgacaagccaggttaccrtttacataacgaatgccaatattaatgttatgtagctggctttggtagtttataatgagctttaaaaaattcatatgcgtgaattttaaatgttaacactgctctcctaaggaaattagtatgttacggataaatattgcaaacacatatactgacacgaaaacacaatggtaacaatattcagagtctttttggaaattagcttaaatgttacggccacttaaaaattctacatatgactattgtttaaatacatttttcatgtctctgatgtagtccttatttgacataagtattttattcactgcttaattgttagatagat

SEQ ID NO: 509887 - DNA, 598 bp, Homo sapiens
tggggtttcttatatatgccctcataacttcagagacggcacagctctaatgaacactcacttctagttcactcacaggcattttctggatacaaacaagtcctcaaaaagaattttggtcgtcttacaaatttgtgaacattgtatttaattcatgtgttttaatccaccaatggagaaacatagtctgttttatatttcctgtagattataaacatgccaagttttaagtacaaagatgcgtcacctagtggctgacaagccaggttaccatttacataacgaatgccaatattaatgttatgtagctggctttggtagtttataatgagctttaaaaaattcatatgcgtgaattttaaatgttaacactgctctcctaaggaaattagtatgttacggataaatattgcaaacacatatactgacacgaaaacacaatggtaacaatattcagagtctttttggaaattagcttaaatgttacggccacttaaaaattctacatatgactattgtttaaatacatttttcatgtctctgatgtagtccttatttgacataagtattttattyactgcttaattgttagatagat

SEQ ID NO: 509888 - DNA, 635 bp, Homo sapiens
acttttcatgcaacagcaacaagagtaaatatttttaccgtgagtggactaaaaatgttcacattaaaacacaatgattgtcagactaggtaaaaaacaaaatctaactatgaactacttacaagagaaacatccataataaaagatacagaaatattgaaatttggaagatgaaaaaatgtatatgataaaaaactgtaggtaaaagaaagctatgcagtttgacatctctctttgtaagacagattttcgtaaatggtgatgagcacatctagaggttggtgtgaaagtacaatggaacatcatatgtggttagaatttttgtgcattttaaataaaaataaatrtcattggtatgatccctcttttctcccatccttaatttagatgtcttctattttagccatgtgagaatagctttcatgtctaatcttgtttcttaattgtgtgttttcttcttccttggagatgttctcttcatttaataattattgggtattttctccaaagacatttactactaaatgcccattgaacagtaataaaagtcctctttttcttgaactatgaaggcaaaaatatcatttcttacaaccagaaaaaaatgcatctcatgcatctctactgaataatag

SEQ ID NO: 509889 - DNA, 340 bp, Homo sapiens
caacttactgttaactcactrattgtcagttcagtgttgctaggtattgcaactttttctagagaagttggaaatctggattttatgtaaaatatcccaatgataaaataatcttttataactttgcaaaacagttcaaataagtctttggggtttgtgtgagataatggccctttttgatacagcaacaatattgtatattggaaaacacataggttttggaaagagacagaccagggtttgaattctggttcagatagcttcttgtatggctggacaatttcttctgaaactttgtgtcttaagtaatgaagatgctattttgttttttaatgtcaat

SEQ ID NO: 509890 - DNA, 585 bp, Homo sapiens
agttaaatctccatttaagccaaagcrtgctaaattcgtattacactaataggttatttgagatggcctaattttgtaatttataaataactttaaactttattattcttcaaattgatctccgcccaccaaacattccttttcatttttagagttatgaattttctagtggagaacaaagagtgactaatgactaatccgagtttgtatgctgttgttaacatactgaaagtttttttctcctacttattattttatcttgttcaaacataacttgattctcttttggaatcatgaaatagagttggaaggcttctttaagggtcaaacatcccagaatatcctttgaggaaaggagtggcacatcattcccatgttacacaaacagtagactttgcctaggcctatgtcctcaagatcatcacaatttgggtccatttttgccttttcagtcaccggtaaagaaggagaacagctagcttctctcctttgtatattcatcttttatatacttagagatcaggcccatctctcagtgtttaacgaagactaaacatgaaaaggttctttggaacttactcatca

SEQ ID NO: 509891 - DNA, 585 bp, Homo sapiens
agttaaatctccatttaagccaaagcatgctaaattcgtattacactaataggttatttgagatggcctaattttgtaatttataaataactttaaactttattattcttcaaattgatctccgcccaccaaacattccttttcatttttagagttatgaattttctagtggagaacaaagagtgactaatgactaatccgagtttgtatgctgttgttaacatactgaaagtttttttctcctacttattattttatcttgttcaaacataacttgattctcttttggaatcatgaaatagagttggaaggcttctttaagggtcaaacatcccagaatatcctttgaggaaaggagtggcacatcatycccatgttacacaaacagtagactttgcctaggcctatgtcctcaagatcatcacaatttgggtccatttttgccttttcagtcaccggtaaagaaggagaacagctagcttctctcctttgtatattcatcttttatatacttagagatcaggcccatctctcagtgtttaacgaagactaaacatgaaaaggttctttggaacttactcatca

SEQ ID NO: 509892 - DNA, 604 bp, Homo sapiens
agcaactccaccaagcctttgtgctctatttaagcctatccgaggcagaaaagcaagcccaagttcatcatatatacagagcattgcctctcaccctgcccactttgtgtggctaagtagcaacctgagataccttacctagcctcagatcccagcacatgactctgcccaactatagattccaaataacagtgtctcctaaccagggaggacaacctgcagcccttcttggtcacagaataccacagagcctagctagcaactctgcctgacagcagaatttagccagaggtctcaccagagcatggagcatagacaaccgtatcattagacctcagagaacaggaagtgacccagctcaaccagaaaatctgacaccaacatctttctgccttgtgktgctaccagccaactcatctagaattttcagcctagactaaatagtaaagaactattaccaccaaagagtgtccacaaaggctgaaagaaggatttgtctcatcaaatatacaggcatcaacataaggacacaagaattattaaaaaatcaggaaaatgtggcaccacaaaagaaaccataaaggtccaataatgtacctagaag

SEQ ID NO: 509893 - DNA, 496 bp, Homo sapiens
tgcccaaatacaaacttggcttggtttttcctatattatacttacacactgccttgaatatttgatggaaggggggttggtaacagtgataacactttttataaagtggtgacttccaatttgtttcactaaattataagctccttaaggacagggtctgagtctgcatttgtttacaactatagaaccggtacctgatttagctatgataaaaatgcttggaagttatttatttcgtcygtgccattgcttctgctgctccggcagggtggaattttatatccctcttttccatctatacctccccacctgccccaaaataaatttctatccttcaagattcagatcaaaggtatttcctcagtgaattctgttattgtgaatgccccaacaagttcagaattaatcagtcacaaaatacgttttcctctgtttagcagtaataatgtccatccctcacccaaggcaatgataatcttccctaatgcaaatgtct

SEQ ID NO: 509894 - DNA, 496 bp, Homo sapiens
tgcccaaatacaaacttggcttggtttttcctatattatacttacacactgccttgaatatttgatggaaggggggttggtaacagtgataacactttttataaagtggtgacttccaatttgtttcactaaattataagctccttaaggacagggtctgagtctgcatttgtttacaactatagaaccggtacctgatttagctatgataaaaatgcttggaagttatttatttcgtccgtgcyattgcttctgctgctccggcagggtggaattttatatccctcttttccatctatacctccccacctgccccaaaataaatttctatccttcaagattcagatcaaaggtatttcctcagtgaattctgttattgtgaatgccccaacaagttcagaattaatcagtcacaaaatacgttttcctctgtttagcagtaataatgtccatccctcacccaaggcaatgataatcttccctaatgcaaatgtct

SEQ ID NO: 509895 - DNA, 496 bp, Homo sapiens
tgcccaaatacaaacttggcttggtttttcctatattatacttacacactgccttgaatatttgatggaaggggggttggtaacagtgataacactttttataaagtggtgacttccaatttgtttcactaaattataagctccttaaggacagggtctgagtctgcatttgtttacaactatagaaccggtacctgatttagctatgataaaaatgcttggaagttatttatttcgtccgtgccattgcttctgctgctccggcagggtggaattttatatccctcttttccatctatacctccccacctgccccaaaataaatttctatccttcaagattcagatcaaaggtatttcctcagtgaattctgttattgtgaatgccccaacaagttcagaattaatcagtcacaaaatacgttttcctctgtttagcagtaataatgtccatccctcacccaaggcaatgatratcttccctaatgcaaatgtct

SEQ ID NO: 509896 - DNA, 628 bp, Homo sapiens
gacctacaccaggtaaatagcttcgcaaatcatgtcagtactgggaaggatactcagaggttatcttgcctatctttctgctttccagcaaggtcatacttaaatcatcccaacaactcagacatcccgttattaaagcttgtcagaatatgtcttagccctccttgtttgattatataatatttaataattctcagtatattcttcttttttattcattcattcatccactacctttagttcaattctgcattataaaattaatttcctgctttgatttttctgcaggagaatacacctattctctacaagcggtttttctttactcttggattcttcaacaggatgaatgaaattagaattgatttttttwaaaaaagaaggcatacataacattccctttgttccaaatacttctttttgtaatatttctcacatccctctgccaggaaagttgccatatctgtcacaccttctctctttatttcctttctaatgaactagatgtgatagtctgtcattccaactattttcactccaataacctcaactctttccctattttgcttgccccatgtatacagggtgaaactccagtgctcaacttacctggcttcactttcttcag

SEQ ID NO: 509897 - DNA, 577 bp, Homo sapiens
tgggactacaagtgtacatcaacatgcctggacattttttattattatttttcatttttatcagagaggaggtctcactttgttgcccaggctaatcttgaactcctgacttcaagggatcctcctaccttcatccctcaaagtgctggggttacaggcgtgaaccactgcacctggctcagggtaagtctttttcatataatagcaactcataycatatgatacaaatatctataagaaagtatctgaaatatttgctaactacagtacatattcaaaaagcttagtgtggtttttttttaattgtgtccttttataagatctactactgattcattttattgttgttgatctcaacctaaataacgtgggaaagtgattaatactattattccaggaagttgcttttaactgcatgagaattgtctatacaacaggcatctttaaatatcttataaaaccgagagaaagagtaaaatagtattctctgtgattttcgattgaactcttaaatttaaatctataaaccatttctcattattatagtttattttcaattacatcttcctttggtctt

SEQ ID NO: 509898 - DNA, 612 bp, Homo sapiens
tttatggagccacagccttagctgtcctcattccccagcctttaggttgctcctggttgaacctgtccagttcactaggtcttccggtccaggaactgcttctgtcactatctgggaccacctttctggggcctgttctatgttgaccgatgcatggacaaattcattttcaccaccaagttgacaccttattakaaaattgatggaaaatataaaccaaacacaaaagataaagaagcacattaagtggtgaggtaaaaatggcacaaacttctaattgtgccccagtccaccttcttgaggaagaagataattgcctatctggactgcatattcatcttctgaatatcagaacaccctaaactgcttggcattgtccatttaatcactcctagaagtcattctgacattgggtccctgggcagcgtgatgtaaagtaagacctggtttttctgtctaatttcctgattatgtggagaaacaaacacacttggaaatcagaccgaactgattgcagccctagatccatgactgccggttgtgtggcatgaataagtgaattaacagatctatgcctcagttaacttatgtgtactatgggaaaacaatagt

SEQ ID NO: 509899 - DNA, 585 bp, Homo sapiens
ataatataataaaattaaaaaaaaagaagaaaaaaagcgatttaccttggaggacgctaaatgtctccacttctgagatatttgaggttgctgtgaagggtcattgacaaataagtttgactagattatatggttaggtcttaaagagaggttgtgaaatctcagatgtaatctggagtagaaacatcaaattgcctactacacattatggtatgaaattatctaaattattaaaaattattaaatgtataaattctattgtttaaaactatgttatgggaaaaagagtgttagaaagttatcacaactkacggtagaagagattaggaatggggaagatttagccatataataatattttatttaaaagagaactttgaatcaaaaaaagcaaaatgttaaaaattgttaaatctgagagaggaacccatatatgtgtctcttacacattatgttttacacttttctatagtttaaaacattccagagttaaaaaaattacaaagaaagcaaattgaaaaacatctgaaatttattgaaacaatatgtttcagaagttgatggttactgaaacgcaactgctca

SEQ ID NO: 509900 - DNA, 546 bp, Homo sapiens
tgcaagaccactactaaaagtctcactttygctgttcttcctgcctctgagtccattctctgagtttggatagagcatgtttctcacagtcctcatgctgaactaggcccagagatactggatttgggagacatgcaacacactgagacaccagccaagggagtgctggcatcacccttcccctaaccccaggctgcatagctcacagctccaaaagagaccccttccttccacttaaggagaagagagggaagagtggagaggatttgtctggcatctaggataccagctcagccacagccagatagggcactggtcagagtcatgcagcctctgtttcaggtgctagctcccagatgacgtttctagacacaccctggaccagaagagaacttgccaccttgaaaaaaaggacctagtcctgccagcatttattgtctgcaaactgaagagcccttgggccctgaataaccagtagtgatacccaagtactgcattaagggccttggtgagcctcagagacttgttggcttcaggtgagactca

SEQ ID NO: 509901 - DNA, 516 bp, Homo sapiens
gcatagcattttagttttaacttgtatttctcttatgactaaatgttgagcaactttttgtttgtcttctattataatgtgccttctcaggtctttcctcatttttctattagcttctatgcattttatcattgttttgttttatatagtctagatataagacttttgtcacatatacgtatattgcaaatgttttccacaccttgtgtctttctttctcattctcttaaagctgtatttgaatgaatgtatgctcttaatcttaatttgtcctattcatctaattttttggctaccaagttttgtatgtcctattgacgaaagcctatctcaaatcatcaaaaaattcaaagtttttttttttgcttctttctaaaagtgttgttgtttatattttatatttaaattgtctatgttttatagttagmtctatcacaacttaatatttgtgtatgggatggggtatctaatttgtcaatactgtttgctgagaagaatctccctgcccccactgtg

SEQ ID NO: 509902 - DNA, 563 bp, Homo sapiens
tctaatatgcaatagaaattagtaattgrgtgacattttcactgacatgaaacagtaaatgaagggctatcaacataatcaagatcttgcaaatgtgataagaaaatgatttagggcaaaagaagctaatcagaagaaatagagatctcattctttctctctctctccctatcaattttattgagatacaattcattcacattaagtaggctgataacttttgacaaatgtatacaccatgtaaccaccgccctaattgagatagagagcagttccacctccccagagagctccttcatgcctcctttcagtttccccttttccacccaaccctaaataattattgattattatagattaattttcctctattaatcagtatagattagtttccctgtcctagaatttcatataaatataattagagagcctggattctttgtgtccagtttctttccctcagcacaaactctaagagatttgcccattgagtggcatatatcagtatttcagtcttgtttattctagtacatgaaaatatcaaagggatttattctttcaac

SEQ ID NO: 509903 - DNA, 563 bp, Homo sapiens
tctaatatgcaatagaaattagtaattgggtgacattttcactgacatgaaacagtaaatgaagggctatcaacataatcaagatcttgcaaatgtgataagaaaatgatttagggcaaaagaagctaatcagaagaaatagagatctcattctttctctctctctccctatcaattttattgagatacaattcattcacattaagtaggctgataacttttgacaaatgtatacaccatgtaaccaccgccctaattgagatagagagcagttccacctccccagagagctccttcatgcctcctttcagtttccccttttccacccaaccctaaataattattgattattatagattaattttcctctattaatcagtatagattagtttccctgtcctagaatttcatataaatayaattagagagcctggattctttgtgtccagtttctttccctcagcacaaactctaagagatttgcccattgagtggcatatatcagtatttcagtcttgtttattctagtacatgaaaatatcaaagggatttattctttcaac

SEQ ID NO: 509904 - DNA, 598 bp, Homo sapiens
aatacaatgcattatacccataagatggaatattatctggcaataaataggaataaagttctgatacatgcagcaacatggatgaaccttgaaaacattayggtaagtaaaagaagccagtcataaaagaccacatattgtaccattccatttatataaaatgcccaaaataagcaaatctatagagacagaaaataaattagtggttggtaattgcctagggctggcaagaaaggaggaaaggaggagctggggggtgggggcaggatgacaatgacaacaacaggtagaacgaggagtgactgctaatgggtataaggttcctttttagggtaaggaaaatgttctaaaattagatgtggtgatggttatgcaattctgtgaatattagagggaagaggagggaagaatggaagactttccatgtatctactttatgaaaaagttttcataaacttttacctcctctctcaactttctgatgagctctgtgtcattgtgatgggttttgatgagttcagctttgccacttgcaacaagggatgcactttcaattagatcaggccgtaaagtaccttgggcaaggaaaacctcctct

SEQ ID NO: 509905 - DNA, 612 bp, Homo sapiens
aatacaatgcattatacccataagatggaatattatctggcaataaataggaataaagttctgatacatgcagcaacatggatgaaccttgaaaacattacrgtaagtaaaagaagccagtcataaaagaccacatattgtaccattccatttatataaaatgcccaaaataagcaaatctatagagacagaaaataaattagtggttggtaattgcctagggctggcaagaaaggaggaaaggaggagctggggggtgggggcaggatgacaatgacaacaacaggtagaacgaggagtgactgctaatgggtataaggttcctttttagggtaaggaaaatgttctaaaattagatgtggtgatggttatgcaattctgtgaatattagagggaagaggagggaagaatggaagactttccatgtatctactttatgaaaaagttttcataaacttttacctcctctctcaactttctgatgagctctgtgtcattgtgatgggttttgatgagttcagctttgccacttgcaacaagggatgcactttcaattagatcaggccgtaaagtaccttgggcaaggaaaacctcctctggtttcaagttcat

SEQ ID NO: 509906 - DNA, 597 bp, Homo sapiens
catgacatcacaaattatgctgattagggccggcacggtggctcacacctgtaataccagcactttgggaggccaagttgggtggatcacttgaggtcagcagtgtgagaccagcctggccaaaatggcaaaaccacatctctactaaaaacacaaaaattagyggggcgtagtggcacatgtctgcaatcccagctactcagaggctgaggcaagagaattgcttaaacctgggaggcagaggttgcagtgagccgaggttgtgccactgcattctgccctgggcaacagaacaagactctgtctcaaaaaaaaaaaaaaaatttatgctgattgttttccctctcttcagtgcttcaccagagcaacaagcagaagccacagcaagaagcttagccccaaagaagtcaaaagcaccggctcctaaacggagtcaaagctgttggaatcacaccctagtgtcttgtaaaactaatatttatgaacatacatttaacaatccttggctttttatttaatgacaagaaactaaaaactaagatctctatttgctaataaaacttagctactggaggccttcaccgtaagatgacaagg

SEQ ID NO: 509907 - DNA, 401 bp, Homo sapiens
ctgatcaaggcaaaaaacaccaggtgaatgtcggtgcaaaaggccatgggcgtttaatcccatgtgtccactccaagactaggcctgagactacgagctgtatgttttcacctcactcccccagacatgtttgatccttgtggctctccaaggaccctggtgaaagttaggcttccttccaggaacaataacacattctgtccagacttgtcttcaccttcaagcwaaagaaaacacctgagctcctaaagactctggatccatattattaacgaaggctaagaatatttaaaggctgttatacggtttccaggaaaagctcaagccccaaatctactgcagatagacactgctgagtgcttctgagaaactggggcattacagccatcccagtgcaccta

SEQ ID NO: 509908 - DNA, 401 bp, Homo sapiens
ctgatcaaggcaaaaaacaccaggtgaatgtcggtgcaaaaggccatgggcgtttaatcccatgtgtccactccaagactaggcctgagactacgagctgtatgttttcacctcactcccccagacatgtttgatccttgtggctctccaaggaccctggtgaaagttaggcttccttccaggaacaataacacattctgtccagacttgtcttcaccttcaagcaaaagaaaacacctgagctcctaaagactctggatccatattattaacgaaggctaagaatatttaaaggctgttatacggtttccaggaaaagctcaagccccaaatctactgcagataracactgctgagtgcttctgagaaactggggcattacagccatcccagtgcaccta

SEQ ID NO: 509909 - DNA, 370 bp, Homo sapiens
gaaagagattcctagttaataaaaataaatgactctcataagatagaatatttgatcayccatttgattagctggaattttaaatatctttaacgtaacgttatctaatttatgtaaatttttaaattattgcttaataatcatgtaaatactaagcagaataacgttgaatgtttacttggtgccagaaaatgttcctagcattatggaaaaggttaatttttcaaaaaacttttaacaacctatgagataagtgcaacgaatgtccccattttacatatttgaaagctgagtcatgtttaggttatataactttctccaaatcccacaggtaatatgaagttgggccctgatttgtaccaggcagtca

SEQ ID NO: 509910 - DNA, 261 bp, Homo sapiens
ttttgaaaaaagtcttattctccaatatgtaaatgaccgtcaggatgcctgtttagggagcagaaattgaattaaggcaggtttcaatcttagtagagatgacaggagttaaaaagagaaaatgaaataatggaaagtgtattgtggatacacagtaggsaggagaggtgacagttgcacaaaaacaaaggtgtatacttcctagctctgtcacaaaattcaactgtcgttgtgttttaggtaacttaaccagagcttgat

SEQ ID NO: 509911 - DNA, 548 bp, Homo sapiens
gagagtgtggtctcagctggagacgctcttaactctgattgcatggagacactcaggascacaaattgcaccacggggttagtccatcacggggttagtccatccaaaagcaaggaggcagcctttggtacccctgtgccagtcaatattcattaaagggcagttttttcaaggaagtcggagctagctgctggacactaacagtcaaatctcaaaggagctgggagagaaatgcacaagcaggtaagggggttctggttaggggacctacaccatccactatgcgtttatattttagtgcacctacagtctatagttgggtaccgaataccatcagttgagttgctttgaattcacactcgtgtattccccaggcttaattaagagcacgtggtgaatgggaggtggtaatgactcagtataagattacctagaggctgaatacctagtgggccagaaagctgttttgtgaaaagataaaggttagattttgcctttggtcagttatttggaattatacccaacaccttacttttccaatcctttag

SEQ ID NO: 509912 - DNA, 565 bp, Homo sapiens
attagattgtgcccacccagattaaggatgggtctgcctttcccagcccactgattcaaatgttaatctcctttggtaacaccctcagagacacacccaagatcaatactttttatccttcgatccaattaagttgacactcagtattaaccaycacatactcataattttcaaaattttatgattgtttatattactttgttcagagtgaaatagatgtctcagaaaatgaccatgattttctgaggatttacgtgtttattggcagttgtctcgtaccctggttttagaagcactgacttataaaggaccacatgaccctccaacttaaagatagttccccaaaaggctgtcattttatcctccctcccgccttctctctgaaagagattataaatgaccaacaacactgaaaacaacactctacagaaaaatggttttcacccaatttatctaacaactcagtgccatacagtgtaaggagtgtggtctttgaagacagaaagatatgcattttaattccatctctagcacttccgtgaaagaccttgggggaaatctttta

SEQ ID NO: 509913 - DNA, 462 bp, Homo sapiens
ctgtgtcttctattacaaaagacaatgcactcatacatatgtattatgcacttaattaaaactgttggattttcatttttaaaagttctgatgatgtcctgaatttttatagtgatttggatctctggcctgtcatcagtttgcatattttgggtggaaaagtagggtttgggtgaaataagcattccaaagtttatataacgggaggaacatggcctaaaattagccttaccrtgggcttaaaattcattataggtattaattcctcgtacttctcaaggggttattttctcccttaatttttaaaattctaagtgacatgtatttgttttagaaatatgtagaaaaatataaacaggaaaattaaaattatctataatcttattctgctgagttgaacattacaactcatatatttcttttctataattttattgcataaaatctatatattttatagaa

SEQ ID NO: 509914 - DNA, 577 bp, Homo sapiens
acctttcatttttggccattaggcaaagacagatcccagcatagggcgttttctttgggtctgatcttaatgaacctagggtggttgtgagggaagactcatttgtgtagctgcaagtgattactatctggctaagacagattgtcctcagagctcctggaattgaaaaccaaagataattacgttaaaccttactaaaatkatgctttatcatcccagcagtagactctctagaaacacccaagcagaggaagatgcctctggactgagtctttggtcagacatcatgttagtgccttaacaagcacagacaagcattgagccctccacacaccatctccccaaagatctccaattagccacacgaggtggattgtgtacaaaaagctccctttcttttgcattctttttaaaaggactcctgcccaatttatgtcacacgtcactttagttcctaattctgatgtctcccgacaccaacgccaaccctgtcctcccacatattctgatccttgtgaagcaaagattttttagaaattgtacaaccaagtcaagagtgcctgcagacgccctgtgg

SEQ ID NO: 509915 - DNA, 577 bp, Homo sapiens
ctgcgtaaccctctggcccccctccaacgtgcctcaaaatgttatttcacattttgggtccaaatggacactttctgagaagtcggtgtaacctatcaagctttggaaacaagtttaagttgtttttgtactttccattacccaggttgttctggaacgcagctctaagaggttcagcttgccaccacgtcaaggaatttgagaaaagggaaaaacaaagagggggaaagcctgcacaagaagaccgagggtctggaaatcagaacctggtgytttccaaaggtcctgttcagcctacactccccttttgcatttctgccatgctgttggggcaaactggcatgggaagtaggggcttttgtcctaaaggcatagcatcaaggtccccagagctacaaggctctccaattccttctccctggtcccgtatcatcagacaaacccaatagagtgattctctaacatgctgtgctcagaaaggtgaaagaacccaccaggcgtggtagggaggctgtgtccactgttcagcccagtcagtgtggcttctctccctgggctgggctccatcagctcatgc

SEQ ID NO: 509916 - DNA, 621 bp, Homo sapiens
cactggctacactgaagtgcccaatgggcacatgttgcaagtgggtaccatactgggcagactgagaatgtttccatcagggtggaaagtccttagatcccttaaataattagaaaaggtcccaactctcattctgctggtccaggctagagacacttagaagtgtcctgagtgacatgggtgctctctcgtctcacaaaaaagaagcacaagagttaagggctagaacagcataactagaacacctcccagagatgtggcctagagcaggtaactctcaaggctcagttcctgyctctgacagaggagccgaagatgagcatctaccacaatgaggtgtaaggattgagtaagttaatatgtttgtaaaacactcaaaacagtgcctggcacatagcaagctctctagaaggaagtgctaaataaatccccagttcaatggctgccagttggttgccagacactctgacatctttcatcccagaatggccttactggaagatgcaaaaaaaatctctcattgcgaacagctcccagccttctggctgccaaaattatacattgattcacctgagccttacctgatgcaaaacaccacaaccccacaccctgggggaaaaa

SEQ ID NO: 509917 - DNA, 425 bp, Homo sapiens
tgaaagcacaaccctgagcttcaggatactctttctgatgtcttgactagctccagtttgcctggaggtttaaaggaaaatgtacccagaaaacctgggctcttactccagtatctgtctaatacaggaggaggaagccttctcaaagccaaaagaacagaacaccaagaggggttccaaagattgggttcaaaaaagtcattgaatgttactttgagaaggaagcaagrtcacctagtcgtaagcctgtattttagaggagaaaactgggacccagagaggaattgacttgtccaacgccctattgtgtgttatggacagaagcaaaattaggaggatgggtgaaaaagaaggaagttccaaaagcccacagggtctgccttccattgccatagtcccaattgttgctcccctagtgagggcac

SEQ ID NO: 509918 - DNA, 425 bp, Homo sapiens
tgaaagcacaaccctgagcttcaggatactctttctgatgtcttgactagctccagtttgcctggaggtttaaaggaaaatgtacccagaaaacctgggctcttactccagtatctgtctaatacaggaggaggaagccttctcaaagccaaaagaacagaacaccaagaggggttccaaagattgggttcaaaaaagtcattgaatgttactttgagaaggaagcaaggtcacctagtcrtaagcctgtattttagaggagaaaactgggacccagagaggaattgacttgtccaacgccctattgtgtgttatggacagaagcaaaattaggaggatgggtgaaaaagaaggaagttccaaaagcccacagggtctgccttccattgccatagtcccaattgttgctcccctagtgagggcac

SEQ ID NO: 509919 - DNA, 359 bp, Homo sapiens
gaatggtgtctggcttcactttgttgaaagttacctatatcataatgcacgattagataaatacttgagttggtggctgcagaactgctctcacaaatgatacctagagtcacagtgataatgtacaaagctcatctcagatggggcaygacctctttgaaaatgctatccaatggtacaaatgcgtatgtgtgtgtttttcatatcaatatatttgcaagagggcaacatgataaagtgatgtcaatctctgcagcaacactagaacataaatgtgttaaaataattgtggtatgtcaggaattcaaaatgggatattttcatgaacagtaagtatcatgtcaagtctaaaaaacagg

SEQ ID NO: 509920 - DNA, 535 bp, Homo sapiens
  misc_feature (1)...(535): n = A,T,C or G
cgccagcccattccctgaacctcccctgccccctgtgtctttatgcccccacctcccgcatcattgcccctctctgtacttttgcacctgccattccttggggctgtggtttccttttatccttttccatcagaaaaactgtgttcttcccttaacacccataggcatctgtgaagccttctcattcttccccaggcagagcygctcatggtaactggctactactggcttctttgtctgggtcctacaaggtaaggattctctccagcaccagcagagaattccctcctggctcttatgccttggacnactagtaccccacctggcactagcaggttctcaggaaattcttttgaactttacatggttctgcagttgaaagacttgggttcaaatcttaactccactcctgagtcagttgtaactctggacaagtctcttcccctctctgagcctctacttctccaggtgttgaagagggttggctacttgtaaagagtttacttttacatctggaaatcttgtgtgatttcaa

SEQ ID NO: 509921 - DNA, 457 bp, Homo sapiens
caaggggcttggaataaagaggagggggaaagacttgttataatttcaaaagcctcagggctttgagggcttcagggggtttagacttactcagacctgagtttcccaaatttgtccgatggtaagaaacacctgactcacttgttaacaatgcatattcccagggtctgcggctggggttctgattcagcaggactggggtagagagaaatctgtgttctggaagtcatgcttacatatagttcttatgtacaatttggtggggaaactgaggcctcagaggaagtgattttcacgtgcatggtagatyagaacaatgaccccagttcttccttttctgtgataggattaggtacccacatcctttaccaagtaaatctgcagggcccactcactgtgggcagagtatacttctccatcccactgatgctgggcttggccgtgggacttgttttgg

SEQ ID NO: 509922 - DNA, 427 bp, Homo sapiens
accagtctcagtgcacaagtgcaggtatgaaacaaaagacacatttgtatgtcctttgatgcaattaaatccagckagcccccatcctaccgggctggtagaaaacttgacctttgtaattactggactcctcctcagacttgtgcaaaggtccaggggccttttgcagagccaccattggcccatatggatgcctgctctgggaggacctggatttgcaccaggacacatgccaagtggcatatgggctggaattcagcccctgcattcccactgggcaccctgggtgctgctctggaagctgcctgcctccacctcactccagtctgaggatatctccttctctccctcagtgccttccaaaggtgctcccctccctgcctaccttgcagagctctttttgcaagtttaggctctgaccaaaaga

SEQ ID NO: 509923 - DNA, 592 bp, Homo sapiens
attcaaaaaaaaaaagaaaatctaatacattttagcaagaacagcaaaagttttgtagcatttgatccacaacctgttcccttcccttgtttccttctccctgccactacagctctatattttagaaactctatctagtccaggcaggtggccaagaagatgggggttccctctctctctagttcccaggctaccctgaaagaaagaagcataccatttgcatttctcatcacctcccagccctgtgttgtgtaagttctattctgaacagcaaccaggaaaaatgaagctccttttatcccaccaagyctccactcctggggtaaaacactaccctgggcacagcaggctgagaacactggaaccctgaatgccccacctcaaactccctgtcgagagattccaaacctggggcaagctgagaaccaggggttacctactctctcccctgctcaaagagccagaggtgttattctgggagaagagggatgctggtccatgccatccaaattctgccctcctccccatttcagtggcataaaagttaaagttctccctggtggctgaggctgactatgaagaagaaactgca

SEQ ID NO: 509924 - DNA, 592 bp, Homo sapiens
attcaaaaaaaaaaagaaaatctaatacattttagcaagaacagcaaaagttttgtagcatttgatccacaacctgttcccttcccttgtttccttctccctgccactacagctctatattttagaaactctatctagtccaggcaggtggccaagaagatgggggttccctctctctctagttcccaggctaccctgaaagaaagaagcataccatttgcatttctcatcacctcccagccctgtgttgtgtaagttctattctgaacagcaaccaggaaaaatgaagctccttttatcccaccaagtctccactcctggggtaaaacactaccctgggcacagcaggctgagaacactggaaccctgaatgccccacctcaaactccctgtcgagagattccaaacctggggcaagctgagaaccaggggttacctactctctcccctgctcaaagagccagaggtgttattctgggagaagagggatgctgktccatgccatccaaattctgccctcctccccatttcagtggcataaaagttaaagttctccctggtggctgaggctgactatgaagaagaaactgca

SEQ ID NO: 509925 - DNA, 466 bp, Homo sapiens
agattcaacttatataacctgtgggtccttttccttaatttccaaaagtgggattatactatatacataattctacaacttgcattctttttctacttaaaatatatacaaacgagcttccctgcagatccgaagacatgggtccaactcatyctttatgctaaccacagtgttccacagcatgggcatgcaacttttccagccattctctttctggccaacatttgggttatttaaaattttgcaacaatgctgtagtaaacaacttgtttaaataaacattctgtatatttaagaatcaggtgatttatttctataggatatagttccaaagggtagatttctatgctaaaatatatttctgattttaatagaaaaatattttacatgggaggaaagcagcataatagaaggcaaagaaaaaaatgatagaataaaataataaatttgcatagcagactcacag

SEQ ID NO: 509926 - DNA, 552 bp, Homo sapiens
ctcctaagctaacataaacctcacgagggcagaggctgtgacctaatgtcacctagcaccattgatagttcaaggtcattattttagaaaaatctatacatacattttttgtttataaaaattacaggattataaaaccgaacataaacttaatacatgatctaattttgtgataccctcccagatcgctctcagatataatccagtctaaattacaccacacacagatgaatttatttggttaaaaaaaagcccttccgtgccatasccattccaagtaatacattacaatgttttacattgtttactgagggcaattctattttaagagtctctaacttaagcagaaaaggtaactatcgggaactgggcttaatacctgggtgatgggataatatctacaacaaaccccgtgacacgtgtttacttatgtaacaaaccttcacatgtatccccaaacctgaaataaaagtcgaaaaaaaaaaaaacctctagagctacaatttatgctcaatgccttccgcacggtcttccgcagaagtgaggagcagc

SEQ ID NO: 509927 - DNA, 645 bp, Homo sapiens
tcgttcctggtcagagcacacccctccctcaggggtacggagagactcaagcactagaagactgcccgtcagcgtcagccctgtgctagcacagaggaaataagagcgggtgaccatcccataagccagaccacccttgcatcagctttctccatgcgctggtgccaaacaagaggaggtttcatatgaggtcrggaaggcaaagagggtatgtggtagagactttcaagaagattttactaaattcttctgggaccttagccaaagcctgggttaaccttggttgcgtcactggtaaactaatcacacccttgctgaaatgggaaagcaagatgtggccttcgttaaattccgggaaactggtaagttttgtgagcagcatacattctcacagttgggaggcattttaaataacaattttgaatcctttcccctctattgttggtttttatgtgtagttcaaggtgcttggcagggtattaccaaaactgatcaatatcatcagtagcacatgtgtatgctataagccagcataatttatatatagcagggcacatataagtgcattatacttcatatattaattcaatccaaatgcacaaatatttattgcatgcttacgcaatgccaggcactgcactagct

SEQ ID NO: 509928 - DNA, 562 bp, Homo sapiens
gtgtggagaacatggctatttaattgtaaaaagttgtcctgaggaaaagcctgtattctcctcacccagtgactagaaaggatggtgtaccatcagtaggctgcagagagaaaaccactcttttgtgttttcctttctttctaccaggtgtaaatgtgtcaggaagtccaggatggggctcctaggttcagcattgttatgggttgaagtgtgtctcttccaaattcatgtgctaaagtctgctatagtttgagtgtatccttcagaattcatgtgttgtaaatttggcccctggtgtggtgttgggagatggggcctttttgaggtgattaggttgaaagatggattaataccactttcttgtgggactgggttaatgcttgtgggastgggttaatgcttgtgggagtgagtgtgttcttgcttttgaaggacaggattagttactgtgagagtgggttgttataaagtgaagctgcccctcatgttttgcccttcagggcatgtgcctgattcctgttctgcttctgtgccacatttctggtgaacacaaggccctcac

SEQ ID NO: 509929 - DNA, 584 bp, Homo sapiens
ctttttcttcccggtgcctgttctacctgttccatgtctcaatcacttcttttgcctcctcactgctcctactttctaccagttatttgctctccactctaagtctagacctatgaggcatctctctgtaaatatatccaatccatctatttttttttttttttgctatattctgaagtcttatgctacaattgcacataactggtttctctctgctatttctttctgcattcattgatgttactttgtgtatcatttcttgttcatctcaatttaaccattaactgtccctagtcattctctatcttctatctgttctgtgtggtcttttaaaggctatgtggctgccttcactgtaatatgatgctgcttactttgtataggttggcttttcraacttttctcttcttcagcattcactttactttctcttttctcttggtctgatctggttttttatgtttctgtgcttattctacattctggcctctcctctcacacccatttgtctctctgactcctttcaatgcctcttctatcctcagccaacatccccatcttgatgtgctgagcctgctctatat

SEQ ID NO: 509930 - DNA, 611 bp, Homo sapiens
tgcttattagtatagtatctctttccaaagctggtacccttctcttcaataatgtggtaaaaactgtgtgtaacccttaattccagctaggcctctgcttctacctgaattggtacaaaattaagacattatcttgtaagaactaaaattgtatttgaaatttttattttaggctgcaaaaacaaaaacaagcaaacaaacagcaaataacttgaaaataggcctgtcggataatgtaaattcttcctttccagggaagcagaaggtagactttaycacaaagaaaagatgcgtagttaatggagtttaaatttaaaagtatagttaaattgagggtaacttctgaaaatcctgttttattcacctcactgtggtaccagtaactatcctgagtcaggttactttaccgttaactgtcacctataacacaataatccattaaccatctaatgcagttattggatgtgttcatactggaaattcttaaccatatagttgtcctgccaattttattttaaaacaatgaattgtcttaatataagtcactgcatttctgtaacatattaaagaaggtcacaactaatccaagcggacttaaccctattcaacaa

SEQ ID NO: 509931 - DNA, 640 bp, Homo sapiens
  misc_feature (1)...(640): n = A,T,C or G
catggtggcacatgcctataggttgcagtgagccaaaatcattccagtgcactctagcctgggtgatggagtgagactctgtctttaaaaaaaaaaaaaaaaggtatcttttctttcttgataatgtactataacattcaaagaatcacaggttggaaggatgcaatattcttattctttacaagagacttttcctgccacttgtttttataatgactgtagccaaaaatagtaggatattatgtancttcaatgtatagaatgctaaatacatcttcagtacaaatcttttttcataaacctgcttttttttcacacaaatggtagctccatgactgcagcatttgcaagtgaacgataaagttccaaatggtggtttaacaacagtataacaggtccacataaatagatttggttaaggaagcaaaaagttgtatgtagtccaatacacatagtcaaaccattggggaaaaaattaaacaacattaaaaacttcaaataagctcttttttttgtttctggttgcaaccgatgtttacccggccctccacaattgtaaacacaaaacatgttttcacccaaaacaaaatgacccacaaaaaataattaagtyggcttccaagagaccatggccatccgt

SEQ ID NO: 509932 - DNA, 666 bp, Homo sapiens
agcgatctaaatcaggtttggaaatgaggcattagttcctcatacatctggctatagtaggccagaggggattgttcctatrtgaggtcctcagccatgcagttgcttacttaagagctattttctggattaatagcatgtgaagcagggtgggctttattctcaagacagcacagcaggagctacagttgggcttctaggacattttggtagaagaatctgaaagacagtccttggatgattacagaaaatctttagaggattctgtaacattggtaactgcccaagaaaaagagtgaggcaacccacagggacaacaaaaacaaggcagaaatgtggcctttgcagcttctaccacaatgatcccattgacatctttccccttaatagcttcttctttttatttagtgtcttgatgctgttttttgtttgtttttcttttcctgtttgtccacgtgcttcttcccaacttgtttccttggtaggacctttctttgtccttctctcccaaggccagatatgcattatttttcttcttttcctttctttcctggagtactcaccaaaatgcttggcatcaactgctaattctaagctattgattccaatatcaacaatcttgtcctctcaccagtcccaaatgcctgttggacagtccatccaagt

SEQ ID NO: 509933 - DNA, 564 bp, Homo sapiens
gaaacttcgagaccttcccgtccacacctgattgacagaaggaagctgtcgcggcccaggaggcgagtgtgggtgtgcagaggtggagacaaaacctaaaagcacgcagagccggcgagggcttgcggtcctggacggtaggggtctgcgtctggtgccaccttctccatcaggctgcttgctgggtccaccaagcctgacccctccagccaggaggggatcacggagtgtgtcccccgcccgggctgctgcctgccggaagggggctgggaaaccgggatccccgcgcgccacttgccyggcagcgtcagtttcacccaggactggctagcggttccctcgtggctctgcgcggaggtccgcctcctcccttccctcccccatcccgcgcgctgcctccgcctccttcttctgcctccaccctcaacccccatccccgcctgacgggagctagccctcagtccgcccgagctgtggttgtgggcgccggacaagtccaaggcgcctcctcccaatatggacagccgctacaacagcactgcgggcatcggggacttgaaccag

SEQ ID NO: 509934 - DNA, 501 bp, Homo sapiens
ttgtaaggtaccttcaattctcctccaacttcccaaaccccatgaagaaactagagcggccccggtctttgctctkttgcctcccccactgctcacatctctagactttccctaccagttctccatatttccatcacaaaagcccaaggactaatacctaaaactctccttaaggaagaggaagctgagtgggctgagaaagattcttctaagcagtgttggtggaagaggaaagcgggaagacgagacatctacatgtgcgtaaacttgctctttttatagacagataaaagctcatagatattttgcattctccttttgcaaagagttaaataatctcaacatggtctaccctaagagcaaaataactgcatactgggcattcatcagaacaggcaatgctgaatttgcagtttgtaatatttaataggaacccactgtgacaaaactagtaattatttcaactccaagtatctccacattcttcatttgggaaaaaaa

SEQ ID NO: 509935 - DNA, 501 bp, Homo sapiens
ttgtaaggtaccttcaattctcctccaacttcccaaaccccatgaagaaactagagcggccccggtctttgctctgwtgcctcccccactgctcacatctctagactttccctaccagttctccatatttccatcacaaaagcccaaggactaatacctaaaactctccttaaggaagaggaagctgagtgggctgagaaagattcttctaagcagtgttggtggaagaggaaagcgggaagacgagacatctacatgtgcgtaaacttgctctttttatagacagataaaagctcatagatattttgcattctccttttgcaaagagttaaataatctcaacatggtctaccctaagagcaaaataactgcatactgggcattcatcagaacaggcaatgctgaatttgcagtttgtaatatttaataggaacccactgtgacaaaactagtaattatttcaactccaagtatctccacattcttcatttgggaaaaaaa

SEQ ID NO: 509936 - DNA, 501 bp, Homo sapiens
ttgtaaggtaccttcaattctcctccaacttcccaaaccccatgaagaaactagagcggccccggtctttgctctgttgcctcccccactgctcacatctctagactttccctaccagttctccatatttccatcacaaaagcccaaggactaatacctaaaactctccttaaggaagaggaagctgagtgggctgagaargattcttctaagcagtgttggtggaagaggaaagcgggaagacgagacatctacatgtgcgtaaacttgctctttttatagacagataaaagctcatagatattttgcattctccttttgcaaagagttaaataatctcaacatggtctaccctaagagcaaaataactgcatactgggcattcatcagaacaggcaatgctgaatttgcagtttgtaatatttaataggaacccactgtgacaaaactagtaattatttcaactccaagtatctccacattcttcatttgggaaaaaaa

SEQ ID NO: 509937 - DNA, 602 bp, Homo sapiens
aatggactgcctgagcaagaagatagatggaatttacagagtgacatatctggtccatctgattattaaggatatcttctatactgaggacccctgataaacagttacatgaaacatgaataatctcacattatagatccatttaytcaacaaattttttttttttagatggagtcttgctctgtcaccaggctggagtacagtggcgcgatctcggctcactgcaacctccgactccctggttcaagtgattctcctgcctcagcctcccaagtagctgggattaccagcacatgccaccatatccagctaatttttgtatttttagtaaagacagggtttcaccctgttggccgggatggtctcgatctcccgacctcgtgatccacccatgtcggcctcccaaagtgctgggattacaggcgtgagtcaccgcgcccggcccaacaaattattctgtgtgtgtgtgtgtgtgtgtgtgtgtgtgtgtgtgtgtgtgtgtagacagggtttcactatgttgcccaggttggtctcctacccctgggcttaagacatcctcctgcttcagcctcccaaagtgctggtattataagcgtgag

SEQ ID NO: 509938 - DNA, 602 bp, Homo sapiens
aatggactgcctgagcaagaagatagatggaatttacagagtgacatatctggtccatctgattattaaggatatcttctatactgaggacccctgataaacagttacatgaaacatgaataatctcacattatagatccatttattcaacaaattttttttttttagatggagtcttgctctgtcaccaggctggagtacagtggcgcgatctcggctcactgcaacctccgactccctggttcaagtgattctcctgcctcagcctcccaagtagctgggattaccagcacatgccaccatatccagctaatttttgtatttttagtaaagacagggtttcaccctgttggccgggatggtctcgatctcccgacctcgtgatccacccaygtcggcctcccaaagtgctgggattacaggcgtgagtcaccgcgcccggcccaacaaattattctgtgtgtgtgtgtgtgtgtgtgtgtgtgtgtgtgtgtgtgtgtgtagacagggtttcactatgttgcccaggttggtctcctacccctgggcttaagacatcctcctgcttcagcctcccaaagtgctggtattataagcgtgag

SEQ ID NO: 509939 - DNA, 567 bp, Homo sapiens
gctgcctgccgtcccagctactcgggaggctgaggcaggagaatggcgtgaacctgggaggcggagctttcagtgagccgagattgcgccactgcwctccagcctgggcgacacagcaagattccatctcaaaaaaaaaaaaaacaaaaaaaaaacctgaatatgaagaattaatttacaaaaaggactatggtttttaaatattctaaagatgtagtctgtcaaatttccacatacaaaaatggaaaataagtatataattatatataatgtattataattatgtctatatatatgcaatatacatataaagttgaaaatatgagtgtgcacaggcacacatgaaagtctaaaaagaatcttttggtaacaatgccttggctggaagacttaattttggttaaataaaatacagcaatctaacctcgcccaataattgccacatgaaaattatttctgccaagtctatactgatatctatcttcctaaaatatagttgaatagacataactttctctggcttttattttaactattgtcatatttcttaaaccattcaggctcctg

SEQ ID NO: 509940 - DNA, 522 bp, Homo sapiens
taacgatatgatattctattcattccagtttaaaataatttgatctttgaaatgtaaattataaatttaagcaattcactcaatataaaagaattataatcatgagggtatattcaatatacttaattgactatagtccatatcactgcttataaactttccaagcaaatggcttctacttttgtgtgtgtgtgtgtgtgtgtgtgtgtgtgtgtctatttaacytgggactgaacactaggcatatatttatcctaataaaattatcatttttattttactttataggtttttggaaggagccttcatttatgctaataaaattatcattttgttatactttataggtttttggaatgaaccttcatttatcctaataaaattatcatttttgttataatttataggtttttgggatgaacctttggaagcatagccaggataaaactttattgtgtttgcatagcagtcaaatatttcaaaatctttctcgcagaatcataaaagcatgagaaacttgca

SEQ ID NO: 509941 - DNA, 588 bp, Homo sapiens
atttttttatcttctatttaatgcccttaagtattttttttctccttgttgcaggaaaaaacctgttactgtattttccagtaagtccttttgttttatactttctggtcagatgctgcaaatcagaaacttgcgcacaattggaaagtgaaaagcgaagaagtcacattctcagcatgaagctaaggctaagatcagaaagagtccttgtaaattactgcttttctgttgtagagagctgagaagctctccagcacagtgtaagctttctgccaatgcttggactctgggtatcctgaaacttmtttcccaggcattctaacagttgtgtatatgtgtatatataaattacattagatgtaatgtatataaaaatattttgacattttaataaattaaatggatgaaagtatacatattttaatgctgaataaaagttaccagaaacatctatgtaatgttttttgttgtggtttctacagtttagttttttatttgttacagccatgccattcctctctgcatgaaaatacaagcatgactacttctttaaagaaactgcaacccacaatcatgttccaaggcagc

SEQ ID NO: 509942 - DNA, 625 bp, Homo sapiens
ataggatctttctggatggtcagggactgtatgtctyggaatttaactgatgaatacagactcaagcagatatggaataggatataatgttaaataaatgcaaataattagatgagatggaagatcagttggcctcttcaaccaatgtagataaaactctggacattttatgaccacagaatgtaagtccgttcatattaatgatcaaatggacaatatttattgttactaaataaacgtgcatttgttaaggatagaaccagagctgcattaagagaaactaatgtaaaaccaaataagcagttagaaattgagttcagatatataagttcaaaagagaaataagatagccaaaagaggaccgtaatctggctgccaagctacagtaagacatgccagaggggcagagttggaacacaagaggaagtacctcaatgtagtcaaacaggttaggactgaaacaggttaggcaagaaataatcactggagaagtgaaggtctgcagacttacattacctagctaatcgtgctgcacacaaatgtctacctagtgcttagtccacacaattcctcatggcatcaaaagttattgaacttctgtgtatgtttaagaaatctagccaca

SEQ ID NO: 509943 - DNA, 574 bp, Homo sapiens
attagtatgtatgtcccaaatattgcttggaatatgcttatacaaacaaaaatcatttgttttttatctgaaattcaaatttacctggatgtcctgtattttatctggaaaccctacacagaaatcaaatggctcacgctgtgtctcagagctgcaacgatccaacgccctccatccttcagaggctgtctgagtccggggacacaactcccaccctcctctcctgccagccgcggccsgtggctgctctcttcacttcgtcccgcttcgccccgactgtggatctacccgctcccttctccctcagtccccaaagcaccagactcacaggcctgctgtgtgacccacttttaccgacctttcggggagagtagagggcatttgtgactcagctcagagcaggaaacacatctcacgtcaactgtcagacagcgctgctccgaatcccatcacagtgctccagcagggggcgtcctcaccggccgcggccacacccacggctcaacccggcctagctcccagacaccctccttccaccgcctgttttccaccgtccccgcctgctctttcaagc

SEQ ID NO: 509944 - DNA, 545 bp, Homo sapiens
gcagagactccagatgcccccccaacacacccctgaggtcaagtctttgtccccttctacctgagttycttgcctccaaggcagagcccaggagtgccctgacacaaggacagacagatcctatgctggacagggatgaacgcacactgggaggcgggagcagcctcaagcagtcccaggctagagggaggacagggcccaccgagagtcatcttcatctgccctgagcccagggctgtgtgctgcgggaagaacgaccaggctcgggggagttctcccaccagtcccaccaggatcgctcttatcccgggcctcacttcacccaccctgggcacacagagaatcaggggccactgtcagtcctggggctccttagggagctctgggcagggctaccccgtgtcctccattctctggactgaaccctcctccctgcccctctgactgctgccccttcttgtcgtccctaagcccatttttcctctgccgcaggtgccctggctccatgcagtttatgcagcactgggagcgggtgtatttacatt

SEQ ID NO: 509945 - DNA, 417 bp, Homo sapiens
cccccccaacacacccctgaggtcaagtctttgtccccttctacctgagtttcttgcctccaaggcagagcccaggagtgccctgacacaaggacagacagatcctatgctggacagggatgaacgcacactgggaggcgggagcagcctcaagcagtcccaggctagagggaggacagggcccaccgagagtcatcttcatctgccctgagcccagggctgtgtgctgcgggaagaacgaccaggctcgggggagttctcccaccagtcccaccaggatcgctsttatcccgggcctcacttcacccaccctgggcacacagagaatcaggggccactgtcagtcctggggctccttagggagctctgggcagggctaccccgtgtcctccattctctggactgaaccctcctccc

SEQ ID NO: 509946 - DNA, 300 bp, Homo sapiens
actcctgggcatctcaccctgagcaggctcttgycagcgctccgtggtcctggctccctgtcctctccaccccgtccctgctgcgtgtctctgttctcatcctcttccacgcctttctgccccccatctgcgctgctgagcactgctggagaaactcacccagtcgtgcagactgctaccatgacaagttcatggtctctggccccagtagggatcgcagctctgctcagcaatccttccacagctctcccctcattctttaaacctcccccactctcttcaagtattcgactcactctg

SEQ ID NO: 509947 - DNA, 532 bp, Homo sapiens
ggccagaattatttactattaaaaattaagactaaatattaatctatccagtttacaacttgattgtgtgtgtgtgtatgtatacggctatgtaacgtatacatctagtccttctagctggatcattcttaaggtaaataaacataacaacaatgcacttacacagggcatttattatgttgactagggagtcagctacgccaagccacatggctctcacaagaggacttattcctggataaactcaatctgcttgggcgtaggcattttctgtgtggagtccactgggcccattattggtccctacaagttcttgaaggccgtagtccttgaagactctgggaacccagagaagaacaggcttagcaccattcctgtacmaagtaggtaatggatgcatgtttcctgaataaataagcaaacaagtgatgagaaaacttcacatatagctgtaacatagggctgaacatgaaagccagaagataaatatcaagagctactgggtttaaggggggaaaaaggaaaactacat

SEQ ID NO: 509948 - DNA, 532 bp, Homo sapiens
aaaagaggaactgcccaaatgcagtgatgtcagttactttgctgtcatttggatggtgatagggtgagggaggaggatggagtcactcagagtagaaatggggagaccaagaagagcatccaggggctgttgctgcactaggggttgagggggcctgtgtggattgggtttaagagtcaggggtcatggcttgaggtgaagggagaggagatcctgtaggattctaagcagrttgaggaagagacggagacaggaaagtaagccctttgtaggctgggaccccaggtacccatcaccgtatctggcataggcttatcccatttataattcttctacccctcatcccttagttacaaacttttactcatactgcaagcatcacatggcttaaaaccctgttctcaaagaagccttttctgatcccctcagggacagatttgctaagcctagtaggtccctcctaggttgccatatttctattgccatcacaacatgtttcacattttgtcttttatcccctgcagactgtaag

SEQ ID NO: 509949 - DNA, 372 bp, Homo sapiens
ggtatcttgagagggagagtggccattgtggggaagtctggggcaaatgcctagacaggcttccagggcctggcagatcccacccaccagctacccggttcccttcaggagctgcatggcttgggatgggctcttttgcaaactactggccattatagcagacactgtcacytctcccctcattgtttatgtactcactgttgttccttcctgttctaagtgcttgctctgactgcaggagtaggcaaggctcctacatagagcaagcccaaaataggtggatgtctatgccagcctccttacctcctggagcaggacaactcagaagtgtgttctccattgtctgcctgactccccgacaggactgagctc

SEQ ID NO: 509950 - DNA, 621 bp, Homo sapiens
tgataacgaactgtgtcccaagcctcctctcgctggaaacaggagggaattctgtggcttacacgcaaccatatgttgaggatgtgaatattgcttcgcacattctagcagtttcaaaatgcatgagggcttttttccctttaagaatcaataactcatcaagaaaaaagaaagctatatgcacaaaaatgttaattaacaacattatcaatactagcaagaagaaattacaagcaagctctatgtgcaacattctggaaattaagtaaattatggtgcatggacgatgatgaagataatgcattcaatgaaatkataattagaaagattttgtaggtacatagaaaatatttaagctaaagtgccaaatgagagaaaaatgaccaaattatatgtgcattgtgattgcaactgtatcagtataactgtgtagatgggcacaggctggaagaggaaaataaaaaatgataatacataatagttgtatagaattcgttggattaattgtaattaatcactatttttaaaaattatttttgaaaaggtaaaaacattttttaaataatggcttgaaaacaaatggcagaaatgtgcatttaaacatttaacgtgcagtttaaa

SEQ ID NO: 509951 - DNA, 422 bp, Homo sapiens
gaacctccagggcttagaaggtgcaggtcctcacttgcctttctgcccagctctggagtacagatgtcctttctggccaggtgcggtggctcatgcctgtaatcctaacaatttaggaagccaaggttggaggattgcttgagcccaggagttcaagactagcctaggcaacataattttttagtgagaccctgtctctacaaaaatgttttaacayattagtgagacatggttgtgcacacctgtagttctagctacttaggaggctgaggtgggatgatcgtgtgagcctagaagtttgagattgcagtaagctatgatctcaccactgcactccagcctgggaaacagagcaagactctgtgtctctaaaaaaaaaaaaagaaaaaaatttcctttccatgccttgtcctttgtggtcc

SEQ ID NO: 509952 - DNA, 533 bp, Homo sapiens
ttccctttgcaaaaacaaaccatccttctccatgagtcccattacatggccagaactcctttctgggagattatttgatgacaaattatatcaagaaattaaacagaaaccccattagtaatggtgacaatattccacacacacatgaaatatttaatgaaaatctagagctagggtgttgaatttgcacacaaagaacctatgtaagatgcattttctctgaatgcaaatgcaaattttcttttctaaagacctttgcaagtacgcaagagctgtctgcttttagtcacagggaaacatccatttagtaatctcctacctccattgattccacccataatgagatatccagaggtatagtagaagtccagaaacattcaaaatatggaagcagaaagatgaaaccagctcaaatggctagtacyatctgctaaggagtcagacatatgaatggccgaaagaacccttagtctttaaaggatgagtggagctggtcaaattaaaaatgggtttctgctagatcctagtataag

SEQ ID NO: 509953 - DNA, 643 bp, Homo sapiens
cctgcagaactgagaccgtggcctctggggtgtgctgccaactgttactggtgtctgagctcaggggaggaaccccctggagctggatgggacctgacttctgagaagaaggcactggctggctagtgcttatatctcggaaacaactgcttctgggattgtggcaaacctgcaaattaaaatcaactgctgctactgggaccaaagattgaagaaccactgctaaggtgacagtaaaaacaaagaaagcaaacagaatgagaaaaatcccttctccctactccatcctttcagtctcttctagcacccrctaatggcagagctggtaaagaagaaatgctgttggcagaatcccagcccgggcattacagagcagaacataggaggtaggtctaaagtaagaaacaagcatttaataacgagcattagtcccccaggtgattatgttgtgtaggcagggttgagaaccactgcctgtggaaagctacaattcaggactcttctcaggtatttctggttgtttatgctttgtccaagtcccccagacttggttcagttttcccattattggcctgctctttcaagctctctatttgcttttggtctcttgacttttgggttcccacagttatggcttacatct

SEQ ID NO: 509954 - DNA, 643 bp, Homo sapiens
cctgcagaactgagaccgtggcctctggggtgtgctgccaactgttactggtgtctgagctcaggggaggaaccccctggagctggatgggacctgacttctgagaagaaggcactggctggctagtgcttatatctcggaaacaactgcttctgggattgtggcaaacctgcaaattaaaatcaactgctgctactgggaccaaagattgaagaaccactgctaaggtgacagtaaaaacaaagaaagcaaacagaatgagaaaaatcccttctccctactccatcctttcagtctcttctagcacccgctaatggcagagctggtaaagaagaaatgctgttggcagaatcccagcccgggcattacagagcagaacataggaggtaggtctaaagtaagaaacaagcatttaataacgagcattagtcccccaggtgattatgttgtgtaggcagggttgagaaccactgcctrtggaaagctacaattcaggactcttctcaggtatttctggttgtttatgctttgtccaagtcccccagacttggttcagttttcccattattggcctgctctttcaagctctctatttgcttttggtctcttgacttttgggttcccacagttatggcttacatct

SEQ ID NO: 509955 - DNA, 643 bp, Homo sapiens
cctgcagaactgagaccgtggcctctggggtgtgctgccaactgttactggtgtctgagctcaggggaggaaccccctggagctggatgggacctgacttctgagaagaaggcactggctggctagtgcttatatctcggaaacaactgcttctgggattgtggcaaacctgcaaattaaaatcaactgctgctactgggaccaaagattgaagaaccactgctaaggtgacagtaaaaacaaagaaagcaaacagaatgagaaaaatcccttctccctactccatcctttcagtctcttctagcacccgctaatggcagagctggtaaagaagaaatgctgttggcagaatcccagcccgggcattacagagcagaacataggaggtaggtctaaagtaagaaacaagcatttaataacgagcattagtcccccaggtgattatgttgtgtaggcagggttgagaaccactgcctgtggaaagctacaattcaggactcttctcaggtatttctggttgtttatgctttgtccaagtcccccagacttggttcagttttcccattattggcctgctctttcaagctctstatttgcttttggtctcttgacttttgggttcccacagttatggcttacatct

SEQ ID NO: 509956 - DNA, 591 bp, Homo sapiens
gaaaaatctattatcctgtgaggtgtggctaaaatgaaaacatcagctttcatgcctctgtttttgttctttggagagcctgactgggttattttcttagctgtagacttcatcacttaaaacacccaaccagttagatcagaagagaaataaagctaaycctttttatctggaagatctcccacatataatgagatactctaaatcctcattcagatcacttcaatggatatcggtgggctctaatgttcatttaacaaatatatattgagctcctcctaggatctgggcaatgtcctaggcactagaggaacagcaatgcacaaagcaaagtaattgctctcatggaggtcatattctacttaaggaaagagacaataataaataagcaaacctataatataccagatgtagttgggtagttcaagataataaattcccatgaagttgtcaagctgttagctaggataatagtctcatctgaaggctcatctggggctggaggatctgctcccaagttaactcacgtggatcacaaggctttgtttctaaaccatgtggacctctccagagagctcctcatgacttggc

SEQ ID NO: 509957 - DNA, 591 bp, Homo sapiens
gaaaaatctattatcctgtgaggtgtggctaaaatgaaaacatcagctttcatgcctctgtttttgttctttggagagcctgactgggttattttcttagctgtagacttcatcacttaaaacacccaaccagttagatcagaagagaaataaagctaatcctttttatctggaagatctcccacatataatgagatactctaaatcctcattcagatcacttcaatggatatcggtrggctctaatgttcatttaacaaatatatattgagctcctcctaggatctgggcaatgtcctaggcactagaggaacagcaatgcacaaagcaaagtaattgctctcatggaggtcatattctacttaaggaaagagacaataataaataagcaaacctataatataccagatgtagttgggtagttcaagataataaattcccatgaagttgtcaagctgttagctaggataatagtctcatctgaaggctcatctggggctggaggatctgctcccaagttaactcacgtggatcacaaggctttgtttctaaaccatgtggacctctccagagagctcctcatgacttggc

SEQ ID NO: 509958 - DNA, 591 bp, Homo sapiens
gaaaaatctattatcctgtgaggtgtggctaaaatgaaaacatcagctttcatgcctctgtttttgttctttggagagcctgactgggttattttcttagctgtagacttcatcacttaaaacacccaaccagttagatcagaagagaaataaagctaatcctttttatctggaagatctcccacatataatgagatactctaaatcctcattcagatcacttcaatggatatcggtgggctctaatgttcatttaacaaatatatattgagctcctcctaggatctgggcaatgtcctaggcactagaggaacagcaatgcacaaagcaaagtaattgctctcatggaggtcatattctacttaaggaaagagacaataataaataagcaaacctataatataccagatgtagttgggtagttcaagataataaattcccatgaagttgtcaagctgttagctaggataatagtctcatctgaaggctcatctggggctggaggatctgctcccaagttaactcaygtggatcacaaggctttgtttctaaaccatgtggacctctccagagagctcctcatgacttggc

SEQ ID NO: 509959 - DNA, 604 bp, Homo sapiens
ctgggaccagccactgccgtaacttgaagaaacaacaggatagggaaaagacgagatgaactttctgtagatacttatttttagctgctgggcatcataatatcctacctatttttaagaaatayggtaggttgaagtcactgctcctcttccccctatccctattacagatcttgctccacatcccagttccatggcaggtatgtcatgtgacatacacatacacatgtagcataaactggccaatcagattctcccaccaaggattttgaatttcaagaatgtgatacatctgtacagcagcagttagagattaatcctgatagctttgctggagtttaaagtctatcagcagaggggcaaatatccaggagtatcaagactggtggcagcagttcaaaaagactattcctgtcaaaggatcttgatggtgcccaacctcctttggattctgcccattttctgagcttggttctccaggatcttatcactattctgagttttccaatagttttataggaaattcttgttgtacttaagctagcctgatttggttcccacagttggcaactgagtaccctgaatgatgtacttctcaatgtcc

SEQ ID NO: 509960 - DNA, 592 bp, Homo sapiens
cagacagtattattgaagaacctgtcttgcacccaaatagatcttctttggttgctaaagtctaaacttccaccatttgagaaatattcctttttgacattagagttttcagtttttattctgtcaacatgagtgtcctattaaacaccagaactcctgggaggggtaattaactaagcaatttgttctcaactatgaaattagaatcctggcaggaaaaagatagcatgttgacgttcttattcagggactatctcaaagatatggacaacattaaaggggaccaacaagggctggttaagaatcccagggaatagcaacaggaagtcttccatcccaccttcctcctcctctggtggggcgggaaccattcctggatccccaagagagctgtagatgcaactcaggttgcagatatggaaacaggatgcccatcaggagttgagtggactttgaaaggggaagccaggccagcagagaaagagatgaaaacaaatacattaacctcttttttccccctctgccttyccatatgctgatggtgtctcccactggtcagacccaacaggaagccagagggcaaaggcatgca

SEQ ID NO: 509961 - DNA, 588 bp, Homo sapiens
gaacactaaatattatttcctgtgtgcataggtcagttgcagatcttaaaaaaggactttgcccaatttttagatctgcaatttagatctctaatttaaatttcccaattttaaattagagggttttttgttgatttgagtgaattctctataaagcgaagatttttaaatctaatatgtatacacacacacacatacatatgtagtaaatatttttacaagtatgctgccctttattttttctcatatgcagggtgrcttaatttctgttttactaaattgcccttcagagtgcttgcttctgagcttcttaaaaaggttttgtcaagataaaaatgtatctgtgtaaataggcatttatattttcttccggtatttttatcattttgtacattaaaaacttttaatctatattccatcaggaacttattttgtggcacaaaaatctagttttctccaaaaagcaggcatttcacttaggaaactaattcttttcctgctagtataaagtgtgaccattaccaagttctaaattcttacatatatttgggtgtttgtggattttctattctgttgtatttatttacc

SEQ ID NO: 509962 - DNA, 588 bp, Homo sapiens
gaacactaaatattatttcctgtgtgcataggtcagttgcagatcttaaaaaaggactttgcccaatttttagatctgcaatttagatctctaatttaaatttcccaattttaaattagagggttttttgttgatttgagtgaattctctataaagcgaagatttttaaatctaatatgtatacacacacacacatacatatgtagtaaatatttttacaagtatgctgccctttattttttctcatatgcagggtgacttaatttctgttttactaaattgcccttcagagtgcttgcttctgagcttcttaaaaaggttttgtcaagataaaaatgtatctgygtaaataggcatttatattttcttccggtatttttatcattttgtacattaaaaacttttaatctatattccatcaggaacttattttgtggcacaaaaatctagttttctccaaaaagcaggcatttcacttaggaaactaattcttttcctgctagtataaagtgtgaccattaccaagttctaaattcttacatatatttgggtgtttgtggattttctattctgttgtatttatttacc

SEQ ID NO: 509963 - DNA, 633 bp, Homo sapiens
ctgcactgttcattggcatcatgctgctagttccttccaagagtgagcaggatgatgacaatctacctttatcatgatgatcatggaacatcgtctgtataagcaaggattcagttctgtttccaagttgggatttgtttgtttaattgtatttcatgtcttgggaaatgtttaaatcaggtcgaagaattgtagtaagtcaaatatctagaacaaaaaaagtctcatatggtttttaataaacacactgagctcctttgtgtctcagatagttaacagaaaaaagttactcyaacaggtcatagttggacacattgccatagtttggatcctatatgttctctttgccataaggcaaactttgtaaaaggctagatagtttggctttccaagacatatggtctctgtgacagttactcaactctgtcattgcaatgcaagcacaccacagacaatatgaagacaaatgattatggccatgttctaataaaactttatttacaaaaataggtggcaatcaaaatttggctcatgaatcgtagtttactgatctctgccataatggtatgaaaaatcttgacactcttttgattacataatagtagatgtagtcatgaactatagtaatgtatt

SEQ ID NO: 509964 - DNA, 602 bp, Homo sapiens
ctgagatgtgttagtccatgctttccttgtcctttgtacaggcctgaaaaagaaagatgtctagacattggggttttccatcctcttctcactcctttaaatgagctgaatagtcaactaaggttatacttttggattcctgcatatatacattcatcttttttattcatgtattggattaagccttgtacatatgccatatgccgttacttttatttatttccttttttttttttgagacagattcttgctcagtcactcaggctatagtgcagtggcacaacctctgctcactgcaccctctgcctcccagcttcaagtgattctcctgcctcagcctcccaagtagctgkgttttgtagtccaaaaagttttgtatttttagtagagacgtggtttcaccatgttggccaggctggtcttgaaatcctggccttaagtgatgcacctgtctcaacctcccaaattgctgggattacaggtgtgagccaccatgcctggctgccattacttttagtatcaacaaaaatatagtaaaatattatagctatatccaatcttcagatggaaaccaaggattaaagagattgaataatttttcc

SEQ ID NO: 509965 - DNA, 497 bp, Homo sapiens
gtgattgtatatatttccagagaacaaagctttataatrgtatccttgtcctaactagactgacaaattaacacttgttgatgatggtccacacctctccaccacatggggatggcagctatggctggcaagcatactgatggagagtagctatagattttttaacccagaaaatccattttatatcttctatgtgcagcccttaaaatgataaagttatatataaatatatatatagaaaatatatttatattagaaaaggcatatacatacttgctgattgattcacccaaagttcatagcaaaatactaggtctgtgaacaaagcacgtacttgtcagagaaaaagaaatgtttattctatataaatgtataacatataccacatatgtatattttatataattatatatgctctcattatgttcatattcaagagacaagagttgataatatatgtatacagacctataactctgttgtatatggcatatgga

SEQ ID NO: 509966 - DNA, 603 bp, Homo sapiens
ctggccaaggaggccagaggccgaggctccacagggctctgctcagcacccacgtgcatctgtcctgactccagtaagctgctcatgctgggtcccagggccaaaggttacagacrctttgtaagtttgcaagagaatctacaaaaaggaaagaagggctgtggggacaggaggcttagggcatcacaaaatcagaaaggaacccagatgaaccaaaacatccaggtcccaggaaggggaggcagcctcctccttctgtctctgaccacgcagcagaaacaaagcttttggacaaatgcatgagacggcataagggcaggatcaacttgtccatctctctgccaactaaagcaccacagggccatttgggaccttttgcctgccccttccagccacatgtaaccttcacagtcactacatattcctcccagttcactgtctccctgcagaagcttgaaagtccacagagaacaagaagagctgggagccaagagtccttcacagcctcaatctgttctcctctggcctaaagaagctctctttcctagtccttttcttatcttcaaaatgaaattccagcagtttttgtctcagctaccccaa

SEQ ID NO: 509967 - DNA, 603 bp, Homo sapiens
ctggccaaggaggccagaggccgaggctccacagggctctgctcagcacccacgtgcatctgtcctgactccagtaagctgctcatgctgggtcccagggccaaaggttacagacactttgtaagtttgcaagagaatctacaaaaaggaaagaagggctgtggggacaggaggcttagggcatcacaaaatcagaaaggaacccagatgaaccaaaacatccaggtcccaggaaggggaggcagcctcctccttctgtctctgaccacgcagcagaaacaaagcttttggacaaatgcatgagacggcataagggcaggatcaacttgtccatctctctgccaactaaagcaccacagggccatttgggaccttttgcctgccccttccagccacatgtawccttcacagtcactacatattcctcccagttcactgtctccctgcagaagcttgaaagtccacagagaacaagaagagctgggagccaagagtccttcacagcctcaatctgttctcctctggcctaaagaagctctctttcctagtccttttcttatcttcaaaatgaaattccagcagtttttgtctcagctaccccaa

SEQ ID NO: 509968 - DNA, 665 bp, Homo sapiens
ctgtcaagctgaaccaggcaccaaggtcactgcaggcaccacacctgctggatgactgcctcaggcatgagaagctggctgggcccgccttgaggggatcccagggcccctccctgctgcctgcctagagccaagccttgaagctccaagtctgcctcgggtttaactacgtgtcagttctttggacactggttcctcatccaggatctgggaagttgtttaggcaaaggccatctgggaagaaaaatacttttcaaaaatgtaactgaaatcatgtcactgttgtacccaacaccctcctatggcttcttggcccattcagaggacaagtgaagtcttcacacccaatcagccccactcgtgcctgtcatcctgcgagtctgccgctcactagctccacttcagatgcaatggcctcctcatgctgccaggacattccagacccagtcccgtctcggggctgtctgcactggcctctgcctctgctccagagatccccgtggctgcaccctcatttctctcgagctttggttcacatcctcactttgtccatgagctctccacctcatcccgacctctccctgtctgtgctgtcttctccggagtgtgtctgccacctgcttcctttacttcatcattgtgtrctgtctgcaagctgcatgagg

SEQ ID NO: 509969 - DNA, 528 bp, Homo sapiens
ggcccattgttcaaatttatttgtgaaagaaatggattgtttgttctgtagatcatcccacatcttggattttgctgtttatattctacatgccatttgtcatgttgtttgtaaactggtgcttataccaaaaagtttggttaaatccagggggttttatgtggtaaaaaataatcttttcaggagatacatgaaatctgcttttctattatgaagttaacattggtcrgagtgttctgatctcctcaggttgaacttcccattaaaagcctcttttgcactttctctaatggttttagcattctttaggttcagtatttagatgagttattcattgagacctacaacatgataatagtttgattttattatttcttctttatttatttattatttgaagttctttaatggaatagaagttactcatatcagctatttggttgctctcatacagagatcatgtaggaaaggtaggataaatgcttgattttctctctttttcttttttttaaaaagtattcaaattaa

SEQ ID NO: 509970 - DNA, 528 bp, Homo sapiens
ggcccattgttcaaatttatttgtgaaagaaatggattgtttgttctgtagatcatcccacatcttggattttgctgtttatattctacatgccatttgtcatgttgtttgtaaactggtgcttataccaaaaagtttggttaaatccagggggttttatgtggtaaaaaataatcttttcaggagatacatgaaatctgcttttctattatgaagttaacattggtcagagtgttctgatctcctcaggttgaacttcccattaaaagcctcttttgcactttctctaatggttttagcattctttaggttcagtatttagatgagttattcaytgagacctacaacatgataatagtttgattttattatttcttctttatttatttattatttgaagttctttaatggaatagaagttactcatatcagctatttggttgctctcatacagagatcatgtaggaaaggtaggataaatgcttgattttctctctttttcttttttttaaaaagtattcaaattaa

SEQ ID NO: 509971 - DNA, 291 bp, Homo sapiens
aacgccaagctgaaggcaaatctcctttgcttctgggtagggagaagaagggaagagctaggcagagctaatgatgtcctctgagactgaggctgagttacaaacacaactgaggtccaagttagagattcaatcttaagaaaagtggctgcttttttcctgctcatttctcttatctacyctgggaattaggcgtatgttggagtgtccctagtatcttcagggacacggagacaaacgtgtccctgaagatactagaaggaacattcagagtttcaacattaacctaca

SEQ ID NO: 509972 - DNA, 597 bp, Homo sapiens
ttcatctcaaaacctaccccagccacattcattatttagctttccccacctcatatacccacttgcaattttcttagaattatattcagtcctttctcttccattggattatgggccactgtgcagggactgagtctggctccactttttaatcccccccatgccaggcrtggtatctggcacagaaaatgaactcaataacgagatgctgaattttctacttcctgtatgcttcctggtgacaaaagtaattaatcacaatatagtaaatctaattttaagatacaactattttttctctctcagtaatatatgatggacattgcccactaataagacagaacaggaaacatgaatgggttccagtgtacaaatgccctaacagcatgaaacattaaaatggtatttttctgctttctgaaattcaaacagtgatgagagacagcattcatgacatagaataaggctgcttcaattataaaaacaattcagatcaagctcttagaacacttcaatgtctaatttgcttccttaaccatttgacttatgcatttcacttttttctctagaacttctatggaagaagaattagagaaa

SEQ ID NO: 509973 - DNA, 724 bp, Homo sapiens
ggactataggtacatgccactgcagactttaaagtgtctttctattgtatttgagtcatcccaattacaaggcttctgttccccagtcccatttgatagaccacttgtccattgtgaggaattaagtgatgatgacaaacttgtaaccctccattgttgaaataggggaaaggagctgaccgtggcctgaagaaaggccatgtcttgccagagtggccatgagaatttcataagggacaagacagcaggctggagagctccaactgtgccaagatgcattcttgtcaggtgcatagcccaagaggcattgtccaaaaggaaaccgcttacttgatgatcataaagtaaagaagtagggttggaaattgagacagttaaaggaaaagttggtcaaattgacaggacaagatccagagaaattaagcatgtcagaaacatacaatcagagacaagaccatgtgaactggagctactccactgtgaactccagaaggccccattctccttgatggttagttatgtcaacttgggagaaaacgtttagttttgggcttctttgtgattcctataggatgggcaaataaagactgccatcaagaaggtgaatatgcatatctgaagctcagaagagatctgaggtggacaatgagattggagaatcattggcttattgrcagtagttgagaccatgaacactgttgagattacctaggaaatgtgaaca

SEQ ID NO: 509974 - DNA, 479 bp, Homo sapiens
ttagtcccactgccccactcaggtccacagctcttggactggcctgtccccactgctgcttctcatcccatggggtggcttctgggtgcaagtgaagcatgggagggctgtagtgttacaacagctctggctcagggaaycctggggtctgggccccaagaagggttgcgatgcttcacttccacagtctgggagtgtgtcactgcctgcagctcagtaagccagccaggaacgtgttacagctcctttcactcccatcattcagtgggtcccaagttcttgtcccacatccaggaagaatgaggttatgtggataactggagggtgagccaggcagagaggagctttactgagctgcagaacagctctcaggagacccaaagtgggtagcctctatccacaggcaggttgtcccagtgagtgtctgagtctagctgagtctggggtttttatgggctcaaaaagtgcatgctgattgg

SEQ ID NO: 509975 - DNA, 478 bp, Homo sapiens
tgcacccgggagcacaggctcccatcccaccaacttgatagggtgcagggctcctgttggcaccacctgcttccggcccctgctggtgctgcagagtgcacagctctggctgcgcctcccttgctatagctggcatccttgtagtggccactccagatgggccaccgccaccatcaccatcaccatcacatagattatgtgactctgacaattaacaatttctcttatgacttcgagtattgtgtccctaacatgaggatccataaagtgataatcctcctatacccccagctctaaaattattattctttgccaggaaataaaaaatctggagtttgtggaagaaaatggggaaaggaawatatctgtcaaacaccagtgaaagaaaggaggaataaagctaaaatggattgatgtgactgcttctatgtgcagattctgttagaggcattgcctcacaatccttacaccaacctca

SEQ ID NO: 509976 - DNA, 590 bp, Homo sapiens
cctggacctggattctttcccttgtaccagcctgcctccactaaatctccatcccactaaaaaactataaaaatacacacaaggaaactaagcacccccaaaacgccttaacttcctctgtatttccaaatgaaaatgttagctgacttatttcaatatttccttgttgtgaaaacattttttttaactccaatcataatgtgtgtttggcctggattggggtccaggatttaaaggcaagctctaccgatgccatctcaggatgctctcaacctgacttggagctctgtggagttgaccttctgcttcttaaatccaaatctggatcgtcatcaagtatcacttggtttatctggtgagtaaagaatccagcgaggtaggtgttcagagccactttttcatcwtcaggaactaaaagcaattactaatctgttttcactaatgcagtccatctgtgcatgagcaatttgtgtggttttcctaagaaggacatcatattctctgtttttttaaatgcttaatacttgcaatcagagggacagaaatatccagccagccccaattcttataaaacagagctgaaagcaggt

SEQ ID NO: 509977 - DNA, 527 bp, Homo sapiens
tacgacatgaataccaagaggctgggatcattggggtcattttagagggtgcctgccacactggctgacagaatttcaacatgatgcagaaatgccatgaaggaggtttgtcttggctgctgtgggaacacagcataggggggattaaggaggaagggtacttagaacagtggtgaagacaaggaaaggaggtagccaggccacaaagaggaggagatggcacaaccagaacaatcagagaggtacgaagtggcacacattgttttctgaggtagactggcccactggcataattgcttaattgacagttgttaaaataaacctttctcactgataaaattaaaagactggaaagaacactgaaggtgggaaaacaagtcattcacttgatctggtagtacacgcatgggtttgtctaagatctggamacctcatctcttccctcccctttgctcccgcccctctcctgctgcactcacaccattctagccaaactgaaggacttgcattcctctgaatccgccatg

SEQ ID NO: 509978 - DNA, 558 bp, Homo sapiens
acttcaaatgtgctattcatgtgatttttgcaagcttatgcctttggcacccatcctcattaattttatatggcagttatttggtaatttccataaaatattcttagaaggcatatgtttttcatttccaaagtttgtattaataatgtaatatgaccataccaataatcttatcaacagatatcctattgctcataatagaaaaaaaaccccacaaaacaaccattaacctggcaggatgtcaaggtcaataactttcrcattaaatttagtgttaaactttttaaaaaacagctttgttgaagtatgacttacataccatcaaattcacttattacaagtgagcaattcaatggtttttaataaatttgcagagttgttcgcccatctccaccatccagttttagaacatttccatcacccaaaacaaatcctttgcttctatctgcagtcaccctcccctctttctcccagccccaggcaaccactaatctactttctgtgtgcataaatttgcgttttctaaacattttatataaatggaattatataatatat

SEQ ID NO: 509979 - DNA, 607 bp, Homo sapiens
tggctttgatttcatctatggccggctctgccaaaaccagctccacaaagacgatggatgctccaggatgcctaaattgatgctttcagggccctagtgactagccaatggcatccctctagcctgaatatttctgagttaatgtcccaagcccatgttgctaaattcaaccttatcaatattaccagtgcagaggctctagtgttccgtacaagctggatagcctcagaattacttaacctcttcaaatccccgtctcctcatctgcacaattgcagcaaatacaggtctgttgtgtggattaaatgagactatgtctgttaacatacttattctggtgcctggcacrcaagcagtgctcaataaatgacacagttaactctttatcagtgaggtttcctctagtggcaagtgacagaagccagttcaacttaacttaagcaaaaaaggcccagcatctgggccaggagctcatccatggtcttcactatgggttctctctaatcacttggctctgtagtcttggctctgtagtctctgattggtttcattttcaggcagaccatccccatgagatggcaagatgaatggtgagacatcttcccag

SEQ ID NO: 509980 - DNA, 558 bp, Homo sapiens
ctacacagggaagacattaatctattcatgagggatctgcccccatgactcaaatgcctcctatcaggccctacttccaacactggaaatcaaatttcaacataaggtttggaggggtcaaatatccaaaccatagcaggctgccttcatgtctaggctaggtaatactggagggaaaacacggtaaattcacaaatgatttgaccagactttgaattcaagtcttattcctcaacctggatgctaccatttatttttcagagacttcacatagtagctggtccttgcattcagtccagaatttatarctgccttcagtaggagagatggggtggagtgtgcttactccatcttccttggaaccagaactcttaagtatgcttttaaaattattttcaaaagtgccactattttcatctcatctagattaaattcaagacccaagtgataatttcattggccatcattagttctgttacaggctatagatgaaaacagtcttggagtcaattcttttacatgtgacattatcttgagtaaattacctattgagactct

SEQ ID NO: 509981 - DNA, 558 bp, Homo sapiens
ctacacagggaagacattaatctattcatgagggatctgcccccatgactcaaatgcctcctatcaggccctacttccaacactggaaatcaaatttcaacataaggtttggaggggtcaaatatccaaaccatagcaggctgccttcatgtctaggctaggtaatactggagggaaaacacggtaaattcacaaatgatttgaccagactttgaattcaagtcttattcctcaacctggatgctaccatttatttttcagagacttcacatagtagctggtccttgcattcagtccagaatttataactgccttcagtaggagagatggggtggagtgtgcttactccatcttccttggaaccagaactcttaagtatgcttttaaaattattttcaaaagtgccactattttcatctcatctagattaaattcaagacccaagtgataatttcattggccatcattagttctgttacaggctatagatgaaaayagtcttggagtcaattcttttacatgtgacattatcttgagtaaattacctattgagactct

SEQ ID NO: 509982 - DNA, 558 bp, Homo sapiens
ctacacagggaagacattaatctattcatgagggatctgcccccatgactcaaatgcctcctatcaggccctacttccaacactggaaatcaaatttcaacataaggtttggaggggtcaaatatccaaaccatagcaggctgccttcatgtctaggctaggtaatactggagggaaaacacggtaaattcacaaatgatttgaccagactttgaattcaagtcttattcctcaacctggatgctaccatttatttttcagagacttcacatagtagctggtccttgcattcagtccagaatttataactgccttcagtaggagagatggggtggagtgtgcttactccatcttccttggaaccagaactcttaagtatgcttttaaaattattttcaaaagtgccactattttcatctcatctagattaaattcaagacccaagtgataatttcattggccatcattagttctgttacaggctatagatgaaaacagtcttggagtcaattcttttacatrtgacattatcttgagtaaattacctattgagactct

SEQ ID NO: 509983 - DNA, 419 bp, Homo sapiens
caagtgctaggggaaaggcacagactagagtgagttccagattcagtgtgacctggaccaactcagtctgagctgtttgayttgcattcaaaagatgaaacaagattctgttgttttaagatgacaaaacgtcaccaagtattccagattcaatgtgaataagaagatgtatatatgtcttataaggtaggtacccttattttccgcatttttaaaatgggtaaacaggagcacagagtatcaaataacatgctgggggtcacaaagactacttaggggctaaatcctcatttgaaccctggcagtctgactccaggttccatggccttagccatcatgccgtggtgctgtttgaattttatgcaataaggatgtgtttgtattttgaaatccccttatcttcacccatatctattttc

SEQ ID NO: 509984 - DNA, 633 bp, Homo sapiens
gctgcaagtgctaggggaaaggcacagactagagtgagttccagattcagtgtgacctggaccaactcagtctgagctgtttgacttgcattcaaaagatgaaacaagattctgttgttttaagatgacaaaacgtcaccaagtattmcagattcaatgtgaataagaagatgtatatatgtcttataaggtaggtacccttattttccgcatttttaaaatgggtaaacaggagcacagagtatcaaataacatgctgggggtcacaaagactacttaggggctaaatcctcatttgaaccctggcagtctgactccaggttccatggccttagccatcatgccgtggtgctgtttgaattttatgcaataaggatgtgtttgtattttgaaatccccttatcttcacccatatctattttctttctaggctagcttctcttcaggctgtgaatccggttctttccagctccttcagtactttatcaactgcttctcagtctctctttccagaggctcctaaccctgatacttgcccagataatctccaatcttaaaaagcaaaatcatttacgtgcactcgaactctcctcctctctctccccttctttcgccatcaggcttctcggaaga

SEQ ID NO: 509985 - DNA, 681 bp, Homo sapiens
cataacagtatgttgataatgtacaaatggcttacgtcaaaggtgaattagaccattaagatgtaaaaagcaacaacccatcaaaagatgataatgaaagttcattggggcatttagggaatttagtgagtagaagtgcttaacaataaattaggcaaaatgtttcaacttagttgattctcaataagtggtccataaaacatatatgtaagcaagaatgaccatgttaaacatgtctgcttattcactacacttcttatcatctgttttgctaaaagctttggagaacaaagtagacctcatccctttgctgtgggtctctgtaagatggaagacataccatatataagccatcacaggattcctcagttagtcatacaattaacataaattgtgataagtgctgcaaaggaaaagaccagagttccttgaggaaataagactagagggaaggtcaaaggaaggtttttgtaaggaagytccatttaatggagccccagaggatgggtaagaatcagatcaaaagtgagagaaactgcttaacagttggactaatatgtatcatgacccttatttcttccaaaccactgagcccctgcctcagtttcctcacctactaagtggtgatatcaatcacatctacccaataggatcaatgtgaggattatatgacatgtaata

SEQ ID NO: 509986 - DNA, 522 bp, Homo sapiens
tttatttataaagaatatgggaaaagtaaggagatgagcacccatttgatttttagaaatgatcggaagaaatcaaactgctccccccaaaaagatttatgtttgtgacttatagtccaataaagacagacctgtctcctgaataagaaagttctgggtaagaaagctttggttgagagtcccaaccttattaatgctgccaggtcacctgctaaaawcatcttaactgtttggaaggactcaaaaagtttgcaggccttccttccatccctgggtgggggagatagatcttcagagtttaaaaacgaggggattcattaggaatctgtcagagcagcaaattcctctgaccatcgctgtccccccagttcagcatcacgtgcttccttttcatttttccttgtgtccctggaatttccacctctcctcctacttgagctgtcagctccttttccttagcctcatttcaaagggtgaacagatttttttttccatttccttactccgtaagacatccttttc

SEQ ID NO: 509987 - DNA, 612 bp, Homo sapiens
tgcgttgatggctttcagccttgtttaagcagaccagctacggacagcagtaaaccctataatgtcctgccatggctaattgcttaaatcgtctacctctgtaacttttatggctgctatttcaactagataccttcaataagatataagtttattggagcagagcagaatctatttattgtcgttttcayattttattccaaaattaagtttcaccactgtattctcaagtggcagtaaatggattcttccattatttatattgtcctttttagtgaatttgtggtataatagagggtatatattaatttcccccaccccttgtcaagtgtactgtatacataagagagtccctggtatattcatttgacttcattaaatgcaagtacaaatggttcgtcttgataaaagtgagtatttttgcttgggaactcaatggaaatgatataactagcattacagtgttcagttcaatagatgggaactgtgctagacatggggttgggggtacaatggttaatgtgttatggttgcagccttcagggagttcacagcctagctggggaaaaagacatttttaaaatagtgctttactgctatgtgggaaatgcc

SEQ ID NO: 509988 - DNA, 682 bp, Homo sapiens
agtgagcacctcttatgtaccaggtattggagacaaaaagcaaatgccaacrtatgtcgttttgtatgggtctctgccctgaagttgctcactctagctagaaagggagtcaaataaaccaatccagtggaataagcattatgatagatacatgaaaagattgctaggtgaagcacccaacccagcctagagtagagagactaaggagagtatcagggaaaatttctagaagattacaatccctgagctaatttcagaatgagaaatgagagatagaattttgttccactgtcaatgtataatgatgtataataatgattagtaacagagccttcagcaatatgaattctggatgatgaataaaataggaaatcagagtccccaaatcattctagtataaaaagtatttgagttatttataaattgtgtttatttattcaatcatcagatgttgactgaacactgttctatgagtattaggtatacctagaaagtaaaccatgatacctcacctccaggatattatgatctcactgggggccacaatgccctcacacacaaaacagttcttagaaatgtgggctattatattaatcagacccagagtcattagcctcagcagtatgcatgcaaaagcagctaggctcaaaatgtttgagaatggtttatcatgaagatcatg

SEQ ID NO: 509989 - DNA, 586 bp, Homo sapiens
tagacccaagctaggtcaattggagttattggttctgtgaatttgaagtcgcaacagcgcaactataggctgtccctggtgagcacttgaatgaagaagatacacatgctttccttgagtgccgctttttcataagagatatrtaaaaatagatattaagagagaaaataagagtgatagagatgtgtatgtgtgtataggagagacagagcagagacagagatggagactggctttgttgatattcctcatcatcttccaactgaccccgattcccgctccatgtgacacctggctgccctacttacccttaatgtctagtaggtatcattatgtgctcccagtaaatccctcctccccactttttttttcttaaacttgaatgggtttctgctacttgcaaccatattctcccttaaatgagggagagtggataacttagtaaataaatggtctggattctcaaaaagaacaaaaaagatatttcacaggggaaagttgctggcagaggcagaaatcaggaaggctgggacccaagagaggaagatctgattttgagacacaagatgtggaacaaaagacaaag

SEQ ID NO: 509990 - DNA, 204 bp, Homo sapiens
tttataaagagcaggggtggtttcctgggaccatttcacccccggctgcagcacatagagtgayaccaatgtcatggaagaaggaaagaatcagttgacaacataaagcaaaggcaggtccccatggctgtcatgttcccctaagcctcataattcctacttgttctgttgagtcactcgcaccctcccccatgccccacccag

SEQ ID NO: 509991 - DNA, 649 bp, Homo sapiens
tgccccttcaagagaggacatgtaccctccagtttgccacagtctcctccactcccattatcttatattcagtctgattcctttcctgcctgcttcccccaataggtatttacattttttaccactctactcacatataaggtcttaaacaattcattcttttacaattyattcttttaccacccacttcaagttctttaccaaatcttattaattctacctccaaaattgctcttgaatcttctccgttgtttccactcctcttgaaccaatgtgactcttgcataagctacttcatacctcctaaagcttctcctcttatcgtcctctactcttatttccaaaatatcagctaaactgttttaagatacaattacgattataaaatatctccccttacccacttaaaacccttttaaagcttcctattgctctgtggacaaaaccaaaacgcttcccatggcctgaggccctgcaggatctgagtacagccaacagcccccgcctcccctcttgccactctctccttcaaagactctgacagggtcttcttcctgctgctccaatgcatcaagtcccttcctgtctcaaagccttcactcctgctgttctctttgcagggctaattcctattatttcctattccatc

SEQ ID NO: 509992 - DNA, 649 bp, Homo sapiens
tgccccttcaagagaggacatgtaccctccagtttgccacagtctcctccactcccattatcttatattcagtctgattcctttcctgcctgcttcccccaataggtatttacattttttaccactctactcacatataaggtcttaaacaattcattcttttacaattcattcttttaccacccacttcaagttctttaccaaatcttattaattctacctccaaaattgctcttgaatcttctccgttgtttccactcctcttgaaccaaygtgactcttgcataagctacttcatacctcctaaagcttctcctcttatcgtcctctactcttatttccaaaatatcagctaaactgttttaagatacaattacgattataaaatatctccccttacccacttaaaacccttttaaagcttcctattgctctgtggacaaaaccaaaacgcttcccatggcctgaggccctgcaggatctgagtacagccaacagcccccgcctcccctcttgccactctctccttcaaagactctgacagggtcttcttcctgctgctccaatgcatcaagtcccttcctgtctcaaagccttcactcctgctgttctctttgcagggctaattcctattatttcctattccatc

SEQ ID NO: 509993 - DNA, 428 bp, Homo sapiens
gacagtgctttctcactgatttatctctsatttctctcttcctctgcagattaccaaactaggaaatatcatccattccatgacagaatatcttctgttaggtctccagatagatgcaaatcatttgtaaataatttattttcagatacagatgcatacaaccaactattttaattgcctccaaatgtattctctttatcattcctgaccactgatttctttactgacaaatagctgctcctggtgcttggacatcgagatgaaggcaatcactggaaaagccgaaaggaggataaatcctgctaggaggtgacatagttgtacaaacaatccaaatagtgaatgccagcgagcatcaatgggcgtgggctggacctcgtatgatcagtacacatgtgagtgcctgtcctggagcacagccctaggaa

SEQ ID NO: 509994 - DNA, 471 bp, Homo sapiens
ttgcttgctttttctgcccaggctgaagtgcagtggtatgatcatgtctcactgtagcctcaatctcctgggctcaaggaatcctcctgcctgtctcctgagggactggaactacagatgtgcaccaagtagtcagctaattttttagttttttgttttgttttgtagaaagggtctcactatgttctggctgatattttcaacttaagaaatgaatttctaggcttcagtaacctaaaagggctcacttatttaaaactcaytgatatctcagtgaaaatcttagttgaaaaggtgaaaatgtgctataagtcttggtctcatttgagtgcttttcatagagcatttgaaaaccaaacacttgaaaacccagatgagaatacatctgtgtgtgctttgtggttcttcattcttctctccttttttcttttgtagccccatcagtagcacctttaaatgtcactgtgtttc

SEQ ID NO: 509995 - DNA, 471 bp, Homo sapiens
ttgcttgctttttctgcccaggctgaagtgcagtggtatgatcatgtctcactgtagcctcaatctcctgggctcaaggaatcctcctgcctgtctcctgagggactggaactacagatgtgcaccaagtagtcagctaattttttagttttttgttttgttttgtagaaagggtctcactatgttctggctgatattttcaacttaagaaatgaatttctaggcttcagtaacctaaaagggctcacttatttaaaactcactgatatctcagtgaaaatcttagttgaaaaggtgaaaatgtgctataagtcttggtctcatttgagtgcttttcatagagcatttgaaaaccaaacacttgaaaacccagatgagaatacatctgtrtgtgctttgtggttcttcattcttctctccttttttcttttgtagccccatcagtagcacctttaaatgtcactgtgtttc

SEQ ID NO: 509996 - DNA, 552 bp, Homo sapiens
tctgaaggcctgagaaacaggggcagtggtgtagatctcagtccaaggataggagagtactgatgtctcagctcaagcattcaggcagaagaaaaggggagaattcctcctttctttaccttttgttcttgtcaggccctccatggattgaatgaggcccagccacactgaagagggcagtctgcattatgagtcccctgtttcaaataataatctcactggaaacaccttcacagacacacccagaaatcatgttgagccacatagctgggcacctctgtcacccagtcaarttgacacataatattaaccatcgcagcttagagtaattttgacagatgaaatttgaggagtctcagatgggaaaagataacatgagagaaggcacaacgtggcagctttaaattctgactcacttgaaggtctggaacataacgcttttgtgagagcgaggtgtgagatgaagctggattgaggagttctgaccctaaaatgcagggccctgaaagtgaagccaaggcaggtagaaatttgttgatagcaggggagcca

SEQ ID NO: 509997 - DNA, 552 bp, Homo sapiens
tctgaaggcctgagaaacaggggcagtggtgtagatctcagtccaaggataggagagtactgatgtctcagctcaagcattcaggcagaagaaaaggggagaattcctcctttctttaccttttgttcttgtcaggccctccatggattgaatgaggcccagccacactgaagagggcagtctgcattatgagtcccctgtttcaaataataatctcactggaaacaccttcacagacacacccagaaatcatgttgagccacatagctgggcacctctgtcacccagtcaagttgacacataatattaaccatcgcagcttagagtaattttgacagatgaaatttgaggagtctcagatgggaaaagataacatgagagaaggcacaacgtggcagctttaarttctgactcacttgaaggtctggaacataacgcttttgtgagagcgaggtgtgagatgaagctggattgaggagttctgaccctaaaatgcagggccctgaaagtgaagccaaggcaggtagaaatttgttgatagcaggggagcca

SEQ ID NO: 509998 - DNA, 531 bp, Homo sapiens
tgacctttccagtcacttacctccttagggatgccagatcatcccagtgagatcatttattatgctttacactatattttatgcatcatgacagtcttgtgaccacaaagacacagtggctcactttactttggaaaacattctctgatgcagctaagtttcaagcttatgatccaaaactagggacaaataagaacatggaagaaaggyggaccctgggagtcccctgaaacccacacccaaaaggaagtttaagatgatcttggcatctgtcactttgatttccttcaatttccttcatctcagaagggcaaagcttagacaaaaccttgtctcaaaattatccgttcattttcatttttagataactgatactaaagctacttccttatgcaggacagagcagttggatatttttgaaagatatttctcattataactgtaattaagggtggggtttttcatgtgcatgcagtttcagaactttcttggcagtcgtttttccttggcttatcgcagctacacagaaga

SEQ ID NO: 509999 - DNA, 531 bp, Homo sapiens
tgacctttccagtcacttacctccttagggatgccagatcatcccagtgagatcatttattatgctttacactatattttatgcatcatgacagtcttgtgaccacaaagacacagtggctcactttactttggaaaacattctctgatgcagctaagtttcaagcttatgatccaaaactagggacaaataagaacatggaagaaaggtggaccctgggagtcccctgaaacccacacccaaaaggaagtttaagatgatcttggcatctgtcactttgatttccttcaatttccttcatctcagaagggcaaagcttagacaaaaccttgtctcaaaattatccgttcattttcatttttagataactgatactaaagctacttccttatgcaggacagagcagttggatatttttgaaagwtatttctcattataactgtaattaagggtggggtttttcatgtgcatgcagtttcagaactttcttggcagtcgtttttccttggcttatcgcagctacacagaaga

SEQ ID NO: 510000 - DNA, 413 bp, Homo sapiens
agctgggatcagaacaaaagttctggtgagtgcgtggtgtatttagggaattacaagtacttccactctggtttttgcagaggggagggaaaaggctaatgaagaggaggcttcctaggcgcagtggctcacacctgtaatcactcactttgggaggctgaggcagatggatcacttgagctcaggagttcaagaccaacctgcccaaaatggtgaaaccccatgtctactacaaatacaaaaattagccaggcatgatggcgtgcatctgtagtcccagctactctggaggctgaggtgagagagtcatttgaacctgggagttggaggttgcagtgagccaagagcacactactgcactccagcttgggyaacagagtgagactgtctgaaaaagaaaaaaaggaggcttg

SEQ ID NO: 510001 - DNA, 413 bp, Homo sapiens
agctgggatcagaacaaaagttctggtgagtgcgtggtgtatttagggaattacaagtacttccactctggtttttgcagaggggagggaaaaggctaatgaagaggaggcttcctaggcgcagtggctcacacctgtaatcactcactttgggaggctgaggcagatggatcacttgagctcaggagttcaagaccaacctgcccaaaatggtgaaaccccatgtctactacaaatacaaaaattagccaggcatgatggcgtgcatctgtagtcccagctactctggaggctgaggtgagagagtcatttgaacctgggagttggaggttgcagtgagccaagagcacactactgcactccagcttgggcracagagtgagactgtctgaaaaagaaaaaaaggaggcttg

SEQ ID NO: 510002 - DNA, 605 bp, Homo sapiens
tggggtgcctctggttgtaatttgggtggaattcacaagaaatctccaccttatccctcccaccttcttccaggattgcttcctcatgtggactggataaacagctggagtggaattttaacttcacataaacgagtgctgctaagctgccttggatcactagcctcccactcaggtcccagagtagccgcccagctgctccagcagctgcatttaccaactccaggggccactccatccagtcctggacttgtgtggtgcagcacccctgcactgtgcccatgtgtttccaatcaccatgcagcccttgaccagagccctagcgtccgcttcttaaagtcagggcttttgtctccatcatctttcttcagcacccagtacaggacaggcccaagggacctgattagtgaatgtttattcacatactgcccatttttctgtgtgagtttgccctgtttttctgaacatacttgtctgtaacttccttgaaggctggaggtggcatcatctgaacccaycatgatgattggcatggagtcacatgcagcaaacatttacagaataaacgggtgtgacgtgcagaggtcctgaagggtgagcaggga

SEQ ID NO: 510003 - DNA, 631 bp, Homo sapiens
gggatgcgaagggctcttagctctaaggcatctctcaatctctccagggatggtctccaccagcctttcctaacatgagctcctttgattttcttgaagcttggtgatcacagcccaaggtgatcaccgaggtgactaaagaaagcagcagcaactgaaattgcaggtcccatgatagtgggtggggatgtggcagcaagcagcctccctggccctggagtccctccatgctgtgggaagagggytgagcagggcaggtggcagccctgtgggactgagggtgctggctggtgaaccctgttcagttccaccccaccccagctaccccaggatgctgtgtgccatcagcctgctttatgatcccaggcacctgggaagagagaggaatagctcctctaccagagttacagtaatggcaggagtgagtgccagcctgtgggacccattactcctgctctttctattccttccccaacaataaaatgggcagaagcatcagctgagctctctaaagttcagcctcaaactcaagaggcccaggctaggcgtggtggctcccagcactttgggaggccgaagcgggaggattgcttgagcccaggagttcaagatcagcctgggcaacagagtg

SEQ ID NO: 510004 - DNA, 631 bp, Homo sapiens
gggatgcgaagggctcttagctctaaggcatctctcaatctctccagggatggtctccaccagcctttcctaacatgagctcctttgattttcttgaagcttggtgatcacagcccaaggtgatcaccgaggtgactaaagaaagcagcagcaactgaaattgcaggtcccatgatagtgggtggggatgtggcagcaagcagcctccctggccctggagtccctccatgctgtgggaagagggttgagcagggcaggtggcagccctgtgggactgagggtgctggctggtgaaccctgttcagttccaccccaccccagctaccccaggatgctgtgtgccatcagcctgctttatgatcccaggcacctgggaagagagaggaatagctcctctaccagagttacagtaatggcaggagtgagtgccagcctgtgggacccattactcctgctctttctattccttccccaacaataaaatgggcagaagcatcagctgagctctctaaagttcagcctcaaactcaagaggcccaggctaggsgtggtggctcccagcactttgggaggccgaagcgggaggattgcttgagcccaggagttcaagatcagcctgggcaacagagtg

SEQ ID NO: 510005 - DNA, 391 bp, Homo sapiens
gtagcatacactccatacaaagcagctatwagcattttctctatgacactcagaaatatatgaaagtatataatagacatgcttttgccttttttttaatgagcatctccttggcccactttctatacacaacttcactggctttatttctctgcaaatgtttattgccacagctttcctaggtgaaatgtcaataattggcaatcttcacttccagtttctaatacacctctctgagaccttcctctgcagcccacagagcagcacagccacctcctaccacacacatgctaggctctgcccctggccctggaacaggagtcatgaggcactccaggacagattgcttgaatctctacttcctggacaccaggcctgtctccatggtacc

SEQ ID NO: 510006 - DNA, 524 bp, Homo sapiens
ctgaacacgacacgaggctccagcccacagtcaccttccctttctcagaactcttattatgcttcctgtctaacttggaattgcttagattttgcttatattctagctgtgtatcattctgttaagtttcctcagcctccctggtaatcaccactcctgtccatgtaagattttccatttacaaattactctcatatacataaatatactcctgaaagtggaccttgaacttcacttctcttccttcctacttttgtgacttcatggcccaraaaactaagcaggatttctccaagataagaacactgaaagcagagacattctaaaagcatgttaaataaaataaaacatgtagtaaatacctacttttagccctcgcaagtgaagggctcacaagctggtgaggaagacatctgaagaacacatcgctctatgacctcagaagtcacatctgtgtttggccctgagaggaagaagccactctattaatggttcagacaaggttcaggaaactttgaatttat

SEQ ID NO: 510007 - DNA, 639 bp, Homo sapiens
tggaaggggacaaggggatttggagaatattgaaacaaactctagctattttgcaaatggggagactgaggcccaaagagaggaggagattctttaaggctattcaatgagtgagaaaatgtgtaaagtttaaacaaactggaagaaagattatagctagcagttattgaacagtaactccggactgggtattataccaagcccttacaacaactctgctatttacatactactgtattgttagtcccattttacagataagtaagctgaggctcmgggagtttaagaaaccagcctaatgtcagacagctagtttggtaccagagtttgtgttcttgactactacattatattgtgtatgcaacttttcctagtagaattgtaggtaaggaggatttaatttatattcagccttgtggcatagcccagcttggcatttaagatccagatgggcctatgtttaatccagcctctgccatttaatagttctgcttttggcctggggcaagttattcatctcctcaagtcctgggttcctcaggtataagataagacaatctgtgtccatagagctgctgagaaaattaaacagcaagcatagcctagtgcttgagacagctagttgtgactcatagctct

SEQ ID NO: 510008 - DNA, 500 bp, Homo sapiens
gtcccattccagaattcccagaatcagtgagatacattatatccactgacaggagcttagatcctgagcctcccagccagagaaaatctgttgctgttcattgtcatctaattttgtttagtttttaacagcttactcaaggtataattgcatataataaactggttttgcttatttgtattttaaaaaatatttgtgatgaacatgtattactcatgtcactgaaaaaagtacaagaactctctctgaaaagtataaatcttttttggggggagagatgcatataattgcacgtattatactataattgcaattataattgcatataatattaaaaacatacaatttgtaacttagacataccctgtgaaaccattaccacaatgaagaccaaaaacacatccgtcacccccaaagtttcctcatacccctttttagttcctcatatcaccaccctgtctcccaaaagccttstacatgacgacatttttcttcctttc

SEQ ID NO: 510009 - DNA, 565 bp, Homo sapiens
ctggctctccttcaccttctgccatgagtggaagcagcctgaggccttcgccagagacccaatcttaaactttttcagacattagaattgtaagccaaataaaccctttttctttataaactaatcrgcctcaggtattcctttatagaaacacaaaatggactaagacattaactgagatgatcatgtggttttgtcctttataccatttaagggtgtattacaccgatttaaaaaatttttattttaattgacaaataataattgtatataattattaaacacaatctgatgtgtcaatacatgtatacattgtggaatgaacaaattgggctaattagcatattcatcacctcagatatttatcatttttttgtggtgagaacactgaaaatactgttttagctattttgaaatatacactccattattaactattgtcaccatgctgtgcaacagaacacctgaactgaaactttgcacccactgaccaatgtctcccctttctctatctactgcccccacccccagcctctggtaaccatcattctactatctacttttc

SEQ ID NO: 510010 - DNA, 565 bp, Homo sapiens
ctggctctccttcaccttctgccatgagtggaagcagcctgaggccttcgccagagacccaatcttaaactttttcagacattagaattgtaagccaaataaaccctttttctttataaactaatcagcctcaggtattcctttatagaaacacaaaatggactaagacattaactgagatgatcatgtggttttgtcctttataccatttaagggtgtattacaccgatttaaaaaatttttattttaattgacaaataataattgtatataattattaaacacaatctgatgtgtcaatacatgtatacattgtggaatgracaaattgggctaattagcatattcatcacctcagatatttatcatttttttgtggtgagaacactgaaaatactgttttagctattttgaaatatacactccattattaactattgtcaccatgctgtgcaacagaacacctgaactgaaactttgcacccactgaccaatgtctcccctttctctatctactgcccccacccccagcctctggtaaccatcattctactatctacttttc

SEQ ID NO: 510011 - DNA, 565 bp, Homo sapiens
ctggctctccttcaccttctgccatgagtggaagcagcctgaggccttcgccagagacccaatcttaaactttttcagacattagaattgtaagccaaataaaccctttttctttataaactaatcagcctcaggtattcctttatagaaacacaaaatggactaagacattaactgagatgatcatgtggttttgtcctttataccatttaagggtgtattacaccgatttaaaaaatttttattttaattgacaaataataattgtatataattattaaacacaatctgatgtgtcaatacatgtatacattgtggaatgaacaaatygggctaattagcatattcatcacctcagatatttatcatttttttgtggtgagaacactgaaaatactgttttagctattttgaaatatacactccattattaactattgtcaccatgctgtgcaacagaacacctgaactgaaactttgcacccactgaccaatgtctcccctttctctatctactgcccccacccccagcctctggtaaccatcattctactatctacttttc

SEQ ID NO: 510012 - DNA, 593 bp, Homo sapiens
gagctcattattctacagaaactagcaagaacagaaaaaccaaatactgcatgttctcacttgtaactgggagctaaacattaggtactcgtggacataaaaatggtaacagtagacactggggactactagagtggggagggacagggacaagggttgaaaaactgctgggtactatgcttactacctcagtgatcagatcatttgtatctcaaacctcagcatcatgtaatgcatctacgtaacaaacctgcacatgtacccactaaatctaaaataaaagctgaaattataaaataaaaaaagaaaacatggcatataaacacaatggaatgctattcagccttaaaatgggagagatcytgtcatttgagacaacatggatacaactggaggacattaagctaagtgaaataagtcaggcacagaaagaccacacgatcacacttatatgcggaatacaaaaaactgaacacatagaagtagaacgtgcaatgaggaataccagaggctgagggaaggttgtggtcattctgcaatcattctactttgtgaacatatattctgcactgttaaaacatcatattgtatcc

SEQ ID NO: 510013 - DNA, 593 bp, Homo sapiens
gagctcattattctacagaaactagcaagaacagaaaaaccaaatactgcatgttctcacttgtaactgggagctaaacattaggtactcgtggacataaaaatggtaacagtagacactggggactactagagtggggagggacagggacaagggttgaaaaactgctgggtactatgcttactacctcagtgatcagatcatttgtatctcaaacctcagcatcatgtaatgcatctacgtaacaaacctgcacatgtacccactaaatctaaaataaaagctgaaattataaaataaaaaaagaaaacatggcatataaacacaatggaatgctattcagccttaaaatgggagagatcttgtcatttgagacaacatggatacaactggaggacattaagctaagtgaaataagtcaggcacagaaagaccacacgatcacacttatatgcggaatacaaaaaactgaacacatagaagtagaacgtgcaaygaggaataccagaggctgagggaaggttgtggtcattctgcaatcattctactttgtgaacatatattctgcactgttaaaacatcatattgtatcc

SEQ ID NO: 510014 - DNA, 474 bp, Homo sapiens
ctaggatgttcgtaagttatttacaaaaaagttggaaaaaatttcctttcacattcaaagtcagacttctattaacttattgggtcaaattaacatgtttaaaatgactttagagagcctgctttgagtttatgagaagaaatatataaactattgaaggaagatagaatgagtgagaaaatcagaaagtaacttagtataatccagacaacaaagagaaggaatgtgtgtggtatttgtttggggtggatgttgataactatagatggcatgacacaaataatcaagttacattttatggtaggcgtatttctaacagcttaagyttatacactattggatattccattagaaaagatattgtgcaaagtgattcaaaatgagtttcattagcacagagaagtagagcctacagaaatagaaaacacattctataaatttccaaaagggatcattcccaaataccccttactt

SEQ ID NO: 510015 - DNA, 651 bp, Homo sapiens
ctgcgagcctcctcatggctgagcctcagcccccatgcagcatcagagccactgcagtcttggcttcccaggagaccagcccagaagcagcaagaaaggggacctggaaaccaggaggtctgcttccagggaaggccctctgatataatttggatatttatctccacccagatttcatgttaaattgcaatctccagtgctggagttggggcctggtgggagttgttttgaccatgggggtagatcccccatggcttggtgctgtcttcgagatagtgagttcttgtgagatctggttatttaaaagtgtgtggcatgtccctccccacacccaccgactctctcttgcttgttcctgttttggccacgtgatgtgcctgctcatgattgtaagcttcctgaggcctccttagaagccaagcagatgccagcaccatgcttcttgtaaagcccgcaaaaccatgagmcaattcaaactcttttctttataaattaccttgtctcagatatttctttatagcaatgcaaggatggcctaatacaccatctttggagactagctagcacatgggccttctccatctgtagctacacttctagaacacacgtggcttccaaggctactgcagcagccgggggaagagctcaggg

SEQ ID NO: 510016 - DNA, 593 bp, Homo sapiens
cgaacctgaaaagaagaaatataaacctccatggcttggaggtgagagaatatgtaaaatagtaagacaagggcctaatccccaactcctggtcaggaattaggaaaggagacctgttaatttgactagagattcttttagggtctgtgaatggatacagggtgctgtargcggctggtacctttcagccaagaaccagagcctgtgaagcaaagctcatgaaaatgtctgtctctctaactcgccactccccattatatttgggtatctggaaaacaacttttttttgtgtcacatgtattttatttcattgaatatcatatgaacatcgggaaaaatgtgagacaacaaatcctagattatcaacttaggtaacagagaggaggaaggcccaagcaaacataagaaaaaagttctgtactgaaacacagctattccattctactcatttgtaaagttaaagtgtgaatattagaaagtaatacaatattaaggacactaaaagaaagaataccccctagatttgtggtacaagtgtgtggctgtgaaaaacaactttatacatgaagaattcactggagtaaatatcagag

SEQ ID NO: 510017 - DNA, 593 bp, Homo sapiens
cgaacctgaaaagaagaaatataaacctccatggcttggaggtgagagaatatgtaaaatagtaagacaagggcctaatccccaactcctggtcaggaattaggaaaggagacctgttaatttgactagagattcttttagggtctgtgaatggatacagggtgctgtaagcggctggtacctttcagccaagaaccagagcctgtgaagcaaagctcatgaaaatgtctgtctctctaactcgccactccccattatatttgggtatctggaaaacaacttttttttgtgtcacatgtattttatttcattgaatatcatatgaacatcgggaaaaatgtgagacaacaaatcctagattatcaacwtaggtaacagagaggaggaaggcccaagcaaacataagaaaaaagttctgtactgaaacacagctattccattctactcatttgtaaagttaaagtgtgaatattagaaagtaatacaatattaaggacactaaaagaaagaataccccctagatttgtggtacaagtgtgtggctgtgaaaaacaactttatacatgaagaattcactggagtaaatatcagag

SEQ ID NO: 510018 - DNA, 654 bp, Homo sapiens
gttttatttttcaaaaatttccttaatgtggctgctgtggtttgaatgtcccctctaaaagtcatgttgaaatttaatccccaatgcggcagtattgagaggcagagtctttaaaaggtagttgggtcatgagagccctcatgaattaatggattaatgagtgaatgaatgaatgggtcatcatgggagtgggactggtggttttataaagagaagagagaccccagtgaacamacttagccgcctcaccatgtgattccctttgccgcctcaggacggcaagaggccccaccagtaagaaggcactcgtcagatgtccccctgacattgaactctacagcctccagaacagtaaaaaaaaaaaaaagtttgtttgtctataaattacccagtttcaggtattctgttataagcagtagaaaatggagtgagaaatggctctatgagcttttcaaataaaataacatgtaagaataattcctggcctattgcctgacagtcatagtgttccccattctatttctgtcacttatttgggaaggttttcctgattctcacctctcaccccagtcatccctgtggcatgtttctatatcactgtattgatgacaatttactgtactataaagtacagtactgatgacaactttacag

SEQ ID NO: 510019 - DNA, 586 bp, Homo sapiens
cccttagtaggttagtgaagagagtcattgtacataaaattctaagttcagtgagggacagttataacttttgcagggaaattgatgaagctggaaaccatcattctcagcaaactaacataagaacagaaaaccaaacaccacatgttctcactcataagtggaagttgaacaatgagaatacatggaaacagagaggggaacatcatacaccagggcctgttggggtgtgggggggctagaggagggatrgcattaggagaaatatccaatgcagatgacaggttgatgggtgcagcaaaccatcatggcacgtgtatacctatgtaacaaacctgcacattctccacaggtatcccagaacttaaagtataataataataataataaagcaataaaagccatatttagtcttatattcattcatgcaccaaaaggcagaaatcagtccacagatcctctcccgctgcccaggggctacaggggtcctgccgggctggccctgtctgccccggggcagacctgtacatcacacacactgccagtcttaatctgtttgtgacacgaagccactgccctcccccta

SEQ ID NO: 510020 - DNA, 610 bp, Homo sapiens
cttcacagatttggctattgcaaaggcaatgattcatgcccaatcatgaagctcaagcacagttcatttactacctaaaatatatctttgccaaatagaggctgatgtattgagctaattgtcaggataataacaatcaaatraaaagtgagtgaagaatgaagaagctgtttgtttgcttttttgttgttgttcttgtttttgtttttttcttttgagatagtttcactcttgttgcccaggctggagtgcaatggcgcagtctcggctcactgcagtctccgcctcccaggtttaagggattctcctgcctcagcctcctaagtatctgggattacaggcacgagctactatgcgtggctaatttttgtatttttagtagagatgggggtttcatcatattctttaggctggtctcgatctcctgacctcaggtgatctgcctgcctcggcctcccaaagtgctgggattacaggcgtgagccaccacgcccagcctgcttagcttttaaaattagattattcttctcttatagtgaaacctcttccttgtctttacctcacagaaaattgtcttctccaggactaccataaaacaaaacctaatatg

SEQ ID NO: 510021 - DNA, 610 bp, Homo sapiens
cttcacagatttggctattgcaaaggcaatgattcatgcccaatcatgaagctcaagcacagttcatttactacctaaaatatatctttgccaaatagaggctgatgtattgagctaattgtcaggataataacaatcaaatgaaaagtgagtgaagaatgaagaagctgtttgtttgcttttttgttgttgttcttgtttttgtttttttcttttgagatagtttcactcttgttgcccaggctggagtgcaatggcgcagtctcggctcactgcagtctccgcctcccaggtttaagggattctcctgcctcagcctcctaagtatctgggattacaggcacgmgctactatgcgtggctaatttttgtatttttagtagagatgggggtttcatcatattctttaggctggtctcgatctcctgacctcaggtgatctgcctgcctcggcctcccaaagtgctgggattacaggcgtgagccaccacgcccagcctgcttagcttttaaaattagattattcttctcttatagtgaaacctcttccttgtctttacctcacagaaaattgtcttctccaggactaccataaaacaaaacctaatatg

SEQ ID NO: 510022 - DNA, 610 bp, Homo sapiens
cttcacagatttggctattgcaaaggcaatgattcatgcccaatcatgaagctcaagcacagttcatttactacctaaaatatatctttgccaaatagaggctgatgtattgagctaattgtcaggataataacaatcaaatgaaaagtgagtgaagaatgaagaagctgtttgtttgcttttttgttgttgttcttgtttttgtttttttcttttgagatagtttcactcttgttgcccaggctggagtgcaatggcgcagtctcggctcactgcagtctccgcctcccaggtttaagggattctcctgcctcagcctcctaagtatctgggattacaggcacgagctactatgcrtggctaatttttgtatttttagtagagatgggggtttcatcatattctttaggctggtctcgatctcctgacctcaggtgatctgcctgcctcggcctcccaaagtgctgggattacaggcgtgagccaccacgcccagcctgcttagcttttaaaattagattattcttctcttatagtgaaacctcttccttgtctttacctcacagaaaattgtcttctccaggactaccataaaacaaaacctaatatg

SEQ ID NO: 510023 - DNA, 187 bp, Homo sapiens
ttcaagatgctatacatgtttctaacagcttaatgaaatggagaagtagctactaattttctttccaaaatagaaagataaaatagagtattccaactgtctcacacatatttatgacttaataaatgactttcaatattagaaaaatatgttwtgtttctaactccaaggatatctacatctatct

SEQ ID NO: 510024 - DNA, 633 bp, Homo sapiens
aattggtatgtgtttagagtccatttctaggaaagcatatgttcttaattatcattcttacatatttatattccttcactcatgtataaaatcttaatttgtcacttaatgcttattttatcatttatcgcaattttaatcttttttctacaatttacaatataatttcctttccaaactgatatttttaaactttctgtactatttttatttaaattggtttctcatagaaaatgtactgtgatatttttggttttgttttgtttttcatccaatattaatctatcattttctgagtaaggtaaatgaaagcaccccactatgttctggcattttctatttcttctagaatactagaaatgtctgctttatgtattttaggttatgtagtttgctcaaaaattcatcatgaatttgatcttgtttttgttatcactgcyttttttcctttttgtcctacgtttatagaattcctgataatatcaagggacctcaggaaagtcagtccctttttcacttgcaaaataaaaacaaataaccattaacatttttctgtatctgttagaatcctctggagagtattacttccttttcataatattttgagttataaataaactaagatttgaagtc

SEQ ID NO: 510025 - DNA, 633 bp, Homo sapiens
aattggtatgtgtttagagtccatttctaggaaagcatatgttcttaattatcattcttacatatttatattccttcactcatgtataaaatcttaatttgtcacttaatgcttattttatcatttatcgcaattttaatcttttttctacaatttacaatataatttcctttccaaactgatatttttaaactttctgtactatttttatttaaattggtttctcatagaaaatgtactgtgatatttttggttttgttttgtttttcatccaatattaatctatcattttctgagtaaggtaaatgaaagcaccccactatgttctggcattttctatttcttctagaatactagaaatgtctgctttatgtattttaggttatgtagtttgctcaaaaattcatcatgaatttgatcttgtttttgttatcactgccttttttcctttttgtcctacgtttatagaattcctgataatatcaagggwcctcaggaaagtcagtccctttttcacttgcaaaataaaaacaaataaccattaacatttttctgtatctgttagaatcctctggagagtattacttccttttcataatattttgagttataaataaactaagatttgaagtc

SEQ ID NO: 510026 - DNA, 437 bp, Homo sapiens
tccagtaaactgaatgaatgaacatggatgctaaattttgagagcaccatgaatgctggctgtgctttgcattaataattagcacagtgttccctcatagagaggagatatgtccaaacttggactttcatgacaattaccctcggagtttcattttgccttttcatctttgtcagtgctggcaccaagcttgctgttgtatgtctggctctatcaaacaataaaagtaacccattcaaaaagtcaaacaacaggagtggtttttaggaaaccagaagccaaactgattcaccaggttggcctccttcccagggagagagataatgctagctagtcgtcgtagcsgttagcctgggcaggagcagagtgatcgcacttcaggattcccgactacatggctggccaggcgagttaaagaatgtctagggtgagagtga

SEQ ID NO: 510027 - DNA, 476 bp, Homo sapiens
gatggaaaaggctaggccagggacctgggaggagcaagaatgggaatatcagggacaaggactctggggaagaggcatgtggatagaacactgggcagaggccttgcatccccttttaatgcctaccagagggcatctactacaggagaagcaccgaacaacmaaatagaacacaaaactagtggcccatgtattgtacctatggggacacagtaccacataatggtccctgacttagggtcctagaggatggtgtcccaagaatgcagggtttcatcttcaagccggtagctaatctgctcctttaaaagcccatctcatctctccatcaggccagcagcttctaggagatataataagtgacaggatgagcagagcccacggtcaaatgctccctgctgcaacttcttcgctataaagcgactcactcgcccatgtcagctagcctctctcatggccgcctacgtgctggtaca

SEQ ID NO: 510028 - DNA, 569 bp, Homo sapiens
ctactacctgtctgcaagaggcaggattttctttatagacctcaaccaaaacaacatattgcaacaaattaaatgaaacagcaaacgtgggaacccaactgtgttggttaagacagacattaaagaaataattgccaggcrcagtggctcaacctgtaatcccagcactttgggaggctgaggcgggcagatcacctgaggtcaagagttcaagaccagcctggccaacatgacgaaaccctgtctctactgaaaatacaaaaaattagccgggcatggtggtgtgcacctgtagtcccagccactcaggaggctgaggcaagagaattgcttgaacccaggaggccgaggttgaagtgaacagagatggtgccactgcaagactccgtctcaaaaaaaaaaaaaaaagaaagaaatattttacctgtggaagcatgctccttttccatgaattcattgcccttttctctaacttgtcagccttcaatatcatcctccaccataaatccttccttgaccctccagaattggcatagatgagttcccttcctctgtcagttaccttttgc

SEQ ID NO: 510029 - DNA, 569 bp, Homo sapiens
ctactacctgtctgcaagaggcaggattttctttatagacctcaaccaaaacaacatattgcaacaaattaaatgaaacagcaaacgtgggaacccaactgtgttggttaagacagacattaaagaaataattgccaggcacagtggctcaacctgtaatcccagcactttgggaggctgaggcgggcagatcacctgaggtcaagagttcaagaccagcctggccaacatgacgaaaccctgtctctactgaaaatacaaaaaattagccgggcatggtggtgtgcacctgtagtcccagcyactcaggaggctgaggcaagagaattgcttgaacccaggaggccgaggttgaagtgaacagagatggtgccactgcaagactccgtctcaaaaaaaaaaaaaaaagaaagaaatattttacctgtggaagcatgctccttttccatgaattcattgcccttttctctaacttgtcagccttcaatatcatcctccaccataaatccttccttgaccctccagaattggcatagatgagttcccttcctctgtcagttaccttttgc

SEQ ID NO: 510030 - DNA, 428 bp, Homo sapiens
tgtttttacttagggtggagggtccaggtttgagggtggagtttagttgggagccattctgtatcactaggacaacattgataacacagtcccagggctgtgggtgggtatgaggattggggggtttcaggattcaggtttagggatgaacaaagaatgcttgagccttatcacgtaactactgctaactacttggtgctttcctttcctataaatttatatggaacctacataaagaagagggaattaacataaatrataatatactaaatatacctgttggtgattttttttttttgagacagggtcttgctctgtcaccaaggctggagtacagtggcaggatcttggctcactgtaaccttgacctcccaggctcaggtgatcctcccacctcagcctcctgagtagcttgggttagaggcgca

SEQ ID NO: 510031 - DNA, 536 bp, Homo sapiens
cgggggttgtggcagaccctggttcccaagggcctaggaagctcctgccatcctctcctccagcgccgcctccctccaccttcctccccaggtctcgggcctctgccttgcccggcagtttctggccgtgggagcctagcttcccaaacctggagaatcatctgactttcctctcacttgggctggcagcaaaggyccagagagcacaaagttgctttgaatttatataaaatatattggtctcaaggctgggttcctcttcctgctgttctgtgttctctagagctttggcctttggttgaaggacttttaatcaatatctcccttcctagaggctgcaaccgtagaacaggaactctgggaagaaatagtcacagaacattgtgtctgcacctcctgtgtgctttttctatggctagaaggtggcaccaggtgactgggtccagcgctgtctttgtgcagctgaggaaagtgaaatccaggagaggggagagtcgtgttccatgtcacacagttcttgctggatggaagctgga

SEQ ID NO: 510032 - DNA, 585 bp, Homo sapiens
gtgcagctgaggaaagtgaaatccaggagaggggagmgtcgtgttccatgtcacacagttcttgctggatggaagctggaccccaagtctgctgattctgtctgcccttcaagggaccatgatctcacccgactgtattttctgtaagcagtgaccagtgtctaaaggtacttacatgtttacctgactcttctctgtctttcccccaccagcatgacacatccaccaacatgacagagctttgggatgttgttgctctcgtcttcagcacaaccctgtgcctgaacagtgtctgacgcatagtaggacctcagcagatacttgtggactgactctgtccagtgcccttttctgcgactccggtctgctttaagagccctgtgaactcagtgtttaagaagaaacactaaaccagagactcactcaggtaaataaaaacgctcatctttcctggactcttacttcagtgaaccaggctggtcccaattggacaaataaggagaacagctctgtgaatcactctcttcgctcctgcctttggcacccagagaggttacctcactcacctcgaggcagaaagagctg

SEQ ID NO: 510033 - DNA, 614 bp, Homo sapiens
tgaggaaagtgaaatccaggagaggggagagtcgtgttccatgtcacacagttcttgctggatggaagctggaccccaagtctgctgattctgtctgcccttcaagggaccatgakctcacccgactgtattttctgtaagcagtgaccagtgtctaaaggtacttacatgtttacctgactcttctctgtctttcccccaccagcatgacacatccaccaacatgacagagctttgggatgttgttgctctcgtcttcagcacaaccctgtgcctgaacagtgtctgacgcatagtaggacctcagcagatacttgtggactgactctgtccagtgcccttttctgcgactccggtctgctttaagagccctgtgaactcagtgtttaagaagaaacactaaaccagagactcactcaggtaaataaaaacgctcatctttcctggactcttacttcagtgaaccaggctggtcccaattggacaaataaggagaacagctctgtgaatcactctcttcgctcctgcctttggcacccagagaggttacctcactcacctcgaggcagaaagagctgctggattactcacctgctggagagcttgtcaccagc

SEQ ID NO: 510034 - DNA, 506 bp, Homo sapiens
gaactagaagaacttgaccctcatgagtgatattacaagaagcagggttgagaggagattcagatgctggtcctgacacctgccctgtgtgactttgagactcagtttccttatttatacaataaaggrtttggattaggtgatctccaaggtccctatatgtcatctaaatgctagggaaggatctggcaagctctttttttcgtcttcttcttgagacggagtcttactctgtcacccaggctggagtgcagtgaggcgatcttgactcactgcagcctccacctcctgggctcaagcgatcctcccacctcagcctcccaagcagctgggattacaggcacccgccaccacactcaactaatttttgtagttttagtagtttagtagagacaggatttctaccatgctggccaggctggtctcgaactcctggcctcaggtgatctgcccacctcagcctcccaaagtgctgggattagaggcgtgagccatggtacctggcc

SEQ ID NO: 510035 - DNA, 453 bp, Homo sapiens
ctctgaagcccaccaggcctgtacagactggggaaacaccagtgcctgaggatagtggctaaactgccagagaacatggggctgaggtggagcctggatgactcttctgcctctgagcaaagctgcttgccctacacacaacagtattgtcttaacatctgctgagttcccaggtcctcttagcagcaggcagaggcattcagagcccagaccccaaagacatgctgatctggtttaaacctgactgtgctactcatcaactgggggacctaggcaggttacattgtctttttgtgcctcagtttcctcatctatagaatagaggtattctagtttcctgtgatttctgtaataaatttacaaactttgtaacaaattaccacaaatttggtggcttcaaacgatagaaatktattctctcacaaacctggagaccaaaagtctaaagtctct

SEQ ID NO: 510036 - DNA, 584 bp, Homo sapiens
ttaaagtcattttgtctgggggaacagttggtattatcaggtaaggagcattcagaagcattaggaagcttctgggatgttgggaatattttccattttgatctgggaggtcaagtatatacctttctgtgtgtgcatgtgttgtacaaaaactcactgagttatgcacttgaaatctgtgctcctcgttgtatatatgctatgcctcaaaaaaactttctgagataggaatctgtttcatcctagctgatacacagaagaaaagtgtgattctattctacatttggataaatgggaaggaaaaatagaaacattttctgggaaaaatgttgtggacccaggaactgcacaaagtttatttttaacttcattcatgtaacttgtctaccgcagacttccacataagcacagctctagatttgcaggcaactcttgtaatctacccactggtgggttcaaatcatgaagtctcaatagtgagctccagctcagtgagaggaaacttagttccaaaggaaaatgagcctcggcagggagaaatktgtggggaaataaaggaaatggtcagactccagcagaatttt

SEQ ID NO: 510037 - DNA, 486 bp, Homo sapiens
actgggaacaaaattccggagtcagckcggcttaacagcatgcagtgtgcgctccaccccctcagcttcacaagggctcagctcctctccgggctcagtttagaaagatccctgccagggaagagtgggctgcccgggaaaggtctcccaagcacggggtctccggtggcgatggaagctccacttccccactggagacacgtcctgtctgtccaagcatttgggactggaggacaataattatatatctagggaagaaattttccaaacctagaatttttatttaacagatagactgtcggctgctctgacaacaatgaagaacgaaaagacttctggaaccattttcagagtaagggaacctatatcattcattcacgggtgcctctcgtgacgacatgagaactagcttgatgtcactagcgattttttttttttaatgcaagtactgaagttcttgggtcactatttgaatccattttccct

SEQ ID NO: 510038 - DNA, 581 bp, Homo sapiens
tagcagttggaccacacaggctgagcctcggcttcccttccaggccatattcctggagaggcttcccttcctaagccaagggcctctggggctcttgcttcctccctacttcgcctttcctttccctgtgcaaagttggccaccgcctcctcttcttgaatcgcaccaggcttttcccagaaccccccttcacacgcctcctcctctagcccaactctgctcccaacagccggtttggcttccaggtcttccytgatgggggatagtggagtcctccccgctgcacagctcagccgcgctgcttcatcccttctttctggcagaagtgataaggggtcagagagccctcccaccagacaagagctgggcaaatagacctctccgcagagagcaggacagaaatgtttgctaaagcccacttgtgcagcgctattaaaatgcagcagttttgcctgcggaaccatttagaggcaaacatgtcaaaagctttccttacccatgtcagacgcattccttcgtatgaaacacaacggcatcccatgagcaggaggaccctcagagtcctccagggacccgcgttt

SEQ ID NO: 510039 - DNA, 581 bp, Homo sapiens
tagcagttggaccacacaggctgagcctcggcttcccttccaggccatattcctggagaggcttcccttcctaagccaagggcctctggggctcttgcttcctccctacttcgcctttcctttccctgtgcaaagttggccaccgcctcctcttcttgaatcgcaccaggcttttcccagaaccccccttcacacgcctcctcctctagcccaactctgctcccaacagccggtttggcttccaggtcttccctgatgggggatagtggagtcctccccgctgcacagctcagccgcgctgcttcatcccttctttctggcagaagtgataaggggtcagagagccctcccaccagacaagagctgggcaaatagacctctccgcagagagcaggacagaaatgtttgctaaagcccacttgtgcagcgctattaaaatgcagcagttttgcctgcggaaccatttagagscaaacatgtcaaaagctttccttacccatgtcagacgcattccttcgtatgaaacacaacggcatcccatgagcaggaggaccctcagagtcctccagggacccgcgttt

SEQ ID NO: 510040 - DNA, 524 bp, Homo sapiens
tccacactctttggcaaagagattctacttctaggaatgtttcctagtgaactattgagagtctgtgcaaaaaaatgagcagcgaggatttttttagtgttatttataacagggaaatatttaatgtccaataatagattgactatttaaatgatcacatatttctcaaatggaatactacagcattaaacattattttagaagaacatttaataatctggaaagacatccatagtattttaaataaaaaagcagattgcaaaactggatggtagtatgctcttactttgtttataaatagacttttatatgtggaattttaagcgtgygtatatactttttaaaggactagaagattgatcaccaaaaatatttcatagtacttgttgctggttggttggattctaatgaaattttcctcctttcgtaactggccaaggggttcaccttgctggctgcctagacagagccaattcctcaagacaggggaattgcaatagagaaagagtaattcacgcagagct

SEQ ID NO: 510041 - DNA, 691 bp, Homo sapiens
gctgcccatccacgacagatacctgttctgagtcattcacatagagggaaaatggcaacttaatgtttgacttggcttttttctctttagctattggagatcttaggcacaatctaccatcacatgccagtcctcagacaaaaagaagaaagttttcagttcattctagaagccatctcccagatagccagctttcacatggatacagttgttgtcaaccttttacagaagcctctgccttttgacaggtagatccttattgaactgattccttctcctagggaaggccactctgaaaggcactggggagggatttacggtttgagagcaagatagcaaacaaaggttgaaaatagctcatctgaataacaayttaacaattggtatttgaatcacaagtaatgtttttccaagtgcttttcatatatataagatatatatgtattgcataataatatttttaacaatatgccataggaataagagaatattaaaaagtgaatattctcctctttctggtggcctagaatgcacctacatgagaggttcccatcttagtggactttaacaaagttctgtaacccaaggctagaatgctgaattgttatgtaaaacatctttcttatccccaggcatggcagcatgtccatctgcccttgaaattgtcattagtcataatgtgattttagag

SEQ ID NO: 510042 - DNA, 636 bp, Homo sapiens
tgctttgcaaaccctcctgagaaggtgtaaagagacaagcattcctctgtaagccatcaagaaataaactgctggcttttcctatatctgactcctgtcttcatcctattacctcacaaacttggagcatcttgaggaaagagatgctgcctacgatggggatatagaagtggtggtatatttcttcctctctagaatctccttggtggcttccattagcaaaaagcaaatcccacaagttcacttcagggataacctgtgatttggatcgtgacagccacatggctttgcctaggttagccctctgtcttgagaaagtaagtcccagcagatatcaaaaagcggcagaatttgacccacataattctgctgccactaaaaagaggtccactgttattttccgcatgtagccctttcctctcagatctttgccagctttgaattactacccacactcctctttttaaaatcagtcttatgataaactttaacctgcctattctctcccaggttgtaatttatgtgtcaagagtatgccaggtacttttctacaaaagaacctgtctggcattctattaaatatcatcatttyctttctacttttatcccagaacaacagtgcatatgcacgcacac

SEQ ID NO: 510043 - DNA, 575 bp, Homo sapiens
aatagtttagaaatatttccataagtttgggagcctgtaatcccagtgctttgggaggccaacgcaggtggatcatttgaggtcaggagttcaagaccaggatggctaacatggcgaaaccccatctctactaagcatataaaaattagctgggcgtggtggcgcacacctgtaatcccagctactcaggaggctgaagcatgagaatcacttgaacccaggaggcagaggttgcagtgagccaagattgcactactgcattccagtctggatgactgaatgaaactgtgtcccaaaaaaaaaaaaaaaaaaaaaaaatttccataaaatgtgttaccttcctcattagcattggtgctaaaatagtrgaaaaaaatagctatttagaaatgtcactatcagaaaactccacatttctgaatgctgatagacaaggagggcattactgtcactgaaaccttagacaacacagcatttttgtataccagatggagtcagaaagagtctatattcacacactttatttagttctaatattttccttttctaccaaaagctacatttacttggagtta

SEQ ID NO: 510044 - DNA, 623 bp, Homo sapiens
atcactgaataatatttcagtatataggtgtaccatattttgtttatctactcacctattggaagacatcttgtttgcttccaagtttcgacaattatgaaggaaactgttagggttcattcatgtcaggtttttttttttttttcctgaatgtgagttttcaactcacttgggtaaataccaagaaactcaattataggatcatatggtaagtctatttttagctttggaaraaaccactaaacttttccaaagggtcattttcattcccaatgccaatgaataaccatccttgtcactccacatcctcaccagcctttgccattgaaactaaaggtcccctaccccatccctcacccaaccctttcacttattatattacttccaaaaacctttaaatatttgattctgtgacccctgttctttacgccatatttcaccaatgatctcttctataaatgacataggttttcgtattttttttttaatttggcctataggtattatttttctagaaagtaattaaaatgtatcaaagtcaccctgaacattagatgactgagtagcaatatctatatatgcaaagctaccattttcatatgcccataccaaataaatacata

SEQ ID NO: 510045 - DNA, 623 bp, Homo sapiens
atcactgaataatatttcagtatataggtgtaccatattttgtttatctactcacctattggaagacatcttgtttgcttccaagtttcgacaattatgaaggaaactgttagggttcattcatgtcaggtttttttttttttttcctgaatgtgagttttcaactcacttgggtaaataccaagaaactcaattataggatcatatggtaagtctatttttagctttggaaaaaaccactaaacttttccaaagkgtcattttcattcccaatgccaatgaataaccatccttgtcactccacatcctcaccagcctttgccattgaaactaaaggtcccctaccccatccctcacccaaccctttcacttattatattacttccaaaaacctttaaatatttgattctgtgacccctgttctttacgccatatttcaccaatgatctcttctataaatgacataggttttcgtattttttttttaatttggcctataggtattatttttctagaaagtaattaaaatgtatcaaagtcaccctgaacattagatgactgagtagcaatatctatatatgcaaagctaccattttcatatgcccataccaaataaatacata

SEQ ID NO: 510046 - DNA, 623 bp, Homo sapiens
atcactgaataatatttcagtatataggtgtaccatattttgtttatctactcacctattggaagacatcttgtttgcttccaagtttcgacaattatgaaggaaactgttagggttcattcatgtcaggtttttttttttttttcctgaatgtgagttttcaactcacttgggtaaataccaagaaactcaattataggatcatatggtaagtctatttttagctttggaaaaaaccactaaacttttccaaagggtcattttcattcccaatgccaatgaataaccatccttgtcactccacatcctcaccagcctttgccattgaaactaaaggtcccctaccccatccctcacccaaccctttcacttattatattacttccaaaaacctttaratatttgattctgtgacccctgttctttacgccatatttcaccaatgatctcttctataaatgacataggttttcgtattttttttttaatttggcctataggtattatttttctagaaagtaattaaaatgtatcaaagtcaccctgaacattagatgactgagtagcaatatctatatatgcaaagctaccattttcatatgcccataccaaataaatacata

SEQ ID NO: 510047 - DNA, 623 bp, Homo sapiens
atcactgaataatatttcagtatataggtgtaccatattttgtttatctactcacctattggaagacatcttgtttgcttccaagtttcgacaattatgaaggaaactgttagggttcattcatgtcaggtttttttttttttttcctgaatgtgagttttcaactcacttgggtaaataccaagaaactcaattataggatcatatggtaagtctatttttagctttggaaaaaaccactaaacttttccaaagggtcattttcattcccaatgccaatgaataaccatccttgtcactccacatcctcaccagcctttgccattgaaactaaaggtcccctaccccatccctcacccaaccctttcacttattatattacttccaaaaacctttaaatatttgattctgtgacccctgttctttacgccatatttcaccaatgatctcttctataaatgacataggttttcgtattttttttttaatttggcctataggtattatttttctagaaagtaattaaratgtatcaaagtcaccctgaacattagatgactgagtagcaatatctatatatgcaaagctaccattttcatatgcccataccaaataaatacata

SEQ ID NO: 510048 - DNA, 643 bp, Homo sapiens
ctttcaaactctacctaggacttttcaacttgagagcttttcttagtgcccaattatcagtttggggaggagaggcaacactacactgaatgaaaatactctcatgaggtgtagtaaagatttcttttctctttgggtcctgctaaggtgcaagctgcttgtttattctggggccagctggtttgggcatacatgctgaaataattaaatcagagatttcttgacactgtccctttctattacttcctatgttgattcccattcagttatttttgtgttaccctctccttacacctagaatttcctagggaactraaataattttcaactctattaagcaaaataatatggtcattgagtgacatttcctagagtgacatgactagctcattatggagctcaataaaataaagaaaacagcagttaattgaccctactctccttggaagatcatcatttgctacttgggatgacccttcggaatcacatcttccataagcagtgtatccaataattttataaacccatactgctctttgtaggaagattattgtgcaggaaagtgatctaagttgtcaagttaagaatagtagctacctgctttttgtatttttatgaagaatatatcataaattgttcataa

SEQ ID NO: 510049 - DNA, 655 bp, Homo sapiens
tcctgtagctgaagataagactgatttcatctctcttgagacaatgtctctaataagggaaggtcattctgtttgttcaccataaaaagcatgcaacatgtaataaaacaagtatagaagtattagtcaccatgactttagaatgcaggaggctaataaacctccctatcttttccttctgagttcaaagcagattgagaatcaagtcacaagtcaaaataataccaggttcatttaagataaattgagtagctttaaatattcagtcaaaagaggttaattattctcacccctacttaaacataattaccactattcagtgggacaggatgacaatcacagcctcttccatggggcctggtcctggatgtttatagcatggggaagatgagaacgatcttttggaggaaggttagctcccaaaagagggaaggaagaagagattgagctgaatagtcgagtttcttcttgtatatcagctaagttgcaggtagctcccatgggtggatggagagaactgaagtattccgctcgcataacacgtggaaatctgaaaagtggggcataaaggctttatcacattgttattctcaccatcarcactatcaccaaagccactgatttgtaagggtttggaatatatgaggtataagct

SEQ ID NO: 510050 - DNA, 292 bp, Homo sapiens
acccacactgtcctagaataaaattttcaattcctctgtcaaggattcttggctgcaaaacctgatactgcatttcccyttagcccttccacttctgtttttctcctcttcactaaacaactcacttcttcattaacaatatctctacttcatactacagaacttaatcctacaaatatttagtgggcttttaatatttgttgatactgtgtcaggaactggatctatgaaaatgcttgtcattttctgtgccctggagttgagtaatgaattgggcagcatctttaacagt

SEQ ID NO: 510051 - DNA, 247 bp, Homo sapiens
aatgtcaatggacaagatgtaaaagacaaaattgacatatagttttagatagatgcttaagatcttcttcattcttgatctctttaattggctgaatatatgattctagartgaaacaagaatacaattttaaaagatgatatttctgttggatttttatccatttgcccgcccaagatccttttctttcttttcttctataaaacaaggaaggacgaccgctgaatcttgtacgcccttatttcct

SEQ ID NO: 510052 - DNA, 573 bp, Homo sapiens
aaaagcatgaatatatctttataaaatcaaaagaacatttgctactactctgtttaccattgtgctaaatgtagcatgtagcatcttgtcttatctttatctctttaatatcagtatttaagctaagcaaacagattgcattttagaataaataataaaattatctctgtatgtgtgttggtttttttctttttgttctttgcttatggccagtctttttmaaaatccatttcctatagtataaacagaaggatgtatttaaatcatggattattcttactatttaaaaatactgctattttattgtgaaaagagcagtactaggattgagaaatgataaaactatgaaaattatcgtgttaatgtaaaatccagttggtttcactaaaatgaaataaaacccaaaacctgttttattgattcacacaaaactttataaattattacctacccttagagattttggaacattataaaacagacttagtttccccctatgaatgtgaaagaaaatggaaaaataatcatctcatgagaaaatggctttgaaacaagagtaacttctataagaaa

SEQ ID NO: 510053 - DNA, 210 bp, Homo sapiens
gtgtagggtcgcatactcataaacccagtgtaactcagaaacgaatctaatattccawtaaacccatcataacgttgaaaaatcataaatcaaaccatcataagtcacggtttgtctgtggatatgggcgtcatcaattccgttgtattcagtaatgctgtacaccattaacaatggcagactgattgggagtggatattgatagcatta

SEQ ID NO: 510054 - DNA, 593 bp, Homo sapiens
ctggctgccctctggctgcctcttcacagggccattcctccatgcatatggaccttgstgtttctctgtgtttccaaatctcttcttataaggacaccagttggactggattagggcccacccaaataacctcattttaacttgatcacctcattaaggctctgtctccaaatacagtcacagtctgaggtgctgggggttagggcttctttgacgcacgaatttttgggggacacaattcggcccatacagggataatcataaaccctacttcactgtgttattttgagaacaaaagagataaagaatatgaaagtgatctgtaaaaagccatgtcccttatcattgtgctactgagaagctgacaagcgctgggtgtgtgtgggaacctcttaacctcctcagaaagaaaagacacaagcccagctctgcttacagtggggccagattcagtccccacagtctagacaggtgagtgggagctgtcaggcctctttgcagacttagcccactaaggcgccggcaggcatgtcctcgggctcctctcctgcctccaaatttccatggagatgggcatgtgtccttggtggctt

SEQ ID NO: 510055 - DNA, 622 bp, Homo sapiens
cctgcagaagcttcagccccacctcttccctttctaacacacccagctctggctgacaaaaacatggttccccacacctccctgtctcaacacagtgccctgtataagatggccctccttagtatctgctgaccaaatggatgaacacacaaagaggaatggacagccttccctcaactaaatagccaggccctaaacccaagagccaagactattcagtaatcatagttttaatttattctagcaaaaaaagtaggaaaaaaggaaggaagggagggaggaaggaaggaaggaagggaggaaggaaggaaagaaggaaggaaggaagtcctgctggctggctaattaattgtccccaaggaaacacatataaacagattctccatcactctcagtggtcaagataatttacctaccttgggctgacttataataatccaatctattcatctttccaattatgaacaacttcacaatatctttcttgtaatttttttcatacacctttagcttatccatgtttaatattatrttgcagaagaatgagaaaccagggctgttctcatctcattggtgtgcccttggctttctctcaataaaatgtttgcagggtttgtatgct

SEQ ID NO: 510056 - DNA, 584 bp, Homo sapiens
tgtttaagggaataaaaagcaatcagccatcaagttgaggaggcaaggaacacagattccttttccaagaggttaggggatacagaggagaaagatgggagagaattaagggaatgtagagtaagggaagattctcctactatcatttgctggcttgccttttttttytccccccccttaaggttggtaaatcccgagcatgtttgcaaacagaaaagaagaaattcgtggagagtgagaggtaaaagatgcaatagagagaaggatcaagaccacagggagaggatttagcttaagaaaggagggagtcacacctttttcagggtgggagacaggaggagaagattgatagtttgtgtgttttttttttccttgtggggaagaaatcattacatgccaagaatgtgaggctattagcagggtagagaaacaacaaagctgtataatcaactcttaattatcagcattttggtttatcagcttcaaatcttgcttgcaagcaagttagcacttactcagcttaattacttgctttgttagcatttcaaactcaatgtaatataactttgtatgtggcctgcagc

SEQ ID NO: 510057 - DNA, 584 bp, Homo sapiens
tgtttaagggaataaaaagcaatcagccatcaagttgaggaggcaaggaacacagattccttttccaagaggttaggggatacagaggagaaagatgggagagaattaagggaatgtagagtaagggaagattctcctactatcatttgctggcttgcctttttttttyccccccccttaaggttggtaaatcccgagcatgtttgcaaacagaaaagaagaaattcgtggagagtgagaggtaaaagatgcaatagagagaaggatcaagaccacagggagaggatttagcttaagaaaggagggagtcacacctttttcagggtgggagacaggaggagaagattgatagtttgtgtgttttttttttccttgtggggaagaaatcattacatgccaagaatgtgaggctattagcagggtagagaaacaacaaagctgtataatcaactcttaattatcagcattttggtttatcagcttcaaatcttgcttgcaagcaagttagcacttactcagcttaattacttgctttgttagcatttcaaactcaatgtaatataactttgtatgtggcctgcagc

SEQ ID NO: 510058 - DNA, 501 bp, Homo sapiens
tagttatgaaatgtctgtttattagaactgctacctagaaaaatatagctaaaaatagaattcatctaaccctcaaactaatataaaacactgttattgcttaggctttttttttggatgattaataaggtacttgyacatcttacagtacttcagggtagttggtatttatctcagctaagacaaaactagaaatgtacaaaagtgcctggtacccagagcttggttgatatctggtaaataagcaactatgagtttctgaaactgggaagcagacacaaagctctttatactcccggggcatagtctctggctgtgtcatggtgttccctttgaatgaataggtgctctgctcatgtagaaagagactgaattggagaaggtccctaaatgcaactaaaaaggagcagtggcctaatggtacaaatagttggggtacaaatggtcttgttctgcaaaagtaaattcaagaggggctcagcaaatgtcaaatgaagagca

SEQ ID NO: 510059 - DNA, 637 bp, Homo sapiens
acaactgtttttgattaagttcccccacactctggccacaccctccttagagtttccatggcatccaaccgcatgccataatgtgcccagtacacctgtagagtcgtatgagtacatgactaatctatcaagcaaaacatattattttgttagtggaggtaatactttttataaaatagtctcagggaagttaaattatataactcagaaaacctattaataatttttagtaaacatcttaacactatatacttttatacaatttataaacctgtgactccaggtggtcaggctgaagcaaacatatgtatttatattctagaagcaattttttaaataaaaaaattcgacagcagtatttaggctgctttatttttagaactggacaggaaataagttttgtggtttaagaggtttttttaaatattaaaatgagcatgagaagaaaaaatgtcaacagtatattaaaatattaccttaagagataaattcagayatcctgctccccaccccttactttaggtcagattttgatggttcttctggacggcactgtgttgtccaataatagattttatcattcttctgtgtcacctcagtgtaataaaggaaatccaatcacattgagtcgatatgt

SEQ ID NO: 510060 - DNA, 656 bp, Homo sapiens
tccatcaccctcactctggtccagccccaatcttacatttgaagttttgaattactagagtattcccttgtttccttttttgccccgtaactgcttcctaacagtattttcactggaattagatactgaaaagatttaccttgtttggaaggtctgcatagtaagtgaatgggaatccctgattccaaaaatacccagaacgacagcatcttcaaaactggaaccctgaaacttattctttcctgggccttactcacatataagagttctgatcctgacctctagcccaggaattagaatcaatggtatcaaattatttcttgacaccaaatatctccaagcctgtatgttcaagtgtcacccacttccagattgccaagctgtactccacccgtcagctaagatgtgatcattcactcattcattctgtacatagctgtaactcagctggccccgttgcccatcatctcccctaacaatggggaaatttgatgtggtgctattaactagagggaaaagtattgttttttggcatgtttttaaytgaggaaggtactacacgaaaagacaaaggtaaccatatacagaaacaaatcaagggttacacaccttttagaattttcagtaaatcaggcaatatttgcctccaataagaa

SEQ ID NO: 510061 - DNA, 558 bp, Homo sapiens
cccaaaaattcaaattgatttctgtatctcattcagttttaacatctaaatgtataatagctggtcttattttcaaagcatgttctcaatccccagagtcagctttctcaagctcacaattttcatatttttattggtgactgtattatctcatcctgatctttatattaccttcactataaaaactgttactgccaaaatgtcaaaaaatatctgtaaagttgtgattcaagggaatttgagaaaccatttttcaggttagtcctcaaaagtaaattcaacagtgtaagcaagaatcagccatgtagattytaacacctaacccaagccctatgccctaactcctaacctattttatataacctgcactgctcaacagggaggtccagtatcctgcgctggagatggtgcctggcaggacgtgctgatccccccttcacaggcctgtgcagtgcacatgcgtgttttgcaacttccagggtggaagtgagaaattaggcaagaggcaggggtttgtgctgctgctgaaaaggagcttggctgcgaagctccccgttt

SEQ ID NO: 510062 - DNA, 567 bp, Homo sapiens
atctaaatgtataatagctggtcttattttcaaagcatgttctcaatccccagagtcagctttctcaagctcacaattttcatatttttattggtgactgtattatctcatcctgatctttatattaccttcactataaaaactgttactgccaaaatgtcaaaaaatatctgtaaagttgtgattcaagggaatttgagaaaccatttttcaggttagtcctcaaaagtaaattcaacagtgtaagcaagaatcagccatgtagattttaacacctaacccaagccctatgccctaactcctaacctattytatataacctgcactgctcaacagggaggtccagtatcctgcgctggagatggtgcctggcaggacgtgctgatccccccttcacaggcctgtgcagtgcacatgcgtgttttgcaacttccagggtggaagtgagaaattaggcaagaggcaggggtttgtgctgctgctgaaaaggagcttggctgcgaagctccccgtttcccataaatagtgagaaaaaaacttcatcctttggaactgtttccaaggcat

SEQ ID NO: 510063 - DNA, 558 bp, Homo sapiens
cccaaaaattcaaattgatttctgtatctcattcagttttaacatctaaatgtataatagctggtcttattttcaaagcatgttctcaatccccagagtcagctttctcaagctcacaattttcatatttttattggtgactgtattatctcatcctgatctttatattaccttcactataaaaactgttactgccaaaatgtcaaaaaatatctgtaaagttgtgattcaagggaatttgagaaaccatttttcaggttagtcctcaaaagtaaattcaacagtgtaagcaagaatcagccatgtagattttaacacctaacccaagccctatgccctaactcctaacctattttatataacctgcactgctcaacagggaggtccagtatcctgcgctggagatggtgcctggcaggacgtgctgatcccmccttcacaggcctgtgcagtgcacatgcgtgttttgcaacttccagggtggaagtgagaaattaggcaagaggcaggggtttgtgctgctgctgaaaaggagcttggctgcgaagctccccgttt

SEQ ID NO: 510064 - DNA, 558 bp, Homo sapiens
cccaaaaattcaaattgatttctgtatctcattcagttttaacatctaaatgtataatagctggtcttattttcaaagcatgttctcaatccccagagtcagctttctcaagctcacaattttcatatttttattggtgactgtattatctcatcctgatctttatattaccttcactataaaaactgttactgccaaaatgtcaaaaaatatctgtaaagttgtgattcaagggaatttgagaaaccatttttcaggttagtcctcaaaagtaaattcaacagtgtaagcaagaatcagccatgtagattttaacacctaacccaagccctatgccctaactcctaacctattttatataacctgcactgctcaacagggaggtccagtatcctgcgctggagatggtgcctggcaggacgtgctgatccccccttcacaggcctgtgcagtgcacatgcgtgttytgcaacttccagggtggaagtgagaaattaggcaagaggcaggggtttgtgctgctgctgaaaaggagcttggctgcgaagctccccgttt

SEQ ID NO: 510065 - DNA, 479 bp, Homo sapiens
ctctcttctcccattattcccatttttttggtaaattcattaataaatttataatcattatttaaatccttgactaccaattcaacgtcttgaatgtctgtaggtctgcttctaatgactgactttgctcttggttataagtcacattttcctatttcctttaatatttagtatttttaaattttatactgaacattgtagatgatattttatagttattctgrtttctgttgtctgccccctgaggaatattgtattttgttgtagctggcagttaaattactagtgtgtctccttcatcttgtgccagcttgctccatttaaattttgcccttagttctaaggtgctgttcctggtctccagatgtagtcttttgggattttaatgaaaagcctgcagtattttctaaacacctctaaatagccagacttgaaaaccaaattttgccattccagaaataagtagctgttgaaacttt

SEQ ID NO: 510066 - DNA, 602 bp, Homo sapiens
ggtgagtatgggctggacctagtggcttgattcacgatgtcattgccaagattatgttacaaggagactgtgagtttcacattgtacgacccctctttctgtctcgcttgatcactgtggaatccactgccttacggagggggtcatgtggtcaggaatggatgtctctggttaacagccagtgaggaccagaggtctgtcccagctaggtgagtaagcttggaagtagatcctcccccagcggagcactaaggtgaccacagcccgcactgacaccttgattcagccctgtgggagaaccagagccagaggctgcagccaaaccacacccagattccargcctacaggaactgaggtaataagtttgttgaagttgctaagtttggggataacttgccactcagcaatagacaattaattactctctctgccacaagttttgagtagtgaaactctttccgggactacttctcaggcccttgcgtcacaaatacctgacgtttgtggcaccacttccctttctaaacctgtggaagacgaggataatcagtgaccacgttctctcccccacactccaggcagccgcagccacttccaatca

SEQ ID NO: 510067 - DNA, 602 bp, Homo sapiens
ggtgagtatgggctggacctagtggcttgattcacgatgtcattgccaagattatgttacaaggagactgtgagtttcacattgtacgacccctctttctgtctcgcttgatcactgtggaatccactgccttacggagggggtcatgtggtcaggaatggatgtctctggttaacagccagtgaggaccagaggtctgtcccagctaggtgagtaagcttggaagtagatcctcccccagcggagcactaaggtgaccacagcccgcactgacaccttgattcagccctgtgggagaaccagagccagaggctgcagccaaaccacacccagattccaagcctacaggaactgaggtaataagtttgttgaagttgctaagtttggggataacttgccactcagcaatagacaattaattactctctctgccacaagttttgagtagtgaaactctttccgggactacttctcaggcccttgcgtcacaaatacctgacgtttgtggcaccacttscctttctaaacctgtggaagacgaggataatcagtgaccacgttctctcccccacactccaggcagccgcagccacttccaatca

SEQ ID NO: 510068 - DNA, 443 bp, Homo sapiens
gtaccttctttagtgaagtgactgttcagatcttttgcccgtttttaaatcattttttttaaattgttgagttttaaaaaaatattttcagtctttatcaaatccttacatagatgggccttagttacagttcctttatcagatatgtgttttgcaaatattttcccctttctgtggcttatcttctcatcctcttaccagtgtctttcatgtgtttttaaattttatggccattttctttactctcagagaatagctctgagaattagggttgaattcttctggtgctaggygagatcaattattttgatacagtcagtgctttcttcttcccctttctatattgataaccactggtctagattcccactgctgagccaagcccaccacactctggagtctgcccttgttgacttaacgagatagaagcaatgaggaggtgc

SEQ ID NO: 510069 - DNA, 508 bp, Homo sapiens
cagtttttgccactgaaagcaatggcaaaaccccagttacctttgcaccaacctagtatctgtctgaccaagggatccccggggcttgagatctctcatctaaagacagaaaagttgagaagattagaagttggagaacttgggataagtctcattacttcactcaagagcagaggaagtgtccctcgggtgggcaggcagaggccagaagaycattcaggtgacaaccacaattgtcactgttgggcacaggtgggagatgacatgcagggtgtcaaccacaaaacactgacgggtttggaaggtgcttcacttcactcacacagacgggatatattctgtggctcttaatgtaaattcggcagttgtcaagaaggcctgtgcagggctctctctcagtgaagtatactattctgggccagaataggtccagctttcataatcactcaagtgggccggcccctgaatgtaagatccttcagacaacacctgcttctcttcagccact

SEQ ID NO: 510070 - DNA, 542 bp, Homo sapiens
ccgactaggctcgctattttgccatctaaacaatcaacatctctctggcagcagaccactggggacttaacaataacaacagcaataacaataattgctatttctgagtgcttaccatgcatcaaacagtgtcytaagcgctttgtattatttcacttaaaaacttggggcaaacccttaaggtaagtattactactctcattttacagagaaagaaacagagattcagagaaattttgcaatttatccttagttagagagcaataatttaaaaactcaggattcaaactgaactccatctggtctcaaaggctggatactctccactagacactatttgctttcaatgtatgtttaataaaatatcgcttgcttgaatttaaaaatagctatactattaataatgcagtgattataataaatattcaagatagttctttaaagtaaatagcagcacttttaaatttagaagcaaggagcaccaatttgcaagctctgatttgccctgggtaaagcccagccagagccacagccatggagca

SEQ ID NO: 510071 - DNA, 634 bp, Homo sapiens
gaggaccaagactcctaatagcagagacaccatggtaaagagcacaggcttaagaatccatcacacctagggccaaatcctggcattacctttgacaagtgacccttttttttaagtctctgcctcttcatttttgaaatggagctaaaccattgtaagactcatatgacatcatttgtatttgcttgctagccaatttaaaggacagcatttatagcgctattaagttctgcattgttacatttcaatagactcgctgagccagaaccaagctctcttctcctaaattaaaaaagtgaaccctgaggccaggcgcagtggctcgtgcctgtacaatcccagaactttgggaggctgaggtgggaggatctcgaggtcaggagttcgagaccagcctggccaatgtggtgaaaacctgtctctattaagatacaaaaaatagctgggtgtggtggccggcgcctgtattcccagctactcgcgaggctgaggcaggagaatcacttgaaccckagaagcggaggtagcagtgagccgagatagcgccactgcactccagcctgggcgacagagtaagactccgtttcaaaaataaaaaaggaaccctgaaattgctgaaattgttcatgggcga

SEQ ID NO: 510072 - DNA, 485 bp, Homo sapiens
ggacactttcagcaaaaatcataaaagaatgtaatgaattcccaggttttttgggggtttactacttagtaagaactaaaatgactaatctttcattcagtgactccgtaagtgcctaccatatgccaggcactgtttcaggcattgaatatacaatggtgaacagaatcatatgcatgaaggttattaatgaggaggagagagattagaaataaacctgtattgttaggaggtaaatactagttggaaaagaatattaagcaagattggaaatgcaacatgaaaatggagctataattttatatggtgtgatcaaggaaggcctttctgacaaggcaacatttgagcagacacctaaaggaagtgagggagggagccctccaggtatgtgggggaagmacatcctgcatgaagggaacagcaagtacaaggttttgagggaggataatgcttcaaaaacttgagctctaaggataggaccagta

SEQ ID NO: 510073 - DNA, 650 bp, Homo sapiens
tccccattgtatttatcagatattttctttttcttgattttcacttatcactgaacayacttgttcactgacttgaactttgttcatttttttagatctctggatcttttcttgtcatgtcaattctctttttcttaaggtaactgtcttttgacacgtcttctttctgttttctttcttcttccttttccccttattctgtgagtgtagtgctcaattttcttgcagctttaacatcaggagtttgatgaatatattagtttcatacatgactgggatgcctgtacaaagaatgaacaagccgctagagaaccaagtgtgaatgaagcaaggttgtcaatgaaaagcccagaagagggaggaaaagcagagattcgtcctcgccgttgaaattattgctgtgattacttgatacgtgggctcatgacttgctctgtaaatcagtacccttttccctgtgctcatagtggttcctaccttagagtgaccttggttaaaaatgcctgtccaggtggtgttggcctgacaatgtatttgcctttcaaggtcaacttctttcttcttttcacaatttgctttaagctgttatactgaggtgactttattttatttgcagctttgtttccccctgtggctggatcaatgccatt

SEQ ID NO: 510074 - DNA, 591 bp, Homo sapiens
tgacattgttatgtgctgtcggttgcaytcacagggtagtttgggtgctttcttggcccagacacttttcctttcacagaaccattgctcatcactgataatcaccatatattgaaagcttactggatacaggacttaaaatgcagttatatctaacttaaggttgcatttaagcttttgttaaatttgaccactttgctcggccaaagggtggtgggagggagaatgaatatgaataccacatttggcaagtaatttgtgcaccatttcataggtttttttttttttttttcttaaaaacctagcttattcttcgtgggcatagtaaatagtctcttagagagccatgctcaagatctcttaaaatggctttttatagtcctttaatgtgtgatgcagagctggttatcttcgaggtgatatgaggccagtccagtttatctagctcttaaaaaacttgtagtgccatgattagtgctttcccataacattttcttcggtgttgtcaatattgtgggttgaagttcaaatttcagctacagtagccggaccattccacatagaacagactgaaatgggcaacatttttct

SEQ ID NO: 510075 - DNA, 586 bp, Homo sapiens
tggttagcttcacactaggttggcactgggagaaaaaaataattaacttacttttttatataccacttcagtcacctttgatctggtcttcattctgcattgttggactctatttttctggaaagtttcatggcaaaaatggtgaataacaccaacaaggagaggaatactactacattctattttttccctttatagttagattcatttgtttttgtgctagcatggccaaaaaataatttattggaagaacattagaatgctttatgaaatcctaaagaaaccaatgaacaaccagggcgtgggaaagaaaagttttacagtatttctgggatcttcagcagcttatttgaaatatagggatctttcctgtgggatctcaccacaagcgagactcagctcagagctcccagtctctaggcctctctattcactgtggttactttgtggggtctatgtgcatacaagggcttgctctgttcaggatggtgtctttcaggttagaacagggcctggaaaatggttgctrtggtttggatacagattgtccccactaaatctcatgttgaaatttaacccccagtgt

SEQ ID NO: 510076 - DNA, 644 bp, Homo sapiens
ctaagcatctgtgagccagtgctcatgctcaccacctttgtatatgttttctcacttatctctgcgaagctaataatttttcctaagaggacactcactcaggctgagatgatttgcctaaggtcttacagccaggaagaactgattgctttttccacctcccatgactattccaattaagatgatatatttgatgagtgttatcattgatgttctaaattgataataataattttttggccaggcacagtggctcatgcttgtartcccagcactgtgggagaccaaggcgggtggatcacttgaggtcaggagtttgagaccagcctggccaacatggtgaaaccccgtctctacttaaaatacaaaaattagccgggtgtggtggtgcatgcctgtagtctcagcctctcgggaggctgaggcaggaggatctctggaatctgggtggtggaggttgcagtgatctgagatggcaccactgcactccagcctgggcaacagagcaagactccatgataggtaggtaggtaggtagatagatagataatttttcacaatatagcaccttttagcactttcccacatattagtttcaattgttaatacaagtttactaataatgaccaagccattgaaaagca

SEQ ID NO: 510077 - DNA, 611 bp, Homo sapiens
atgggccagaggcggggtgggtgggggcagtggtgggagctcgtggatgttctcttctggctgtttttgaaagttttctctgtggaataacaaacaaggtcagagcaagaagcaagagaggagggctcggggttgagtagggagaaggtatgagagtcatccaggaatgtgggygggaggatgggcttgggaaagtcatgggattgctgggtggcaccaaaggccccctggaggtcagttataacaggacctcagttaccttcctgacgtcattccctgcttctgccctacccacactcctcctcagtctaaccatggtgctgtgcattattgcactgtgtgtgggactgtctcatgtcagatactgggccacttgaggacagcagctctacaggatggggcagtcacgttggcttagagacctgcccgctaagactcagagagggccaggcacattctgatagctcagtttggaggctctgcatagatgccagtaacggagaatttaaggaatggtgactactgaggagaattgcagtcttgaatacttagcatattcttcattcattaaacttttattaagtgcctgtgctgtgctagtcactgccagg

SEQ ID NO: 510078 - DNA, 575 bp, Homo sapiens
ctgaaaagtggctcatgcctgtattcccagcaatttgggaggctgacgcgggtggatcaccaggtaggagatcgagrccgccctggctaacatggtaaacccccgtctctactgaaaatacaaaaacaaaattagccaggcatggtggcgggtgcctgtagtcccagctactcgggaggctgaggcaggagaaaggcatgaacccgggaggaggggcttgcagtgagctgagattgtgccactgcactccagcctgggtgacagagtgagaccccatctcaaaaaaaaaaaaagagagagagaaacccctgagaatcccaggctgcaacatgacaagaagttgtgagaaaataaaagattcctgggctattaaatgaaggataataactttctgccaaccgtactcagcacacttaaataataagcgtaaggtcaattctaagagtaaggataagactaatagtcatatattaaattataaagcttataaataataacattgttttgcccaatcaaaaagtacatcaagacaatctgcagaatgaaatatctaacaatcagcaatttctttgtat

SEQ ID NO: 510079 - DNA, 599 bp, Homo sapiens
aaagtggctcatgcctgtattcccagcaatttgggaggctgacgcgggtggatcaccaggtaggagatcgagaccgccctggctaacatggtaaacccccgtctctactgaaaatacaaaaacaaaattagccaggcatggtggcgggtgcctgtagtcccagctactcgggaggctgaggcaggagaaaggcatgaacccgggaggaggggcttgcagtgagctgagattgtgccactgcactccagcctgggtgacagagtgagaccccatctcaaaaaaaaaaaaagagagagagaaacccctgagaatcccaggctgcaacatgacaagaagttgtgagaaaataaaagattcctgggctattaaatgaaggataataactttctgccaaccgtactcagcacacttaaataataagmgtaaggtcaattctaagagtaaggataagactaatagtcatatattaaattataaagcttataaataataacattgttttgcccaatcaaaaagtacatcaagacaatctgcagaatgaaatatctaacaatcagcaatttctttgtattcaaagatctacatttaagctctttttc

SEQ ID NO: 510080 - DNA, 599 bp, Homo sapiens
aaagtggctcatgcctgtattcccagcaatttgggaggctgacgcgggtggatcaccaggtaggagatcgagaccgccctggctaacatggtaaacccccgtctctactgaaaatacaaaaacaaaattagccaggcatggtggcgggtgcctgtagtcccagctactcgggaggctgaggcaggagaaaggcatgaacccgggaggaggggcttgcagtgagctgagattgtgccactgcactccagcctgggtgacagagtgagaccccatctcaaaaaaaaaaaaagagagagagaaacccctgagaatcccaggctgcaacatgacaagaagttgtgagaaaataaaagattcctgggctattaaatgaaggataataactttctgccaaccgtactcagcacacttaaataataagcgtaaggtcaattctaagagtaaggataagactaatartcatatattaaattataaagcttataaataataacattgttttgcccaatcaaaaagtacatcaagacaatctgcagaatgaaatatctaacaatcagcaatttctttgtattcaaagatctacatttaagctctttttc

SEQ ID NO: 510081 - DNA, 556 bp, Homo sapiens
gaaggaaataatttgtctaagggagaactaatatcatggcactttcttttttgtctggaaatttgtcttaacaaaaaataacctaagaatggatatttgaacaccctatttcctactaagataacttaaaatatataatgggaacaaattatgtaatatcattgcaagttggagaatagctcaaagcacccatttggtacagtgaagacaagcagatttagaaaaatatgctggcctgttgagttatctacatgaatcaacttaaaagggaaaagaggaaakatgttttctctcatacgcttctcttcccctcccatgatccctcccattgtagatgaagagaagtatagcttgctcaccattttcaactaacgaaactggggtggtaggtgtggggggcagtggttaagactaccagaatgaatgaaatatatagacactgatgccttaaacaaaaaacaagttattagcattttgagaatattgtcacaatttatatgatcaagaaaatctgtagtatcttcttccaattttactatgaacctcatcctgcaaa

SEQ ID NO: 510082 - DNA, 547 bp, Homo sapiens
gaaggaaataatttgtctaagggagaactaatatcatggcactttcttttttgtctggaaatttgtcttaacaaaaaataacctaagaatggatatttgaacaccctatttcctactaagataacttaaaatatataatgggaacaaattatgtaatatcattgcaagttggagaatagctcaaagcacccatttggtacagtgaagacaagcagatttagaaaaatatgctggcctgttgagttatctacatgaatcaacttaaaagggaaaagaggaaagatgttttctctcatacgcttctcttcccctcccaygatccctcccattgtagatgaagagaagtatagcttgctcaccattttcaactaacgaaactggggtggtaggtgtggggggcagtggttaagactaccagaatgaatgaaatatatagacactgatgccttaaacaaaaaacaagttattagcattttgagaatattgtcacaatttatatgatcaagaaaatctgtagtatcttcttccaattttactatgaacctca

SEQ ID NO: 510083 - DNA, 547 bp, Homo sapiens
gaaggaaataatttgtctaagggagaactaatatcatggcactttcttttttgtctggaaatttgtcttaacaaaaaataacctaagaatggatatttgaacaccctatttcctactaagataacttaaaatatataatgggaacaaattatgtaatatcattgcaagttggagaatagctcaaagcacccatttggtacagtgaagacaagcagatttagaaaaatatgctggcctgttgagttatctacatgaatcaacttaaaagggaaaagaggaaagatgttttctctcatacgcttctcttcccctcccatgatccctcccattgtagatgaagagaagtatarcttgctcaccattttcaactaacgaaactggggtggtaggtgtggggggcagtggttaagactaccagaatgaatgaaatatatagacactgatgccttaaacaaaaaacaagttattagcattttgagaatattgtcacaatttatatgatcaagaaaatctgtagtatcttcttccaattttactatgaacctca

SEQ ID NO: 510084 - DNA, 556 bp, Homo sapiens
gaaggaaataatttgtctaagggagaactaatatcatggcactttcttttttgtctggaaatttgtcttaacaaaaaataacctaagaatggatatttgaacaccctatttcctactaagataacttaaaatatataatgggaacaaattatgtaatatcattgcaagttggagaatagctcaaagcacccatttggtacagtgaagacaagcagatttagaaaaatatgctggcctgttgagttatctacatgaatcaacttaaaagggaaaagaggaaagatgttttctctcatacgcttctcttcccctcccatgatccctcccattgtagatgaagagaagtatagcttgctcaccattttcaactaacgaaactggggtggtaggtgtggggggcagtggttaagactaccagaatgaatgaaatatatagacactgatgccttaaacaaaaaacaagttattagcattttgaraatattgtcacaatttatatgatcaagaaaatctgtagtatcttcttccaattttactatgaacctcatcctgcaaa

SEQ ID NO: 510085 - DNA, 665 bp, Homo sapiens
cagtgtgagtgggacggtgtgaaggttaacaaggctagaaagggggagcaactattgcagaatcagggtgaaatgataagggtcagagtcaaggtcgtggcactggaatagagagcacaaggcattcagaaaatagaagagaataattcactgtcagcatgcggtaagggagagggagaagtgacagaaatgactcaggatctgarccacagcctgtgtggccagtgatgccagtgttggaagaactcaggaagaagagaaaatgactacagaaaaggggtgtgtccacttgggacagactgacttttaggatgctgtcttctcatttctcccacttttctgtatcttttaggactttggtttccataataaaactgtaatcaggattctcattgccagaagtgaaatagacctgctgaccataaggaaacgatacaaagagcgatatggaaaatccctatttcatgatatcagagtaagtttccgacacatgatttatttggacccacattttctcctttttgaaactgagataaaagttctcattcaaataacttcatggcagactctaaaaagttaactattcagacagggataacctagtttttttcctctacacagtctttagaacatcggcaggtgctaacttagaaaaccctttacct

SEQ ID NO: 510086 - DNA, 600 bp, Homo sapiens
gactctagtctggatgaaacttcatctcaactagacattggaattaattctgttatagaaataatacaacacgtgttgaacagacattctgcagagcctttggggagttgaaatgcatagcacagaagaagcttaatggcaccttcatgtacctggcttatagtaacagctcaacatttttcaaattataaataaattattaaaaaatctaaaatcaatatttaaatatataacacacctgayagatttaatggtgagtgcaaaatccttcaacaaataataagcatctccttcattcatcctaaagaaaacaacattttgaaaattaataatacaaaacattaaagaacatcctattttatatttaaatgctgaatttatcagtaagaggttgcttttgtctgtcaagatctctttccaaaaattatttctgccacagactcctagatattgatctaacctatggcaatggtgattatgaattcaagagttgaaatttcacaatcatatataagcaataaaaataggaggctggccatctcaggagataaccaaaacaggaaaataaagctcaggagggtaaattggaactagagactc

SEQ ID NO: 510087 - DNA, 520 bp, Homo sapiens
taaaaggaatcctcaagagaattaaactcatgcccacattcccattagcactaattcatcattgtccacaggtaacactgtgtcgccaaatggggcttagtatttcatgacagattctcttttcttagaatagtagcttgtagaaataatatagatagatagatagagttatagatagttatagtttcttgattcaccatagatgtaatgattcttttactayactgctctagaaaaaaaaatgttatgaatagaggcaaccctaatgttaagtcactatgtggcagagaaacacacaggcagtggagcaggatgggtatagactgtgtaactaattactagttactctaaacaatgagcatgttttacctctactttgaaagacaaagtaaagttcctattactttggactaggaggaaaatattttgggtaagacagactgggcagcaatgacagtagaaaatatttataattcctattcccttattactggtcttgttttctttctttcaatttttt

SEQ ID NO: 510088 - DNA, 371 bp, Homo sapiens
atctgactgcctggtacaaatcagggcccaacttcatattacctgtgggatttggagaaagttatataacctaaacatgactcagctttcaaatatgtaaaatggggacattcgttgcacttatctcataggttgttaaaagttttttgaaaaattaaccttttccataatgctaggaacattttctggcaccaagtaaacattcaacgttattctgcttagtatttacatgattattaagcaataatttaaaaatttacataaattagataacgttacgttaaagatatttaaaattccagctaatcaaatggatgatcaaatattctatcttatgaragtcatttatttttattaactaggaatctctt

SEQ ID NO: 510089 - DNA, 554 bp, Homo sapiens
tttgtttaaacctttgcacctgcatgtgcaagaggagtggttcagcctagacaaaaacatgttcaatattgactgaaggtttatttgctgtttcctttgaggtctctagatctttcttctttatttattttattttttggaagggtggggaagaacatggaatttggaggcgaactacctagattctaagcctagttccttctcttaactgatttcattgaataatttgaatctcagtaaatttatctgtaaaatgggaataatggtaacacacaccctacctgcatcagacattttttgatgatccataaataccctgtttcttaaagatttttaaaattagattgttaaaaaatgtaaacaataktccatgtcaacatttgttctattctacttgcttttttctgtcactggctccagccagttcaaaacaaaggaaggaataatatttaatagacaaagagaatattgtttgaaagagaaaaattttccacaaaggccaatttacgatgtagcccaagtatacgaagagctacagaatgtgctttaagaat

SEQ ID NO: 510090 - DNA, 607 bp, Homo sapiens
attcaaatgtcttcatgaaagctaccatagtcttccasatgaactttatctaattattctctctgaatcgtctcagtcccaaccaaggggaagagaagggtctgctgccagattacatagatatttgcagataaattaaaatgcagtcctttttttcaggccatgattgagaaagaggtctggattactatttgtaaaatcatgtgtataaatttaaatgcatgtcattttatcactataaaaaccttttatataaatagttttaatgataatgtgcacaattgtttgtttctaaaaaccttaaaggacaaaagatcaaggtggcctgtgtcctgttcaggtggcattcttcaaccttcccaatgtccgatgaatcagttatgtttcacatataggtctgtgaagcattagctgaacatatcactgtttctgtctttgatgattttttatcctcttgagtaactgcttccaaactcttactgcttattttagtggtttgagtaactgaagcacaatatgtaagaactgaatggggacctagggataaatcaattttattaaagaaatctttcaacaaaaagtacaagcacagagatgcttctgaatt

SEQ ID NO: 510091 - DNA, 581 bp, Homo sapiens
atattcaaatgtcttcatgaaagctaccatagtcttccagatgaactttatctaattattctctctgaatcgtctcrgtcccaaccaaggggaagagaagggtctgctgccagattacatagatatttgcagataaattaaaatgcagtcctttttttcaggccatgattgagaaagaggtctggattactatttgtaaaatcatgtgtataaatttaaatgcatgtcattttatcactataaaaaccttttatataaatagttttaatgataatgtgcacaattgtttgtttctaaaaaccttaaaggacaaaagatcaaggtggcctgtgtcctgttcaggtggcattcttcaaccttcccaatgtccgatgaatcagttatgtttcacatataggtctgtgaagcattagctgaacatatcactgtttctgtctttgatgattttttatcctcttgagtaactgcttccaaactcttactgcttattttagtggtttgagtaactgaagcacaatatgtaagaactgaatggggacctagggataaatcaattttattaaagaaatctttcaacaaaa

SEQ ID NO: 510092 - DNA, 629 bp, Homo sapiens
ctgaaattgaagatgtctcaataggaatgccaaacaggaaaaagaaaaaaaaaaagagagagaaaggataaaatagttaaaatatccaggaaccgtgggacaactgaaaatggtgtaacctacatgtaacgggaagaccagaaagaaaggaaagagaaaaagaaacagaagaaatagttgaaacagtaatgattgagaatttacccaaattaatgtcagatatcaaatcaaaattccaggagtctcggaaaacaccatgcaagataaatgccaaaatgacaacaacaaaaaacaatcaaccaatcaaccaaccaagaaacaaaaaaatccacttacatatatatttaaattccaaaaaatcaaaaacaaaaccaaaaatactgaaaagtccaaggggagttgggaaatatcttacctatgcagtagctaagttagaattgcatctrcttttgctcagaaactatgcaagcaagaagagaatgaagtgaaatattctaatttaaatacatttttgctattgtcttgaacaaatttctatttgatcaactaagaataagaaaaaattaaaattttttaaaaagatataagtgcaatgaaagtatatataagtatataaataaaatgacagt

SEQ ID NO: 510093 - DNA, 629 bp, Homo sapiens
ctgaaattgaagatgtctcaataggaatgccaaacaggaaaaagaaaaaaaaaaagagagagaaaggataaaatagttaaaatatccaggaaccgtgggacaactgaaaatggtgtaacctacatgtaacgggaagaccagaaagaaaggaaagagaaaaagaaacagaagaaatagttgaaacagtaatgattgagaatttacccaaattaatgtcagatatcaaatcaaaattccaggagtctcggaaaacaccatgcaagataaatgccaaaatgacaacaacaaaaaacaatcaaccaatcaaccaaccaagaaacaaaaaaatccacttacatatatatttaaattccaaaaaatcaaaaacaaaaccaaaaatactgaaaagtccaaggggagttgggaaatatcttacctatgcagtagctaagttagaattgcatctgcttttgctcagaaactatgcaagcaaraagagaatgaagtgaaatattctaatttaaatacatttttgctattgtcttgaacaaatttctatttgatcaactaagaataagaaaaaattaaaattttttaaaaagatataagtgcaatgaaagtatatataagtatataaataaaatgacagt

SEQ ID NO: 510094 - DNA, 608 bp, Homo sapiens
gctcaattgtctctgcatgtgttggctcatgcatgctttattcctctgaagagcttttataccaagtgaaaggaaataattgcatttccctgaaaattcacaggaaaaagttatgyttttctcttcattcaagtgattctgttagacccaaccacatgcaacaattttaaagttgcttccaaatatatttacaaatatttcctgtcttcaaggaacaatggcaagaccatgactcaggttcacatccggattccaccactaaccatgtacccaattacttcagtcaccttcattcaggtcttacatatcacagaataaaatcagatttcatcagaggaggtgaagacagggagaggagatatttcaatcccttctccgcaacccccgttttttttttttttttaacaaggatcctagagttactgaatgatagcacgtttgagggggaaagaccctaaggatgatctttataagccatcacttggtgttggtggtgataagagactcgagtatctttatgcagtggaaagagaagattggactcggaatcagaagcttgagttcaagcactggtttcatcagtcttgtgatcttgggttggtcactta

SEQ ID NO: 510095 - DNA, 608 bp, Homo sapiens
gctcaattgtctctgcatgtgttggctcatgcatgctttattcctctgaagagcttttataccaagtgaaaggaaataattgcatttccctgaaaattcacaggaaaaagttatgtttttctcttcattcaagtgattctgttagacccaaccacatgcaacaattttaaagttgcttccaaatatatttacaaatatttcctgtcttcaaggaacaatggcaagaccatgactcaggttcacatccggattccaccactaaccatgtacccaattacttcagtcaccttcattcaggtcttacatatcacagaataaaatcagatttcatcagaggaggtgaagacagggagaggagatatttcaatcccttctccgcaacccccgttttttttttttttttaacaaggatcctagagttactgaatgatagcacgtttgagggggaaagaccctaaggatgatctttataagycatcacttggtgttggtggtgataagagactcgagtatctttatgcagtggaaagagaagattggactcggaatcagaagcttgagttcaagcactggtttcatcagtcttgtgatcttgggttggtcactta

SEQ ID NO: 510096 - DNA, 604 bp, Homo sapiens
gtatcagctaattcttgtaggtgcagtgaggaggcagtgagatagtgcaggtaaactataaaacaattgtcacatgaaacgcatcacagtgattctttggacccacaagctccaatcttataaaacatatccagtcacccaccaacatagatcatctcaccttgcatatctgattttgtggatcatggggraaaactgctgattcctagcaaaacccatggcataggataagtgcacaataatttttttttcctaaatgatttagatgacagtgactcattaagggtttcctgaggcctcctcagagtcgagaggtgggtgcctgaagccacccaaagtccctgtcacaggatggctcccaacgcacacaccacaggcctgcccagtatgttccactatctacccagtagagccctgcccagtacgttccactgtcccttccctagaagaggtgactgttgttcacagtcccagaaaagcgggctccccaaaacaatgcaaggacccacctctctctgaacctcacccaccctagttttcctttaaaaatcaatttacaagaagatcatgtgaaggaaaaggttgggtgatattctaacccaag

SEQ ID NO: 510097 - DNA, 604 bp, Homo sapiens
gtatcagctaattcttgtaggtgcagtgaggaggcagtgagatagtgcaggtaaactataaaacaattgtcacatgaaacgcatcacagtgattctttggacccacaagctccaatcttataaaacatatccagtcacccaccaacatagatcatctcaccttgcatatctgattttgtggatcatggggaaaaactgctgattcctagcaaaacccatggcayaggataagtgcacaataatttttttttcctaaatgatttagatgacagtgactcattaagggtttcctgaggcctcctcagagtcgagaggtgggtgcctgaagccacccaaagtccctgtcacaggatggctcccaacgcacacaccacaggcctgcccagtatgttccactatctacccagtagagccctgcccagtacgttccactgtcccttccctagaagaggtgactgttgttcacagtcccagaaaagcgggctccccaaaacaatgcaaggacccacctctctctgaacctcacccaccctagttttcctttaaaaatcaatttacaagaagatcatgtgaaggaaaaggttgggtgatattctaacccaag

SEQ ID NO: 510098 - DNA, 256 bp, Homo sapiens
cgagggacagtgccaggccaaggacaagtcacaggtgcaacaacgtgccagaactggatccggagccccagggcgcaagatctcccgcagcgtcacccggcagagggacgggtgtggccaccgggcgcggcagstcctgcgtgcgctgaaagtgcggctggaggcgcggacggctttccggagccccgagagaggagctaggaatgactttggtcgcagcctctgtaaccccgcatgacggcctctagggggacag

SEQ ID NO: 510099 - DNA, 538 bp, Homo sapiens
acacattgattctgctggcgttttgatcttggacttcccagcctccctgtgagaaatgaatttckgttgcttacaggccacctggtctatagtcctctgttacagcagcctgaatgaaccaagacacccatgtacacatttacaaacaaaacaagtacggcctagcccacattctcaggagcttacaattttcctttaagtaaagttacgtgggaagaccctgaactgtggagcaaaaagggcctgcgttgagactagctctcctgcttgtcgtgctgtggtcttgagaagcacctgaactctttgacccctttctcctcatctgtggaattagggtaactatgccattccccaggcttgctaccaggaggagaatgcggggacagacttgggagcagctcacattcctgaagaagttaacgttctaaggtatggtggtgacaagccggaccgggcagaatacattcttcccgtggtgaaacagaggaaaataaagctggacagacagtgaagggccctgtcatggaaagctccagcc

SEQ ID NO: 510100 - DNA, 579 bp, Homo sapiens
ccgtactggatttgcagcctcatctgcgcactcactggattcrcagcctcacctgcacactcactctgcgcagatgctgggcttctccacccacctggtgctgtctggacccacatgccagcttcctagccagttcctgctgcctggcgtcctcctactgatgacccatgcacatcctaacacatcagaaccttttggtggcctttcctcttctgtggggttaagtccaaatgtcccacaagctgccagctccccccggcaaaggcccttgtgctatctggctctgcggttcctttgctagcacgatccccacacatctgggtgctcggcacaccctggaggactgaccgcactgactggccacggcagtcaagggcttgccatgtggcttctccctcctgctcagcccccatctcccaccctcccgcaggcaaacactcgctgcctgtggcccggcattctcttccccatctttaggaatgtgaaaacaagttgctgttcaaaatctaagctgttggaaatttaacatattttgagccttaagagaatatgattataggacctgagtcatgtgacagg

SEQ ID NO: 510101 - DNA, 495 bp, Homo sapiens
gtgatgggtggtaggtaggtgggtgcaggtgagtgggtggcaggtaggtgggtgcagatgggtggttggtaggtgggtgtgggtcgtgatgccttccctcagctccccccactggtccctctcattgtcagtggggcttgtcacccacatcctcaaattctgtgatccacaggggcagaagcaagtcaggagggcacctgctggccctgagctcttctcaccctccctgcacagcccttgagcttggcaggtgcacccagcagccatgactttctcgccccacaccatcygcatcgaacgcgctgccctggagtctcagctcttgcttccctggaggcccttgttgaagtctcaaaatgagaaggcccaagggaaacgtgtttgaaaggactgagcttccccaccccggggagccccccatgcctggcggcacgcatgtcaagagcacacacactcgggccaacagcctggcaacgcctcctcctacctcaggca

SEQ ID NO: 510102 - DNA, 478 bp, Homo sapiens
gctgcatcagactgtggcgacaggagtggtgctgctgcaggggctgctgtccccacggagaccggtcttgcttgccgctgcagcctggtgatcatttagcaccggaagtatgtattccgcagagtgagagccaacatgctggtgatggaggcgtctttatcatggtgctctgcatattttaatcttcggtggaaagtatggaaaagtatgtgatacctgtgatttgatgtcagaaggacgttgtgaacttgatgtggagtgaggatgttaaggtgcaataggcacccttggcttcattaaatgagacttccccatctccctgctaggcacgcacaggcatatggccacatcttatgtgttatccttatttagagtatgccttgtggtcatgcttaaagttacatgattatattcttcctcatagggtaggtcccwaactgcattcaacacagaaatgtactcttgctgttatacatag

SEQ ID NO: 510103 - DNA, 551 bp, Homo sapiens
tgggcccgggaacctgctggggtagccacctgactgccacctcccttccctcagaatgtgtcgagccactgggcmtggagaatgggaacattgccaactcacagatcgccgcctcgtctgtgcgtgtgaccttcttgggtttgcagcattgggtcccggagctggcccgcctgaaccgcgcaggcatggtcaatgcctggacacccagcagcaatgacgataacccctggatccaggtatgcctggggatggccctggggcggggcaatggagagaaggctcgatgaatgtttctgcatttgggggttaccccaggagggttcatcactggggttcaggtggcaaggtaacaggttcccatggatgaagtatctgtaagtggatggcatccctggaggaacctggtatggggtcaaggtgaggggggaggaggccccaggctgtggaggagctgttggtgctggatgaggcctctggaggcctgggcagaagaagaaagccctttgtgcgggcagtgtgctcagctacccctcctctgttttgcttgagtt

SEQ ID NO: 510104 - DNA, 551 bp, Homo sapiens
tgggcccgggaacctgctggggtagccacctgactgccacctcccttccctcagaatgtgtcgagccactgggcctggagaatgggaacattgccaactcacagatcgccgcctcrtctgtgcgtgtgaccttcttgggtttgcagcattgggtcccggagctggcccgcctgaaccgcgcaggcatggtcaatgcctggacacccagcagcaatgacgataacccctggatccaggtatgcctggggatggccctggggcggggcaatggagagaaggctcgatgaatgtttctgcatttgggggttaccccaggagggttcatcactggggttcaggtggcaaggtaacaggttcccatggatgaagtatctgtaagtggatggcatccctggaggaacctggtatggggtcaaggtgaggggggaggaggccccaggctgtggaggagctgttggtgctggatgaggcctctggaggcctgggcagaagaagaaagccctttgtgcgggcagtgtgctcagctacccctcctctgttttgcttgagtt

SEQ ID NO: 510105 - DNA, 551 bp, Homo sapiens
tgggcccgggaacctgctggggtagccacctgactgccacctcccttccctcagaatgtgtcgagccactgggcctggagaatgggaacattgccaactcacagatcgccgcctcgtctgtgcgtgtgaccttcttgggtttgcagcattgggtcccggagctggcccgcctgaaccgcgcaggcatggtcaatgcctggacacccagcagcaatgacgataacccctggatccaggtatgcctggggatggccctggggcggggcaatggagagaaggctcgatgaatgtttctgcatttgggggttaccccaggagggttcatcactggggttcaggtggcaaggtarcaggttcccatggatgaagtatctgtaagtggatggcatccctggaggaacctggtatggggtcaaggtgaggggggaggaggccccaggctgtggaggagctgttggtgctggatgaggcctctggaggcctgggcagaagaagaaagccctttgtgcgggcagtgtgctcagctacccctcctctgttttgcttgagtt

SEQ ID NO: 510106 - DNA, 373 bp, Homo sapiens
gctggggacattagtggagctaccccagtgctccctgggtctggagtagaagtatcatcagtcccagaatctagcagtgagacgtccgcctatcctgaagctgggttcggggcatctgccgcccctgaggccagcagagaagattctgggtcccctgatctgagtgaaaccacctctgcattccacgaagctaacctygagagatcctctggcctaggagtgagcggcagcactttgacatttcaagaaggcgaggcgtccgctgccccagaagtgagtggagaatccaccaccaccagtgatgtggggacagaggcaccaggcttgccttcagccactcccacggcttctggagacaggactgaaatcagcg

SEQ ID NO: 510107 - DNA, 596 bp, Homo sapiens
acttgtggatacaaagggccgactgtagttgtaacttgcaccagcccaggtatataaaaggagttaaaatttgttttgttcccatatcctttcttgttccccaagaccattagttcctcaagagaaattacagtctcttccttctttgtgatyacagtgcctggcttacagtaggtgctcaataaatgttacagacgcatcatgttctcaagctcttgctgaacctagacccagcctccctttcaaagaagactgttctgccaggtacttcactcagtgtcctacttctttgctcaagtccctgggcccttggacctcctgaatttccaccactactgcagggatcagatctttcaattctctagttttcttccactgatgaaacttttggttccagtctttaagtctgctagcaaaagacaaaacaaacgtacaaacaaaaaaccagcaatagacaggttaacaggaaaaaaagcatacaaatttatttgcatgggaatgggaagcagggtgtaggggcaaagggaaaacttacccttcaccctctgaagattcagtgaaaaatcacctgacaaatggtggatgaataggagaaa

SEQ ID NO: 510108 - DNA, 596 bp, Homo sapiens
acttgtggatacaaagggccgactgtagttgtaacttgcaccagcccaggtatataaaaggagttaaaatttgttttgttcccatatcctttcttgttccccaagaccattagttcctcaagagaaattacagtctcttccttctttgtgattacagtgcctggcttacagtaggtgctcaataaatgttacagacgcatcatgttctcaagctcttgctgaacctagacccagcctccctttcaaagaagactgttctgccaggtacttcactcagtgtcctacttctttgctcaagtccctgggcccttggacctcctgaatttccaccactactgcagggatcagatctttcaattctctagttttcttccactgatgaaacttttggttccagtctttaagtctgctagcaaaagacaaaacaaacrtacaaacaaaaaaccagcaatagacaggttaacaggaaaaaaagcatacaaatttatttgcatgggaatgggaagcagggtgtaggggcaaagggaaaacttacccttcaccctctgaagattcagtgaaaaatcacctgacaaatggtggatgaataggagaaa

SEQ ID NO: 510109 - DNA, 609 bp, Homo sapiens
tggcatgctgccttcatctctctcttcccctctgctgtgaccttggaagccaaaggtcagaaggtggagatgacaggatggagggaccagatttctgagtcactagatagactcgcactgacctgtccttcacctgggcaagaaataagcttttgctttgctaagccactcagacttcctacaaatgatctcagtcttgccaagcctgtcctggctaacactcatctttccatctatctgtctctctgtctcactcctctgtctatctccatccaagttcaagtcccaactcttagcattttggtaagtgctaataccatttggtgaatccttcctgagttgtcccagttgaaaattcattgcttacattgtaatgttcccacatggacctatgtagcattttacatgtgctatctgaccaatccttacaaaatcattagttttacagatgtgactttattaccacattcttcatygttttcttggaatcttgttgtgcaaatctgtttctccctatgactgtaaaccccttgaaggcaagactgtcacgatgagcaaacatgtctttattcctgacttccttctggaggttcacacttgaattcccaa

SEQ ID NO: 510110 - DNA, 532 bp, Homo sapiens
tggaaccacagcttgccatccacaatctgcgtggggaaggaacagtgcagcacttttcaacatgcaactgggaatatgttcyctacaccctgctcctggccggcccgggggcttcacaagaaagctggaatgtggacatgacttttgctctactcataaatctgttgtggtttgatttttaaccactgtgcctcccccttacctgccatgaaaatgcatgccttatatttcacaaatcttgtgattagtaatatgggcacaccttcatatatccacaattatatttaagaatgtttctactccttgggtctttaccttttaaaattcccagcaatatctggtttaggggtctgtttattctctgcacccttcttagtcattaccaccacaggaatgaattccgggaactcattagcatttattgaacatctactatacggtaagcagtgtactaagtgccaaggagatcatctgagtgaatagagttatcatctctgccctcatgtggctgacagtctgtagggtaggtggc

SEQ ID NO: 510111 - DNA, 532 bp, Homo sapiens
tggaaccacagcttgccatccacaatctgcgtggggaaggaacagtgcagcacttttcaacatgcaactgggaatatgttccctacaccctgctcctggccggcccgggggcttcacaagaaagctggaatgtggacatgacttttgctctactcataaatctgttgtggtttgatttttaaccactgtgcctcccccttacctgccatgaaaatgcatgccttatatttcacaaatcttgtgattagtaatatgggcacaccttcatatatccacaattatatttaagaatgtttctactccttgggtctttaccttttaaaattcccagcaatatctggtttaggggtctgtttattctctgcacccttcttagtcattaccaccacaggaatgawttccgggaactcattagcatttattgaacatctactatacggtaagcagtgtactaagtgccaaggagatcatctgagtgaatagagttatcatctctgccctcatgtggctgacagtctgtagggtaggtggc

SEQ ID NO: 510112 - DNA, 656 bp, Homo sapiens
gcacactgatgggctgcttggagcctgtcaaagtgtctctcagagggagttatgacccctagggcctccctgtgatgagctcattctccaaactgcaaccaagaactttctgcaagggaagaggccggggccctgcctgtccccaattacctaaaggatgttttacaaatggcctccctctggccatggtccctttggaccaaattcacactggctagaaaaactctggctgcaattttcttagaagggggcagtgaatttatggctccacatgtcagacggaggaaaagagagagagggcaatgcttctcatcgatcactacgggcatgtgactctgtgcagctatggctttgactagtaaaggtcaaagttcagtgactccagttacatcaacaaacaygaaccattccttccctgccactctgagggctgaatccatcccttgactgtgctcctggacatctggcctctgtttctcactgaagcaaatcgaactgcccttacccttggcaacagcttcctaacttgtttccctgcctctggcctggcctcctctaatccattcccctctgcaatcagcacaccctctgtgaaagacagatctgatcctgccatttcttcgcttctcatcagccaatggctctcactgccttgg

SEQ ID NO: 510113 - DNA, 595 bp, Homo sapiens
ctgactctgaatggcaagttatcccggcatagaggtggtagcaccaccatttgtctctccctcaaaaaaggcatatttgtaccaaagtgagtgatagtgcagccatttatgcaaatagccataatctggttgcatttatttttaaaagtaaataatgttctggaatacagccaaacactaggataatatttaatggagaataactagaggattttttttctattagtcaggaatcagacagggacatcactatattcagtactatttactgtcatgctgtaatarccaatgcaattagacaagataaaccagtttgtgtcataaagaaaaaggtaaaactatctctgtttgcatgtaatataattatatatctgaaaaactcaaaagactgaaaggaaaaacttctataagtgataggaaaataacaggttaaaaatttaatatacaaaaatcaatagcctacatatatataaccaaaaaaaacagtgaaatatatattggaagagaagactctatttagggtagtacatatataaactttaaaaagtgttcaaaacctatttaaggaaaactaaatgttcccagaaaagtaaaa

SEQ ID NO: 510114 - DNA, 595 bp, Homo sapiens
ctgactctgaatggcaagttatcccggcatagaggtggtagcaccaccatttgtctctccctcaaaaaaggcatatttgtaccaaagtgagtgatagtgcagccatttatgcaaatagccataatctggttgcatttatttttaaaagtaaataatgttctggaatacagccaaacactaggataatatttaatggagaataactagaggattttttttctattagtcaggaatcagacagggacatcactatattcagtactatttactgtcatgctgtaatagccaatgcaattagacaagataaaccagtttgtgtcataaagaaaaaggtaaaactatctctgtttgcatgtartataattatatatctgaaaaactcaaaagactgaaaggaaaaacttctataagtgataggaaaataacaggttaaaaatttaatatacaaaaatcaatagcctacatatatataaccaaaaaaaacagtgaaatatatattggaagagaagactctatttagggtagtacatatataaactttaaaaagtgttcaaaacctatttaaggaaaactaaatgttcccagaaaagtaaaa

SEQ ID NO: 510115 - DNA, 363 bp, Homo sapiens
ctgtctgtacaagccaaggagagaggtgttgtaagaaaccaagccctgtcattaccttctcagattcctagcctccagaactgtgaaaaaacaaatttctgtcatttcaggcactttagtctatgttcctcggttatgcagccctagcagaccagtaagcagccagatttcatcaactggcctgtccctgcmcctcctcacaccaccacctcacaaggctacacaaatgcatcagactttattagggactgcagcaactacaatacagtagaaaaacctctgtctaaatttgagggttcccgtgcttcatgctccatattccaagggagaattatcctccaagttaaaactctccacagaagg

SEQ ID NO: 510116 - DNA, 607 bp, Homo sapiens
tggatggccttacaccaggatgcacctgagctyctttccatccacctcctgtgtgcatgagggtatcactgcagcttctggatggccttacaccgggatgcacctgagcttctttccatccaccttctgtgtgcatgagggtattactgcagtttccgggacagctttgcaccagggcgcacctggcttctttccatccacctcctgtgtgcatgagggtatcactgtagcttctggatggccttacaccaggatgcacctgagcttctctccatccacctcctgtgtgcatgagggtatcactgcagcttctggatggccttacaccagagcgcacctgggcttctttccttgctgtgtctgagccaccccaggcctagggctctacaaggtggagaaagttggagggtccttcatgagaactgcactgaatctgttcagtcagccatgggaacccaaggggacagcaaccactgcacctgctgatcctccccgggccagcaacctacccagagcctgaggcccgctgtcacccagccccagccccttggagacacctcactgcctccaagaccagaaggggaactgaggcttggagagggcaagc

SEQ ID NO: 510117 - DNA, 579 bp, Homo sapiens
ccgggtgaggtactccatctctttgactgaataggtcattgatcctatcaagggataacaatrtttttgccactggatgttgatgttcctatccaaatccacagcaagctggtgttgcaattttccagattcatgcagatccactgacttcagtgctgataacaaataggcaatcccaaaataaaaggaggatatagttaccaagattgagtagatataaagatagaagagatttgattggtataattaaataagctaatcatgtctaatttattataggtttagatgaggggatgtttttgaaaattatttgaacagtcaaaagtgttacgtagcatcttggattaagatggtggataggaggcaggactagcttgcagctctcactcagacaaacagagcagcctgtggagactcacatcatgaacttctgctccaagaactgccacaggaacataccaggaaagtcagaagaatccatagaccctttgaaggaacaggatcaccactgcaggctctctgagatgctgaaaaactgtgtccctagggcaagtttccatcctgcctgtaggacagcag

SEQ ID NO: 510118 - DNA, 579 bp, Homo sapiens
ccgggtgaggtactccatctctttgactgaataggtcattgatcctatcaagggataacaatgtttttgccactggatgttgatgttcctatccaaatccacagcaagctggtgttgcaattttccagattcatgcagatccactgacttcagtgctgataacaaataggcaatcccaaaataaaaggaggatatagttaccaagattgagtagatataaagatrgaagagatttgattggtataattaaataagctaatcatgtctaatttattataggtttagatgaggggatgtttttgaaaattatttgaacagtcaaaagtgttacgtagcatcttggattaagatggtggataggaggcaggactagcttgcagctctcactcagacaaacagagcagcctgtggagactcacatcatgaacttctgctccaagaactgccacaggaacataccaggaaagtcagaagaatccatagaccctttgaaggaacaggatcaccactgcaggctctctgagatgctgaaaaactgtgtccctagggcaagtttccatcctgcctgtaggacagcag

SEQ ID NO: 510119 - DNA, 613 bp, Homo sapiens
gatcttttatcggtttgaaaaggatatctaataaatggggaaggactatttgctctgagttagggaaaggggatatggttcattaactcgtcattatcataaacattatttaattcaccaatacagtaaatgttgctgtaacttctgctatgccaaatgcctgtaacatgaaagggaatatatgggtgtatatgaataattaggcctattaatccttctttcccctctaacccctggtcaccactggttttcttactgtctccayggttttgacttttacagaatgtcacatagctgcaatcatacagtgtgtagctgtcccagattggcttttctcttagcgatacggatttcagtttctctgtctttttgtggcttgatagcttatttctttagtgctgaataatattttactgactacatattggagacctttctctcatgcctcatgcccttccctctggaaccttcatatttgtcatgtgactgttacttcagctctgtaacataaatctaacttcatctctctttctaagcctggatgcccagaccctgtgccaatttgtaagatttagttttgaagatcacaagtattattagtactgtgctaagt

SEQ ID NO: 510120 - DNA, 586 bp, Homo sapiens
ttgtgttctgctctttctggagaaatagagaaacagaaaaagcacaggaaatggaattgtgagggatgattgttatgagggtctgtgtgcatggcttacaggagaatgcaaattatgtttccagggtggagtctaacaatcaattcagaaaaatcaaggttaaaggggaaatgaaaatgatactggagattttaaataaatgagatgggcataaaggaaagaagtggccttcaggaatggaggcattaccagtatacttattttttttttgacagggtctcactcagttgcccaggctggagtacagtagcatgatcacagttcactgcagcctcaacatgcaaggctcaagtgatccttctacctcagccttccaagtaactgggaccaccggtgtgtgccaccataccaggctaatttttaaaattttgtttgtagagatgggggtctcactatattgtccaggctggtctcgaactcctgggctcaagtgatcctcccacctcggcctccccaaatgctgggattacaggtgtgagccactgtgccrtgctgtacatttccaatgggctagttgggatgcctc

SEQ ID NO: 510121 - DNA, 449 bp, Homo sapiens
gcaagcatcttgtgtttcataagcccacctgaaaatcatarcaatggtagtcatcgttacctttttttttttgaaacatggtctggctctttcgcccaggctggagtgcagtggcaccatctcaactcactgaggcctccacctcccgagctgaagtgacccccctcccctcagcctcctgagtagctgggactacaggtgtacgccaccacacccagctaatttttctgtttttttatggagatggggtttcgccatgttgcccaggatgatctcaaattcctgagatcaagcaatccccccaccttagcctcccaaagtgctgagattgtaggtatgagccaccgctcctggccatcttttttttttttctttaattttttttagaggtggggtctcattctgttgctcaggctagagtgcagtgtggcaccatcatagccactgca

SEQ ID NO: 510122 - DNA, 654 bp, Homo sapiens
ctgacaagccaacactctggggcggtgggagcagaaagccaggagtctgacagtctgactccttcattccattgtttgagccctagaactacccatctccaggaggtggcaaggtgtcctctcacctcagcggaaagtatttctgacccaactttatgcaacaatttggctccagtaggttgaaataatgtcacagctctcttctcatgacattaaatatggacagtatatggaaaggaaatgtaaaaattccagaaataaaaaggcctccaacagtgtccagtcaagccacagatggcatccagttgctccattaccaaattctccttctctcttggggttcttggcgtacgtagctttgctcatgcccaaccagcttctagacttcctatctggaggcgctgtcccaggattcgttgggatttcttcagttgcaagttaaagacactccaaactaacttaacacggaaatggattgacttacaaaaccgaaaagcccgagggttgcctctagccccaggcaaagctaaattccagggactcaaagatgtcggctccctctctctcccgccctccatcctgcctcttcctcctcttcctcctcygctcattctcctgccctgcttccacctgggttttcaggcaggtgagggc

SEQ ID NO: 510123 - DNA, 378 bp, Homo sapiens
gtgtgcaggagctgaatgtggctcagtgtggcccccactactgtgtgcaggggctggatgtggctcagcgtggccgctactgtgtgcagggtctggatgtgtctcagtgtggcccctactgtgtgcagggtctggatgtgtctcagtgtggcccctactgtgtgcaggggctggatgtgtctcagtgtgccccctacctactatgtgcaagagcgggatgtgtctcactgtggaccccctactggtgcaggggctggatgtgtgtcagtgtggaccccctactgtgtgcaggagctggatgtggctcagtgtggccccctacctactgtgtgcaggagctggatgtgtstcagtgtggaccccctactgtgtgcagga

SEQ ID NO: 510124 - DNA, 534 bp, Homo sapiens
accagtttgccagtgagaattgagcagtctgattgtgtggggctagtataaaagtataatgttgattattttctaaatagacaatcctgttatatgttttatcttctgttgttaataaagtataaagtgcaggtatcccttgctattcagcctctcaccatctgagaggaggagctgagtagatttagacagcgagggatgttcacgttgagtcctctaggatttggtttgtgcagaactcatttatttatttctatataatggcaaagtaacttatggcacttgctgaaaagaactctcattataaaacttctaaccattctctgatttgcttcccacataggccttaaagctctagctttgctgggtgtattgccagatggggactcgagccyagaagatcaggccctaccagtcactgtgcccaccggagcgtcagaggagcagctagagaagaaagctgtccagggtgctgagctgtcagaagcaggcaatgtaaatgacgattctttactacacagaatcacaggttga

SEQ ID NO: 510125 - DNA, 534 bp, Homo sapiens
accagtttgccagtgagaattgagcagtctgattgtgtggggctagtataaaagtataatgttgattattttctaaatagacaatcctgttatatgttttatcttctgttgttaataaagtataaagtgcaggtatcccttgctattcagcctctcaccatctgagaggaggagctgagtagatttagacagcgagggatgttcacgttgagtcctctaggatttggtttgtgcagaactcatttatttatttctatataatggcaaagtaacttatggcacttgctgaaaagaactctcattataaaacttctaaccattctctgatttgcttcccacataggccttaaagctctagctttgctgggtgtattgccagatggggactcgagcctagaagatcaggccctaccrgtcactgtgcccaccggagcgtcagaggagcagctagagaagaaagctgtccagggtgctgagctgtcagaagcaggcaatgtaaatgacgattctttactacacagaatcacaggttga

SEQ ID NO: 510126 - DNA, 145 bp, Homo sapiens
ccctatcagtgcttccaccgaacagccttcaactgagctcctcctttcatggawatcctctgttgggaagattatcctaaaagggagctgacatatgtttccttgaaaaatcattcctccccatcgctgcctttcaggtatggga

SEQ ID NO: 510127 - DNA, 628 bp, Homo sapiens
gtggctccccagacaccagctcagttgtctgctaagatgaaagggaaattttcccaagaggtaatcagttttcttcattttctctaaacacttagggggtatccccaagattgcaaacataagcagaacaagaaggcacaggtatgcagatgcaaacttcctgggaaggagctcacaaaccaggagcactataggtctactccaaggcacctctcctcgggcaacctcaaatgcactccagaactttaactgcaaaaatcacatctccgaaatccatacctctgacccaggtctcacctctgaatcaaggacatgggtattctgctcaaccatggccctgctggaaatatccacctggcttttaaatattggtgtgtcaactaygatgtgctcaaaaagcttcttcttcctgactttcaatttgttttgtgattacatccccacaccacaggcctctatgcactctcccctaccttatgtgcccctccacccaattaattttcaatgccccatcttgtctgcatatgtatctatccaatagaaatatgatgtgagcaaagaatgtgagacccatatgtaattttaagttttctagaagcaattttttttgttttgtttttgagacagg

SEQ ID NO: 510128 - DNA, 396 bp, Homo sapiens
aaagcatttttgagtggtaaacctggcaataagcttttaaaaatattttatatctcaaagtggcagagtatttacaaagtcacattttctaatgtaagtggtctaagayaaaaaaaggaaaggagggattccttggcctttcttgcatcagggagaaattttcttttttcctattaggtaccatatttaccctaacagtgcacagttgcatcataaagaggtccagattcagctatcctactagagggatcacatggaggaaacttgtggttgtgagaaaccttaagattatcaagaagaacctattaacccaaccaacagttggaacccaggcacagcctacttgcacacattggagtcatcccaacagaggccccagatatgtgagtgaagtgc

SEQ ID NO: 510129 - DNA, 508 bp, Homo sapiens
gcattatttaccattttcatacataaagacttaatgcagggggtagaaagagtgagggaggaaaatttaacttaatatcatgaaatttttctaaccatctggtttcatacttttaagccaactgtcttaaatattgagctactcattaccaaaggtatccatatctttaagtcagtagatcaaccctctgcatcctatgaaaacaggcttcctaaacattcctactgtaaatggcttwgtttctgaaccacgtgttctgctttgctcttcactctatatctttaaaatttctagtcttggctgggtgtggtggcttacacctgtaatcccagcactctgggaggctgaggcaggtggataacgaggttaggagatcagatcgagaccatgcctggctaacacggtgaaaccctgtctctaataaaaatacaaaaaattagccaggcatggtggtgagcgcctgtagtcccagctactcgggaggctgaggcaggagaatggtatgaac

SEQ ID NO: 510130 - DNA, 522 bp, Homo sapiens
tccacacaaccatgaataaaaattaccaatttaaaacaaatagataaaaactctattttaaattcagtgccatttcacctgatttaagtccagttagagctgaatagttgaatacattgcttatctgaaagagctacgggagctatgactagctatgatgaaaaaaggaagctgaaatgtgaatgcattcttgttttcaagtataatgagaaactgttatatagcgaatattagtccccatttctttttggagaaaatcaactaactttgggttgcratgcgatagattatgacctaagatttgggaaaaaaaatgttgtaagaagtcagaaatgctgaacagtagaatgaatcagattctgcctaattttattcactggaagttgagagctttaagaaaaattattacattttgtataattttgtgtgataaagcataagactgaatacaaatgaacttgctgccaatgttgtgagacataaaaaaaatgttcttgtccaattctatattatcggcctttg

SEQ ID NO: 510131 - DNA, 539 bp, Homo sapiens
cccaagactctattctacctagaatgcaattgaaattttgctgagatgagtgtcgtgacagtggaggttagtgtctcaggcactatgagaatgttcgcaaagatctttctgactgaggaactctaggtatgtctagttagcatctcacctctaaataatgtactagatttcttttccaatgtcagcctccagtgtcacccatataaaggcacaaaagatataaggagtcagcaccagagaattgagtttggggaagcattgcttgattccaaatcaaccttggagaatagcccagtggttgattggttaggctgtgccctcacccagatctcaccttgagttgtaatgatctccacctgtcaagggtgaggccaggtggagataattgaataatgagggcagcttctcccatactgttctcctggtagtgaataagtctcacgagatctgatggttttgtaaatgggagttcccctgtacaaaccctctcttgcctgctgccatgkaagaagtgacttgcttcccctgtactttctgcc

SEQ ID NO: 510132 - DNA, 518 bp, Homo sapiens
gaaacaatcaggtagatttatcatttacaataattttgcaatataatattattctcaaattacttcatcttttgcctttttagaaagcatgtttgcaaaaaaaaattgacttccttctgtattgttctactgggtttcttgggtatcaaagatgaaagaataatagtgcatgagaataaaattgaatgccttgatgcctggacttttgtttataaatgagatttatttctgtgtctgaacccctttccccttgttccgttaaaagtcttggctaacacacagtagttacttgttaaatactttgaaaatgaatgtttatgtatataaacttcctgaaaaattatagccttacagaaaatagaagtgatatacacagatastttctaaagtatggacaagcttttctggatccgtcattttcatgctatagaacttcccaggagatgtttgtccttttagcatatttagaatttaactcctattttgatggagagcaactccaagtccttggaaaacaa

SEQ ID NO: 510133 - DNA, 637 bp, Homo sapiens
ctggtatgaccaacgaatttttcccttccctttgtttgaatgcacaaagacacgaataaggtaatacccagtttctctttaattggcagaatatatacaataataaactgaaacaaaacttccaggaacttttaaaaaaaactccagagttcatattaaacctcaatgcctgtagtccaattcaggggaacattctctgaaaaaaaaaggcaaccgttgagtaaatatttgctgcaccttagatcttataagataatatactaaatgagacagcgaaaaacatcagagctacacatttgaatggaaacccccgtggctctcacactgtattttgcagaagtagctgcagttaacgcatacctatgtgggaaagacattgtcttgaagtaaaatgcagagaagaattaagctctccccaagcagtcattaggtaatgactctcattctccttytagcgcaactcttcattttctgcaagttaatatttaaaccatatctctctatgtttaattaatgtttcatctttaatattttaagtgatgttgaaataaagttagaagctccaatggtcttttgtaatcacatcctttacttccaggagcaacatttattatctaataagtgcaattctctctag

SEQ ID NO: 510134 - DNA, 642 bp, Homo sapiens
aaacctatttgcatctatgcagagtatgcaatcagaacagaaactgctagggaaatgcaaatccgggggtgaacttgaacttgaagcagtttcaggataaaaaaccaagaaccctttgcaattagtatgccagaagtgataataagagggaactgggtactgctggagcacatgggagataatcagagaatgtccacaaaaggggaggtgggagcagaagaccttaactagaatcaaaacaggttgtttcccagtcattcctgacaagagtttcacgaatgaaatgagtatttgtataaatgaatgacaarcaggtatgggccagaatcacttcatgactattgctgtgtctagtaattgttattgagcacattctatggccaagatgagaattgcttgctttattcttacagtaattttgcacttaaatattatttttcaccaatatgcaaagaaaaagagtaacattgagaaaggtttagaaacgtacccaaacccaattcggtagtaagtggcagatgcaggtttctgactaaaacctgtacatcaccaaagcccaagcatttccactctaccacagagccatctttggtcactatgacacaagcaaactctactcataatattttcttatttgcagtt

SEQ ID NO: 510135 - DNA, 451 bp, Homo sapiens
gctgggaagttgttctttctctgccaaaattcaaacattctgaaaatctcacttcacaacctcagggggtattcacatgaagctggaacaaacctatttgcatctatgcagagtatgcaatcagaacagaaactgctagggaaatgcaaatccgggggtgaacttgaacttgaagcagtttcaggataaaaaaccaagaaccctttgcaattagtatgccagaagtgataataagagggaactgggtactgctggagcacatgggagataatcagagaatgtccacaaaaggggaggtgggagcagaagaccttaactagaatcaaaacaggttgtttcccagtcattcctgacaagagtttcacgaatgaaatgagtatttgtataaatgaatgacaagcasgtatgggccagaatcacttcatgactattgctgtgtctagtaattgtt

SEQ ID NO: 510136 - DNA, 347 bp, Homo sapiens
ttcttgatgacttttattaagccacacttcatagtttttgtttctagactaaatacactccccactcaaactctttctacctcctttaaactttcttcataaatcttttttttaattcctccctccaatctttcagtctcctttggaccctatggaacaaggccactggtgtgaaaattttacggatggaaaatacaagagatttttctcagcaaataagtaaggtctgcttttgagaagtgtctgttcatatccttcgcccactttttgatggggttgtttgattttttttcttgtaaatttgtttaagttytttgcagattctggatattagccctttgtcagat

SEQ ID NO: 510137 - DNA, 564 bp, Homo sapiens
ttgcatgtaagaggtatccagagatttcttaataaataaagtcctgctgtattcttcaataactctgagttttaatctggcagctcaatgaatataaagagcagaacaacattagtataaatttcaaattcaattatgagttacatgaatatgaaaagtatttwtgtgcccctgtacatatatgtgtgtgcgtgtacaccacgatctattcaatattcaaagttcccattcaaacaagtaatatgttgttagtagttaagtgcttagaacctggaggtagattccctgagctcaaattccagtcctgttacttactgactgtaggatttttgacatgctatttaaaacctctgtgccttgaatgccacatagataagtaagaataattatggtagtagctttcagtcaggcagatttttcttttttttcttttttttcttttttttttttttttttgagatggagtctccctctgtcgcccaggccggagtgcagtggcgagatcttggttcatctgcaacctctgcagtcaggcagatttttctaagaattaaataagttaac

SEQ ID NO: 510138 - DNA, 684 bp, Homo sapiens
tagcccatcatcaccctttcagttgattaccaaaaagtggatcaacatataaggcatcctgccactgaacctctgagtcttaacatgcagcaaggtatagaggtgtaagatattataaaagacaaagcaaatgccccaaaataaaggagtgagaagtaaagataatactaatgataataaagtcatatttttcagaatgagttagcatgagaaactaatactagaagaattatatcaatttcctgggcctggaacgagaatattgcccattctcctgttgaaggtgatataaggagattgtcatgaacagtaaaatacaatggaagcttgtctgcataaaagtaacatttgattgagatcggtacataactaatcccatttcaaattgaaaataaaatcaaaattggcgacagtaaggcaaattattggcagagttgtaagggcaaagtaaacattctttttctcagaaaggtcctacattcctggataaggggctcccataaactcaaactcttgaaagttaaggaataccgaaagacattttcttttttgcacagttgttcctacaatcaagctccaaatcacctggtctgattttacatgtactagaaggatcacatgggactcaaagtttgtaatctgytgatagcaaataggactgtcagatggtatgggctattgcac

SEQ ID NO: 510139 - DNA, 590 bp, Homo sapiens
tggctactgccttgagggaggtatcagccttttacttctggatcttggcctctccttgttctaccccttcccaacaacaactgaacataccaagtgcttgctatggcccaagcactgttgcaggtgaagctgcagcatgaacaagataagcaacatctctgctccccaggccctctgcagacatgacacctgcgggagacagacactgagcaagccagtggatacaagaactgggaaaatgagaagtgctatgagggcaagaagttgcaactgttttcttagctacctggagggagggaaaatcattttctggaagtttttttctatgagttttgtcttagctttggctgtcataacaaagtaccatagacagtggcttaaacaacagaaatgtattttctsatacagttctggaggctggaagttgaagattgggatgccagcatggttgggttcttgcgagggttctcttcctggctttcagatggccgcgttttcactgtgccatcatctggcagggagagagagaacacatgaactctgatggctcttacccagacgctaatgacatcttgaggcctctacctcat

SEQ ID NO: 510140 - DNA, 615 bp, Homo sapiens
aaattccgtatcttcatcttaaacattatccagtcaagtattcatttttgaggcactgaaagatcttaaacatagttctatttggtatatctaggaaataaaaacaattaccttctgaaagttcctctggatatttgggtaagtgcagaaacagacatgaaaaagttaagcctttaagaagatcatgttagccatcaaatcaaggcaaatgacataagcaagacgtgcacgtcaccactagcaaaaggtaactcgggtaaggcctggcaaggcaaatgatcaccacatgattgggactgagaaactggtttgccctgactcygctgcttgggacagtaactttttctgaaagttgcctatcaagactctccctgaaggctttttaactcaggaagactctacttggttggcacaaaatagggcttcaaagggagaagttaaaggaaagcaacaggtttgagccttctccctcctctctccccgaggcagtattgcagcagctctgtgaaggggaggaagtggtagaaatggtgctgctgctgggtgctgcagcagcctctggcccaagcgagggtcctcattccttccccttcctgggtctcacacacttccatc

SEQ ID NO: 510141 - DNA, 600 bp, Homo sapiens
tgccctcttgattttactctgcctctgacaattggcaccaggctaccattgtcccctgcacagatgccttcttcaccctgctcatgctccttactctccacctttgtgtagctgcctactctgctcagctctacctaatagcttttaggctgaatgattctgaaagcaatacagaaaggtggccccttgttttttttttttttgttttttttttttcacgctcccctgatgattccaaaatgcatccagcttgggaaccaaccttctaraccctgcggctctgctagttttcccctgcctccctataaaaggaagcccaaagcggttttacatgagtggtacctggtccttcacaaagctctgcccaggtgacagatgatagaaatgtggccataaaaagtaagtttaaaagtcagagactttgtctctttagcataagataaataggttacgaaacagtctggaagaaaacaaaaagatttgtgtttgatgagtaattaatagataacccagtggaaattagatgaataacaatgaataattaatggatcagaatattgacaagaaaaaaggacagaaagaaaaggaaactagaatgag

SEQ ID NO: 510142 - DNA, 600 bp, Homo sapiens
tgccctcttgattttactctgcctctgacaattggcaccaggctaccattgtcccctgcacagatgccttcttcaccctgctcatgctccttactctccacctttgtgtagctgcctactctgctcagctctacctaatagcttttaggctgaatgattctgaaagcaatacagaaaggtggccccttgttttttttttttttgttttttttttttcacgctcccctgatgattccaaaatgcatccagcttgggaaccaaccttctaaaccctgcggctctgctagttttcccctgcctccctataraaggaagcccaaagcggttttacatgagtggtacctggtccttcacaaagctctgcccaggtgacagatgatagaaatgtggccataaaaagtaagtttaaaagtcagagactttgtctctttagcataagataaataggttacgaaacagtctggaagaaaacaaaaagatttgtgtttgatgagtaattaatagataacccagtggaaattagatgaataacaatgaataattaatggatcagaatattgacaagaaaaaaggacagaaagaaaaggaaactagaatgag

SEQ ID NO: 510143 - DNA, 600 bp, Homo sapiens
tgccctcttgattttactctgcctctgacaattggcaccaggctaccattgtcccctgcacagatgccttcttcaccctgctcatgctccttactctccacctttgtgtagctgcctactctgctcagctctacctaatagcttttaggctgaatgattctgaaagcaatacagaaaggtggccccttgttttttttttttttgttttttttttttcacgctcccctgatgattccaaaatgcatccagcttgggaaccaaccttctaaaccctgcggctctgctagttttcccctgcctccctataaaaggaagcccaragcggttttacatgagtggtacctggtccttcacaaagctctgcccaggtgacagatgatagaaatgtggccataaaaagtaagtttaaaagtcagagactttgtctctttagcataagataaataggttacgaaacagtctggaagaaaacaaaaagatttgtgtttgatgagtaattaatagataacccagtggaaattagatgaataacaatgaataattaatggatcagaatattgacaagaaaaaaggacagaaagaaaaggaaactagaatgag

SEQ ID NO: 510144 - DNA, 600 bp, Homo sapiens
tgccctcttgattttactctgcctctgacaattggcaccaggctaccattgtcccctgcacagatgccttcttcaccctgctcatgctccttactctccacctttgtgtagctgcctactctgctcagctctacctaatagcttttaggctgaatgattctgaaagcaatacagaaaggtggccccttgttttttttttttttgttttttttttttcacgctcccctgatgattccaaaatgcatccagcttgggaaccaaccttctaaaccctgcggctctgctagttttcccctgcctccctataaaaggaagcccaaagcggttttacatgagtggtacctggtccttcacaaagctctgcccaggtgacagatgatagaaatgtggccataaraagtaagtttaaaagtcagagactttgtctctttagcataagataaataggttacgaaacagtctggaagaaaacaaaaagatttgtgtttgatgagtaattaatagataacccagtggaaattagatgaataacaatgaataattaatggatcagaatattgacaagaaaaaaggacagaaagaaaaggaaactagaatgag

SEQ ID NO: 510145 - DNA, 590 bp, Homo sapiens
aagaccttgggaggagttgtttaatctttctaacactagctttcttatatatgaaataggatctaataattctcatctgatgggcttgctgtgaaaagtgaatgaggtaatatacatagccatatgaacattgcacctagcacaaaatacattccaaaaaattaatagattttaaaaataaaatattaaactagttcaaccattgtggaagacagtgtggtgattcctcagggatctagaactagaaacaccatttgacccagccatcccaatactgggtatatacccaaaggattataaatsatgctgctgtaaagacacatgcacacgtatgtttattgcggcactattcacaatagcaagacttggaactaacccaaatgtccatcaatgatagactggattaagaaaatgtggcacatatacaccatggaatactatgcagccataaaaaaggatgagttcatgtcctttgcagggacatgggtgaagctggaaaccttcattctgagcaaactatcgcaaggacaaaaaaccaaacactgcatgttgtcactcataggtgggaattgaacaatgagaacacttgg

SEQ ID NO: 510146 - DNA, 649 bp, Homo sapiens
acatttgtaactttaaagatgaaaatctttcagggactgcaaaatttgatgaaaagctccttagtaatgtacactaacaaaatcagcacaaaatgggcaatactggcaagtgtcatcatatacacagaaagtaattgataaagttttatggatgtacactgaataatttaaatagacttcactagtcaatcatatatatctttactggaaaggatgcaaaagactattcctcagtccacatgacaatatatattttttgttatttgaattataatacatattttgttttggctaaatttaatcmctgtgtgatacgccaccacctgtgtgatatgggcttactccataataactaaattttaaactggttgttaaatctcaaagactcttttgccatttttgtatctttatattctgttggtcactagctctctttacaactctctcctgtcccttaattttccttggtacattcctcagtgcatccctcaggcagcactgttactgtgctccatcgctagctcctccctcctttgttgtttcgttgaaagtcagggttccaactatcacacagaagctaatgactccccatactattatctccagtcagactcctctactgagcctattaatttcaagaaggtgtccc

SEQ ID NO: 510147 - DNA, 613 bp, Homo sapiens
aaaaaaaaaaaaaaatgaggaaaagkatttgaattcagaggatcaagaagccttcagtgttgaacatacaagcggcaatgggaaagacaatttcacaaatgtgaaaaaaaaaaagccaaaataggtattcaacacaaaaataatcccccaaaattcactgttccagttagtggaaatactatggaatctcctcttaatgaaaacatctcaattcatttttaaggatgagaaaatcacagagactgatagtgaaccagaagaaggtgaaattacagactctcagaccgagggtagttatgatgaaggcattaccagtaaaggcaatgcaactgcaaaagatactgaggaggcagatgaggaaaaagtgtggccctcatatatgagaataattgtcattagatcacctgtgttacagacaggatcattcttcatcattactgctgtaaaatctgctacaattggaagagaaaatgacatggagcatactcttcgaatccctgaagttagtataagtttcatgaagaaatttattttgaccatgacttacaaagttatgtccttttggatcaggcagtcaaaatggaacaattgttaatgtaaaatggattgttca

SEQ ID NO: 510148 - DNA, 592 bp, Homo sapiens
ctggacacacatacaccctcaggctcaggatacccaggacagagtcctggatgcttgaagtcatgataagtatccagaatgacacagaattccagccaggcatggtggctcacacctgtaatcccagcactttgggaggccgaggtggatcacctgaggtmaggagttcgagaccagcctggccaacatggtgaaactccctctctactaaaaatacaaaaaaaattagccagttatggttgtgggtgctactcaggaggctgaggcaggagaatctcttgaacctgggaggcagagactgcagtgaaccgagattgcaccattgcactccagcctgggcagcaaaagtgaaactctgtctcaaaaaagaaagaaagaaaaaaagaatgacacagaatttgctaaagggggagaaagggctttcttccaaagctgggcctggtttctacagagagtcttccagatgaaaattaagcagctcttctcaagcacctcagaggagaacccctcaccctgatgaatcaggcacacaggcggatccaagacaattggctgtgtgcgtgtgaacaagcctatggtggaaatgcagtgc

SEQ ID NO: 510149 - DNA, 592 bp, Homo sapiens
ctggacacacatacaccctcaggctcaggatacccaggacagagtcctggatgcttgaagtcatgataagtatccagaatgacacagaattccagccaggcatggtggctcacacctgtaatcccagcactttgggaggccgaggtggatcacctgaggtaaggagttcgagaccagcctggccaacatggtgaaactccctctctactaaaaatacaaaaaaaattagccagktatggttgtgggtgctactcaggaggctgaggcaggagaatctcttgaacctgggaggcagagactgcagtgaaccgagattgcaccattgcactccagcctgggcagcaaaagtgaaactctgtctcaaaaaagaaagaaagaaaaaaagaatgacacagaatttgctaaagggggagaaagggctttcttccaaagctgggcctggtttctacagagagtcttccagatgaaaattaagcagctcttctcaagcacctcagaggagaacccctcaccctgatgaatcaggcacacaggcggatccaagacaattggctgtgtgcgtgtgaacaagcctatggtggaaatgcagtgc

SEQ ID NO: 510150 - DNA, 638 bp, Homo sapiens
aatgttggagtgtgtgtgtgtgtgtgtgtgtgtgagagagagagagagagagatcagcttagacagggaaaccaaggctgtcgtttattgggcttgtttaagggtgtacaaggcaaaagaagaggacttcctaacaatacttagtccagcgaggtaataaaagcctagatccaaggtttgagagccatggagctataccaaagggagctactgaaaaacattgcttccctcaatttatcaaatgagaaaatatgagcaaaaaagaacagttccaagtttagtatttccaatttcacatccactgtggttttaagtttatawagtggaccccatggaattatttgagcatctgagcttaagaagccaagaatacaatgtgccttaaagcaggaattgagtcatataaaaggcatgaagaaatcaaaagcaaaagcacagctgtagggtgttggcagtgacaatctgtacacaacattggaagatgagctacctcttcctttctcccccatcatcacacattcagcatctcttgtcaggctgaaacatgcagtatggtcatttgaagggagcaatgtgtagaattagaagtcagagcgctggtgcagggtatttccccaatagtatttaatgaatcttat

SEQ ID NO: 510151 - DNA, 638 bp, Homo sapiens
aatgttggagtgtgtgtgtgtgtgtgtgtgtgtgagagagagagagagagagatcagcttagacagggaaaccaaggctgtcgtttattgggcttgtttaagggtgtacaaggcaaaagaagaggacttcctaacaatacttagtccagcgaggtaataaaagcctagatccaaggtttgagagccatggagctataccaaagggagctactgaaaaacattgcttccctcaatttatcaaatgagaaaatatgagcaaaaaagaacagttccaagtttagtatttccaatttcacatccactgtggttttaagtttatatagtggaccccatggaattayttgagcatctgagcttaagaagccaagaatacaatgtgccttaaagcaggaattgagtcatataaaaggcatgaagaaatcaaaagcaaaagcacagctgtagggtgttggcagtgacaatctgtacacaacattggaagatgagctacctcttcctttctcccccatcatcacacattcagcatctcttgtcaggctgaaacatgcagtatggtcatttgaagggagcaatgtgtagaattagaagtcagagcgctggtgcagggtatttccccaatagtatttaatgaatcttat

SEQ ID NO: 510152 - DNA, 626 bp, Homo sapiens
gtaattaaccctatagagttacatacttcaatttttttcttgctctttcaactttagctactttttcttaacatcctactatgcactgctacaataatcctttctctgcacctcctgacacatcagctatatcatcaattacatggtcaaggtttacaacatttaatctcattctggaagtataattaaaatttcagtgcttcacttgtaaaatttgaaaccaagaaacagcattttcatcattataatcatataattactcttaattataaaactaattaattggatagacctatagaaaagataacattcactaagcccctactgctattaggatattatacacatcaagatcaaatggattctttttctttttacttctccaagtgcccaaatcatctacaatttttatttgttacatattttgaccatgactttcttatatatttgtttctttaagttaaatttctatttactcttcacttgttgtaagaaatagtcactatattattaagaactcccagttttttaatcacattatctattgggcatattatatcctagtttctgaaaggtttttttttttttttttttttttgaracacgatctcattctggtagcccag

SEQ ID NO: 510153 - DNA, 596 bp, Homo sapiens
gttgtgtcacatgaatgagaagagagggctgaagaattatatcactctttttgaataggctttggtaggtagtttgactaagaacaactcaaagtttaataatgggattagtattgacattcagactaatttcagggaaatggaggtttgtgagatgccatatatcttggtatgagggccwctgccctgttgtaagagcagtggcttgggagtaaagtagcccaggttttaatgcatatcctacagctaacttgcctgctagtcttttgaaattcatttaatctctctaaggcagcctaaactgtggctagaaggcttgggttccagtttattactaggagtgtggtctcaacttatgaagaatttaagttattaagttcaataaactgtcggctagagataatacttatcatacaaaccccataggttattcttttgaaacctacgtgacaaaatataaaaacataacttagattgtaatgcgacttacaaatgttagttgtctttattattgtttcctcacatatcagttgaagactacagtagacatatttgagtaattgttcagctctgcactgttttactctgtgctacca

SEQ ID NO: 510154 - DNA, 596 bp, Homo sapiens
gttgtgtcacatgaatgagaagagagggctgaagaattatatcactctttttgaataggctttggtaggtagtttgactaagaacaactcaaagtttaataatgggattagtattgacattcagactaatttcagggaaatggaggtttgtgagatgccatatatcttggtatgagggcctctgccctgttgtaagagcagtsgcttgggagtaaagtagcccaggttttaatgcatatcctacagctaacttgcctgctagtcttttgaaattcatttaatctctctaaggcagcctaaactgtggctagaaggcttgggttccagtttattactaggagtgtggtctcaacttatgaagaatttaagttattaagttcaataaactgtcggctagagataatacttatcatacaaaccccataggttattcttttgaaacctacgtgacaaaatataaaaacataacttagattgtaatgcgacttacaaatgttagttgtctttattattgtttcctcacatatcagttgaagactacagtagacatatttgagtaattgttcagctctgcactgttttactctgtgctacca

SEQ ID NO: 510155 - DNA, 596 bp, Homo sapiens
gttgtgtcacatgaatgagaagagagggctgaagaattatatcactctttttgaataggctttggtaggtagtttgactaagaacaactcaaagtttaataatgggattagtattgacattcagactaatttcagggaaatggaggtttgtgagatgccatatatcttggtatgagggcctctgccctgttgtaagagcagtggcttgggagtaaagtagcccaggttttaatgcatatcctacagctaacttgyctgctagtcttttgaaattcatttaatctctctaaggcagcctaaactgtggctagaaggcttgggttccagtttattactaggagtgtggtctcaacttatgaagaatttaagttattaagttcaataaactgtcggctagagataatacttatcatacaaaccccataggttattcttttgaaacctacgtgacaaaatataaaaacataacttagattgtaatgcgacttacaaatgttagttgtctttattattgtttcctcacatatcagttgaagactacagtagacatatttgagtaattgttcagctctgcactgttttactctgtgctacca

SEQ ID NO: 510156 - DNA, 596 bp, Homo sapiens
gttgtgtcacatgaatgagaagagagggctgaagaattatatcactctttttgaataggctttggtaggtagtttgactaagaacaactcaaagtttaataatgggattagtattgacattcagactaatttcagggaaatggaggtttgtgagatgccatatatcttggtatgagggcctctgccctgttgtaagagcagtggcttgggagtaaagtagcccaggttttaatgcatatcctacagctaacttgcctgctagtctttygaaattcatttaatctctctaaggcagcctaaactgtggctagaaggcttgggttccagtttattactaggagtgtggtctcaacttatgaagaatttaagttattaagttcaataaactgtcggctagagataatacttatcatacaaaccccataggttattcttttgaaacctacgtgacaaaatataaaaacataacttagattgtaatgcgacttacaaatgttagttgtctttattattgtttcctcacatatcagttgaagactacagtagacatatttgagtaattgttcagctctgcactgttttactctgtgctacca

SEQ ID NO: 510157 - DNA, 698 bp, Homo sapiens
aggaaacacatagatgaacccgcagcaggtgcccagccaggggttctcagcaaggccctgtgcactgccaactatgaacttattaagactgactttccaatagttcttagcagtgtgtggagtagaagacagaacaaygtataccttcagaatgcacagagccaatgcatttttggattacaaataaatcaatttaagacctattgcttctgacaatgatttgcaaattgagaaaattctggaaaaatagacatccaacaaattaacagtgattatacctaatgacagggttacaggtggggatttgtttatttgtatgttcttatttgtttcttgtttcttatgtcagcaaattttaaatagaatatgcaaaatgatgacctcaataataaaaaatattgtgtttattcacaagagttaaataatgtttatagaaaggaaaagatgcgaatgtttttggacagattaggatttaaacaaaaatgttaaacacagaatacaaaatatgttttttctcctgttgtctagcttttgtacagtgaacacatgttgcttttatagtaagaaatatacattttaagtttcaaaattactcagattttgtaaacaatctaaaagaaaataaatgtgtttggaaaatccatttccgagtttacagtagtgttgaatagcccagccaaacaacacatgacctgaat

SEQ ID NO: 510158 - DNA, 603 bp, Homo sapiens
caagtcttgttagggattcagacttctgctcacctgcctgtctgcttctatagaggagaagtccatccttttgatgttagaacactattgaagatgataatcaccctgcactgccttctctacaattcaggtactattttcctggaaacacattctcttctctctagaatatatcttaaccacaaccgacttcatttactgttggtgaaagttaggccagtcttacctgaggttggaagaagcagctttcatacaggctgtggatttggtggttcctgtgaaggaaataaaaaatattttatctccaaatwtatttcttttacatattttgaaatggctgcctcaaggccagcagactgaggtgggggaaatttgcatctgtagagaatctccattaatgtgaccatgcctccctcttctgtgcctttctggttctgggagagattgataatttgacactttaaaagtctaaaaaggaacatttaccctccattatctctgagggaggcttcatctacatagcaaggccacctttgctaattaagcttcttcctttctctttctcatcacctgtcttgccactgaatttgtttaaccagaatt

SEQ ID NO: 510159 - DNA, 603 bp, Homo sapiens
caagtcttgttagggattcagacttctgctcacctgcctgtctgcttctatagaggagaagtccatccttttgatgttagaacactattgaagatgataatcaccctgcactgccttctctacaattcaggtactattttcctggaaacacattctcttctctctagaatatatcttaaccacaaccgacttcatttactgttggtgaaagttaggccagtcttacctgaggttggaagaagcagctttcatacaggctgtggatttggtggttcctgtgaaggaaataaaaaatattttatctccaaatttatttcttttacatattttgaaatggctgcctcaaggccagcagactgaggtgggggaaatttgcatctgtagagaatctccattaatgtgaccatgcctccctcttctgtgcctttctggwtctgggagagattgataatttgacactttaaaagtctaaaaaggaacatttaccctccattatctctgagggaggcttcatctacatagcaaggccacctttgctaattaagcttcttcctttctctttctcatcacctgtcttgccactgaatttgtttaaccagaatt

SEQ ID NO: 510160 - DNA, 666 bp, Homo sapiens
taaactaaggctaacaatagctgatgagctaaaataaaaaggtctgtgcatacatctcacagtattttaagaaagtttatgaatttgtattgggccgcattcaatgccatcctgtgccccatgcagcctgtgggtggtkgtttggaaaaacttgattaatgcttttgtggttgagaagatcttggacataaagtgatgtaattagatgaggtgtcagattctgggataaaagtgagcatatggtgcatacaagagagtgtgaataatcataggcataaggcaaaccacagtatattgatgacactaacagctctgagtcttcatcgttccctgtagcctcatgtttgcagtatgactttgtagtcacaatattgctccgtgtttctgatttcagccatgtgccttgctttgggcacaatatgattttagcagttatgattaaggagagaactgaaaaagtgttgacatacttctgcttctttttgctcctgtgtttttgccatgagaacatgcctgagctagctgactgtgggatgagacacatgaggcagaatctatctttctcttttttcctagcacaggcttcctagaacacctatgagccaactagcctacaaacatgagaaagagcccggcaaaatcagtagagatatctcaccatctgca

SEQ ID NO: 510161 - DNA, 626 bp, Homo sapiens
gtcattaagacaaagtggctttttatatacagaacataaattattgcaatagattagtaggcatttcaaattatgggaaacccaactgaggggctaagattgccagagtgaacaaaaatgaaaaaaagtatgaaatacatggtaaatatacacacatcattcaatcactgcagtcagatttctaagtagatataatcgactttattttgtggatgagaaaaaatagtgaagattttgtcacctactcacacacttactctgaatcagggaaggagaaaggtaccactaatgagtcccttcacagagcacagtcacttccctgaacttatataaatgatgtggtgacagcacacttcagaaaaccattttcagagccaacgttttttattgttttattctgtcatctttgcaacggacctttcagagctgaagctgaccgtgatgaaactgtcactcttgctttattgatagtgtttttgtggatcctacaagtgtcctaaggaacacttggactttttatgcacattcatatgcttartaaaaagtgctgaagattgtgggcctgaggtctagcttggagagcaataagcattggccataggtttcagaatgagaagatttggtgt

SEQ ID NO: 510162 - DNA, 521 bp, Homo sapiens
aaagaatattaattattcaaacaacatctatttatttgctatatgccaggcgatgtactcagtataaggaactaagagaaaatcaaagaatttaggctgctcaaagtccagtaggaagaccaatatacaaaaaaagtataatgctgtgtaaaaacaaataatgctaacaaaatgttacaaaaaagcataaaggggcaaataattctgggaaagctaggaagacttcccagaggagattgcattttagttaggcattcaaggtgttgttccatcagaccaagaagaagaaaggagaaacagattcctgtgtatcacactttattctctctctctctctctcgcaygcacacagacacacacaatgtgtattgacacagtttgttgaacgtgttagtaaacaaaagattttgcaaggtgcacaaatgggtttatctgtctcacattagactgtgaaaatgtgttctgtctgctggctgttcagtttgcaaagcttgcacgactgggctgttggcaagggtttc

SEQ ID NO: 510163 - DNA, 521 bp, Homo sapiens
aaagaatattaattattcaaacaacatctatttatttgctatatgccaggcgatgtactcagtataaggaactaagagaaaatcaaagaatttaggctgctcaaagtccagtaggaagaccaatatacaaaaaaagtataatgctgtgtaaaaacaaataatgctaacaaaatgttacaaaaaagcataaaggggcaaataattctgggaaagctaggaagacttcccagaggagattgcattttagttaggcattcaaggtgttgttccatcagaccaagaagaagaaaggagaaacagattcctgtgtatcacactttattctctctctctctctctcgcatgcacacagacacacacaatgtgtattgacacagtttgttgaacgtgttagtaaacaaaagattttgcaaggtgcacaamtgggtttatctgtctcacattagactgtgaaaatgtgttctgtctgctggctgttcagtttgcaaagcttgcacgactgggctgttggcaagggtttc

SEQ ID NO: 510164 - DNA, 460 bp, Homo sapiens
  misc_feature (1)...(460): n = A,T,C or G
agggatgtaaactcaggacctagtgatttgtctgttggaggttttaagaattctgttcttcaccagaaattcttactatgtagtgacgtcaatggattcaggaggcaatgaacacaaagcacaactactttgtggttgttttcagaatctctctcagtaactgtttttkttgccttaatgaaggcatttgatcttggcacccctttttcaagagttcagtgatatgatgaatggatgattttttccacagctggctgattaggcttaaagccctaatattggggaaaaaagtctattgagagtccgtgtgtgtgtgtgtgtgtgtgtgtgtgtgtgtgtgtatacacacacatttttttcttagaattatccaagacatactacactatactatactacactacactacactatactacactaccctatagcnnnnnnnnnnnnnnnnnnnnnnnnnnnn

SEQ ID NO: 510165 - DNA, 442 bp, Homo sapiens
  misc_feature (1)...(442): n = A,T,C or G
caggacctagtgatttgtctgttggaggttttaagaattctgttcttcaccagaaattcttactatgtagtgacgtcaatggattcaggaggcaatgaacacaaagcacaactactttgtggttgttttcagaatctctctcagtaactgtttttgttgccttaatgaaggcatttgatcttggcacccctttttcaagagttcartgatatgatgaatggatgattttttccacagctggctgattaggcttaaagccctaatattggggaaaaaagtctattgagagtccgtgtgtgtgtgtgtgtgtgtgtgtgtgtgtgtgtgtatacacacacatttttttcttagaattatccaagacatactacactatactatactacactacactacactatactacactaccctatagcnnnnnnnnnnnnnnnnnnnnnnn

SEQ ID NO: 510166 - DNA, 489 bp, Homo sapiens
gcagctctctgagggctgcttataacttcagcacttgattttccagggactgacaatgctcatggccctcctgcttrattgtttgagcttctctttgctctccagatggcatcctttggaatatttgaatgagtatggcaaaattatggagcttctatgaatgaacagaagttagtctaaagcaaaagaaggaacaaatgggcatacttttttgtttacctacatagaagtattactatttcattatgtaaagggtagcatagacagtttacatccagattatattaaaattcagatcttaagtattattttaactttttgacaaagtcacatgcaaaataagcttatagttctttgcatgtgtaaaaaataattgtaagtatgcagccaattcatgtcgctatgagtcctcaagtgtaaagtgaagccctgggtgctggtttacttagaccatttttggaataactttttcagccaaaagtcaaaagg

SEQ ID NO: 510167 - DNA, 635 bp, Homo sapiens
gctgctgaaaaagcctagacacttcactacagttggaaataagacatcacacctacattgttttccagcagtataattttacatggaataaaaagttcatgcttagggaaaggaatttgtctaaaaagtgcttacagttgttctgttatgttcttatctttgtcccagcctacctcctgaaagctttggttattaattttagacttgtcggcattgacgagatgacttagggaagttcctaatgcctggycttgtccaatgttgtgaaaccaataaaaatctcctaggttttcattctttacactaatgccaacaaatttcattccaacagacatctcttacaagaggcgaacttccaggtttctctgtcagatcactcatgcatataatttatgtgaaatcacctcccacattaagtgctaaataaaagtcactttatacttcaagaagtgtccctaacaactttaagatccgcagaagatctgtcataaatgccatgcaaatctggattctctctcgctaggtagagggttctacttcttcgttgcttccaatttctttccagtgctttgctcatattcaatttcatactgaagattaacatcaaggcaagtatttgaaaacttatttggctt

SEQ ID NO: 510168 - DNA, 635 bp, Homo sapiens
gctgctgaaaaagcctagacacttcactacagttggaaataagacatcacacctacattgttttccagcagtataattttacatggaataaaaagttcatgcttagggaaaggaatttgtctaaaaagtgcttacagttgttctgttatgttcttatctttgtcccagcctacctcctgaaagctttggttattaattttagacttgtcggcattgacgagatgacttagggaagttcctaatgcctggccttgtccaatgttgtgaaaccaayaaaaatctcctaggttttcattctttacactaatgccaacaaatttcattccaacagacatctcttacaagaggcgaacttccaggtttctctgtcagatcactcatgcatataatttatgtgaaatcacctcccacattaagtgctaaataaaagtcactttatacttcaagaagtgtccctaacaactttaagatccgcagaagatctgtcataaatgccatgcaaatctggattctctctcgctaggtagagggttctacttcttcgttgcttccaatttctttccagtgctttgctcatattcaatttcatactgaagattaacatcaaggcaagtatttgaaaacttatttggctt

SEQ ID NO: 510169 - DNA, 591 bp, Homo sapiens
tgtaagctcttgactttgcttatttaatgttcacagttttaatgattcaagggtatctctctgacactgtcaccacacttgataagtttatgttgttgagtggaccatcccatgagtttgttactgttggtgagttatttaccaaaacaagtaatttatctggccattccacatctgcatttaaatattttttcctattcttattcacagatgttttaattttaaaaagattttataatgtagcattaaaaacatagggcattttaaaaagtcttgggcaatattgatacaagtgctgccaaggcaccattgtgtcagggaagctagttgaaataaatcctgtggagatctgcccagcttcccacttctgcacgagagaatcttgctctgactcgtttgctagatggcacagaagtggctaactttgtaaaattcaggctgcagtatatgtatttctgaaaactgggccatacaatttgacacaccttatgatacaaaatgtgtctgtgatggaaaaagatgccatatrgagtttatggcaagcttcaacaggagaacgacaatataaatccttgatgttctgtagcaagg

SEQ ID NO: 510170 - DNA, 591 bp, Homo sapiens
tgtaagctcttgactttgcttatttaatgttcacagttttaatgattcaagggtatctctctgacactgtcaccacacttgataagtttatgttgttgagtggaccatcccatgagtttgttactgttggtgagttatttaccaaaacaagtaatttatctggccattccacatctgcatttaaatattttttcctattcttattcacagatgttttaattttaaaaagattttataatgtagcattaaaaacatagggcattttaaaaagtcttgggcaatattgatacaagtgctgccaaggcaccattgtgtcagggaagctagttgaaataaatcctgtggagatctgcccagcttcccacttctgcacgagagaatcttgctctgactcgtttgctagatggcacagaagtggctaactttgtaaaattcaggctgcagtatatgtatttctgaaaactgggccatacaatttgacacaccttatgatacaaaatgtgtctgtgatggaaaaagatgccatatggagtttatggcaagcttcracaggagaacgacaatataaatccttgatgttctgtagcaagg

SEQ ID NO: 510171 - DNA, 544 bp, Homo sapiens
ggatttatatttttaaattagactttttttaaagttccaaaattttctatttttctctttatttcttatatgagaagtaattttcattactaaaatctgaatctatcttcagctttatttaactgataatttttcttttgtcataagttgactttactgagctatactgtatatataataagatgccctatttatgtctayttatcagcataaatttgttcatagtactactttatccttttcggtatctgcagtggtatctcttctttcagtcctaatactggtggtttgtgtgtttttattctttgattattcaagctggaaatttatcaattttattgatcttttcaaaggataactttcttttttgaaggaaattgttgactttctccctgattttttatattctattttattgatatttttctatgatctttatttttttcttccttttatttattttgtgtttaatttgctcacctttcttctaccctctttagatagaagcttcaattattgctttagatctttcattatttctgat

SEQ ID NO: 510172 - DNA, 655 bp, Homo sapiens
attttagtctggatttttttagatggtccaaatcctggagatcctatccaactatttccataaattagtggatctcaagtaaggtgcacatcagacctacctacagagcttcctgaatcagaatgaaaagagggacaccaattggtagttttttaaaagctccagatatgattctaatgccagactaaaaagtcatttcatggcctggaaattccaaattttcaaagtcttaatatatttcacaggctgtctcctgacacacaaaaaaggcatacaacttctggtttttagtttggaaaatatagttgtaacactatgctaatgaataccatatataaattacaaaaagtatgcctttgtcattatacaccaaatcttagtcaatcctttcttataaatatgattttamaaagtagtatctttgttaaaggcaacaaataatcgccatatgaaataaacatgcaaatagaattctaatgtgattactcactgtgttggctaattttaggtgtcaactaactaaacgaaggctacctacatagctggcaaggcataatttctgaaagtgtctgcgagtgtgtttccaaaggagactggtgtgtcagtctgtggatgagtgaggaagatgtgccctcaatcttggcggacaccatca

SEQ ID NO: 510173 - DNA, 403 bp, Homo sapiens
cctgctgaggtcctcgccctgggtgggccacaggcacttcaaactcaacatgccscacactgaacttctcacttaacccctactttctttttttttttttttgaaatggtatctccctctgtcacccaggttggagtgtagtggcacgatcttggcccactgcagcctctgcctgagttcaagcaattctcctgcctcagcctcccgagtagctgggactgcagccactgcgcccagctaatttttgtattttttagcagagacaaagtttcaccatgttggcctggttgttcttgaactcctgacctcagttgatccacctgtctcagcctcccagagtgctaggattacaggtgtgagccaccacgcccagccaacccctgcttttattaccaaatgccat

SEQ ID NO: 510174 - DNA, 615 bp, Homo sapiens
tatcaacccagaatcctatatccaacaaaaatattcttcagagatgaaggagaaatcaagccatgttcagatgaaggaaaattaaaataacttgttgccagaaaacctgctctaaaagaatgatttttaaaagcgttcttaaaaggaagaaaattataaagaatatgctaagcaaaaaatgaacaaaaaaccctcaagttttctaatttatgtttattagttgaagcacatattacaacactgataaatttctaaatgtatgttgaggaaatattttaaacaattctattataagtggagaagggtaaaggaatgtaaaaggagacatggtttctatatctcactcaagctggtaaaatgacaacaccagccaattgtaaagttcgtgtatatgtgatgtaatatcttaaaaaaaacacttaaaaacaatcaaataatgcacacacacacatatatacacacacatatatgtaaatggaaaatctttkgtgataataatatgtcagtgtagattcatcagttgcaagaaatgtaccactgtggtgttgatagtgggggaataaagtctagctacatatgtgtgtgtgtatatatatatatacatgtgtgtgtgtg

SEQ ID NO: 510175 - DNA, 480 bp, Homo sapiens
aggctggagtgcaacggggtgatcttggctcaccacgacctctgcctcctgggttcaagtgattctcctgcctcagcctcccaagtagctgggattacaggtgcctgccaccacgcccagctaattctgtatttttattagagatggggtttctccatgttggtcaggctggtcttgaacgcccatcttcaggtgatccaccctcctcagcctcccaaagtgctgggattacaggcgtgagccaccgtgcctggccctacatttttaaattatagccactgagtgcagtggaaagaaaaaaaaaaaaaaaaactctgtgagaggcattcaaactgcctaaytgtgagctaaatttccttagaatttaaacctaactgctttgcataaacttctagatcaacagatgtccatcctcttctattatctgagggtttggtttacactgtcagccaacaaacccttctctattaagcaccaatt

SEQ ID NO: 510176 - DNA, 625 bp, Homo sapiens
agggacgatcctcttgcagcctaacttgcaataaatggaccttcataagactcgagtctgctgcatatcctggtaattaatcatacggaggcaccaagccttaagtattaaacactctctaaatgggaaaaaaattgctgtattgctaagcactaggacttgattcatttagtattaactttcagtctttattaaagtggctttaattttatttgtgtgatgttagtgcatttctggaaaaataaacaccgaggttttttagctgattgtacccgataygctcctgattcaaattgtaagctgcatgctattttccaggagaaataaagatccccattttttaaagcttatttttaaaaacatgccataatggtaagttgcatttcaatatcctgtgaaaagtgtgtactgaggacagcacagtggcaggcaccgggctgggaacagaacatgcaatgatgctcaggtgtgggcacttggtccaggttgcccacagcccagatgggaggcagggaggattcaagtaactgtcctctgatgcaatcgagagtgtgcagacacggtagacagatctgttttactggagggatccagggcagcttcctagaggaagcacactttagtt

SEQ ID NO: 510177 - DNA, 533 bp, Homo sapiens
cagctgttgatttaaagttgttagttaaggtgtgtcagggttctctagaaggacagaaygaataggataggcgtatacataaaggggagtttattaaggagtattgacttgcacgatcataagttgaggtctcactttaggccatctgcaagccgcagagcaaagaagccagtcagaatcccaaagctgaataacttggagtccgatgttcgagggcaggaagcatccagcatgagaaagacgtaggctgggaggctaggtccatctagtttttccacgttcttctgcttgcttttattctgaccacactggcagctgattagatggtgcccacccagggtgggtcttcctttcccaccccactgactcaaatgttaatctcctttggcaacacccacacagacacacccaggaacattactttgcatccttcaatccaatcaagttgacactcagtatttaccatcatacagggtgagaacagagattggaagggggcggggaaccctgtgcctgtacaacccttctcctat

SEQ ID NO: 510178 - DNA, 533 bp, Homo sapiens
cagctgttgatttaaagttgttagttaaggtgtgtcagggttctctagaaggacagaatgaataggataggcgtatacataaaggggagtttattaaggagtattgactygcacgatcataagttgaggtctcactttaggccatctgcaagccgcagagcaaagaagccagtcagaatcccaaagctgaataacttggagtccgatgttcgagggcaggaagcatccagcatgagaaagacgtaggctgggaggctaggtccatctagtttttccacgttcttctgcttgcttttattctgaccacactggcagctgattagatggtgcccacccagggtgggtcttcctttcccaccccactgactcaaatgttaatctcctttggcaacacccacacagacacacccaggaacattactttgcatccttcaatccaatcaagttgacactcagtatttaccatcatacagggtgagaacagagattggaagggggcggggaaccctgtgcctgtacaacccttctcctat

SEQ ID NO: 510179 - DNA, 533 bp, Homo sapiens
cagctgttgatttaaagttgttagttaaggtgtgtcagggttctctagaaggacagaatgaataggataggcgtatacataaaggggagtttattaaggagtattgacttgcacgatcataagttgaggtctcactttaggccawctgcaagccgcagagcaaagaagccagtcagaatcccaaagctgaataacttggagtccgatgttcgagggcaggaagcatccagcatgagaaagacgtaggctgggaggctaggtccatctagtttttccacgttcttctgcttgcttttattctgaccacactggcagctgattagatggtgcccacccagggtgggtcttcctttcccaccccactgactcaaatgttaatctcctttggcaacacccacacagacacacccaggaacattactttgcatccttcaatccaatcaagttgacactcagtatttaccatcatacagggtgagaacagagattggaagggggcggggaaccctgtgcctgtacaacccttctcctat

SEQ ID NO: 510180 - DNA, 533 bp, Homo sapiens
cagctgttgatttaaagttgttagttaaggtgtgtcagggttctctagaaggacagaatgaataggataggcgtatacataaaggggagtttattaaggagtattgacttgcacgatcataagttgaggtctcactttaggccatctgcaagccgcagagcaaagaagccagtcagaatcccaaagctgaataacttggagtccgatgttcgagggcaggaagcatccagcatgagaaagacgtaggctgggaggctaggtccatctagtttttccacgttcttctgcttgcttttattctgaccacactggcarctgattagatggtgcccacccagggtgggtcttcctttcccaccccactgactcaaatgttaatctcctttggcaacacccacacagacacacccaggaacattactttgcatccttcaatccaatcaagttgacactcagtatttaccatcatacagggtgagaacagagattggaagggggcggggaaccctgtgcctgtacaacccttctcctat

SEQ ID NO: 510181 - DNA, 594 bp, Homo sapiens
gtaaagtaggagaaatgaaagaatgcctgcattttaaagtatctggtaagattttatggcatatttcaaatgttatttaaataacttggatacaaattaattctgttctctaaactactgaaaataatgatttattttcttactataagctccgaaaatatttagtaaatattatattctaattcattgtcctgttttagttatttaagagtttctctcattcatatcaatttgttaagacctagccatgattccagtgttttctttaactcttacttttgctcttcacaagtttttatttgcttattcaatgaatcaatgaatcaatatttattgagtcgtaactgttatcaggtattattatattaatctgaaggaattcaacgatgaaatgtacagagagacaaacttataatctaaccataagatcaataatcaaaccacttatagggcaatgattagtcaaaaaatggccaatatgacttcattaacattgggaaagggagaacacagcctacaaatgacctgcayaaatgcaggtcctgcacaaatgacctagcagaaaattcggattcagagaaaaacaacaacctc

SEQ ID NO: 510182 - DNA, 610 bp, Homo sapiens
agacaattgtgaaggggaacgactcataatacgactgcaaaatttcacagttgaaagtcaaatagcagtgattttgctttgccagcctgacaccaccttgaccatgtggatgtaagtccctgggcagtgaacatgctctgtgaagcactggagtcatgttggtgcaagcaactcctcaatttaaaacgtggtaggacacagtcacagagggcatcgggcacttttttctccatcaaaattccatacattatggtaactggggaattaatgccaaccacaaccacaatataaaacctccaccaattacgctgtgtgtgagtctgagttctccaggtaaataatatatatcctattggttctgttatatctatatatcttgtaattatgtgtgtgtgtgtgtgtgtgtgtgkggtgtgtacagtcatgccttgcttactatcagggatacattctgaggaatgggttgttagctgatttcatccttgtgcaaacatcatggtgcatttacactcacctagcctagcctactccacaccgagcctgtatggtatagcctattgctcccaggctgcagacctgtacagcatgggactgtactgaatgtagtagg

SEQ ID NO: 510183 - DNA, 610 bp, Homo sapiens
agacaattgtgaaggggaacgactcataatacgactgcaaaatttcacagttgaaagtcaaatagcagtgattttgctttgccagcctgacaccaccttgaccatgtggatgtaagtccctgggcagtgaacatgctctgtgaagcactggagtcatgttggtgcaagcaactcctcaatttaaaacgtggtaggacacagtcacagagggcatcgggcacttttttctccatcaaaattccatacattatggtaactggggaattaatgccaaccacaaccacaatataaaacctccaccaattacgctgtgtgtgagtctgagttctccaggtaaataatatatatcctattggttctgttatatctatatatcttgtaattatgtgtgtgtgtgtgtgtgtgtgtgtkgtgtgtacagtcatgccttgcttactatcagggatacattctgaggaatgggttgttagctgatttcatccttgtgcaaacatcatggtgcatttacactcacctagcctagcctactccacaccgagcctgtatggtatagcctattgctcccaggctgcagacctgtacagcatgggactgtactgaatgtagtagg

SEQ ID NO: 510184 - DNA, 646 bp, Homo sapiens
ctgctgggcttttccaaccaaggatgggtggggcttgaattcagggcaacttctcaaacatcaaaagaagcatttaacttctccctgggcaagccctaacagagtctggctgctgttcttgggggagacaagctcagattctctttctctcctactctctctctctttctctctctctcctcctttttttttttttttttttttttttggctgagaaccccatagcagtggaaaaggcaatataccagttatttttatttttatttttgtttttttaccagtaattaaccctattacaccaagttttaaagaattggaatataatggaacatacttaatgtgaagtctgtactgagcataattcagccttggatgatttgaaggcactgtgtgactctaccagacctgccattaatctcatcatggcaastacgaggacatgactatgggctctctcatcagaacagggagtggtggagagcttgctcagccaggcacgacttatggccaaatcgcttgtgcctacagtccagtgatgggaacgagtgatttctttgactgtttctttctttaccaggaaaaaaaatgcattcagaaataagtctacattgcacaacaaaatggcacattgtctcagtccccaagg

SEQ ID NO: 510185 - DNA, 494 bp, Homo sapiens
cttcctaaaagacactttttcctcctcctccctctttcgtcttctatctgtctttacctcctcctgtccttctctgtcttcagccacatgatggttgcagagagccaagcctactacatgccccctgaggatgctagatggaaggatggaaggtgccagggcccttgtgggtgtcacggggctcatgactgagccactgctggaactcttcaaccacttctttctggacagggcagtcgtgccacttttagctggattcctgaatcttgccttcagatgcatcctgactcatacagtgygcaaaaagcacatggtaaattgcaaaagcctccacaaatgaatgctgaatgtgtgagtaatatcatccactcaccaagctccatgcccaaagtccgccatgacttagggaacgaaggcaaagtatgagcccaactcctcgctggctcaagaaaatgtgctaggctagacgggttgaatgtgcccttggttggtac

SEQ ID NO: 510186 - DNA, 494 bp, Homo sapiens
cttcctaaaagacactttttcctcctcctccctctttcgtcttctatctgtctttacctcctcctgtccttctctgtcttcagccacatgatggttgcagagagccaagcctactacatgccccctgaggatgctagatggaaggatggaaggtgccagggcccttgtgggtgtcacggggctcatgactgagccactgctggaactcttcaaccacttctttctggacagggcagtcgtgccacttttagctggattcctgaatcttgccttcagatgcatcctgactcatacagtgtgcaaaaagcacatggtaaattgcaaaagcctccacaaatgaatgctgaatgtgtgagtaatatcatccactcaccaagctccatgcccaaartccgccatgacttagggaacgaaggcaaagtatgagcccaactcctcgctggctcaagaaaatgtgctaggctagacgggttgaatgtgcccttggttggtac

SEQ ID NO: 510187 - DNA, 494 bp, Homo sapiens
cttcctaaaagacactttttcctcctcctccctctttcgtcttctatctgtctttacctcctcctgtccttctctgtcttcagccacatgatggttgcagagagccaagcctactacatgccccctgaggatgctagatggaaggatggaaggtgccagggcccttgtgggtgtcacggggctcatgactgagccactgctggaactcttcaaccacttctttctggacagggcagtcgtgccacttttagctggattcctgaatcttgccttcagatgcatcctgactcatacagtgtgcaaaaagcacatggtaaattgcaaaagcctccacaaatgaatgctgaatgtgtgagtaatatcatccactcaccaagctccatgcccaaagtccgccatgacttagggaacgaaggcaaagtatgagcccaactcctcgctggctcargaaaatgtgctaggctagacgggttgaatgtgcccttggttggtac

SEQ ID NO: 510188 - DNA, 616 bp, Homo sapiens
caggtggcaacacaaggtgcacccagcccgccgtctgcttgccgctgctgtttccaacaaccgatgcaggtgttctgccgatgcccccacgctgctaagcgaacactgtgttttcattgtattaatgatatgtcatctatttgactgttaagtgcttaygtgtgaataagtgtaagaaaatgattgcttattggtcacatataaattcagagtcaggaatgatggtgaggcccaacagccacaaattctccacatggtgcctgagatagtgacacttttgctttctgatggttccctgtacacaaactttgtttcatccacaaaattattaaaacattgcatgtagttcccttcaggtatgtgcatgaggttgatatgaaacataaatgaattttgtgcttagatttggatcccatccccaagatattttattttatatatgcagatattccaaaatccaaaacaatccccaacaggaaacacttctggtcttaacctgtatcatccttatatcctgcagggaagatacagcaatttgccccattttaccctgcaaggggttggtatggcagagttgacttctaaaccagggctgtttccacgagcaacgagtttt

SEQ ID NO: 510189 - DNA, 605 bp, Homo sapiens
ggtaaactgagaatacatatgatgtctgaaagccgcgttaggctgaagaaatctgatcttagtgtcgggtattgaatttccaattagaatgctcatttgccctctgtgctgcacactctgggccttgggctaatttaaatggagtattttcagtggatcctgcctagagacaggaaggtggcttaggggccatctcctgctttcttttattctcaacgtactgtgggaaatactgtttattcatttaagattgctgattgaaggycagattaaattattttttattcaactagtgttgcttgacatttttgtatatgatctttaatattcttcatttttaaaaggtatgtataaaataatcctctttatatacaatacaaatatatttgtgtgtgtacaaaatagatatactatatagtcataaagagagatgtaaaagatggccaagaaaatgttaatggtgcttacataaggaaggtagaatttcatgtgacctttactttcttttttatagtaccatgtggtttttgaattttctacaatgagaatgcgccatctatataatcagaaagaaaacaataaagctattgagaaaaaatactacc

SEQ ID NO: 510190 - DNA, 616 bp, Homo sapiens
atgaaggcaaaatgtatattaaaaattaaatagaatcactacaactcatcagtatagccaatgacactaatactcataatgattatcatgttgataataataaatagtactatcaattttgtatacctactatatactagaccttatgttaggtaatggaaatacataccatttattgcacaaacttaactgaaaaacaacatgtagtttgagtattgccttataygcatcccatccttcaaataaaatgacaaaaagaaaaacccgagttatagtttctgccttttatcccaataataaaacattggttaagaatatgctttttaggatgttaactatgtgtcattcaatttattaaataggtcagtatggttgaatctttatgaattttaaaaaggaaaaaacattgaaactcttgtatttctcgtgctgaagagttaataaattagataaagaaaactactgacagaagaaagttgaaaagaatactctaacttatctaagaaccattttcttatcattaaaacaattttgcataaaggctattaagtttgttattgattttagtacagtaaaataataatgtttattcattaattacaaaaaatgtaaaatg

SEQ ID NO: 510191 - DNA, 654 bp, Homo sapiens
ggttcttgattaggtttgacaactgcgtcctaaaattctcttccatgaagaatgaatgcagtgtttatggcagacaaccatcctagccaagaaaaatttgaataatgcaagtattgcataatcatgttatttgtatcccttgacagcagaatttacaatgcctcatttaatgagaaattgaatggaagatgtgtttgaaaaattaatccattttaataatatatggcactgatattggccgtgtctgtcaggttttatacctataaactaagagcccatgaatatcaattacagtaaaaaataatgagatatgtattatttccctaaggaaattacttttaaaaatatgcattctgacactctcaagattaattacacaattatgcagttccaaagtgtaatcagtgaaattctaagcagcagtgagaatgagtatttatatttactaaaaactcagaagcctcacttctgatgaaactttacaaagtcactgaagtttagagactatggcattccaataaaaatacttatcaatcttttakctagcaaagtctggggattgggggtaatttaacagtagcaaagaaataatgattagaacactgcaaaatacactgagtcaaaacaaaggctgaatattaaagaaccaaaaga

SEQ ID NO: 510192 - DNA, 258 bp, Homo sapiens
cttacgtttcattcctatttgggtgcaaactattccccctaagcagctacccatatcagtcaactctttttcctgaaatcaacaatacaygtaaacatctccctaaaatgctaatttagttgctgctgatgctactgcaaagcacagtgcattcactgacttcattaactgagtaatcagggaaatcgagtgtcaataactcaagcacagattttgtgtaataaaattattgtttaattctgtagatctcagtttttc

SEQ ID NO: 510193 - DNA, 637 bp, Homo sapiens
gagaaagtgtgcttcgaaatgaaggtggaataaacattttttagacaaacactgaaagatttttttcaccaacagacctatacctaaagaaattctaagtgagttcttcagaaagaagaaaagtgatctaagagacaggcattgagatttatgaataaaagactattataaaggattaacatgtggtaaatataaatatatacagaataaaataaatgacagctactgatgctctttgacttacaatggagttacatcctgataaacccaccataaaacaaaaaacatcattacttttaatggaaaaaactgcaattacttttgcaccatcctagtatttgtacagttgatttaaacccaaacataccagtaattacactaaatatgattgggctaaatattccaattaaacaagcatcctctaggaaaggggttggcaaactatgtaattggtcagatagtgttttaagctttgtaggctacatatatctctgctgcctattctttcttctttgtcttttataaccttttaaacacacaaaaacaattcttarcttgtataccatacaaatcagataagctagattttgcttgagggcaactgtttgccattctacactctaagcaataatgacag

SEQ ID NO: 510194 - DNA, 575 bp, Homo sapiens
gagcatggcaagcatctgaagcaaggactccccagtggactctcttaactccattactgctctctaaatttatttaacaagataagcaaactgttccttgttcatctctgaattgcctgcagcaactaataggtactgaacacttttaaaatcagattgaggttgggcttggtggctcatgcttgtaatcccagcactttgggaggccraggcaggtgcatcacgaggtcaggagatcaagaccaccctggccaacatggtgaaaccctgtctctactaaaaatacaaaaattagctgggcatggcagcacgtgcctgtagtcccagctacttgggaggctgaggcaggagaattgcttgaacctgggtggcagaggctgcagtgagccaagatcacgccactgcactccagcctgggcgacaaagcgagactccatctcaaaaaaaaaaaaaaaaaaaaaaaaaatccaattgaactgcattttttctgtgcttatttcttgtaactctgactctggtttgaaaaggatatattcgtggatgtgatgtgggattggggagtacagagagaatga

SEQ ID NO: 510195 - DNA, 575 bp, Homo sapiens
gagcatggcaagcatctgaagcaaggactccccagtggactctcttaactccattactgctctctaaatttatttaacaagataagcaaactgttccttgttcatctctgaattgcctgcagcaactaataggtactgaacacttttaaaatcagattgaggttgggcttggtggctcatgcttgtaatcccagcactttgggaggccaaggcaggtgcatcacgaggtcaggagatcaagaccaccctrgccaacatggtgaaaccctgtctctactaaaaatacaaaaattagctgggcatggcagcacgtgcctgtagtcccagctacttgggaggctgaggcaggagaattgcttgaacctgggtggcagaggctgcagtgagccaagatcacgccactgcactccagcctgggcgacaaagcgagactccatctcaaaaaaaaaaaaaaaaaaaaaaaaaatccaattgaactgcattttttctgtgcttatttcttgtaactctgactctggtttgaaaaggatatattcgtggatgtgatgtgggattggggagtacagagagaatga

SEQ ID NO: 510196 - DNA, 575 bp, Homo sapiens
gagcatggcaagcatctgaagcaaggactccccagtggactctcttaactccattactgctctctaaatttatttaacaagataagcaaactgttccttgttcatctctgaattgcctgcagcaactaataggtactgaacacttttaaaatcagattgaggttgggcttggtggctcatgcttgtaatcccagcactttgggaggccaaggcaggtgcatcacgaggtcaggagatcaagaccaccctggccaacatggtgaaaccctgtctctactaaaaatacaaaaattagctgggcatggcagcacgtgcctgtagtcccagctacttgggaggctgaggcaggagaattgcttgaacctgggtggcagaggctgcagtgagccaagatcacgccactgcactccagcctgggcgacaaagcgagactccatctcaaaaaaaaaaaaaaaaaaaaaaaaaatccrattgaactgcattttttctgtgcttatttcttgtaactctgactctggtttgaaaaggatatattcgtggatgtgatgtgggattggggagtacagagagaatga

SEQ ID NO: 510197 - DNA, 612 bp, Homo sapiens
tggaattgacagatttcaagcttccctttcacatgtttaaatgatgtgctcctgaccacagtgacagtgacctcttctctactctattttcagcagccatcacctagtcatctggagcagagataactaaggaaggggacaggaaaaaggatttgaatggctttagataaaggggcattgtgtctgtcaggaccccatctctgcagcacagacatcaaaacagcaggcatttctggtaagcccagacatgaagtcatttaactgggatgctgagccagtgacttctcttcacagagtacatacagagttaatcctgtttgtagcaccattgttactgagaaagggctttcaggactaagattccttatggtagagataaagcgtcctcaaaatatgacaacaytggttggccaaaactatatcctcagtccaaatgccaaaacaactgttccagaaaatcatgtcaaagagatgttacagctcttacatgcctctttaatttgaagccaaaggaaagctgtcccaaagacagcatgtgtggcctgcacaatctctttgtcccgctcacacattcttctcttctctccacaacattccttttcctgctccatg

SEQ ID NO: 510198 - DNA, 616 bp, Homo sapiens
cctgagtgcttatctacatgttcctatcaatgatgcttttcttacatttgccacattgagcccttaaatacctccttttgagagttacatacaatagagaagataagttcatgaagtgtcataatttgaggggaatttagagcccattgaataagctccacatctaattctcaaataccctctctgacacctctatccaggagtgctycaacctctgctcagaacatcagtggcaatggaaatagagaaatgttgattaattaagattttagaggtaaaagcattaggacttactgatttgtagaatgtgacatgtgaaacagaccgaggtggtaagaaggaatcccaaatttctcacctaagacactaggttcacaatggtgccattttatgacatgtcagtgtatgatttgggcagaaacaggtttggtagagaaggccacgatgccatggatgtgttaagtgtatgatgttttgagttatcaactgaagatgagtcagcagccatttcatctctggaaaactcatagaaactataaatctgttgctattattaagggacagaattcaatacattaaaaagcaatattatttactcctaaatgtatggaaaaga

SEQ ID NO: 510199 - DNA, 666 bp, Homo sapiens
tcaactgtaaacagggaattataactttttaaatacttgaaattaagataatggattgtaagattttgtgagttcttaatgctctgaaatctgtagaatctctacttcaataaatcctctatagtcttctgctttgatgtgttttcagtttatcattggctctgatattgtaaaattttaattgtgtgattttttcctaatatttatctatgtttggtactgtatgaactatctggttctagtttgaattgagggaaaacatggctctctataatttaccaatgcaagtcagagaagctaatatttattaaggaatcgataagaaaaggctaagtaaattgtgtgattaagtccagrcattctgtttagcatattatatatgtctgctatatttttatttcataggtaagagaacatatttagaaagattaagtaacttttccaatgccaactacttagaaaatagtggagttaggataagaatagagatctctctgatttaggagtctctgattagggtttctaattctccaggctcagccacccagttgcatgcaacagagaaagactctggctaacctatacaaaaaggaaatgtattaggattgaagatgaatgtaagagaacaaacctaccaacacaattaaaatggaacaaggatcaaag

SEQ ID NO: 510200 - DNA, 326 bp, Homo sapiens
acttacatgtactgagtatatatttagaaaatctggaagaagctatggtgcattaagaatgactataatttctttggcactccaccyattaagaggtggggtctctgttgtctgtccttgaacccagacaggctctgcaattgctctgaacaacaacaacaatatgacagaagtgatgccatgctagcttataaaactagcagtttcctctttctgccttttggaacaccttctttgggaatctcaagctagcatgtctgaagtctgacttcctaagagcaccatgctggagaattcaattgtcagcgaacccattgacagtccca

SEQ ID NO: 510201 - DNA, 326 bp, Homo sapiens
acttacatgtactgagtatatatttagaaaatctggaagaagctatggtgcattaagaatgactataatttctttggcactccacccattaagaggtggggtctctgttgtctgtccttgaacccagacaggctctgcaattgctctgaacaacaacaacaatatgacagaagtgatgcyatgctagcttataaaactagcagtttcctctttctgccttttggaacaccttctttgggaatctcaagctagcatgtctgaagtctgacttcctaagagcaccatgctggagaattcaattgtcagcgaacccattgacagtccca

SEQ ID NO: 510202 - DNA, 561 bp, Homo sapiens
catggaatccgtgattattttttccaaaataggaagtaccaattttcttcttttcaacaagagaatcttttctacccttgggtatttgtctaaaatgtgatgcagtgctgcagtttgctcatatactaggaggcagttcccttccaattatatattatgaattctatcttagatgggaaaaagccttgtggcagttacaaatcccaagctaattatggcataactttaagaggcatttaaacattgaatcggattaaaagtagctagcaaatgtggaatttgtaaagaatctatgcaatatttggccatttcctaaagagacaggagactcagatgaggactaagcaggacacgatttttcatcaaattaactaaattagtgctttgtggattgcatgtggcaactagtcagtaattaccatgrtctgcaaatgaaaacttatttgaagatggaaaataaagaaaagaaatatgaaatctttttttcttttttttttccggtcagctttggcagagactagtttccacttcctggacacacaggaagacagtatctcccat

SEQ ID NO: 510203 - DNA, 449 bp, Homo sapiens
tctgtggaccaggaaccatgtccattcctatagacatggaatctgctggtgacttgatcwtggacttccagactccagagctataaaaaaataaatttccattgtttagaagtcacacagtttatgatattttgttctagcagccccaaaggactaaagagaggacctaacaaataatcaacttctagatggtttctaatgaattctaataataataataatagtaataataatgataacatcattacttctagttgaagaacagtccttcttagttgatgactctgagaaacacagcaggtagcacttatttctgcaggatatgtgattgtcactgttgttggctttggtggtcagtatgagcaggctgggtaaatgaaccacaggtcctgatccctctgagaaaatctgcagacagactcactttgagattatccatcatgctgtca

SEQ ID NO: 510204 - DNA, 499 bp, Homo sapiens
ctgggaacatccttgtggattgccaagttctcacctggtcaaagagatgccggcaaaagaaaacaaaagtggagtcctctaaagtgtcggayaaaaggctggcagccttcttgcccaaatctgagggaggactgggccaaatgaactctgtgaacattgagtggggataggaggcaagtagaccctagggtgtacccttgggagtagggcccaagtcttggggataatacttgcatcaaattgtatatcctgaagagccagcattcaggcacctgccacacagcactgcaagtcaagtaagactttgcttttttcttctaactccctcttccccatcctgggggagccaaaagccacaaaggacatcagggtgtgaaaagtttgaaagaacagatcacatcaccactactcctccttccccatcagctcaggactaaggtgggtcagaggtggtggcaggggtggcagggaaagaaattttgaactagatgagagattg

SEQ ID NO: 510205 - DNA, 421 bp, Homo sapiens
tgagcaccatcaggctagtgatgatgtctattttttttctattgtattccagcgccccatctcttgcctaggatgtagtcaacactcaataaatacttgaaaaacaaaagaatgagttcatcgattcacccttgctcttggcattgtgctcagtggagaaaatgaggaacagagtgattcaaagacttgctgtgggctaacctttctttcaagaagtcccagtatgttagtcccctactgatactgtaacaaattaccacaactttagggctttaaaacagcacacatgtattaccttccagycgtgaaggtcagaagtctaaaatgaatcttacaagactaaaatcaaagggttggcagggctgcattccttctggatgctccacaggagaagctgtttatttgccttttcagacttcta

SEQ ID NO: 510206 - DNA, 558 bp, Homo sapiens
caggtagcatgtggtaacctctgtgtccatttagccacccagaatatacttagtgaaagcctgtgccctagaggattagggattttaaatccgttcactgtcaccacagggttaaaatgagaagagctaagtggacaatgaccctagccattctaggggtgagtgaggaaagsgggaggtgtttttcattagagagaagatacactgcaatcagaaggcagttctttcagcatttattcatgcaacaagcatttatcatgcaactatagtgtgccatgaactgttccagcactatgatgcagtcatgaacggttctcacaaaacaggaccctcgtgtagcatttatcaatagttacaataaaacaggatctatactttggactgtggcataaacaacatttgcgaaggccctaaagctccataaaaagaaatgactcatcttccacacaggtgagagaattagtttatttgttgtgggatgtttgcttttttctgaaagccccaattaaaggagctgtgacaagcatcagccccaatctaaagtataattctttgaaa

SEQ ID NO: 510207 - DNA, 496 bp, Homo sapiens
gatgatcagagagttaaataaataacttgtctagccgctaagtgacggagcaaagactcaaacctaactgtgtttgaatgtaaagttcgagccaccctatcatccttcctctccaggcctgacaaatgccagcctgctgcccctaccttaaaaggctcagaaagtagaccctccccacagctctactcactttcctccaccatccaggcaggaaatcmaggcattaatttattctatgagtagttatgtaataaatgcctctttaatgcatgacagtggaaaggagagatgatttccaaccagttggactggattgatgattttctcattcttttcttgctcccaaccccttttgttcaaataaagtcctatcaagatcaccaataaaactcaatgtataaaaaaggggctcctggttaaagcagaagtaggggcccaaaaccctccaccccgatccttacctagtctgctgagttacctccaaggaatccctaag

SEQ ID NO: 510208 - DNA, 501 bp, Homo sapiens
catagggtttgttttgaaagagctctggcttctttggttttcatatatcattttctaagccacaatccccaggtcaaatgggcttctggggacaaatgaggctgggacatgatacggagatccagctaagggcagaagcgaggacatggcagatcctgcttgctggcaggcggggaagtgggaacgtcataggaacatctgtccttctatggcccagggggtaaagtgagacctcatgagrtgagggcaggccgagatgtacagaaatgaccaaacggggcagctctgaataggggcaggttatgtacgagccttcgctgcttcccttctgtgctggttacctgtcacctgaactctatctgagagctgggtgctctgccgctgcaagtagctggcaagtgcctgagaatgaaacaggccaggtcgggtggggaggatactaaatgcaataacctgtgtagaagggaaacttagccataggcacatcccttcatgatcaac

SEQ ID NO: 510209 - DNA, 668 bp, Homo sapiens
aaagtgcaggattcacttgccattttcatttttctcagtgggagccacaggctagagctgcttctaatcagccatcttggcccccacaattatgcatttgataagctttctttcctgtaactgtcccaattgccttccaagaaacttacttggctgcctccaggcaaaaaaaaaaaaaaaaaaaaaaaaaaaaatctctattcarataacacctctaaaatatttgaaaattaaaaataaataactttcctatgtgcaacttggcaaggctgcaacaattagccaaatcaccggtttgtccactctaagaccgtccatagactatgcgtaagttaatctcaatgacactctgtatgcctttggactatgtaatatcagcatttttttctggcaaatgaatccaaagcccccattttattaataagtataaaaaagggaccccactgagtaagctgtttaaaaatactgtgatggtataaaaagggtaatgggtttcttaatgcttcaagtggactcacaaaactccagtgcttacattttcagaaatgcctccatgatgtgggaggaaaaggcagataaagcagtccatgttgcttcactgatggtggtagcttctaatagcacagattcattcattctgaaaattgagcttagtaagcacccactgg

SEQ ID NO: 510210 - DNA, 668 bp, Homo sapiens
aaagtgcaggattcacttgccattttcatttttctcagtgggagccacaggctagagctgcttctaatcagccatcttggcccccacaattatgcatttgataagctttctttcctgtaactgtcccaattgccttccaagaaacttacttggctgcctccaggcaaaaaaaaaaaaaaaaaaaaaaaaaaaaatctctattcaaataacacctctaaaatatttgaraattaaaaataaataactttcctatgtgcaacttggcaaggctgcaacaattagccaaatcaccggtttgtccactctaagaccgtccatagactatgcgtaagttaatctcaatgacactctgtatgcctttggactatgtaatatcagcatttttttctggcaaatgaatccaaagcccccattttattaataagtataaaaaagggaccccactgagtaagctgtttaaaaatactgtgatggtataaaaagggtaatgggtttcttaatgcttcaagtggactcacaaaactccagtgcttacattttcagaaatgcctccatgatgtgggaggaaaaggcagataaagcagtccatgttgcttcactgatggtggtagcttctaatagcacagattcattcattctgaaaattgagcttagtaagcacccactgg

SEQ ID NO: 510211 - DNA, 550 bp, Homo sapiens
gagtgcttcaatgggctacattgcactattgtttgcaaaagggattataaacatttccaatgcattagcgctttgagggtgtattggtcactgatatcagtcataggcactaggacatgggagggatggaggggagcatgaygattcctcaagttgtgtttgatcattagttgacattgaacatttcaagtgtttgtttttgttttgtgtaaactgtgtgagtctgttttgctcatttatctcttgatgccttgattttttagtgagtttgataattttatatattatacgtatactttgttgtatttcatgtgaatattttcttcagcctctttgcctattattttgtcgcacacacttatttactttgatggactcaaatgtgttaaactttttgatatgtcgcaggtctgagaattatgtctccagtgttctgacattcagttctttcttcaattttattttcccccactacaaatacatggatatataacgatttcttagtagtcaaaatgattcttcagcaccagggaagtttttagccgtgagc

SEQ ID NO: 510212 - DNA, 622 bp, Homo sapiens
caaccaagaatgcacctaaacattaccagattgttatgctcttaaatgtctctttttctctactatagagagtgcttcaatgggctacattgcactattgtttgcaaaagggattataaacatttccaatgcattagcgctttgagggtgtattggtcactgatatcagtcataggcactaggacatgggagggatggaggggagcatgatgattcctcaagttgtgtttgatcattagttgacattgaacatttcaagtgtttgtttttgttttgtgtaaactgtgtgagtctgttttgctcatttatctcttgatgccttgattttttagtgagtttgataattttatatattatacgtatactttgttgtatttcatgtgaatattttcttcagcctctttgcctattattttgtcgcacacacttatttactttgatggactcaaatgtgttaaactttttgatatgtcgcaggtctgagaattatgtctycagtgttctgacattcagttctttcttcaattttattttcccccactacaaatacatggatatataacgatttcttagtagtcaaaatgattcttcagcaccagggaagtttttagccgtgagccat

SEQ ID NO: 510213 - DNA, 360 bp, Homo sapiens
cctcacacagaaagaaaaaaatttatagatatatatatgattttatatactttaatgttatttatatgtttatattatataaattataagtgtataatatagatcatattstataaattatacatgaagcagttttagggaaccttattaatatatcccaaataaaaactgcacatgtatttcagaagtcacttagcattttcttccaagcagatcgttttgtgtttaacttttacagaaattctggaatatctcttgattcaatgacaaaagttacaaaaagtgttctttctaattgctaggatgtatttgcattttgccatcattggaaatatgcccttacccagaattcattccaaa

SEQ ID NO: 510214 - DNA, 360 bp, Homo sapiens
cctcacacagaaagaaaaaaatttatagatatatatatgattttatatactttaatgttatttatatgtttatattatataaattataagtgtataatatagatcatattctataaattatacatgaagcagttttagggaaccttattaatatatcccaaataaaaactgcacatgtatttcagaagtcacttagcatyttcttccaagcagatcgttttgtgtttaacttttacagaaattctggaatatctcttgattcaatgacaaaagttacaaaaagtgttctttctaattgctaggatgtatttgcattttgccatcattggaaatatgcccttacccagaattcattccaaa

SEQ ID NO: 510215 - DNA, 149 bp, Homo sapiens
tgtaggctcattcatttctctaacagcagtartattaataattttcatgatttgagaggccttcgcttcgaagcgaaaagtcctaatagtagaagagccctccataaacctggagtgactatatggatgccccccaccctaccacacat

SEQ ID NO: 510216 - DNA, 149 bp, Homo sapiens
tgtaggctcattcatttctctaacagcagtagtattaataattttcatgatttgagargccttcgcttcgaagcgaaaagtcctaatagtagaagagccctccataaacctggagtgactatatggatgccccccaccctaccacacat

SEQ ID NO: 510217 - DNA, 149 bp, Homo sapiens
tgtaggctcattcatttctctaacagcagtagtattaataattttcatgatttgagaggccttcgcttcgaagcgaaaagtcctaatagtagaagarccctccataaacctggagtgactatatggatgccccccaccctaccacacat

SEQ ID NO: 510218 - DNA, 397 bp, Homo sapiens
aatcttttcctcatggttgtttatagtttgcttccagcacacccagatctgacactttctggccttaaagttgcataaaacaccctgtcagttgtaggsagtaagacagggtcttgggccgactggggacaaatatcagaatcttcctggggccagtagcaccagaatggggcctggcagacagagagccaaggttcttctgggagaaaccagcaatgctctggtggaacgaggtctgttctccacgtctgacacggtcctcagccagtttctaccaatcagattggagcctttgccggctcagcctggcagatgggcatgtgcacgttttgggcatgtgcaagttttgggcctgtgcccaggctgtaaggtactgctgacaggctgcgggctgtgg

SEQ ID NO: 510219 - DNA, 397 bp, Homo sapiens
aatcttttcctcatggttgtttatagtttgcttccagcacacccagatctgacactttctggccttaaagttgcataaaacaccctgtcagttgtaggcagtaagacagggtcttgggccgactggggacaaatatcagartcttcctggggccagtagcaccagaatggggcctggcagacagagagccaaggttcttctgggagaaaccagcaatgctctggtggaacgaggtctgttctccacgtctgacacggtcctcagccagtttctaccaatcagattggagcctttgccggctcagcctggcagatgggcatgtgcacgttttgggcatgtgcaagttttgggcctgtgcccaggctgtaaggtactgctgacaggctgcgggctgtgg

SEQ ID NO: 510220 - DNA, 397 bp, Homo sapiens
aatcttttcctcatggttgtttatagtttgcttccagcacacccagatctgacactttctggccttaaagttgcataaaacaccctgtcagttgtaggcagtaagacagggtcttgggccgactggggacaaatatcagaatcttcctggggccagtagcaccagaatggggcctggcagacagagagccaaggttcttctgggagaaaccagcaatgctctggtggaacgaggtctgttctccacgtctgacayggtcctcagccagtttctaccaatcagattggagcctttgccggctcagcctggcagatgggcatgtgcacgttttgggcatgtgcaagttttgggcctgtgcccaggctgtaaggtactgctgacaggctgcgggctgtgg

SEQ ID NO: 510221 - DNA, 606 bp, Homo sapiens
attccagggtgtgctgagcccgccttgagactgacccaggttgtttgagttgttggtttgcattctgtgtttgcagatcggctgctgcgcccatagcattcttcccttcctggagctttaaaaaaaaactttcttattaaaatgttcacacctataaaaatagagagaatagtatgacccactcccatgtccccatcatctagatttttaacatttttgcttcatctttttcttgcggaaatattctaaagccaatcccagacatcctaacattcccctccaggcatcctaacattcccctcccaaatatttctgactgcatctccaaaaaaataaagacattttcttgcataaccacaaaaccatgatcacaacaaatccagcaattattcctaagtatcctctaatactcaaaccgtattcagatttycccagttgctcaaaaaggtctttgcagttgaatgaggagatgaacaaggcctatattcacattgcctttgattgctagctacctttccctacaaaatttgcttttgtaggcgtagggggatctgcagtgagctggggctagctagttgcaacaagtgacccagagctgttgaaatg

SEQ ID NO: 510222 - DNA, 477 bp, Homo sapiens
cctattctctgagaatctgggcactccttgcctgtgaattgggaagtggtttttgggacgctgccacctttgctgagcaatcygatggcaattattaagctcagcattttcctggtgggtttagggaaattgcctgggaaactattacatgtgaattttacatgtttgggttctttttatttaaccagttgcaattatccttccttaattttaacttgaattttacagacaattattgtggtatatgtggatttcctttcctatacttttaaaatttctccgtaaacaggagaaactttgtcagagagaaagtaattttgtcttaaaactgtattcctgcttgtaaacatggttgagaacaggggtagatgttggaaaaagagggaactgacaagaatgagagtcaagtaataccaagccagaaaatcagaaaagtcctgaacatttggataaggatcagactcaacaaaatacctg

SEQ ID NO: 510223 - DNA, 600 bp, Homo sapiens
tttgtctgatgtgagagtagagaggtgagccttttctgagacactagatggcacagcagctccgagccagcagcctccgagaggctgggctggtttctgttactgctgccacgaacactgagcccccsctagggtgggagggggctccattttgatgcactttggtgggcacaggttgaccagactgacttttgctccacctggcctcctccctgggactcacctcaactttcaatcctaatgacatgttgaggcccctgagggacagtgtcctagctcacagcaaatctctcatgagtgcttttgttgctttgctagctgtgtatatactcattttttaaagtaagtctcttcacacctggcagtcctgacttctctcacatcattaaaacattggctgtaaacaggaccaaaaagttctttgctgcctgggtggattgccaaatgatagttgcttgctgtgtgattgttgtgaccacctcagaccacagggttggggttttgttcttgtcatgcttctctttttttctttgcagcttgaatgttgcttaggattcagaaactaaactgtttttaggctttgttccctttagtcccgaa

SEQ ID NO: 510224 - DNA, 532 bp, Homo sapiens
cagcctccgagaggctgggctggtttctgttactgctgccacgaacactgagccccccctagggtgggagggggctccattttgatgcactttggtgggcacaggttgaccagactgacttttgctccacctggcctcctccctgggactcacctcaactttcaatcctaatgacatgttgaggcccctgagggacagtgtcctagctcacagcaaatctctcatgagtgcttttgttgctttgctagctgtgtatatactcattttttaaagtaagtctcttcacacctggcagtcctgacttctctcacatcattaaaacattggctgtaaacaggaccaaaaagttctttgctgcctgggtggattgccaaatgatagttgcttgctgtgtgattgttgtgaccacctcagaccacagggttggggttttgttcttgtcrtgcttctctttttttctttgcagcttgaatgttgcttaggattcagaaactaaactgtttttaggctttgttccctttagtcccgaaca

SEQ ID NO: 510225 - DNA, 600 bp, Homo sapiens
tttgtctgatgtgagagtagagaggtgagccttttctgagacactagatggcacagcagctccgagccagcagcctccgagaggctgggctggtttctgttactgctgccacgaacactgagccccccctagggtgggagggggctccattttgatgcactttggtgggcacaggttgaccagactgacttttgctccacctggcctcctccctgggactcacctcaactttcaatcctaatgacatgttgaggcccctgagggacagtgtcctagctcacagcaaatctctcatgagtgcttttgttgctttgctagctgtgtatatactcattttttaaagtaagtctcttcacacctggcagtcctgacttctctcacatcattaaaacattggctgtaaacaggaccaaaaagttctttgctgcctgggtggattgccaaatgatagttgcttgctgtgtgattgttgtgaccacctcagaccacagggttggggttttgttcttgtcatgcttctctttttttctttgcagcttgaatgttgyttaggattcagaaactaaactgtttttaggctttgttccctttagtcccgaa

SEQ ID NO: 510226 - DNA, 595 bp, Homo sapiens
cctgggccaggatgcacgcgacactgagcaacaccttgtgggcgttgtgcaggcggtcaaacgtgccaccgacagcgccacggtagtagccacgcaccggctgctttggagacccggccacgggggaagctggcctgatcgtggagggtaaggggacatccaggggctccacgggcacttctcctatcccataatcggagtatagcagcaccgaggccagtcgcggacaacagctgtaacagctggtggcgtaacgcactagctgctgtttgaccgggttgtactggcttccatccagggtctggaaatctgtcaacacgacttctggcgggtgggcgagattctggactgaggtgggcaggggagggagaaaggtgctcttggttcggatattggtcagtaggattctgacgtccaagtgcctgtggacgtcggcgccagcatagaggtgcgtgatgaaatcaagaacctcaaacgtggcctgcacggggctgkactggggctgagccgggccctccaggctcatgcccggctgcaggtgaacatagagtgtgtgattcaccagccgggccgccgaggtcaggatggaggccag

SEQ ID NO: 510227 - DNA, 552 bp, Homo sapiens
tgcttaaagacgtgccattcattgccagaactcgrttctcattggagcggaggaagttcgtgggtggagctggttgtttggcgcctgcgtcttgcggcgagcgggctggcgtgcggcgccgttgcgggcgggagcggctgcaacgccggtgcctgaggagcgatgccgagggaaatcatcaccctacagttgggccagtgcggcaatcagagtgagcgaaactccggcccctcagctagccaggttccttagggtcaatgggatctcgctgtgggatcctggactccatctgtccttgccagaatcgtagttctctgaaaggcgagacatccctgacccagtgtccacttgcccaaccccgaggggccctcccctgcccagtccctggcgtacagtcctttcctcagacacgggagagtcctgcggcttgacttcttatccctggacgcaggcgcccagtcccccggctcctgattggaacctgcccggacctagatatcttctttctcccctgcccgccccttccccccagttgggttcgagttctggaaa

SEQ ID NO: 510228 - DNA, 612 bp, Homo sapiens
tgcatgtcctcaggttaaacttcacatcttgactggcaggcttgcctcgcgggtgcacttcgtgaatgcccgctgctcctgcagcggaagagtctcctgtccttgggcctcagtggcaggggcagcaacaggaggctgcggccagttggcttcacactgtttgggaacagcagaagggtcagagcagacctcaacattatctgaaacgagtactattcacaacagcaatttgcaggttatgtgacaagaatcatatcatttggtgtgtgtgtatgtgtttatttatgagacagggtctcactctgttgcccagggtggagtacagtgccrcaatcgtagctcaccataacctcaaactcctgggctcaagcaatcctcccacctcagcctcccaggtagctaggactacaggcgcacaccaccacacctggctaattctttattatttttgtagagacaggcagggtcttgctgtgttgcccaggctggtcttgaatgcctcaagtgatcctcccactatggcctcccgagttgctggggttacagtcatgagccaccgcacatggccctagtttatatttattaattggtttaatcctcccaggaatttga

SEQ ID NO: 510229 - DNA, 303 bp, Homo sapiens
ttttcaagggaggaccctgaggcccaggagagaaagtcatttactccacgtgacaggaagctggtggctgagccaggagagtcctgcatccaccatgctccagccaaggcaagcctcctgctccttccactgctcctgcacctcctctacagctatggactcccttctcctgcctgcagcccaggagatggacggaggatgggatggctgggcagcctcctagagcagcgcccygcaagggacacaaaacactcctgtcacttgggcttgaggaaaagctggacagaggccagaaggaagatg

SEQ ID NO: 510230 - DNA, 303 bp, Homo sapiens
ttttcaagggaggaccctgaggcccaggagagaaagtcatttactccacgtgacaggaagctggtggctgagccaggagagtcctgcatccaccatgctccagccaaggcaagcctcctgctccttccactgctcctgcacctcctctacagctatggactcccttctcctgcctgcagcccaggagatggacggaggatgggatggctgggcagcctcctagagcagcgccctkcaagggacacaaaacactcctgtcacttgggcttgaggaaaagctggacagaggccagaaggaagatg

SEQ ID NO: 510231 - DNA, 524 bp, Homo sapiens
tcagagctgacatagaccaaaggctttttatagatgaggaaatgaaaatgatgattttgagcatgaaaataacatgatctaatttaagttgaaagtagattgcaggggacagagcagacagagagagcccaggtagaaaaccttgctagtctgagagaggtgaaggtgcttcagactggtgtggcrgtagtgagggtgagaatcggtcagatcctgggtatatttgcaggtggagttggcgtggcttgccaatggattggatatagagagtgaaagaaaagagaagggttaagaaggaggtcattgttttggcctgatcatgttggtgaatgagcttgccccttactgatatgggctgtgctggtggagaaatgggtgagaagagttaaaataagaattctattttggacaggaaaagtttgagatgctgatgtgacatccaaggagtagtgaggagtagaacattggatgggtgggcgaggaagctcaggaagggattgaggcaggacaaatgtggttaggac

SEQ ID NO: 510232 - DNA, 524 bp, Homo sapiens
tcagagctgacatagaccaaaggctttttatagatgaggaaatgaaaatgatgattttgagcatgaaaataacatgatctaatttaagttgaaagtagattgcaggggacagagcagacagagagagcccaggtagaaaaccttgctagtctgagagaggtgaaggtgcttcagactggtgtggcggtagtgagggtgagaatcggtcagatcctgggtatatttgcaggtggagttggcgtggcttgccaatggattggatatagagagtgaaagaaaagagaagggttaagaaggaggtcattgttttggcctgatcatgttggtgaatgagcttgccccttactgatatgggctgtgctggtggagaaatgggtgagaagagttaaaataagaattctattttggacaggaaaagtttgagatgctgatgtgacatccaaggagtagygaggagtagaacattggatgggtgggcgaggaagctcaggaagggattgaggcaggacaaatgtggttaggac

SEQ ID NO: 510233 - DNA, 475 bp, Homo sapiens
ctgaccctaaggggccctaggcctccctctatcctactgcccaaccattcttccgtgatcttgcaaacagcattccatcgggtataagtgcttcagccatcttggtttcatctttccctccaccctctgctgaactattaaagcattttattccacaaacaaatctgatcttacaaccgctctgacctgaagcttgctgtgaggcagaagaatgggaggaatgcactgggatcagtgttactgcgggtgcattggaagagaagggccagggcttggctgtagcatcagatactggaggcagacccaaattcgtaaagacccaaggcagcaaggccatgtctcaggctctctttctcccaggaacaacaggatcatgatcgaagttcgggaaggcgcttcacagagtttttcccctctgtcaaggagtttaagctgcyggtttgaatttctgccctatgaagaatttccggattat

SEQ ID NO: 510234 - DNA, 627 bp, Homo sapiens
tgctgttcactttacaaacaccttcacacatatggtcgcacttgtttctctaaatagcttttgaagtaggcaaggcgggccatttcacagaggagagaaccaaggcatctttctaattgagattaagggatttgctcaataccacaccacttattaagtggcagagggggcacttgaacctgcttcctctgttagtcctgtcttctttccataggcatgaatattattatttaaatttgcagagacccccatccaggagcccagaacctcccaagatgaaggtttgctcctgaacttggcaaataacattgacaattctgccaggaaggaatcttgcatttgtcagaacacttcccagaagggctgcctctgtgtgctgaagagaaaacagatgtcagggactagttctcagcctgcaacattcagtccactttattttcttccacaggcagattgagacagagggattcctccctgcctgacarggccagtattatgcacatggaatataaatagctgtctctaccatatgattctaggactggtgtcagtaaactttctataaaggtccagatagtaaatgttttagggtttttaggccacatgcaatttctgttacaactactt

SEQ ID NO: 510235 - DNA, 285 bp, Homo sapiens
tgattcagaaggcgttccagggcgttgcaggscctcagggacatcattaggaaaataggttactgtagaaactgaaggaacagcatcctgataatatgaggtttcacagtgattgggtcctggataaagaagttattttcggtaatgaaggattagtagctcctgccagatatgaaaatggcaaaaccaagaacagcacttggacgccccctgctccagtgcttagctccaggggaggctaacgactgctcccctccactcccgccaccgaagcacctaaagcaa

SEQ ID NO: 510236 - DNA, 334 bp, Homo sapiens
ttttttttttttttggagagcaaatgggtcctcagttaacttgactgcctgacagttgaccaaaaatctgctcaaggctcaagttttagcctgtaagactttgtactcaacctcaaacagctgtctgagcactcaraaggctctttttattttttctataccctactttgtttctttttggggtgagggaacgcttctttcagatcacgatcatagggagattattggattccttgttgggagatagtaagaaccctagttctgctactgacttgatatgtggctttaagcaagacttgacttcactctggctagagttccttggctgggaaat

SEQ ID NO: 510237 - DNA, 334 bp, Homo sapiens
ttttttttttttttggagagcaaatgggtcctcagttaacttgactgcctgacagttgaccaaaaatctgctcaaggctcaagttttagcctgtaagactttgtactcaacctcaaacagctgtctgagcactcagaaggctctttttattttttctataccytactttgtttctttttggggtgagggaacgcttctttcagatcacgatcatagggagattattggattccttgttgggagatagtaagaaccctagttctgctactgacttgatatgtggctttaagcaagacttgacttcactctggctagagttccttggctgggaaat

SEQ ID NO: 510238 - DNA, 637 bp, Homo sapiens
tctattcctttgggtatacacccagtagtggggttgctcggttgaatggaagaaatttcaaagaaaaaagggagagtaacttattttggggaggtggtgatgaaagagaagccttctctgaaagagggagacataagccaagatagaaaggtaaagaggggcagcaggatgtgcaaaggcccaaggcggcaaatgacttggtgaatccatggaaacagaagaagtccagtgagagcggagtcttgttagtgaggcacagagggtgtcaggtgaggctggaggcggtggcccaggtctggcccggcaataggctgttgtaagggctgaccttctgcctgtgaataaggggggtcatggaaggtttcaagcgtgagaattacacgatctcctgtggtcctggggcgtgtggggaatggcttggaaggtagccaggtggcacacggagaggccttttcagccatgaaaccgtatggtaggaggactactccagcctcctcaagaaaaacattcaggtgatgaggttcattttgaacgcattgagagggcacaagmggaagaatattatatctcagccctggatttaataaataaagggcttgttatgactgttagccttctggctcagcagaaactggaa

SEQ ID NO: 510239 - DNA, 489 bp, Homo sapiens
tcctggggcgtgtggggaatggcttggaaggtagccaggtggcacacggagaggccttttcagccatgaaaccgtatggtaggaggactactccagcctcctcaagaaaaacattcaggtgatgaggttcattttgaacgcattgagagggcacaagcggaagaatattatatctcagccctggatttaataaataaagggcttgttatgactgttagccttctggctcagcagaaactggaaaaccagctgaaaaatcctggttcaggtctacaagaaaccaatccagaggtcacttcaccaactgggtaaccgcttcggatttccttttttgggttatgccctggaaaccaacacccatggggcggagcttgggttaccctcatgacccaccaggaccacagttggaatcctatggtcayctgacttgcacttctgcctgtaacaaatgttctttcagtttaaagaatacctggcttcttgtttagg

SEQ ID NO: 510240 - DNA, 622 bp, Homo sapiens
acagaaatatgggaattctaatagcatgggcaattatcttgcccatctttgccccatcttatcttgctagtgtataatgattgatgtagaaaagagcataggtaaataggaaacatgacctataacttgtaattacacttgtgttggtttgcactgaatttgtatwtagaattaatgcctagcttttaacagtttgaattgagtttttgtgcaaaagaattattttatttcagagagtcttttatgtttatatggcttaatttgtatcactattcagaaggttcgtgtgtttttcataagttcccagaataaagtgaaacttgcatgttatttttttaaattgaggatgaagcaaaatatagccaaggaaggaatacatctgcatatttaatggccaaataaataaatataatacaaccactaagattttcaggagtttacagttactgcaatgataaaatttggtttgtttttctttcaggttattcttttctactttttcctctgatagagcagttgaagcagttaaaaggatttcttaaaaaatctgacaacactgcaaatttatgctgaatacatacagtatctaatttaaagtaaaaggaactaaactttttcccct

SEQ ID NO: 510241 - DNA, 622 bp, Homo sapiens
acagaaatatgggaattctaatagcatgggcaattatcttgcccatctttgccccatcttatcttgctagtgtataatgattgatgtagaaaagagcataggtaaataggaaacatgacctataacttgtaattacacttgtgttggtttgcactgaatttgtatatagaattaatgcctagcttttaacagtttgaattgagtttttgtgcaaaagaattattttatttcagagagtcttttatgtttatatggcttaatttgtatcactattcagaaggttygtgtgtttttcataagttcccagaataaagtgaaacttgcatgttatttttttaaattgaggatgaagcaaaatatagccaaggaaggaatacatctgcatatttaatggccaaataaataaatataatacaaccactaagattttcaggagtttacagttactgcaatgataaaatttggtttgtttttctttcaggttattcttttctactttttcctctgatagagcagttgaagcagttaaaaggatttcttaaaaaatctgacaacactgcaaatttatgctgaatacatacagtatctaatttaaagtaaaaggaactaaactttttcccct

SEQ ID NO: 510242 - DNA, 651 bp, Homo sapiens
  misc_feature (1)...(651): n = A,T,C or G
gttgttctcagattattgtttcagttatatagaggattactagactagttatgaagaaaccccactacattcaatggaattggtgcttaaaatctcatcgatgtgctgtctctggagtgataagaaagggctacatctcccgaaatgatttctttacgtcatgtattggtttccttcttcaccttgaacttttgttgaactgtatgtactttaccccaaacctgttaatattttgagcgcttctatgtgaaagcaaagaaataattttaatactctggcattcataaattttattgatgagattatttattttaaaggtttgaggtaacatctctggttgtaccaaagaagaaataaatatggtttcttaatctcttgcatgttttcttataaataatcatgttcaatgaaaagaagttactgagcttatttagatacattaaacattacttaactactggttctataggtgtatgtttataatattagtgttttttctacataaagtaatttaaaaagctgttccacagagggtgttaccctgtgacagatgcgtrtgtgtgtgtgtgtgtgtgtgtgtgtgtgtgtgttntagtgtgtatggagagagcttcatggaccttttcgaaatgttaattccctagaaagatg

SEQ ID NO: 510243 - DNA, 601 bp, Homo sapiens
  misc_feature (1)...(601): n = A,T,C or G
tgtgtgtgtgtgttntagtgtgtatggagagagcttcatggaccttttcgaaatgttaattccctagaaagatgtgcagctgcatgcgcatctatatttttgtatagtatttcagagatttcgtggacttttttaagtctagccttgctttatttctaggttaagaaccactgccttcattccaatggcttgttagctccctcctactcagaactttattgtaaacatgatttatgtttcaccatttcttgtaaattttataaatgcagctcagctaaagcactgtattcttaacaagtatttcctgaccacttaagcactttattattatctgtgtaatcrtattggcttgctgtttcattaacatctacttaactatccaacagacttaatatattcattttatatcacagagcctgtgagtaacctgtgctggggcataacacaatagctcaacatagtatctttagttagtttatggaactaaattctctcaagtcaaaggagagtgagccctaatataattttttatatatatttttctcgtgtgtacttttatacattttaaattctagtcctagttgtttggttaaatcaatca

SEQ ID NO: 510244 - DNA, 601 bp, Homo sapiens
  misc_feature (1)...(601): n = A,T,C or G
tgtgtgtgtgtgttntagtgtgtatggagagagcttcatggaccttttcgaaatgttaattccctagaaagatgtgcagctgcatgcgcatctatatttttgtatagtatttcagagatttcgtggacttttttaagtctagccttgctttatttctaggttaagaaccactgccttcattccaatggcttgttagctccctcctactcagaactttattgtaaacatgatttatgtttcaccatttcttgtaaattttataaatgcagctcagctaaagcactgtattcttaacaagtatttcctgaccacttaagcactttattattatctgtgtaatcgtattggcttgctgtttcattaacatctacttaactatccaacagacttaatatattcattttatatcacagagcctgtgagtaacctgtgctggggcataamacaatagctcaacatagtatctttagttagtttatggaactaaattctctcaagtcaaaggagagtgagccctaatataattttttatatatatttttctcgtgtgtacttttatacattttaaattctagtcctagttgtttggttaaatcaatca

SEQ ID NO: 510245 - DNA, 601 bp, Homo sapiens
  misc_feature (1)...(601): n = A,T,C or G
tgtgtgtgtgtgttntagtgtgtatggagagagcttcatggaccttttcgaaatgttaattccctagaaagatgtgcagctgcatgcgcatctatatttttgtatagtatttcagagatttcgtggacttttttaagtctagccttgctttatttctaggttaagaaccactgccttcattccaatggcttgttagctccctcctactcagaactttattgtaaacatgatttatgtttcaccatttcttgtaaattttataaatgcagctcagctaaagcactgtattcttaacaagtatttcctgaccacttaagcactttattattatctgtgtaatcgtattggcttgctgtttcattaacatctacttaactatccaacagacttaatatattcattttatatcacagagcctgtgagtaacctgtgctggggcataacacaatagctcaacatagtatctttagttagtttatggaactaaattctstcaagtcaaaggagagtgagccctaatataattttttatatatatttttctcgtgtgtacttttatacattttaaattctagtcctagttgtttggttaaatcaatca

SEQ ID NO: 510246 - DNA, 520 bp, Homo sapiens
tgaaacaacatggcaagtcatatcgatttcagaagatggctctgtgattaatttcagaagatagtttgtaaacctggggtagaaacgtctacgccgctgatatgtctatatatcccttgcagggcagcgacggaccccctgggaaacccggaccacctggaccacctgtgagttgttctaggcttaaaatttaaaattcatgtgtttacttaagacttttataactcagaggtaagactacatttagatgttttcaaagataaaaktcttctgaatttcgtgtataaatataaatgatagccaatgtagctttaaagagacctgatttgttctccctttggttcagcctcaatgtgcaatgctcagattggcatactgcgggtctccccatcttggatttaggaatctgggtttgtgctccgactctccacttcctggctcggggcccctgggaaagtcatttaaccttaatgtgcttcattcacagaaaggagaagggccagaaaaatagatcctttcc

SEQ ID NO: 510247 - DNA, 520 bp, Homo sapiens
tgaaacaacatggcaagtcatatcgatttcagaagatggctctgtgattaatttcagaagatagtttgtaaacctggggtagaaacgtctacgccgctgatatgtctatatatcccttgcagggcagcgacggaccccctgggaaacccggaccacctggaccacctgtgagttgttctaggcttaaaatttaaaattcatgtgtttacttaagacttttataactcagaggtaagactacatttagatgttttcaaagataaaagtcttctgaatttcgtgtataaatataaatgatagccaatgtagctttaaagagacctgatttgttctccytttggttcagcctcaatgtgcaatgctcagattggcatactgcgggtctccccatcttggatttaggaatctgggtttgtgctccgactctccacttcctggctcggggcccctgggaaagtcatttaaccttaatgtgcttcattcacagaaaggagaagggccagaaaaatagatcctttcc

SEQ ID NO: 510248 - DNA, 656 bp, Homo sapiens
tatatattaaaagccaaattgttatcccctgaaagcattgtttcaactagttaggatcatattctgtaattcagtttcctttgttttactattcattcaccctgtctaccctatctttacctgaaaccaactatacgcttcattctaattttaattttcttacatcttgttgataaaaatttcctcctggtctttccctctcatactcatacacacaaaacagcttctctgaatcatttaaaagcacctaggcttctcactgactttttgggaacattctttgaagttcttgcatwaataactgcagattaagataagaactttttaagtattataataaaggataaattataatttactggcattgaaaaggggctggcaacaaaaatgtagacctatttgagtagaatttgaagagattagtcttcaaatttcttagctacaacaaaggatgaagaataaaaactgattgaagtgtgttccttgcttttagagatgtgaattgagtgagtgaagcacagaaacagaaaaatgcaatcatgaaatgaaatacacatttagtgtacacattcagcctcatcctggatgaaactttgaagttactcttttgggttctctgtcagcaccaccctgcaactctcatcatctcccaccag

SEQ ID NO: 510249 - DNA, 580 bp, Homo sapiens
cctagagtgtggccctcataagaatggatcaaaataactgttggagctctaaccacaaattccacattccaggctgttggtgggaagggaggagggagaagaagaatgcatggcaatttgtctcattttgattagaatatttaggccatttacatttaatgtagttactgatatatttgggctcaaacttaccccctgagcttccacagcatcagatctgcccccctgcatacccccgatctcttgccaagtggcatttgggtcyttatgtcattttcctcacatgtctgggagtaaagacgaggttcagggacttgagcttgtgtactctggtgtcttccaggagaatgtgtcaagtacaggggagatggcttggaaagaggaagactcagaggagagtcaaggacatcaaaacaggcaagcccaggagcaggaaaagagatgagagtcagcagaggaaacagtgctggggcaggggagcaggtggaagggtcagggaataaggggggctggagaggtgggggtggggatgctggcgagggagtgcctggctcaccagactctggagtcaatgacaaaa

SEQ ID NO: 510250 - DNA, 611 bp, Homo sapiens
ttccactcgccacactgtagccaaattaaaatctgagtctggcgtttccctttgggaaggtgctcagtagctaygtacatgtgttccaaactcttggtggcattcaaggtctttcttggccttttcagcctcccctctaaccacaacacatactgtcccttccagccttggggaattccttgcagcctcagaataggaggcctcctccatctgcagtgccctttgcccccctctctacatcctctcctagtctactcaccagcctggattgcaattgctcatttgcttacctgaccccccctctctatgccagaacctggcagcttcatacaagtcccttaataactatatgttcaatgaatgaatgaatgaatgaatgaatgaatgaatgaatgagagtcttgttcatctgagttcccaaggcccagcatggtgcttggcacatgataggttcaaataaatgagagatgaatgaacagcttttgcaccccaccctcaagcccacctcccttcctttgtctcccctcctttctgtcattctcctttatcactgagggtccttttttggttatactctgattctgctacccaggggcacttctgtggaaagc

SEQ ID NO: 510251 - DNA, 611 bp, Homo sapiens
ttccactcgccacactgtagccaaattaaaatctgagtctggcgtttccctttgggaaggtgctcagtagctacgtacatgtgktccaaactcttggtggcattcaaggtctttcttggccttttcagcctcccctctaaccacaacacatactgtcccttccagccttggggaattccttgcagcctcagaataggaggcctcctccatctgcagtgccctttgcccccctctctacatcctctcctagtctactcaccagcctggattgcaattgctcatttgcttacctgaccccccctctctatgccagaacctggcagcttcatacaagtcccttaataactatatgttcaatgaatgaatgaatgaatgaatgaatgaatgaatgaatgagagtcttgttcatctgagttcccaaggcccagcatggtgcttggcacatgataggttcaaataaatgagagatgaatgaacagcttttgcaccccaccctcaagcccacctcccttcctttgtctcccctcctttctgtcattctcctttatcactgagggtccttttttggttatactctgattctgctacccaggggcacttctgtggaaagc

SEQ ID NO: 510252 - DNA, 608 bp, Homo sapiens
tgtgaaattgtaggtagaatgcagagcgcaaaaggaacctataaaaacttaggccaaggatagcctcctgagacagggacgttcaagttcagaagtaaccaggcaggagagaatgggagaagttctgggcaaagggaacagcatgtgcaaagactgtgtggccagagagggcatgatgagtttgaagagctgaaagaagacctgcgtggctggagctaagaagaggcttcctaggtggtgagcaggggaggaggtgaggggtggatccaaccatgtcaggctttgagggcccaagagtggtaagaagccaggttttagagacaaaaacaggtccctagggagacagaaaatgctttctattccttctggacaccaagaaacraagcacaagttaaatcctcagtagctactcacttctctagtgctggatgggactttctgctccactgcaaagagctcaatctggccctgccctgtgcagcacaagggggcaaagctccttaggctaaatcacaggtgctttggtttttaaaacttgactgaaggacttgggtgactgatgggtgagcaagaagaaagttgtttggattcatgggtgcacatttagg

SEQ ID NO: 510253 - DNA, 610 bp, Homo sapiens
gttggattagcaacagtgaggtcaatggtgaatctaacaaaagccatctatgggaagagragagagatgaactgcagtatgtttaagacagagtgcaaagacaggaatgatctctttccaaaagttatgctgatatagggatactgaggataaagaatcaagaaaggtttatttcaagatcagtaaaaaaaataaataggcggtggctcacgtctgtaatcccagcactttgggaagctgaggcggacagattacctgaggtaaggagttcgagacgaacctggccaacatggtgaaaccctgtctctacaaaaaatacaaaaattagtcaggcatggtggcacacgcctgtaatcccagctacttgggaggctgaggcaggagaactgcttgagcccgggagacagaggttgcagtgagccgagattgtgccactgcactccagcgtggccaacagagcgagactctgtctcaaaaaacaaacaaacaaacaaacaaacaaataataaataaataaatgtatgtatatgtgagaatgtgaacatggttggctaaataattcacagggcccaatgtaaaatgaagatgaggaattcccgttcaaaaatca

SEQ ID NO: 510254 - DNA, 278 bp, Homo sapiens
ctcactgcttccacgatggaaagatggccagtccgctcccaggggcagggccaaccacggtcgcccaggcccaggtcttctacctcccagcctccgggagaacacagcccaggtctgggcctctcctgcattccaccctgtaggggtggccaccagccctcttagaagccaaggcactgtgtgactcccgtgatctcgtgtgacccccagctcttgctgatgctgtcttcatatcctgatsaaagactctgacctctgcaacccttgggcacccctct

SEQ ID NO: 510255 - DNA, 495 bp, Homo sapiens
ctgtgagtttcttggttagattcctgtttagtatakagtcatgaagtttagccatagaagcctttgatgagtgactccttcatttgcatttagaatctgggatgtaagtaaagatgatcattagattttcatgctttttaattagacacactaaaatcagtaaaactagttctctctctaaatttattaatactttaaattttcttaattgtctctaccttcattaatggatatacccttacattctatttgaaggaaagtcattttctctcacccaatgtatatttcttttaccttgttttttgaggttgacaattggtgaattagctttgtcattcaggagtgtgtttaaaggtttaggagactgatatccaaattaacataacttccaagaacaatttaaaatttcacaggaaaggcaattctagtgaaatttccagaaatttaattgcaattaattttgcaactgactgaacacatatattcccaataaat

SEQ ID NO: 510256 - DNA, 595 bp, Homo sapiens
cgagaaataaatttctggtgtttataaaatacccagtctatggcattttgttatagcagcctgaatagactaagacagctacaatttaaaatatatgtaaaaaacatatatttttatgcttaaaagttattgttactctgtgtgcgtgctattctacatttgtgtatgtgtgtgtgaagttgggaaagagtgtggcattaaaataccaaataaatgaataggaggatgtcatacatttgctaaatatatgataagtatttgttaggcaaaacttattcacaggtataaaaagcccrtcagcataataggtaagaaaccttctccctatcctgttttttggaataatatatagtctttggggttaataaaaaagtaaagcattaaactatctagcaaggcagtttctaaggctaactggttggcttgtgttgcacgggaacatggctgatagagccagatttcagaaccttatttgattttctatagatgggactagggataggctcctccattgtatgtgagaatatgcgtcacatgcataactacacaggcctcttattttccatcacttgctttttcttatggctcatcttgg

SEQ ID NO: 510257 - DNA, 595 bp, Homo sapiens
cgagaaataaatttctggtgtttataaaatacccagtctatggcattttgttatagcagcctgaatagactaagacagctacaatttaaaatatatgtaaaaaacatatatttttatgcttaaaagttattgttactctgtgtgcgtgctattctacatttgtgtatgtgtgtgtgaagttgggaaagagtgtggcattaaaataccaaataaatgaataggaggatgtcatacatttgctaaatatatgataagtatttgttaggcaaaacttattcacaggtataaaaagcccgtcagcataataggtaagaaaccttctccctatcctgytttttggaataatatatagtctttggggttaataaaaaagtaaagcattaaactatctagcaaggcagtttctaaggctaactggttggcttgtgttgcacgggaacatggctgatagagccagatttcagaaccttatttgattttctatagatgggactagggataggctcctccattgtatgtgagaatatgcgtcacatgcataactacacaggcctcttattttccatcacttgctttttcttatggctcatcttgg

SEQ ID NO: 510258 - DNA, 610 bp, Homo sapiens
ccattagaaaaaaaattagaaactactaacatcttttaccctggttgataacattttaaaaatatgagaatgatcgcagttttggtttattagctgaaatattagtttaaagcttatagaaaaatcccattcttcaaattttatgcaaatgcttaagtttgatttgtcctttcccattttagtatctagtgaggcagcctgttatgaacataagcaatctagtmtcatgatgcattgcttctttgcagtagggtttaatgcttaaggatatataaaatgagtcacatctttgattttgacctagtttgaagacctatttagttctcattaagctcttctcataggtaaaataatgaattatattactaactcttaaatcacttctctaaagagctatgattttttgcgtgtacatgtatttagagattggaaggcctgatgataacaaacacaaagtcaaaacatcactgtatttctttagtgctggccacttgggaaagttctcattacagagtgatagccacaggccattttccctgttaaactcagatgaaaactaagctactttgatccaatccttttgaaaagataagactggtgttatggttaa

SEQ ID NO: 510259 - DNA, 636 bp, Homo sapiens
ttgaggaggtataggatccccgacacacaaagaaactttctcttaataaaaaacaaaaacaagacaatgacagaaaacaaccagtaactaaccttactaaggtgctacaaaggacaaagcctaagattggaactaatattctagcctctctattaaattaatacccttcagaggacagaatcctgatcctggatctctaagtataaagaatagggagtttggtacatgaatagatgctgggggtgaaactaggtgtattagggttctccagagggacaggactaatagaatagatgtatatatgaaaggaagtttattargggatattaacttacatgatcacaaggaaaagtcccacagcaggccatctgcaagctgaggagcaaaggaagccagatcgagtcccaaaacctcaaaatcaggggagccaacattgcaaccttcagtctgtggccaaaggtccaaaagcccctggcaaaccactggtgtaagttcaagagtccgaaagttgaagaacttggagtctgatgttggagggcagaaagcatccagcacaggagaaggatgaaaacagggagactcagccagtctagtccttacatgttcctgtgcctgctttttatcctagctccactg

SEQ ID NO: 510260 - DNA, 636 bp, Homo sapiens
ttgaggaggtataggatccccgacacacaaagaaactttctcttaataaaaaacaaaaacaagacaatgacagaaaacaaccagtaactaaccttactaaggtgctacaaaggacaaagcctaagattggaactaatattctagcctctctattaaattaatacccttcagaggacagaatcctgatcctggatctctaagtataaagaatagggagtttggtacatgaatagatgctgggggtgaaactaggtgtattagggttctccagagggacaggactaatagaatagatgtatatatgaaaggaagtttattaggggatattaacttacatgatcacaaggaaaagtcccacagcaggccatctgcaagctgaggagcaaaggaagccagatcgagtcccaaaacctcaaaatcaggggagccaacattgcaaccttcagtctgtggccaaaggyccaaaagcccctggcaaaccactggtgtaagttcaagagtccgaaagttgaagaacttggagtctgatgttggagggcagaaagcatccagcacaggagaaggatgaaaacagggagactcagccagtctagtccttacatgttcctgtgcctgctttttatcctagctccactg

SEQ ID NO: 510261 - DNA, 656 bp, Homo sapiens
aattaagtgaatatgtggaatgtggaagttatgtttttacatgttgttgtatattacagcaaacaaggggagaaggctggaatgatgcatgtaatggattagagttgaagatattatatactcatgtttagcttgatatagatacagatggatatataaatatttacatatatttgtatgttcagaagttagtgtgcacacatatatttccttgctctgtcagatgagagggcctaggagcaatgacgctgcagtagcaatgagcatatctagcagaaagatcttgatttctaacaccattctccaataaaaggaaccagagcttcttgaggaaatagctaattccagagctggggcaggaaatatataagatgagcccgaaacttcttataatgacaggaattaaggaagtgttcaacaacaacaaaaaaaaccatgatagtgttatgtcaaagggacgtaaaagccaactgaacyaactcccaatggctaaagctggaaaaatttgagcaatgtaataaaattgtattggaaaatgatttagactatattataaatattcatgagtttatagtgatattcacaaatgattgaattaaaaaatggagcacaaaatataaatctcccattcagaagaataaaaaatgatttatgta

SEQ ID NO: 510262 - DNA, 639 bp, Homo sapiens
ttatcccttgaggtacatgtttttaagccctccttaaatttcatgcgattggcaaatattacttgctttggctgactaataagaaggtaatcacatctgtgaagagtagcacatcaccaagattactgggtcttcatgacaaatacagaaattaaatgttaacagaggggaaaggttgctgctcctctttttcattcttcctttacaccagcattgagtctttaatcttacattattaaactgcaataactttatttacattctttatctgccctaaaatattttaaacaagaattcaaaaattgctagcatagcctacggagtcaatactggacaaaaacaaattctcaactccctccaacatgctcttyggaaaattctcagaaatataaagtcattaagtagtttaaaagagaaccaatttcaaaaatcaaaccaaggtcctctagttaaacagttactgaaaaggaaaagttggtatctagaattcctttttctattaagttgagaaagaatattaaatctactaagcagagatcagtaggttagattgaaattaaactcctaattttcaaatgttaaatgtgtaagagatcctaattttcaaatgttaaatgtgtaagaggtaagtggaatatt

SEQ ID NO: 510263 - DNA, 604 bp, Homo sapiens
tttattgtccatgctgtattttaatatataaatatactactatttcccattcatctgtcaccaaatattcatcacatagatatttgaggtattttctttttttccattacaaccctattattgtaaacattcttaaaattttctcctggagtacatgtccatataacataataccatttgtataaattttaaaacaaacatttgataacttcactgtattataaaggaaattccttgtggacaaagacagatagaactsaaagtcatccctcttcttatgtgagacgaatatatatctgattgcttcctctgccctattttttcactgagccatattaaggcgtaaatgactattcctgtaaattgtatattcagtgaaaggctaatcagaaactcaaaagaatgcaatcatttgtcttttatctacctatgacctggaagccccttccccgtttcaagctttcccgccttttcagaacgaatcaatgtacattttacaagtactgattgatttctcatgtctccctaaaatgtatagaacgaagccgtgcccgtccaccttgggcacatgtcgtcaggacctcctggggctgtgtcaaggtcg

SEQ ID NO: 510264 - DNA, 598 bp, Homo sapiens
tagatgatttattgtccatgctgtattttaatatataaatatactactatttcccattcatctgtcaccaaatattcatcacatagatatttgaggtattttctttttttccattacaaccctattattgtaaacattcttaaaattttctcctggagtacatgtccatataacataataccatttgtataaattttaaaacaaacatttgataacttcactgtattataaaggaaattccttgtggacaaagacagatagaactcaaagtcatccctcttcttatgtgagacgaatatatatctgattgcttcctctgccctattttttcactgagccatattaaggcgtaaatgactattcctgtaaattgtatattcagtgaaaggctaatcagaaactcaaaagaatgcaatcatttgtcttttatctacctatgacctggaagccccttccccgtttcaagctttcccgccttttcagaacgaatcaatgtacattttacawgtactgattgatttctcatgtctccctaaaatgtatagaacgaagccgtgcccgtccaccttgggcacatgtcgtcaggacctcctggggc

SEQ ID NO: 510265 - DNA, 679 bp, Homo sapiens
ttcccttatggttaaattgtgtgtgtgtgtgtgtgcacgtgcatgcacatgctcacgcgtgcacacctacaccttggtaagccaaagaatgtttatgtttctatggtcatacctacttatttctgttaaatagcattctgttgtgagtcttatactctttgttaatataacttttaaacaaaaatgatttcagttgcatataatcacatattttcctatttcaaaacgttccatatttttatgcagccctcctccacgttttactgtccatttcccgtaagtagacgtataagttgcctttatctaaatgctagcaaaaatgttgcttccgtgaatgtttctgtacacgagtctaattaaaccgagcaagcatttctggggtataaggattttaactgcagatcacaatatatacttatattcaattttattttatgtttccatatttatttccataatgacttttctgattaaactgttttcagcattatacacrtttcaaagtctctacatattcaccaaatcatttatacaatcaaacttcatgttttgctaaccatacaagtataaaatggttattatttacatttatgtttgtatgattaccaatgaaattgtcagacattcatgtgctccatgtatgaactgcctctttatatactttgtccatttttcccca

SEQ ID NO: 510266 - DNA, 625 bp, Homo sapiens
attcttttgcattttggtaggatttttttctgcatacgttatagttttttgtttgtttgtttgttttttgctttgacttaaggtttttctattttttttttggagtgggggtcacattatcttgtaatttttttattctgacacataccctaaatagaaaaggtatgcatcatgtatctgtacaacttagaataaaataaacatccgataactcacctcaagcttaagaatcagaacaatattctccccactacccacataccctacggaggaaacctactctctctattattgggttattcatgttcttccttttctttatggtttaatcataaagctattctyatatagtatcttaatttgtttcacattgaattttatacattaaaacatgctttgtatatttgtctgagatatttttcttttgctcaaagcgagaatgagctatgttaatgtatataagtgtagttcattctttaataccactatagaatgttcaattgtctgaatatactctgagttatttatagtttctgttgttgattgacataatgagttgttgtcaatactttataatgatgactgatgctgctataagcttccctatacatgtctcttggtacac

SEQ ID NO: 510267 - DNA, 483 bp, Homo sapiens
ttataacactctagactggcccctcatcaccaggatgctgtgccctggtatggtagtagagagtccttcacctctttagcatctgtggtcagatgcagcaaagtaccacattccttttcacctgctccccacaggttgcaagaaatatgtacacattggctgcctggaacacaaataggcatctcaaagcttcctacagttaatacacaaattaaaattttataatgaccctggctacagttatatttctctattatcacttgaaccygccttttttccaaagcagttgtatattttaggttttgtactatatttacaaagtatggggacttaaggaaatatgccctaaataaagcactatccgaaaatttcttacctacatttctatccatgatgctcagagaacagtattcagtttatgaaaacaacaatctccttatgaaagatagcaccagatgctgcttaggctgcagaatttgcagc

SEQ ID NO: 510268 - DNA, 598 bp, Homo sapiens
cacttataggttaatatttcaatcaaaactacagttacaactatgcttaaagaatgcacagaaatagttaacacaatgcctgaaccatgagacaagaaytcttgacccctaaagacaaaaggaaggggaaaatcatcttgctgttatgtgctgctctgcttcccacgagtttctcacagatttatggaccctgagatattctgattttcagaaaaaaaggtagaaattcaataaactcaataagcaggtctgcttgtagatctggaattgcatgggagaaaaacattctaacagaggcaactatagtacattttcttttttcactcatttacctaatatttttaaagctgggcacaggagatacagtgataaatgagaatgatggcagcatgcctgaaggaacttgcagacaggccaaggagctggcaaatacaatagagtatgttttaagtgccagtacagggttaataaagggggtcttgggagcggcactaacccagtttggatcatggatacttgccaaagagatgattaagctgagatccaaggaataaagtggaagaagccagagaaggcctgaggaaaaaatattccaggt

SEQ ID NO: 510269 - DNA, 598 bp, Homo sapiens
cacttataggttaatatttcaatcaaaactacagttacaactatgcttaaagaatgcacagaaatagttaacacaatgcctgaaccatgagacaagaattcttgacccctaaagacaaaaggaaggggaaaatcatcttgctgttatgtgctgctctgcttcccacgagtttctcacagatttatggaccctgagatattctgattttcagaaaaaaaggtagaaattcaataaactcaataagcaggtctgcttgtagatctggaattgcatgggagaaaaacattctaayagaggcaactatagtacattttcttttttcactcatttacctaatatttttaaagctgggcacaggagatacagtgataaatgagaatgatggcagcatgcctgaaggaacttgcagacaggccaaggagctggcaaatacaatagagtatgttttaagtgccagtacagggttaataaagggggtcttgggagcggcactaacccagtttggatcatggatacttgccaaagagatgattaagctgagatccaaggaataaagtggaagaagccagagaaggcctgaggaaaaaatattccaggt

SEQ ID NO: 510270 - DNA, 484 bp, Homo sapiens
cagtggtaagaaatggtagagctggcacggagcatgtgggcacttacagttttagttatgcgtcccaacttctaaattttattcacagtgcttttcagttagcactgtagcaaaagagtattagaattgttatttttttctttcgtattttaaagcctcagcaatttttagtctggaaagatatacagatataatttattattattaatatgtagtaacatgaatatattgtgatatatatttaatacataaaaatcaatatagtgtattaatataatacatatatattaaatatattatagttatataatacaatttaataacagaagagatgtgcctttgatctcacatcaactagtcaygctgcctacttttcaaacagtagtaaaagtttgggattttgggagacagctcaactgagaagccgacagtggttttttatctgtgcttactaaaccatgagtaaagcaaataatttcaacta

SEQ ID NO: 510271 - DNA, 313 bp, Homo sapiens
tgtactcacctcacttgacttctatcctcactgtgtctgctgataaaatgtcagttttgtcctccattagctttctggcctrcctgtgtaacccaaggccttcagtgtcatctcacctctctctgtagtgacccaaaggcaagttcatagattcctgactcttggctagcttctatgactttttctaggaacaagtaggagcttctggctcttttctatactgcaagggaaagtgtagtaaacttgaggatggctaatacagtcccctctaacaactcatgcttctttctcctccactgcaaacacacatgct

SEQ ID NO: 510272 - DNA, 659 bp, Homo sapiens
cagctgttcctattcggccatcttggctccacccttacctctaacttctattcaggtgtataaaacacttctgccaaattaatcatcctaaaacttttctttcaccacatcctgatcaatgataagcaatggtattttattttctaaatataaagtcaattttatatcctaaatgcctatttttatattcaaaacatttactttgatcttaaaaccattgtaagagaactgccatgagaaataaaccgtaaaatcacaaatcatgaaaatgcttttagttcatttaatcttacaaattccccttacatgtgatgaaactgagactcaaaaagtcaaaggaacttgccagagattacacagctacttaacagtaggagtgaactagaatttgaattccctaattttcattctagttctcttttaattgtgatatgctataaacacttataaaaaaaactttttcttactgaatggactcctacattagaagaccagattctccattactttaaaagttatagccacagacagtgttcatttggaacaggggcttctcaccatgatggtgagaagttttatcttcagtctcacctccgaatcctgtyagctgttatctcgtatttagagcttaccattttctaaggtgaatcaatcattcc

SEQ ID NO: 510273 - DNA, 481 bp, Homo sapiens
cctttgctttctaaccaggggtgactgtaggaagaaaggatacatcagtggaatctcggaaagtcaagagttagccatgtgttggtgaagccgttaaaaacagacaccacagcaagggaaagacctatttccacatatatcaytagtcacccaggtcccaaattcctctgtaacatgagagagttgaattggataagttcatgtctctctctaagttcggttctcctaggatttgtacagttttgaatacccactacgggtaaaacatgtactgacttcagtggtgaaaatgttagtgctgcccttgaataacttatcctccagtaagatatggtaaaagacggttcatttcttcaactggttaattaatagcagtacttgaagtgctgccttgagaaggatgataagatcatatctctgttcatcataacaaaagctgttatcaattactgatgtttgttctgatggggagaaagaagtg

SEQ ID NO: 510274 - DNA, 240 bp, Homo sapiens
tctaagactgattcctttatccagtcaatattttatgactagctaagaagcatacttttatagaaaatatattttaagtcaattgtatacatataagttgaattattatacgtgtagtatgaatctttgttaaagtagcttacaatraatcttttgattagtattgattagttttttttagtttttatagtatccatgtttttttagtttttatagtttttatagtatacatataagttg

SEQ ID NO: 510275 - DNA, 602 bp, Homo sapiens
gtgcagttcctaaagactgactcaaatgtcacaaaaggttaaaagagaccgggttgcaaggcagaagcagtccttaggtgttgagagtgcaccagaagcccctaagtcagcagggttcagaagaagaagtggatatggtggctgccacgtagggcaagcctggaacaaggcagcggaatgtcataagcaccggacccaagtcagggaccaacagccagtgaggaaccaagacctagttatgacagaacaacaaagattagctgggagtcactcaagaagtggggaaaaccagagtcagtttgaacccaagactggattgatggtgaagtcaaaacaaggtggaaggcaagtaaaaagcaaagttagaaacaaagcaaggggcgtcaagcatgattgaaaytcagttacctctggatatccagaaatccaatgctaaagcattaatcacaaactcaaatgactgcagctccaggctggtgacctgaaggtagggatctggtggctaagggtatgacaaagagagttgtagtgtgtagggccaaccctagagagagggtttttcattccattttaaaaacatatctcatattatattctggcag

SEQ ID NO: 510276 - DNA, 285 bp, Homo sapiens
tgaaatgagtggaaattaagtaatagtctgtggaacacagagtagatggtggggctgtcagaagagacaatatgaagaaggaaattacaagttgggagcttaggagcctggcttgtgtgtggcgcaagtccttagattctaggccctgttgtgcctyaggaagggaagtaacgcagcctgagaggtggtccaggacacaggtgtagggcacgctggactgaaggacatgctggcttgatcaaagcttacgtaagacatgaaggatagtggtgctgtttggtgctc

SEQ ID NO: 510277 - DNA, 626 bp, Homo sapiens
tcaaacattaataaatccagatagtatgattttcaattaatttacaacaaaggaaaaatatagttgaggtggctgtaaatttgagtaataaaacgtcaagagacagaaccctcttgttagggaattattactgggcttaaaaggaaggttccagactagatgcttgggaggcatgtatccagtcaagtccgaaactggactagatacacactatgtttagttagttataacttttaaaagtcaacaaggtaaaaatctccttaatggccaactttctgtaatttctaatacttctgatgccgtgatgattcacctctattgagaaactcagtgcaattactgatttgtttgtctttctttaatatatagaaccaatcagtctggttggcctgtcagttgactaatgagtatattggaaagattgagatgggtcaactgaaatatakgcctaagtcagctgctttgatttttggtgtctagagatacagctttctgaacgttccttttgtcctgcctttttcttctcatatcctggtataatgagggggaaagagaggatcttttgtggtatcacacatttggttgattataagaacactatacgtcatataaaagaagaaatcggg

SEQ ID NO: 510278 - DNA, 561 bp, Homo sapiens
aaataggcatggattggcatcaaaagacctaggctggctctgctctatttctacttgggtgacctttggaaaatcactttgcatttctgaccctcaattccctcaactgtatatgaaaagtgtaaagtgatccaagagtcacttgcatcacattcttaagtcctaccctataattactgaatcagaatttctcagaggtttacatttttaacaagcttcccaggtgatgcttaggtacattttcatttgaatcactgtcgtcaataaatgtaaggaacagtcttttctatgtcaacgtcagtgctagtgatgtgtgcgtcagttctagyaatgccaaaaagaggagcagtaattggaacaatctctaagttgacatttgtgctatattttgtcttctgtctttaacctccatcatagatgaagaagttatagcctttccttaaactgaatcataacaagaggattgctttataggagaactaccaagactggcaatcattttaaactattcatccaagacaaaggagcatggtgcctagtgggttattgtactatcagtgg

SEQ ID NO: 510279 - DNA, 533 bp, Homo sapiens
ctggcagattagcgcagtggctggaacacgagtacagtatatctgttttttgtttgtttatttttgagacggagtctcagagtctcgccctgtcaccagactggagtgcagtggtgcratctcggctcactataagctctgcctcccggattcaagcgattctcctgcctcagcctaccgagtagctgggactacaggcacgtgccaccacgcccagctaatttttgtatttttagtagagacagggtttcaccatgttggccaggatggtctcgatctcttgaccttgtgatctgcccgcctcggcctcccaaactgctgggattacaggcatgagccactgtgcctggctgagtacagtatatctgaatccaccaaagcgatttgctttagtggttgcatgacaatatttaaagatcaatatcccattctttttagtaaggtgtttattgttctgacaaaatatttaaaggagaaaaaacgttaagacaggtaaagagtagtgtaacatcttttttttctgaatacgaata

SEQ ID NO: 510280 - DNA, 533 bp, Homo sapiens
ctggcagattagcgcagtggctggaacacgagtacagtatatctgttttttgtttgtttatttttgagacggagtctcagagtctcgccctgtcaccagactggagtgcagtggtgcaatctcggctcactataagctctgcctcccggattcaagcgattctcctgcctcagcctacygagtagctgggactacaggcacgtgccaccacgcccagctaatttttgtatttttagtagagacagggtttcaccatgttggccaggatggtctcgatctcttgaccttgtgatctgcccgcctcggcctcccaaactgctgggattacaggcatgagccactgtgcctggctgagtacagtatatctgaatccaccaaagcgatttgctttagtggttgcatgacaatatttaaagatcaatatcccattctttttagtaaggtgtttattgttctgacaaaatatttaaaggagaaaaaacgttaagacaggtaaagagtagtgtaacatcttttttttctgaatacgaata

SEQ ID NO: 510281 - DNA, 582 bp, Homo sapiens
aaattatgcattatatacaattcttttgaaaaccaaaccatcccatatttttatgggaaagtgcatttcctgttctaaacaataggcatggatataagtttttggaaatacatgtactcataaagtaggagctacctgctgctaaagtaattttccaaaatatttagtattgtgcaaagtagataaactacttttcatttttatgcttttaaaaagtgtttgctaactggacacacaatggctcatgcctgcaatcccaacactttggaaagctgaggcaggagaattgcttgaggccaggagtttgagaccagcttgggcaacataaggagaccttgccactrtaaaaaatttaaaaattggcagggcatggtagcatatgcctgtggttccagctacttgagaggctgaggtgagaggactgcttgagcatgggaggtcaaggctggagtgagctgtgttcaagccgctgcacttaccagccatgttgggtaggattttacaaataagttgtataaaaacacagctacactgacccacttaggaactatcaaaggctgcttttacgctgtgatggcagag

SEQ ID NO: 510282 - DNA, 455 bp, Homo sapiens
ctgaatcatatggtagttgtatacgttaaaactacttgaggaattcccatactgtttctcttaatggctgtactaatttacatttccaccaataatgcacaaggatttcctttttttcacatccttttcaacacttgttatttcttgtctttttgatagtagctattctattaggtatgaattgatgtgtcattatggttttaatttgcctttccctgataattagtgattccaagcatcttttcatattcctgttggccatatgcatatcttcttttgagaaatgtccattcaggtcctttacccattttttaatcgagttatttttcttgctgtttagtttgagtttttgacatattttggatattaaccccaagagctactcttsaccctaacaatttcacaagataaagtgactctgccgataaaaaaaaaaaatgccttctaacaaaact

SEQ ID NO: 510283 - DNA, 521 bp, Homo sapiens
tcatggtgtttacttaataataaggtatcagtattggttcattagttatgagaaaggtaccctactagtgtaaaatattagcatttcccagaggaaactgggtccaggtgtatgggaactccttgtgtagtttttttttctttgagacagggtttggctctgttgctcaggctggagtgcagtggcgcaatcacagctgacggtaacctccaactcctgggcgcgagcgatcctcccaccttagcctctgtactatctttacaaagttttatgtaactatcaactgttgtaaaattaaaacttaatatatgcataaaataaagaaccccctgacttcagtggagagagcagactgagatggacaagagtgaagtcagagagacgtgtgggggccccacagtggtccaggtgggcrctgtgagtgacttgttggtagcagtggagatgcagaaagatgagtcgatttcagtgtcaggacatgcttatagctggtgaggaggtgagggaacaggaggaagcct

SEQ ID NO: 510284 - DNA, 532 bp, Homo sapiens
acggtaacctccaactcctgggcgcgagcgatcctcccaccttagcctctgtactatctttacaaagttttatgtaactatcaactgttgtaaaattaaaacttaatatatgcataaaataaagaaccccctgacttcagtggagagagcagactgagatggacaagagtgaagtcagagagacgtgtgggggccccacagtggtccaggtgggcgctgtgagtgacttgttggtagcagtggagatgsagaaagatgagtcgatttcagtgtcaggacatgcttatagctggtgaggaggtgagggaacaggaggaagcctgaatgatgtgtggttggagccagtggatttttttcaatagatttttctttttggggaaaagatagatgaagggcaggtttgaggtgggtggccaagggttctcttttggctggaatattactgacccccctgggatgttactgagatcactggtcctcatggaaatgccattacagggaccggtgagcgtgaagacccaggcgagggagg

SEQ ID NO: 510285 - DNA, 557 bp, Homo sapiens
gtaacctccaactcctgggcgcgagcgatcctcccaccttagcctctgtactatctttacaaagttttatgtaactatcaactgttgtaaaattaaaacttaatatatgcataaaataaagaaccccctgacttcagtggagagagcagactgagatggacaagagtgaagtcagagagacgtgtgggggccccacagtggtccaggtgggcgctgtgagtgacttgttggtagcagtggagatgcagaaagatgagtcgatttcagtgtcaggacatgcttatagctggygaggaggtgagggaacaggaggaagcctgaatgatgtgtggttggagccagtggatttttttcaatagatttttctttttggggaaaagatagatgaagggcaggtttgaggtgggtggccaagggttctcttttggctggaatattactgacccccctgggatgttactgagatcactggtcctcatggaaatgccattacagggaccggtgagcgtgaagacccaggcgagggaggtgctggcatgtaagtggatttaaagcat

SEQ ID NO: 510286 - DNA, 449 bp, Homo sapiens
ttccaagtaacccaagaggctgtcggagctctttagcaaagcagtgttctggtccatgtcaccctccagaaggacctctctctggctgctggggraggctgggattgggggtgggggtggtggtggaaggtggaggagcaggggatgagtgaaggctgctgtggtcacctgacaggtgatggcagctggacggggcaggtggtccaaggcagcatggaggtggaggttgagccaggggctgctcccagggaagggaggaggcaagaggagtcatccaggaggcctcccaggcgggggctatgatgtcagggcgggaggaactccatgttccgctgaggccccattagaccccaagtgcagaagtggcgaggggagcaggatccacaagtctggagttcagaagagaggtccaagctgagcctggggagtggagaggtgcgggcacgtgc

SEQ ID NO: 510287 - DNA, 633 bp, Homo sapiens
tagtttactgaaattcttccaaattagttaaattttcaatttcacctttgacccaaagctctctcccagcccctattctacgaggggcagacttacagctctggtggctgtgggcagggagggagcatttccacacctaccaccttccttgtgattgcttctctgcagtgggttttaggaggaggaagaaaggaagaaaaggatttctcatgtgaatgccaatggtgagttggggcaggccgttttctgtgggccataatgtctattcccctgcatgaataaccacacatcagttgctttcgtacccaagagcaggggtgattttctaaatacttaatagccagaatggcacaggcaccaacccaggtgaacagtcacctgccaatccctgagcagggtcctgaaagctccctgctgtgccaggtcagaggtaggggacagcagggactccattaggtacttcaaaagtcctgggtgctctaggggtgggggcagagtggctggggtggcaggaagcayttggggaagtggctatttgcaagctgatatggaaatgtttcaatattttaacaattggtatggcagttgaattttagccttgccgtcacgaatccaattcactgtctatacact

SEQ ID NO: 510288 - DNA, 508 bp, Homo sapiens
cagaaggggacagaggtgggatgcagatttagatggggtgygtgggggctgagcacccacggaggggggcagaggtgggatgtggatttagatggggcatgggggtgctgagcacccacggaggggggcagaggtgggattcgagtttagatggagcatgcgggggctgagcacccacagaatgggacagaggtgggatgcggatttagatggggtgcgtgggggctgagcacccacggaggggggacagaggtgggatgtggatttagatggagcatgcggggtctgagcacccatggaggggggcagaggtgggatgaagatttagatggggcacgcggggtctctccggggagacggtgcccaggcacagcctgggggtgggaaggatggagacgtgagggttccagagtcacggggtccaggaagctcctttcttctttgctccatgaaaagcatggaagccacgctcactgctgggcctggggtgatgccactgaggctggga

SEQ ID NO: 510289 - DNA, 441 bp, Homo sapiens
ctgtggcctgtgccgtgtaagtggatacagcctcgggtttcactgcacgctccctcctctctggctagtttggggccctgtccttggggcattaggggcatgaaatgcctgcagacccacgggtgatgccttttagagagtgggtgaagagaagtgggaagcacagccccagtgctcaccccagggggccggagggagcaggatctgtgtgttcaccccacagtggctccagagaacatgggcggctgtcctgcccggcactcagygaggggctgccaaggtcggcttcagggaacagtcaatcaacacatctactggggacaggaggagggagggaaggggagaagagggcatgaagagcctttttctggcctggtcctgcccggcactcagcgaggggctgccaaggtcagcttgagggaacagtcaatcaacacatct

SEQ ID NO: 510290 - DNA, 441 bp, Homo sapiens
ctgtggcctgtgccgtgtaagtggatacagcctcgggtttcactgcacgctccctcctctctggctagtttggggccctgtccttggggcattaggggcatgaaatgcctgcagacccacgggtgatgccttttagagagtgggtgaagagaagtgggaagcacagccccagtgctcaccccagggggccggagggagcaggatctgtgtgttcaccccacagtggctccagagaacatgggcggctgtcctgcccggcactcagtgaggggctgccaaggtcggcttcagggaacagtcaatcaacacatctactggggacaggaggagggagggaaggggagaagagggcrtgaagagcctttttctggcctggtcctgcccggcactcagcgaggggctgccaaggtcagcttgagggaacagtcaatcaacacatct

SEQ ID NO: 510291 - DNA, 665 bp, Homo sapiens
caggtgcgccctggtgcaaagctgtcccggaaactgcagtrataccctcatgcacacagaaggtggatggaaagaagctcaggtgcatcccggtgtaaggccatccagaagctgcagtgataccctcatgcacacaggaggtggatggaaagaagctcaggtgcatcctggtgtaaggccatccagaagctgcagtgataccctcatgcacacagaaggtggatggaaagaagctcaggtgcatcctggtgtaaggccatccagaagctgcagtgataccctcatgcacacaggaggtggatggaaagaagctcaggtgcatcctggtgtaaggccatccagaagctgcagtgataccctcatgcacacagaaggtggatggaaagaagctcaggtgtgctctggtgtaaggccatccagaagctgcagtgataccctcatgcacacagaaggtggatggaaagaagctcaggtgcatcctggtgtaaggccatccagaagctgcagtgataccctcatgcacacagaaggtggatgttgtttattgaaattagaatctgatcaggtctcctttatttggtctggtgactctatccaaaagcagtggggcttgtccccagactagcactgatgtcattgagaccagggcctccgaccagggctgg

SEQ ID NO: 510292 - DNA, 665 bp, Homo sapiens
caggtgcgccctggtgcaaagctgtcccggaaactgcagtaataccctcatgcacacagaaggtggatggaaagaagctcaggtgcatcccggtgtaaggccatccagaagctgcagtgataccctcatgcacacagraggtggatggaaagaagctcaggtgcatcctggtgtaaggccatccagaagctgcagtgataccctcatgcacacagaaggtggatggaaagaagctcaggtgcatcctggtgtaaggccatccagaagctgcagtgataccctcatgcacacaggaggtggatggaaagaagctcaggtgcatcctggtgtaaggccatccagaagctgcagtgataccctcatgcacacagaaggtggatggaaagaagctcaggtgtgctctggtgtaaggccatccagaagctgcagtgataccctcatgcacacagaaggtggatggaaagaagctcaggtgcatcctggtgtaaggccatccagaagctgcagtgataccctcatgcacacagaaggtggatgttgtttattgaaattagaatctgatcaggtctcctttatttggtctggtgactctatccaaaagcagtggggcttgtccccagactagcactgatgtcattgagaccagggcctccgaccagggctgg

SEQ ID NO: 510293 - DNA, 665 bp, Homo sapiens
caggtgcgccctggtgcaaagctgtcccggaaactgcagtaataccctcatgcacacagaaggtggatggaaagaagctcaggtgcatcccggtgtaaggccatccagaagctgcagtgataccctcatgcacacaggaggtggatggaaagaagctcaggtgcatcctggtgtaaggccatccagaagctgcagtgataccctcatgcacacagaaggtggatggaaagaagctcaggtgcatcctggtgtaaggccatccagaagctgcagtgataccctcatgcacacaggaggtggatggaaagaagctcaggtgcatcctggtgtaaggccatccagaagctgcagtgataccctcatgcacacagaaggtggatggaaagaagctcaggtgtgctctggtgtaaggccatccagaagctgcagtgataccctcatgcacacagaaggtggatggaaagaagctcaggtgcatcctggtgtaaggccatccagaagctgcagtgataccctcatgcacacagaaggtggatgttgtttattgaaattagaatctgatcaggtctcctttatttggtctggtgactctatccaaaagcagtggggcttgtccccagactagcactgaygtcattgagaccagggcctccgaccagggctgg

SEQ ID NO: 510294 - DNA, 504 bp, Homo sapiens
gcctatttgcagtgcacctgctttttatatataaaacgcatctttaataagatatgcatctctcaccttcctaattatacatagttgccaatgtggtgaatttaagcattagtccagaaagataaaacactaactctttaatcctggtatgggtagtaaagagtcatttaatggtaaaacaagacttttctgacttactactggaaaagctttaccaaactcacactgtcttatgttttatttattttttaactttarataaaaaaactgacataaaattgtatgcatttaccttgtacagcatgatgctttgaagtatatatacattgtggaatgactaaatctgtctaatttacatatgtattaccttgaatagttatcatttttgtgttgaggacattttatacccactcttagcatttttcaagaaaacaatatagtgttaactatagtttcatgtttgttgttggtagaggagcaaatccaaagtcattaatcatctag

SEQ ID NO: 510295 - DNA, 504 bp, Homo sapiens
gcctatttgcagtgcacctgctttttatatataaaacgcatctttaataagatatgcatctctcaccttcctaattatacatagttgccaatgtggtgaatttaagcattagtccagaaagataaaacactaactctttaatcctggtatgggtagtaaagagtcatttaatggtaaaacaagacttttctgacttactactggaaaagctttaccaaactcacactgtcttatgttttatttattttttaactttagataaaaaaactgacataaaattktatgcatttaccttgtacagcatgatgctttgaagtatatatacattgtggaatgactaaatctgtctaatttacatatgtattaccttgaatagttatcatttttgtgttgaggacattttatacccactcttagcatttttcaagaaaacaatatagtgttaactatagtttcatgtttgttgttggtagaggagcaaatccaaagtcattaatcatctag

SEQ ID NO: 510296 - DNA, 641 bp, Homo sapiens
catcagaacaaataaataccaatatccaagggtgggatccaggaattctcattttatcaaattatscaggtgattcccaaatacactaacttttggaacatctggtctggctcagctccttcaagattctgcctttagaggccaagattttattttgatgctaatactttccattatacaaagctgccttttgtgcccaaagcaattagtggcaattgataaacttacaataataaatcaaggaatatttaagaataaataacctaaaagaaaatccaaattctttatatagatctggttcctgccagactcttctatcactttctgccttacttatggtgctccagtaagtttattctcacctcacggtctttgcattagttgttccttctgcttggagtgctcaaacattaacatgagtagactcacgttttactcaagactgctgaaacatctgctccttcaagaggtattcccaatctaaagtaactttcaccccaaaccagagactaaatactatagtcactctctgtagtatttatcagcatttaaaataatcttaatttatttactgtcttagtcaaaatatacttaagctccctgggaccagggattgtgtctgtgttgttcattgcctcaag

SEQ ID NO: 510297 - DNA, 569 bp, Homo sapiens
gctgcttctagttggccaccttggcccccttccatcaggaaataattttcatggatccttactgtgctatttttgctggtgtccttggacttctttttggggtgatgaaaatcttctggagttagatagtagtgatggttgtcaaactctgtaaatatgcttaaaaatactgaagtacacattttaaaaggatgactatggtatgtgaatgttttaataagttttattatttgtatttgctatttatrtattattatatatgttaaggctaacagaccaggagatgactgctattgagaaaagtttgttgttcacagatccaaataggaatgggcatgccatgttactggaggatagagtgtggtacatggaaagcaccaaggtcttcggatcttcgtatgaggcagggcaaacaagttttggattggttagtcagaataatttcaatgggctctagggtttaggggctgtacctagttgtctggtacctggtcctatggtgattatggcaggcagacagtggtctgaagtgtcagagcccaataaaggaagtggttcggatattggct

SEQ ID NO: 510298 - DNA, 313 bp, Homo sapiens
cagcacctgcacaaagtaggtgcttactgatttttttgcggggggaggggggggcggtgaactacaraaatcctaggagaggttttcctccaagagaaactgtatttagtgtttgctttttttgttgtctagatgtccagtgcccagaaatcccttctgcctatgggcagcaaggttctgttaatgtttggccttctggtgtcactggaagaaaatagaggagggaaaggtgggacatgatgtcaggttgggaccaggatactgaagttaggctcagggagcaaaatcaggagattttggttggggatgttga

SEQ ID NO: 510299 - DNA, 543 bp, Homo sapiens
tgaatccagttatcagacaatatgtgaattgtgctgacattctacactcagagctaaactccattccgctctcatgaacctattagatgaaaacgcctcaatttagataactgcaaattgctttcggagtcttaatttcctattagttcattaatctctctattcagaatgccaacaagacagctaatgataattccggaggaagtgggcattaaatcggagcaggagggaagggggttagacatgaaggagatgtttctggcttcctgggtggagggtaccccaaagttaattcataaagttagtaacagcattagcttacattaattaaacacttctaatggactgggtacaaggatgaacaygtcattgaacaattaccttacctgttttttgttgtcgttgtcgttgtcattaagcaatctagtaaggtggatattattatcccccttctacaaaacaactgatactccagggagccacacaaccagttggcagcagagtcagggttcaaatataggcgtgtctgaccggcagcctgtg

SEQ ID NO: 510300 - DNA, 543 bp, Homo sapiens
tgaatccagttatcagacaatatgtgaattgtgctgacattctacactcagagctaaactccattccgctctcatgaacctattagatgaaaacgcctcaatttagataactgcaaattgctttcggagtcttaatttcctattagttcattaatctctctattcagaatgccaacaagacagctaatgataattccggaggaagtgggcattaaatcggagcaggagggaagggggttagacatgaaggagatgtttctggcttcctgggtggagggtaccccaaagttaattcataaagttagtaacagcattagcttacattaattaaacacttctaatggactgggtacaaggatgaacatgtcattgaacaattaccttacctgttttttgttgtcgttgtcgttgtcattaagcaatctagtaaggtggatattattatcccccttctacaaaacaactgatactccagggagccacacaaccagttggcagcagagtcagggttcaaakataggcgtgtctgaccggcagcctgtg

SEQ ID NO: 510301 - DNA, 580 bp, Homo sapiens
agagagagagagggggggagagattgaggccagatagcaaggcactgcaatttcttacaaaggactggactgagcgaggcactgtgttatgttctcaagtgtgctgatttatcaaatgctcactgccacccaaggcaggcaagattattatattagtctgtttttatgctgctgataaagacatacccatgacagggtgatttataaagaaaaacaggtttaatggactcacagttccaagcagctagggaggcctcacaatcccggtggaaggcaaaaggcacttcttacatggcagtggcaagggagaatgagagaaccaagcaaaaggggtttccccttataaaaccatcagatcccatgagrcttattcacgaccacatggacagtatggaggaaaccacccccacgattcaattatctcccaccaagtccctcccataacatgtgggaatagtgggagctgcaattcaagatgagatttgggtggggacacagccagaccatatcaattattattcctttcacacagatgaaaatactagggacagaaatgtgaagtgacttgcccaaggtcagg

SEQ ID NO: 510302 - DNA, 575 bp, Homo sapiens
tgaaccatctcccatcacttgccggtcatatcacctggggagtatcaaagggagccctcccctcctgaaagagctgagaccccaaaccttagtggcagagaagaaaccttgaaagtgaaagccattcagaccatcagctcacctcgctctccaaccccatccacttgctgcaaacttgagcagtttggaggtctcctgtgtacagcgataaaccaactggagcagaggtgcattcgattaactccctgggcacatctcccctcgatattgccagggtgctttcttccccaagagatatgaggcagcagcaggactgggcccaagaaaagtactgaaggttgccaggtcacwgttaattttaattttcaatttgtgtcaccgtcagcaggagttatatctaatctccactgcctcagagtgtcaaaagggaaatcggaagtggttatgtaacttggagtctgagaatttcgagggaaaggttgcatccctctgctggaccgttttgcctgatttgggtcagtcactctccaaacagaataagccacagcccaaagcctccaaatctaagcaaatag

SEQ ID NO: 510303 - DNA, 622 bp, Homo sapiens
ctgttacatgcttccagaactgtggggaatagaatcagagtggcctctctcatcggcacctgaggcacagtgcctggggcccaccctatgtataggtgcccatgaaaatcctttcattttcatttattttacaaacagaagaaaaaaataaataaaataataatgagtacggcaaaatgattccaggatggattatatgatctttataccaacatagtttaaaatataatttttaattttttcctttttccttttttaatggagaagggaccaatgaaagccaaagtaccttgggcccacactgaacagcatgaggcctctgcrgcaaaacatccatgggaaattgcatggagctctgggtgggctaatgaatagggttaagcactgtggaaacagacttgtacacagttggggggtaatagctcagacttggggtgcacagggaattctgggaggttgtccacagctagggagtctccccactatattctgtccacaggtagcagccccttcccttactcatattccccttggtctatccctcaccacatctccacttctcaccttggccccaacctgagacagacacatccaggcttggggaagggtcatacaattttgg

SEQ ID NO: 510304 - DNA, 605 bp, Homo sapiens
ggaaacttggggagaggaaaatgaatcaacattacaggactgccttttaatttacgcctgtgaaataattttgacgattgttcataagtgtttaactaatgtttgttctggaaatgtcaccattgcctctggaatttactttgatattctctgagtgttayctctctattaatatgtgagcctggaaagaattgctccctgttttttgtcctgacatcttttttgatgtgctaagacttggactgaatttgattataatgatggcagttgagggaaaaaaactgtcttaaaagaaaatctattccatgctctatctttcagagacctaggatgccgtcccttctcttctcaccacagccacactggagatatccagggtacccttggcccctagggtgttctcctgtctagtctacccactttgggagcaagaatctttgtaagatggtagaggtgagcacccactctcttctcctggtaagacacactcagagtcctgaggaagcatgttcccttctctcttcagttacacacacacacacacacacacacacacacacacacacacacatcagattcctcttttgtctagaaaaatgtgtagt

SEQ ID NO: 510305 - DNA, 605 bp, Homo sapiens
ggaaacttggggagaggaaaatgaatcaacattacaggactgccttttaatttacgcctgtgaaataattttgacgattgttcataagtgtttaactaatgtttgttctggaaatgtcaccattgcctctggaatttactttgatattctctgagtgttatctctctattaatatgtgagcctggaaagaattgctccctgttttttgtcctgacatcttttttgatgtgctaagacttggactgaatttgattataatgatggcagttgagggaaaaaaactgtcttaaaagaaaatctatyccatgctctatctttcagagacctaggatgccgtcccttctcttctcaccacagccacactggagatatccagggtacccttggcccctagggtgttctcctgtctagtctacccactttgggagcaagaatctttgtaagatggtagaggtgagcacccactctcttctcctggtaagacacactcagagtcctgaggaagcatgttcccttctctcttcagttacacacacacacacacacacacacacacacacacacacacacatcagattcctcttttgtctagaaaaatgtgtagt

SEQ ID NO: 510306 - DNA, 610 bp, Homo sapiens
ccctttcagtaaaatattaaaataatataataataataataataataataataatacgctgggtgcrgtggctcatgcctgtaatcccagcactttgggaggctgaggtaggtggagtccttgaagtcaggagtttgagaccaactttgccaacatagtgaaaccccatctctactaaaaatacaaaaattagccgggcatggtggtgcacacctgtaatcccagcttctcaggaggctgaggcacgagaattgcttgaacctgggagacggagtttgcagtgagctgagatcgcaccactgcactccagcctgggcaacacagcaagactctgtctctagtaataataataataataatgatgataataataataaactagtgtgtctacatacacacatatgtgtgtatgtgcttatatgtatatgtttataatctattaatatgtatactttaaaaataaaatgcagggccaggactagggtggggctgggaataaaggcttgccttggatgcaaaatttaagaggtgccccaaagctcagatatcaagatgaaaatattttaatacaatattttcaaaaactaagtgggcaatgtacgtgaaccag

SEQ ID NO: 510307 - DNA, 610 bp, Homo sapiens
ccctttcagtaaaatattaaaataatataataataataataataataataataatacgctgggtgcggtggctcatgcctgtaatcccagcactttgggaggctgaggtaggtggagtccttgaagtcaggagtttgagaccaactttgccaacatagtgaaaccccatctctactaaaaatacaaaaattagccgggcatggtggtgcacacctgtaatcccagcttctcaggaggctgaggcacgagaattgcttgaacctgggagacggagtttgcagtgagctgagatcgcaccactgcactccagcctgggcaacacagcaagactctgtctctagtaataataataataataatgatrataataataataaactagtgtgtctacatacacacatatgtgtgtatgtgcttatatgtatatgtttataatctattaatatgtatactttaaaaataaaatgcagggccaggactagggtggggctgggaataaaggcttgccttggatgcaaaatttaagaggtgccccaaagctcagatatcaagatgaaaatattttaatacaatattttcaaaaactaagtgggcaatgtacgtgaaccag

SEQ ID NO: 510308 - DNA, 610 bp, Homo sapiens
ccctttcagtaaaatattaaaataatataataataataataataataataataatacgctgggtgcggtggctcatgcctgtaatcccagcactttgggaggctgaggtaggtggagtccttgaagtcaggagtttgagaccaactttgccaacatagtgaaaccccatctctactaaaaatacaaaaattagccgggcatggtggtgcacacctgtaatcccagcttctcaggaggctgaggcacgagaattgcttgaacctgggagacggagtttgcagtgagctgagatcgcaccactgcactccagcctgggcaacacagcaagactctgtctctagtaataataataataataatgatgataataataataaactagtgtgtctacatacacacatatgtgtgtatgtgcytatatgtatatgtttataatctattaatatgtatactttaaaaataaaatgcagggccaggactagggtggggctgggaataaaggcttgccttggatgcaaaatttaagaggtgccccaaagctcagatatcaagatgaaaatattttaatacaatattttcaaaaactaagtgggcaatgtacgtgaaccag

SEQ ID NO: 510309 - DNA, 495 bp, Homo sapiens
tgtgggcctgggtttttgtctccaaagatcatcttgtttgtttgttgaatttgggagtttgaccttatcacaagaacactttactgtagtgtgataaccatttatccttttgctcacacagatatttttataagcctgaagatctgtattgactaatgagaatgatgcactgagctcaaaaactagtattacttgcatggcattttaaattatataacatgattgcttataggaaatacatccctttttatagacttatgatgcctgctgtgtcatgcaattaaaaagttccagaaaagcattctcagtatgtcarattcttgaggctgatttataggattacagctttccccctttgtgattcaattaaagcattttacattgggctattatagagtttaaagtctgatcatagtttggaggctgaactattagattagcatgtgatctgtttataaataaactgaatttcttgttggcaagggataataatta

SEQ ID NO: 510310 - DNA, 614 bp, Homo sapiens
  misc_feature (1)...(614): n = A,T,C or G
nnnnnnnnnnnnngtctaaatattttgcctctgttgataaagcctgacaatgcaatggccccttgtagcatttggcctaaatctctgggtagtctggagagagacagaaggtactcactcaagtccctgtgtccagtagtttaccccaacaatgtgattatgagagcctctcctttgaagccagaagaggaacccaacctcagagctaatgttttccattcaagtagcccccatactacttctcacctactctatcttctggrttctctgaaatcaccactggagccagtattctctggattgacctctgtttgctagatttctcttaagcacagaggtgctcatgtcattatctctttcctctgatatagtatggcaactctacacatctcttctgcccttcacacccatgacctcaagttcattgttttccttcttatgacctgcaacagatccttagattaggtttgttctgttgtcagcctcttcatattcctgattctttgagttaaagccttgcttgatgtgctgcttaactacatcttctttacactttgacttaccaattttttgccaatttttttctttctttctttttttgacccaatactaca

SEQ ID NO: 510311 - DNA, 506 bp, Homo sapiens
taaaatattagcagcatcagtgatgtatctcagcttagtctattaggggtagatgatatacacaagtacataattaaataaacacagagaacgaagcaaaacacttgaaaaccatttgtattacattctttccaaagacagggacaaagcaatttgcgttctcattttgcttctcaccctccttcattaacaaccagaaatggcttttatggatggtaaaaaccatctggcatctgcattgaccattgcactgctatccacctggttctgagctcagcggaggcagctctattttaatcttttttttwaaatttagatgcccatgggagacttcactgaagctcagaattccatggccaataaagtatctgaggccatagttgaagtcactggccccctggatcagcttggcttactaagactccagccaggctcctgcaggagtaggctagggaatgaactggaagaaagacagcttgaagagacataaagggagacagtagtgt

SEQ ID NO: 510312 - DNA, 654 bp, Homo sapiens
gtttcaccagctgacccctcctcttccaaaaacgtaaagtgtgaattcaccacgttgcaggaacctcggctttcagtgcgtgtggacttagctgggggctgaggggctgcacaccctggaaaaacaaaggcaactgctgctccagaagccccactgggagagccctgtggggcgactacatcttgacctgcaaatttccttccctctttgcccctagtcccgaccatttccactagcaaggagtttgaaggatgtagactccttgagtccccatcacgcgaaataggtggtttgtactacttcgaacttggaggtgatgcgcaaaaaacaatgaccgaggtgaygcaataatgccagagctggatggggagcccagcacctgccaagcagccccgtgcccagccaccaaccagggtgattgcggtctaggctagggaggaaagcccagtgcctgactgctaaccgagagctcaaacctggagtcttaattttttccaggtcaaaagggtgttttcattgcttggcaataactgtgggggcaaggaggggtttcacagtatagctttccatttttcattggatgtcatttcagaaggaggagatgggtcctgagaccaggggatttagtcatcagcaagttaaggagaggatatt

SEQ ID NO: 510313 - DNA, 654 bp, Homo sapiens
gtttcaccagctgacccctcctcttccaaaaacgtaaagtgtgaattcaccacgttgcaggaacctcggctttcagtgcgtgtggacttagctgggggctgaggggctgcacaccctggaaaaacaaaggcaactgctgctccagaagccccactgggagagccctgtggggcgactacatcttgacctgcaaatttccttccctctttgcccctagtcccgaccatttccactagcaaggagtttgaaggatgtagactccttgagtccccatcacgcgaaataggtggtttgtactacttcgaacttggaggtgatgcgcaaaaaacaatgaccgaggtgatgcaataatgccagagctggatggggagcccagcacctgccaagcagccccgtgcccagccaccaaccagggtgattgyggtctaggctagggaggaaagcccagtgcctgactgctaaccgagagctcaaacctggagtcttaattttttccaggtcaaaagggtgttttcattgcttggcaataactgtgggggcaaggaggggtttcacagtatagctttccatttttcattggatgtcatttcagaaggaggagatgggtcctgagaccaggggatttagtcatcagcaagttaaggagaggatatt

SEQ ID NO: 510314 - DNA, 405 bp, Homo sapiens
atcctgcctgctttactgcccagcagatgcccgtagatttcttaattctgctgctgccaaactggcacctgttgtctrcaaacctttctccgtcccactctgggcatcatgttcagagtcctttcctgccagtataggtggagttttctggaagctgctgctgtgatggagtttgggctgcaagatgtttataggggatccacacatgtggaatgaaggaagaatttgggattgggcagagggagaagactgccaatatggcacagagctctagatgaatgtggcctgtcagagttgtcccctgttgaggcaaaatggccagggcttcatcctccagcctcgctcaatcatgggatgtgggttcctctaagggagggtgtgaccttgggcaaggtggctgtccac

SEQ ID NO: 510315 - DNA, 405 bp, Homo sapiens
atcctgcctgctttactgcccagcagatgcccgtagatttcttaattctgctgctgccaaactggcacctgttgtctacaaacctttctccgtcccactctgggcatcatgttcagagtcctttcctgccagtataggtggagttttctggaagctgctgctgtgatggagtttgggctgcaagatgtttataggggatccacacatgtggaatgaaggargaatttgggattgggcagagggagaagactgccaatatggcacagagctctagatgaatgtggcctgtcagagttgtcccctgttgaggcaaaatggccagggcttcatcctccagcctcgctcaatcatgggatgtgggttcctctaagggagggtgtgaccttgggcaaggtggctgtccac

SEQ ID NO: 510316 - DNA, 565 bp, Homo sapiens
ctggggggaactttgtgcttgagcagatgttctctttgtctctgagcggtcccttgtaactgttcatgggagccagctttctgtatcagttttctctagagaagtgcacttcctggaacatctgcccactgcagaaatgcagtgtctctggagaaatgcacttcctggaacatctggccactaagtcaggagcagatcccttcccatttacaggaaggtgacttccctcatcctaatcccatgtttactacctctgaggcaaggccagttacatgsgtgtataccctgtgccattactgagaagggccctgacttggtcctgctgctaccatcttgatttatgaattagggccctgcattttcatttttcactggatcccacaaattatgcaactggtcctggtcagatgttattccctgaggtttgaggcacaacagtgaccaaacagtgccacacctagcctcaggccctccaatcctggtcatgccctacgaattccattaaatggacagtagagaagaaaaaggatcagtaaaacaaatgctgtcaagaagggtgagaagc

SEQ ID NO: 510317 - DNA, 572 bp, Homo sapiens
tgggacccaaggcgtaaagcacagctatgatctttgttctctatccttctccttgcagccaatgctagcatcatctgaagatracaaaggtcatgagctgggcccttcccccacaaatcaggtgaaatgcattccactggtcctcttagtccagaaggagatgttaacacaggcctggagcttctgaatctaggacaaatatagaggttaggagttgtccctgcatatcctatatatgtatgtatttatgggaaagcctcaccttgaaaaataccattatggaaaccatgggcagaagagggggagtatggaagcaggacaaggaagagtctgcagggaacaggaggagaactaggagaatacagtgtcctctggagtgagagaaggactgatagacatctgccaatggaaggtgtggcagccagtctcccagacagctcccactggtcctgcccattagtatccataccctgtgtggtcacatcaacagggctgagctggtgtattagtctgttttcatgctgctcataaagacatatctgagactgggcaatttacaaaagaaagaggtt

SEQ ID NO: 510318 - DNA, 619 bp, Homo sapiens
acccatggctctccagtagcataggccacgctgccagaagcccctccaaacactcacccagacttgactgtggtccccagatacacccaacatactctctgggcaccatcagagaaaactcagacccagtacctgccatgaaagaacttgagatggaagagggagaaaaacttatacaaaaacctttgatatggcccataaaatctcatcagagcctytactttactgagcactggcctaatcccattcccacatggtccataaacacttttgtgtcccttaccccactgggcctgtcgccctgctgtcctgccctgatgcagctggaggctggggggctccagccttctcctgaggattcctgtctaaatgctcagctgctctggaattcacaggagcccagggcatggggcccacctggtctcctgcttccttcaggttgttgcagagcccctgtcctccctcgccttctctacccctttgctccccctgcctcgcctgcagctgtccatgagctctgctcagcaagtcccagctgacctggatctttcctttttttccagctaaacagatatctgccttgctaatactgactgcctttcaaagcataattatgatg

SEQ ID NO: 510319 - DNA, 619 bp, Homo sapiens
acccatggctctccagtagcataggccacgctgccagaagcccctccaaacactcacccagacttgactgtggtccccagatacacccaacatactctctgggcaccatcagagaaaactcagacccagtacctgccatgaaagaacttgagatggaagagggagaaaaacttatacaaaaacctttgatatggcccataaaatctcatcagagcctctactttactgagcactggcctaatcccattcccacatggtccataaacasttttgtgtcccttaccccactgggcctgtcgccctgctgtcctgccctgatgcagctggaggctggggggctccagccttctcctgaggattcctgtctaaatgctcagctgctctggaattcacaggagcccagggcatggggcccacctggtctcctgcttccttcaggttgttgcagagcccctgtcctccctcgccttctctacccctttgctccccctgcctcgcctgcagctgtccatgagctctgctcagcaagtcccagctgacctggatctttcctttttttccagctaaacagatatctgccttgctaatactgactgcctttcaaagcataattatgatg

SEQ ID NO: 510320 - DNA, 548 bp, Homo sapiens
tggctgggcaacctggggcaagtcattcagcctctttgggcttttgctttcctatgtgccacgtagcgggagagggcattccagttccctacccaacctactgtccaaagcttttgtctccaactctctcatgccaaggcacagccctgactctgccagccccctgatcagggcctccccaggcaacaataggaccatgcccatcaccgggtacaaactttgtggagktgttgtggacagggagtgccaggcctgggtttccctggagagacaccgacgtgcaggtaccacacattttgactcctgtcttctaagtcgtaacactgcagctcccaggatttgccaattcagcccggctgcccccaccacgctactgattacagaacggtctagagaccaagatgaacctcctgggacttaggaagcaggactgtgaattcccttcatgccctgactctcctgtacctgtgtcccaatgtcaagtctgagaaccacagaaacctaggaagtcagggctttagaggaaagctcgtgattttagcctcctc

SEQ ID NO: 510321 - DNA, 450 bp, Homo sapiens
gggtggtggcgcagccaggggtggcttgagttggccttacacccaatcacttccatcatccatcccaaataaaaatacactaagaaaaaagaacactcactagcaaacatcagctcaagacaatcaccagactcttacaccccccaccgccagctttctacctgagtctttctttcctctgtagagactggcccctggtctaggaagatctttccctccattctctgactatttacactatttatgtatttgcctctgctgaaaaaaaaaatcatctttcttttctaagtaatgattgccagcgctaagctgggagctagtgacagggaagatgacttcattgactttgtccttgaggagaacgtggcaaaggagaatgacaagtatacacgtacaattaaatagayattcatcttaaaatgtatttaatttaatttttttatttttttt

SEQ ID NO: 510322 - DNA, 556 bp, Homo sapiens
tctatgttgcccaagttggtctcaaactcctgagckcaagtgatcctcccacctcagcctcccaaagtgctaggattacaggcatgaaccaccaagcctggccttaaaatgtattttagcaagtacatactgtgtgtcaggcatcattacaggtgttggaccacagcagagaacaacagaaaagtttaaagaaccctgacaggtttatagtatttacccattgatagggcttatagtatttacccattgttgcaggttaggctctccaaggaaatgggctctgagattggggtttagtgcacaggatgtttctctttttaaaatttcttttaaaattattattaatttttttttggtagagacaaggcctcactatgttgcccaggttggtcttgaacttctgggcttaagctatcctcctgccttggccttccaaagtgctgggattataagcatgagccaccacaccgggcctgcagaatgtttcttaggcagtgctcttgggaatatctttggagaggaggggaaagccagattgggcagaggggaaagtcca

SEQ ID NO: 510323 - DNA, 516 bp, Homo sapiens
atccctacttaattttattgtgtagagttcgtatgtgtgaatagcatatatgaacacacacacacaatcactcatgtataaatgttgagtcccatacaagaaaatattgccctagcttggaaatacaagataaatatgacataatacatttctctcaagaattttacacataatttagtctgagagatattttattctacacagtgtaggaagtgatataccacaaaaaagtgagaaataaaatgccataggatttcacagaggggtagagttcagatcacgtccatatgagaatatcatgcctaaaacttaagagcctaacaacaatcaccattaatttgctcaaaattctgcaatttcagtaaggctaaataggggtagcttgtctctgcttcaagtcgtgcttactaggattgtttgactaaaactggagratccaagatttctttactcacatgtctggcatcttacctgggttggctgggtctttctctgttgcccttcatggtctctcat

SEQ ID NO: 510324 - DNA, 644 bp, Homo sapiens
tgggcaccaatgctgacataccaaaaggaaattgaatccacctgtgtgaagaatgcctccttaaaagctgagtggatccctttagcttggggtactgcaatgccaactaaaacattagtttataatgtataaaccaacactgtgaaagtagttatttctattttattgtaaagttgactaaatcagattctaggtagtcaagaaaatatggaaaatccaaataaaaacactcaaaatgtgtcattgttttctctctcatcagtgatatagtaataaaactggcatcctgggttgggaattctactcctctgtacatctgctttccagtggacgttggtctccttaggatatcttataacccttgaagaagaaccttcatcccaagctcaaaaaaagcctaaaagtaattcacttaccccaatctcttacccaacyggatgtttacacaggaaatctctgattcattcataagacctaaactaaaattacgacgtccagattgcaatagacaaagaaggacaaagtctatctattttctacttttctcagcttggttccaagtcagcatacctcaggatatattttctactaacagatacaaagtagttactcatcttgcatagtggtttctttgacttaactcc

SEQ ID NO: 510325 - DNA, 587 bp, Homo sapiens
gtgtcaagtcttggtagaccaaagaaaaagtatgcctagactattttgtgaaaattcagatatctctaattactgtaaatccagattcatgtgccagcaaacatttgttgctaaaattgtttaaaattcacttccatcaccttcttcatgaaagcagagaccaacttgactatcattgtttatgctgccctttgaaaacwtttctgtgatcaaagatgacaaaagcaatgcaacagcctacttctctgggaaaagctagccccagtgcctaagggaaaacattcactaactcttttcatatgaaaatcagtctttgttcagagaaggaggggaacaagcagagacttttactgggacaagtaaatcaagccttcagcaactcaaggaacaaacatacaagacaagctcaactcctcgttaagaccaaattaggacaacactacaagaaaataaattgttttatctggttgtggtgctttggggatagttaattgactactcaaataacaactttgatagtatatgaactgtgactgtgttagtaggttttaattagcaggaactttttgtaaattggacaaaaactt

SEQ ID NO: 510326 - DNA, 587 bp, Homo sapiens
gtgtcaagtcttggtagaccaaagaaaaagtatgcctagactattttgtgaaaattcagatatctctaattactgtaaatccagattcatgtgccagcaaacatttgttgctaaaattgtttaaaattcacttccatcaccttcttcatgaaagcagagaccaacttgactatcattgtttatgctgccctttgaaaacttttctgtgatcaaagatgacaaaagcaatgcaacagcctacttctctgggaaaagctagccccagtgcctaagggaaaacattcactaactcttttcatatgaaaatcagtctttgttcagagaaggaggggaacaagcagagacttttactgggacaagtaaatcaagccttcagcaactcaaggaacaaacatacaagacaagctcaactcctcgttaagaccaaattaggayaacactacaagaaaataaattgttttatctggttgtggtgctttggggatagttaattgactactcaaataacaactttgatagtatatgaactgtgactgtgttagtaggttttaattagcaggaactttttgtaaattggacaaaaactt

SEQ ID NO: 510327 - DNA, 628 bp, Homo sapiens
agaacaagaactaaattaaattatcttgacatccctcatacaacaacattgtctggtgaatgataatcactctagaaataccatgaaaatgaagttaagaatggaaataccacaaactcaatcaatcawatgagttattatttctgagctacctggaaaaattctactctaacacatttataaatcacattttttacttatgtgaaaccatgttactttttaaaaattatacccattatatctgaggttcaatttaaagaccttttgtttaattatctgttttgaaaattagatgaactgattattttgattttttaaataagtggatgatttccagaatcatatgctagtctatattttccaacagagcatattggccaaaataaaatttttctttgattctgaaacttatactatcccagcaacaccataattttgtcacttatatgatgcttttgtcacttatacaatatttgaagaaggttttggattttaggtcggatctctactaaccctggaattctttaaaaatgaatactttggcctggcatggtgtctcacacctgttatcccagaaatttgagaggctgaggcagaaggatcacttaaggctaggagtttgagacca

SEQ ID NO: 510328 - DNA, 627 bp, Homo sapiens
aataaatagttgctgagtgactgaatgtttgaaaacatctcctgctagtaagagcaagttgacagttaaccttaacagatgctattaatctggaaataacatttttttcctgcttgcctactgacacttaaactatttcctgggaccagacaggaaagacaatgayatctcttgttttattactataagagaatgattgactaaaaaatagtagctttgtacttcataagtccaagtgccatcatattcactggttgcttttaatcagttactctgagctgcgttcttattcaaagaatattaaagcaggaagaacctcagagatttgctaatccaatttgtgacaaagccaagactggaaaccagatctcactgttctactcattgtgacactatggtcccaccttttcatttacaaatgcataacacgcactgaagcattaaatccctcaccccaaatccccatactgcaagtcaagacagagtcagggctggaaaaccagcacatgaagttgtagttctagtaggaatcaaagaaactcagctctctgagtttttcccatgatttctatgaatagtaaatgaacacatattctgtatatggtgcccatcccatgatgaaataga

SEQ ID NO: 510329 - DNA, 639 bp, Homo sapiens
ataccctgccaccacacatgcacagacttccccactatcaatattcagaatcagagtggtacgtttgttgcaatagatgaaactacattgacatatcatttttctttacttttaaagtgtacagtgccattgagcacttttggtcagacttctaactcagcctatggcaatgaaatccaactctattagtaatattttatatcccaaattatttaacgttattgcttatctttattaaaatcaaatgatcaattagcagcaaacatctaataatgttaaagcctaatgttcaggtagttcagattcattttttatcagatrtcattgatacatcctgaagggtcatctcagatccagaaaatcagaagtttcttatcttgcattactaggaaaagaatgtgacatggctgtttatactgtctgggatttgtgactttgtcatacgcttggcaatctccaaaaccaaaatttcattttgtctttgaaacattttgctttttggctactgtgaccataaaatattttctccaagaaacatcaaatcctgcacaatttaaaacataaataggctatttagggtcctgctgttttacaaagaaaaggccatttatatttcagtgacctctatgttaatgcagc

SEQ ID NO: 510330 - DNA, 563 bp, Homo sapiens
ggtgtggtggctcgtgcctgtaatcctagcactttgggaggccaaggcgggcagaacatgaggtcaggagttcacgaccagtctagccaacatgatgaagacccgtctcgactaaagatacaaaaaattagccaggcgtggtggcatgcacctctaatcccagctactggggaggctgaggcaggagaatcacttgaaccygggaggtgaaggttgcagtgagccaagatcgcgccattgtactccaccctgggagacagggttagactctgtctcaaataaataaataaataaataaataaaagaaaaagaatttctgaataagttgattcagattaattaatattttttaggattagagagatatttgccaagatttattgctaagtcaactactttcacagctatttagaaaatgtctttaatccataggtgtttgtaacatttcctaagaaacgtgatatatttgaattttaaaagatgcttatatatgtttccaccaagactggctagaaatgtctattttatcactttcattctacacccatttattttgactttcc

SEQ ID NO: 510331 - DNA, 641 bp, Homo sapiens
agcctggaactcctgggtgcaaacaatcctcctacctcatcctcccgagtagctggggccacaggtgggagcaaccaccaagtccaactaattttttyttctttttgtagagatgggatttcaccatctttcccaggctgctctccatctcctgggctcaagtgatcatatagcctcaacctcctaaagtgctgagattataggaataagccaccatgcacggctcatatctgagtttccttccaagtctcagtagaaaacatccaagagaaaaggtttaccaaacccatttaattaggttataaaataaaaataaattttgcatatctaaaattatgaatatgaaccctataattttataactgataattattacaagttattaaattctttaataattacatgttttatggtagcaaatatgttctaaaattaattctagaacaaggattatatttggttatgagaataaaagataggttttattctcataaaaaagatcaaaaaaggaatctgttttattctcacaaaacagataaaaaaaaagatctgtttttgagtttagcctaagaaatcttaaactgcaagggcttatgaggaaaaaaaatgaatctgtggtaaaacaaaaaactggtcacata

SEQ ID NO: 510332 - DNA, 597 bp, Homo sapiens
tggttgagtcagaacgtcagaattcatgcacatcctatgtagaggggtggatatggggtgagagctcagagcccttataaacctctgagaattaatttgacaacaggtctctcataggccaattcctcagctctctagtcaaagcactgaaagatgggagggcatgacccatgggtttcttatccaaagcaagtcaagattccccatctgtgaaacaaaggttaggctaaagttycgagttcctctaaaattccatacactttttgaaatcttgtgattccaattaactagtattttgttctttacctaacttctaattcatcaaaaacttcatgcttttggaattggtacttaataaaataactatagtatcttcatatttactaaataagcatttcatcaaagtaacagttcttgagtgttgactttgtgaaaagcaccggtgttcccaccaacaccagaaaaggataagacatgatccctgaccccagggaggagaggcagacacaaaggcaaataataaaagccacagtgaaatatgtgccctgtgcaaatgcaataagaatacatctgagatcagaaaagtatgaacaaagt

SEQ ID NO: 510333 - DNA, 591 bp, Homo sapiens
agtctccctcagagaaataaagatgatgaggatgaagatgatgattaaaaaaactaattgtgacatcttattgtatgccagtcayttacatgaataaactcatttaatccccatgacaatcctttgaactgtttgtcccgctttacagatgtgtctttacttctttgaggcatacagaaatttagttaatttgcccaaaggcacagaaatgttaagtggtagaaccaggatttcaaccccagcagtgtgacttcagagcccagactaattttacaggaagtgtggggtaagagtagacccaaaataactatagttaaatgataagcatcattgttgaggtataaaaaaaagaattgcctgtacaagcaaaaggatgaaaggaatttttacaaatgtttacaaaacttcatctcaagcttccagcacataatagccctgtaatctcacccatatttctgttctactttgtcccaatctcccctccacttctctctcttgtttttcatacttccctgcattgcaaccaatttttgctcattctcaacttcagtttcaaaagttctataaacaacggcacttatggaatcccat

SEQ ID NO: 510334 - DNA, 579 bp, Homo sapiens
tttttcaatgagctctggttcctggaagtagggaatggtatttggagaccaaaatctaggtgtgtaaagctaattattgttactggattggtcattgtttcttggcygttacagtgaacagagctaaaaaatacatatttccttttaaagagaaaatgaagcatgagtttatgcctatgcttccattaaaaatttagaattatttttatttatagtgccttttctcttattctgaaacacttatttcccaatgacactaatataattacagatacacactgtgctattacatgactgtgatcatttcagagaataagactgatattgaatctattaatataattactaaatcaatgaaaaaattttggggagtattcttttgtttttagaatgtcttttgtctaaggatagatagtcaaatttctgtgttttaaggtcacttgaaatgattcttttctatgtgattaattctgttgtcagacttttggatttgacagataggaaatgatatctcagcatagttttaattgtatttctgtgttcgtatgtttaagggtcactgacatttcttttatgcat

SEQ ID NO: 510335 - DNA, 579 bp, Homo sapiens
tttttcaatgagctctggttcctggaagtagggaatggtatttggagaccaaaatctaggtgtgtaaagctaattattgttactggattggtcattgtttcttggctgttacagtgaacagagctaaaaaatacatatttccttttaaagagaaaatgaagcatgagtttatgcctatgcttccattaaaaatttagaattatttttatttatagtgccttttctcttattctgaaacasttatttcccaatgacactaatataattacagatacacactgtgctattacatgactgtgatcatttcagagaataagactgatattgaatctattaatataattactaaatcaatgaaaaaattttggggagtattcttttgtttttagaatgtcttttgtctaaggatagatagtcaaatttctgtgttttaaggtcacttgaaatgattcttttctatgtgattaattctgttgtcagacttttggatttgacagataggaaatgatatctcagcatagttttaattgtatttctgtgttcgtatgtttaagggtcactgacatttcttttatgcat

SEQ ID NO: 510336 - DNA, 583 bp, Homo sapiens
ctggtttttcaatgagctctggttcctggaagtagggaatggtatttggagaccaaaatctaggtgtgtaaagctaattattgttactggattggtcattgtttcttggctgttacagtgaacagagctaaaaaatacatatttccttttaaagagaaaatgaagcatgagtttatgcctatgcttccattaaaaatttagaattatttttatttatagtgccttttctcttattctgaaacacttatttcccaatgacactaatataattacagatacacactgtgctattacatgactgtgatcatttcagagaataagactgatattgaatctattaatataattactaaatcaatgaaaaaattttggggagtattsttttgtttttagaatgtcttttgtctaaggatagatagtcaaatttctgtgttttaaggtcacttgaaatgattcttttctatgtgattaattctgttgtcagacttttggatttgacagataggaaatgatatctcagcatagttttaattgtatttctgtgttcgtatgtttaagggtcactgacatttcttttatgcat

SEQ ID NO: 510337 - DNA, 652 bp, Homo sapiens
gggcctcttcagtataatatggaggtattaagggggaatggcttttatttgttattttgagagtttcaaagactatttgctgaataaatgtagtgaacaaatggacacgagcggaatgaaaacctgcactccgtgactgtcaacactctgcctcgatggatgtacttgctctgctcttgttatagaaccctcatttagtgctcttcatgctctgccagaatgtcaggtcaaaattatttcttctcctcattctgccatcttatacatatttctacaacaaatatkaaagcacattacaggctaaaagcactctaaaatataatatgttattagaaattgggccataatattgtccaagaatatcaggcctggaaattctcagttccttgagaactttctctagagagaaaattcctattttctgccataggtaactaatgaaaaaaattcactaccaaatgctttggatgaaaaatgttaaaaaaaatacactctcactttgaaaaagtggggaaaatgcaggtgggagaaggaaaccaaacacaaagttttggtttttgttgatgtgaatacaggaataccaagtagttgcatttttgactgctacaacttttatcatcaaaacaattccaaaaccactatgttgtctcat

SEQ ID NO: 510338 - DNA, 582 bp, Homo sapiens
tttgcccttcctctgcctttttgttctattcaggccctccaaggattggatgatgccctccctcattgatcttgtttactgtgtactcattcaaatgctaatttcttctagaaacatcctaacagatacacccaaaaagaatactttccaggtatctgggcatcccttagcccagtcacattgacacataaaattaaccatgacatatgagaatggtatgatctggttgctgtaggcaaarttgttggggggcatgtctggaagaggactgttctgtgcgggactgccagagcttcagcccagctaagaggtgagagtgccctggaccagaggtgtcagaggagcccaagagatgtggacagcttaaagattcattttggagataagagattgctttcctcatctcccatgtttagtctgcttatacctatttttattttgttagctcttaagtcacttcctcaaggcctgcaaaatctgttgttggcagttgtcgctcactgcaatttttatgaataattttccccagtactgtgccagattttcagcattcattcaatggacggtagctatggcaaactc

SEQ ID NO: 510339 - DNA, 582 bp, Homo sapiens
tttgcccttcctctgcctttttgttctattcaggccctccaaggattggatgatgccctccctcattgatcttgtttactgtgtactcattcaaatgctaatttcttctagaaacatcctaacagatacacccaaaaagaatactttccaggtatctgggcatcccttagcccagtcacattgacacataaaattaaccatgacatatgagaatggtatgatctggttgctgtaggcaaagttgttggggggcatgtctggaagaggactgttctgtgcgggactgccagagcttcagcccagctaagaggtgagagtgccctggaccagaggtgkcagaggagcccaagagatgtggacagcttaaagattcattttggagataagagattgctttcctcatctcccatgtttagtctgcttatacctatttttattttgttagctcttaagtcacttcctcaaggcctgcaaaatctgttgttggcagttgtcgctcactgcaatttttatgaataattttccccagtactgtgccagattttcagcattcattcaatggacggtagctatggcaaactc

SEQ ID NO: 510340 - DNA, 612 bp, Homo sapiens
aatcccattctgaatgtcattgctgcttcagtcactggtctggagaaacacagcctaccctacaattataagctattccctctactcaacccattactatcagtttcatgtgaatctctggttggggttcttctggaagagggctgagaaattagctggaagaaaggaatctagatttagtatccacttagctctcatcctgttatcagggtgaggttaacaaactcaggatataggttcattgcccatttgttgtatattatatctaggccttatccataatcataatcagtcatcttaaatgtgtttcttaaatctcaaatgtcataaaaggcaatgtggaaataacatgagtttggaggtctcccatcaaatggaatcaagrctctactgcttattggataaattagccaccctctgaatatgtttccttattaatactcagttatatcaaatttatatattcatgttatttttcttaaaaaagacagaaaatttgaattgaaacaaatgatcaacagtgatggaacaatgacaataaaaggaagtagaaaagataatcaactgctgtgtggatatttgccattcttttgtccatccaatctgagtttc

SEQ ID NO: 510341 - DNA, 329 bp, Homo sapiens
gtaaagaaaaccagccacacaaaaaagaaaacaaactttaaccaattaaaatgytgttactcataaatcagccttgtgtagaaaatgttgtaatcctgttatatgtctttgttttcttcctatgtaagcacaactttaacttttagctttggagcacttatcccatttctctggagtccctgtaacctgggtggctattcccagatttttacttgaataaactcattaaaactggattctgattatttcaattatttcagattgacaagtggtcatagaatttcatattcatataagacctatccaaattccatacaaataattttagg

SEQ ID NO: 510342 - DNA, 570 bp, Homo sapiens
ctgtcctctgaatgcttcttgtgctcatgtgtctccacatccttgctcatatttctctgcctagagacttaccctttctgtctatattttcctttgttccatttcacacatccctcttgccactacctgctcacatttttaactaaagaacttattttcattattcaaggcccagctcaaagtttgtctctactaagcattttctctcattttcctctcttttctcaatttacataaaacgttccctcctctcattattgttccattcacatgtttattctagtgcattgtgccaccaatagtctttttctattatgtttttgtttctaatttgagctctgtgaaaaacagagctagattattttccatattttttcttccagtgcctaatttagtgcttagttaatattaaaaatcagataattattaatgagttaaagttgttttgctaaatagtaacagaaataatgttttattatcagaaagataacaactaaaaagatggattgatagatacctgaaattcatggatttatataagtggacrtattacattaatagctttaacca

SEQ ID NO: 510343 - DNA, 646 bp, Homo sapiens
agaagccagtccacaccctgtgtggaaagacaaatcctcagataagaccttatatttacaaaattctcacagtgaaagctcagatgaacactatattcgtccattttcccatttctataaaaaactgccagagattgggtaatttataaagaaaakgagtttaattgattaacagctccacatagctggagaggcctcagaaatcttacaatcatggcagaaggcaaaggggaagcaaggcatgtcttacctggcagcaggagacagagagagtgaggtgggaagtgccacactttaacaccatcagatctcatgagaacttactcactattacaagaacagcaagggggaaatctgctcccacaatccaatcacctcccatcaggcctctcctaagacacatggggattataatttaaaatgggatttgagtgggcacacagtgccaaatcatatcatcctcccccttacccttctcaaatctcatgtcatttgcacatttcaaaattaatcatgtcttccccacagtgtcccaaagtattaactcattctagcattaacttaaaaagtccaactccaaagtctcatctgatacaagacaagccccttccatccatgaaacctgtaaaatcaaaaaacaagttag

SEQ ID NO: 510344 - DNA, 653 bp, Homo sapiens
ttttggatacttcaatctattgtgtaaataattaattagtatgggtgtaattgtacttagcctttgttttttcctaaaatttttttctatgcaatgactatttttaagtgtagtctgaacgcatgagaatctttagttctaacaagtttaaaaaacatttaaagaaaattgttcacaaaaaaatgcacattccatagattatccctcaattctgcttctaccaccaaccacacattctcctcttccgctttgagcaataaaatatttataccccattatactgcatcttctttacaactgtccatattgttaaagtaatattattccttatataaactggttttcattgtgtgtttgttatattattctatttacaaaagaagtgttcgaatttcttaggctgagatgtaatgcatcctatttcttgtcaaacttactgaaaataatttttccattcattggaattttaattacaggcatasgtttcagcagcaactgagaaggcctggaggaataggcattaacatgaggcaaagaaggagtttttgtttgtttctaggtgaaagtaattgtctaaacaactggagtgaaacaaatgattgtgaaccccggagaaaagttctgcctatagatcctgagttggaagacaaaag

SEQ ID NO: 510345 - DNA, 644 bp, Homo sapiens
tatccagactgactctcttgctgaaaccaaggaaaaaccctgagtagcatgagagyaatgcttcttctgatagtgttgatgccctagcaggaaagaggctgtggtctaaaatttaagtaaaggtacctacatagataggcacacagaggactgagacgaccttggttcgaaggttctttgctgaacaagatggccttgggatttgattttcatgaacacacaggcatgggggactgggacaaaatccttcagccataaaactgggatttcaaagggcacatccgtgatgtgaagatgaaccagatgtaagtccatcagtatgagtacatggaggcagtccagagtggaatatggctcagattcacggattgtccaagttcctatatctggttgttctgccatcactagagtggcactttttgcacattccaggatgtcatcacaaacatattaagtggcaagcggggggatgaagagaggaaagggtctgctctttaagaacaagactaagagcttgcacacatcactttcacttacattccattagccagatcttagcacaaagtgttgagaaacgcagcttttttctggaggagcatggaccttactaaaaattagggcttttacttcttttttaaagaaca

SEQ ID NO: 510346 - DNA, 644 bp, Homo sapiens
tatccagactgactctcttgctgaaaccaaggaaaaaccctgagtagcatgagagcaatgcttcttctgatagtgttgatgccctagcaggaaagaggctgtggtctaaaatttaagtaaaggtacctacatagataggcacacagaggactgagacgaccttggttcgaaggttctttgctgaacaagatggccttgggatttgattttcatgaacacacaggcatgggggactgggacaaaatccttcagccataaaactgggatttcaaagggcacatccgtgatgtgaagatgaaccagatgtaagtccatcagtatgagtacatggaggcagtccagagtggaatatggctcagattcacggattgtccaagttcctatatctggttgttctgccatcactagagtggcactttttgcacattccaggatgtcaycacaaacatattaagtggcaagcggggggatgaagagaggaaagggtctgctctttaagaacaagactaagagcttgcacacatcactttcacttacattccattagccagatcttagcacaaagtgttgagaaacgcagcttttttctggaggagcatggaccttactaaaaattagggcttttacttcttttttaaagaaca

SEQ ID NO: 510347 - DNA, 626 bp, Homo sapiens
tgcacaatgaatgctccacagtgtagggattcgactgaaagaaacaccagggaactttttatgggggtggaagtgttctatatcttgttacttggatatacacaattgtcaatactctttgaataactgaacatctaaaacctgtacttttcattgtgtgttaatcacatctcaatttttttttttttttttgagacagtcttgctctgtcacccaggctggagtgcagtggcacaatctcggctcactgcaacctctacctgccgggttcaagtgattctcctgcctcagcctcccgagtatctgggatcacaggcacgcaccaccatacccaactaatttttttgtatttttagtaaagacggggtttcaccaygttggtcaggctaggttcaaactcctgaccttgtgatcctcctgtctcggcctcccaaagttctgggattacaggcgtgagccaccgcgcctggccacatctcaattttttaagattctatttaaatgacctaaaatgcagtttcaggtaactctgcttctctggtagtcttcaaagttgatatatcgaaatttctactttgaaacagaaaacaaaaataatattttaatgtcaacagtgtctttgacac

SEQ ID NO: 510348 - DNA, 601 bp, Homo sapiens
ggcgatgctctggctctctgaatcagtgtatgcctttcctgccatagacccaccaggagcagcacatgttatgaccttggcctccactccyctaccccataaataatcttagctgagagagctgaggctacagaggtaaaatgggtttatagaaaaaaatcaggagtaaaattatgagcatatttggcattaaaaaaataatcatccaactagagaacataatctggatggaccagatttatgaaagcagaactatcaataattaaaaagaagcataataaatatctttaaagaggtaattcagaatattggtaagaagaagcagacaagaacagttactaaaaagaactaagtgaaaatattgggggctgggtatagtggctcatgcctgtaataccagtactttgggaggctgaggcaggcagatcacctgaggtcaggagttcaagaccagcctagccaacacgctgaaaccccatctctattgaaaaaagaaaaatacaaaaattagccgggcatggtggcaggcacctgtaatcccagctacttaggaggctgaggcaggacagtcacttgaacctgggagacagaggttgcagtg

SEQ ID NO: 510349 - DNA, 601 bp, Homo sapiens
ggcgatgctctggctctctgaatcagtgtatgcctttcctgccatagacccaccaggagcagcacatgttatgaccttggcctccactcctctaccccataaataatcttagctgagagagctgaggctacagaggtaaaatgggtttatagaaaaaaatcaggagtaaaattatgagcatatttggcattaaaaaaataatcatccaactagagaacataatctggatggaccagatttatgaaagcagaactatcaataattaaaaagaagcataataaatatctttaaagaggtaattcagaatattggtaagaagaagcagacaagaacagttactaaaaagaactaagtgaaaataytgggggctgggtatagtggctcatgcctgtaataccagtactttgggaggctgaggcaggcagatcacctgaggtcaggagttcaagaccagcctagccaacacgctgaaaccccatctctattgaaaaaagaaaaatacaaaaattagccgggcatggtggcaggcacctgtaatcccagctacttaggaggctgaggcaggacagtcacttgaacctgggagacagaggttgcagtg

SEQ ID NO: 510350 - DNA, 601 bp, Homo sapiens
ggcgatgctctggctctctgaatcagtgtatgcctttcctgccatagacccaccaggagcagcacatgttatgaccttggcctccactcctctaccccataaataatcttagctgagagagctgaggctacagaggtaaaatgggtttatagaaaaaaatcaggagtaaaattatgagcatatttggcattaaaaaaataatcatccaactagagaacataatctggatggaccagatttatgaaagcagaactatcaataattaaaaagaagcataataaatatctttaaagaggtaattcagaatattggtaagaagaagcagacaagaacagttactaaaaagaactaagtgaaaatattgggggctgggtatagtggctcatgcctgtaataccagtactttgggaggctgaggcaggcagatcacctgaggtcaggagttcaagaccagcctagccaacacgctgaaaccccatctctattgaaaaaagaaaaatacaaaaattagccgggcatggtggcaggcrcctgtaatcccagctacttaggaggctgaggcaggacagtcacttgaacctgggagacagaggttgcagtg

SEQ ID NO: 510351 - DNA, 633 bp, Homo sapiens
ccatatgcgtgaaattatatatttcggggtagtgtgagcttttaatgttaagtcatattaaactcttaagtcaaattaagcagacccggccttggcagtgtagccataactttctgatgttagtaaaaacataattggtgacttgaaattaaatcatgccaaggttttgatacacttgtcttaagatgttaatgaaacatttcaaaacactgatgtgaagtgtccagattctcagatgtttgttgtgtgaattttgtttagttgtgatttttttttttcagtgaatgtctggcacattgcaatcctcaaacgtggttatcttgttgtattggcataattagtgacttgtaccttcagcaacagcatttgagcaagtttttatcagcaagcaatattttcagttaataaggtttcaaaaatcatgtaagaatttaaacttgctgaatgtaaagattgaacctcaagtcactgtkgctttagtaattgcttattgtattagcttagatgctagaactgcatgtgctgtgcatattctgattacattaaaataaaaaattggcttggttccaagatggccgcatagaaacagctccagtctacagctcccagggtgagtgacgcagaagatgggtg

SEQ ID NO: 510352 - DNA, 639 bp, Homo sapiens
ccctgttacagaaggccagggtgatgttctggcatgatggtgagatgatcaaggctcctagaatctctattgtgatacagaactgaaaattgccataacagacatcaaagagtaacagtggattcctgattttttttttcgtgtgagagcaacttttttctgggttctctgcatattggtattgaaaaaacaaagacaaaaattataaagcttatgagtagctgcacacagttgctaggagctacagttgctgttgtcacttgatttaccttgccataatctgtcatcttccaagatgcttccrtattcttcacagatcagttggtgagttgagatgaaaatgtgacaaaaagcaccatccttgcaactttcaagtctttgatggtaacaatgaccttgacaatttcacccatttgcaaagaaactttagatttactattctggaggaaaataacagttccacgggttcttatttggatatttctaacataataggccttcctccgtggatcagggagccaggcatttctttctagccatgcacacagttaactgggaaggatagccttggagttctactctcctcataaggtagactccaggaaaaacaacatttctcagatagcctccgtagcaaag

SEQ ID NO: 510353 - DNA, 590 bp, Homo sapiens
cacaggcttcaaggcactagttaggcagggrgaacattgcaatcaaataataatgacattacttttcagtcattctcacattcctgctgacttatgccagcttaaatccccatttgtgtttgtagcacacatatttatactaaggtggtgcaaggtgatgtgacaaacaaaccctaaattatataatggcttagacataataaagcttaatatgggtgttcatgattgccacttagtgactcagaaactcaggcttcttctgccttatggctctgccatcttcaaaacagcttccaaaaggatgctttgctcatcggagccaatccagaggaaggagggaacaccaggaaagagcatccattgcaggtttttatgagccaagcctggaagtggcacatattccttctgttcacattctgatgagtagaagtcaggtccatggctttgtctaactggctaagaaatgtcacctaggtgtgggccaaggatgaagagacaggttaggtgaatagttagccataacatccgtgaacatcaaattcaagaaacaaaaagagaggggggacaaagtactacttgacatgtgtttg

SEQ ID NO: 510354 - DNA, 633 bp, Homo sapiens
caaaacaatcccataagctgcctctgataagcatagtccaaggctggctgaacagccaacagcccatgtatcagacctgaaaacagccctgtgggccactcctgcggaacatatcccagacaagtcaagcagccatgtgcctgcatattgggcctgagaaacagcccttcaggctgcccctcgtgggcatgcctctgaactggctgaacagcctcacacctgcattccagacctgaaaaaaaatgtaggctgcccctagcagacatgcacccaagcaagcttgagaagctatgtacccacatcccaggctcaagaaacaggcctgagaaacaaatctgtaggtagcacctctggtgggcacaccaccagactgaaaaagtggacctgtacctgtgtcccaggcctacaaagcagctccatggactaccacctacagaaatgtccccaagccagccaaacagtcttgwacccacatcttgagcctgagaagcagccccatgggccgcccccagcagacacacccccaggctggctgagcagcagtgtgcccatgtccaagatggtgaaacagtcccctgggccaccctcagtgtacttgcacccaagccagctgagaagccatcttattacatc

SEQ ID NO: 510355 - DNA, 465 bp, Homo sapiens
ataaattactaagatctgttttgggggctctcagtgcaggcagaggcttaaattaatttcactcttctgtttgtggaaaaagtaataaccattaattagttactttacaaaaactttactggtaatttaaaaatatttttaagtaactactctagaatttaccaacttaatattgccagattttaatatattggggttgcttcacacaagataaatctacacacttagaattaaaatatggcacartttccctgataaaatatggcatggttttattttgctataaaagtatccacagaaatccagtattatggatggaatgcagcttttgcaagctattttatcattgccattaccttttctttcagtaatattttatggaggcttatttggaaagctggggttgaggagtgttacaggccatagctggtactttcacaatagcaggcctggtgaattgagaat

SEQ ID NO: 510356 - DNA, 595 bp, Homo sapiens
tgtgttgtaatgcactgctcttgccaaaataaaatgaatctccatgcatgatatgacagttaaatagggagtaagtctgcagcaggaaacctgcagcgaatgagctctgtatcaaagtcactcccataggtaagtaagtggacacagttctaatgtgcagaagaagtctctgggctccaccagtgggtttctccatgacttgtttctagtgggctgccctgcacatagttaagtgtcgatgggttgacaaacagagagcactggatttgaatcctcttcataaaatgatcctatctcttagggtgaccgagataattaaacaatataacatagtgcctgctatatactgggagctcgacaaagagaaactgctattattattattaactgccaagatacctaacattgtcttattgtaaatcactttgaatcccttgtgaaaggaagcaaactagaaaaacattagtatatttcaggaagtgaaatttactagctatttttcaagaacacttgmaaatctcttgatacccaaaatactccctcacattcctgttccctgggctacaaatcagccccccgctccaacaattgatta

SEQ ID NO: 510357 - DNA, 595 bp, Homo sapiens
tgtgttgtaatgcactgctcttgccaaaataaaatgaatctccatgcatgatatgacagttaaatagggagtaagtctgcagcaggaaacctgcagcgaatgagctctgtatcaaagtcactcccataggtaagtaagtggacacagttctaatgtgcagaagaagtctctgggctccaccagtgggtttctccatgacttgtttctagtgggctgccctgcacatagttaagtgtcgatgggttgacaaacagagagcactggatttgaatcctcttcataaaatgatcctatctcttagggtgaccgagataattaaacaatataacatagtgcctgctatatactgggagctcgacaaagagaaactgctattattattattaactgccaagatacctaacattgtcttattgtaaatcactttgaatcccttgtgaaaggaagcaaactagaaaaacattagtatatttcaggaagtgaaatttactagctatttttcaagaacacttgaaaatctcttgatacccaaaatastccctcacattcctgttccctgggctacaaatcagccccccgctccaacaattgatta

SEQ ID NO: 510358 - DNA, 647 bp, Homo sapiens
ctggcccagagccagtaagcacatctgagtgtaaactgggatcatgatcatgaactcrggcaaacatcgttttgattagccctatagctgctcctcctccagcgtttcctaactcagtaagtggcactctcatgttttaaagttattcaggccgaaacttcactctttctatgtctctcactgtgtaaccagtacattagataatcctactgatattacctttaatatatatccatgcatcatacaaagattaataattaattgaaacaatgtcttattaatgaaactttggattgatttcaaatttttcccatcataaaaactgctggcgtaagcatctttaggaacactcctaattaccacaggataagttgttggaagtgaagggtgacctcagatataattatttgcaggcttttactacactacagagtcccagattctcttttagggtagttgtgccatatctgattccaccatcaatatagagacaacctttattataaagcttgcatttgcatagaaagattccagaggtggagttttatttattgagcttgaattgcaccagaaaaggtcaagtatactcagcagcatttcagatgttttgggggtggcaaatatgaaaaaatatgatggagataatt

SEQ ID NO: 510359 - DNA, 582 bp, Homo sapiens
tgtgcctggcccagagccagtaagcacatctgagtgtaaactgggatcatgatcatgaactcgggcaaacatcgttttgattagccctatagctgctcctcctccagcgtttcctaactcagtaagtggcactctcatgttttaaagttattcaggccgaaacttcactctttctatgtctctcactgtgtawccagtacattagataatcctactgatattacctttaatatatatccatgcatcatacaaagattaataattaattgaaacaatgtcttattaatgaaactttggattgatttcaaatttttcccatcataaaaactgctggcgtaagcatctttaggaacactcctaattaccacaggataagttgttggaagtgaagggtgacctcagatataattatttgcaggcttttactacactacagagtcccagattctcttttagggtagttgtgccatatctgattccaccatcaatatagagacaacctttattataaagcttgcatttgcatagaaagattccagaggtggagttttatttattgagcttgaattgcaccagaaaagg

SEQ ID NO: 510360 - DNA, 607 bp, Homo sapiens
ataacaaagtcagtcacttgaccttggtgagtctcaattttctcatatgtaaaatgactccacacatctgaggtgtgatgagaatcagttgtcagttgtcagatgccgtccacagtcctctgaagttcacarttggaaatataaacgagtgcttgcaattatgttcttcatccttcagagacttagtccttcatctgtaaaataatttctctactcctcagggtcgtggtgaagatgaagcagaatgatctctgaaaatcttctctaatggtgctagcatgcgctagttgctcaataagtattacttttctacccttcaaaaccttcctgtggcccagatgcctggtctggcatagagaggttagttagggaggtatgttgtttgaaccctgaggtgtcctcctacctttctatctgttaattttgtattaattttcaacacatattaaacttgggagtttccaataaaattctggtttcctgcttctcccttttaaatatgttaccaaaagcaatacatatacagaattataaaaagtcaaatagtagataagaattagaaatatcagtttcctaccttcccgtcctaagtcagattccccagaga

SEQ ID NO: 510361 - DNA, 607 bp, Homo sapiens
ataacaaagtcagtcacttgaccttggtgagtctcaattttctcatatgtaaaatgactccacacatctgaggtgtgatgagaatcagttgtcagttgtcagatgccgtccacagtcctctgaagttcacagttggaaatataaacgagtgcttgcaattatgttcttcatccttcagagacttagtccttcatctgtaaaataatttctctactcctcagggtcgtggtgaagatgaagcagaatgatctctgaaaatcttctctaatggtgctagcatgcgctagttgctcaataartattacttttctacccttcaaaaccttcctgtggcccagatgcctggtctggcatagagaggttagttagggaggtatgttgtttgaaccctgaggtgtcctcctacctttctatctgttaattttgtattaattttcaacacatattaaacttgggagtttccaataaaattctggtttcctgcttctcccttttaaatatgttaccaaaagcaatacatatacagaattataaaaagtcaaatagtagataagaattagaaatatcagtttcctaccttcccgtcctaagtcagattccccagaga

SEQ ID NO: 510362 - DNA, 607 bp, Homo sapiens
ataacaaagtcagtcacttgaccttggtgagtctcaattttctcatatgtaaaatgactccacacatctgaggtgtgatgagaatcagttgtcagttgtcagatgccgtccacagtcctctgaagttcacagttggaaatataaacgagtgcttgcaattatgttcttcatccttcagagacttagtccttcatctgtaaaataatttctctactcctcagggtcgtggtgaagatgaagcagaatgatctctgaaaatcttctctaatggtgctagcatgcgctagttgctcaataagtattacttttctacccttcaaaaccttcctgtggcccagatgcctgrtctggcatagagaggttagttagggaggtatgttgtttgaaccctgaggtgtcctcctacctttctatctgttaattttgtattaattttcaacacatattaaacttgggagtttccaataaaattctggtttcctgcttctcccttttaaatatgttaccaaaagcaatacatatacagaattataaaaagtcaaatagtagataagaattagaaatatcagtttcctaccttcccgtcctaagtcagattccccagaga

SEQ ID NO: 510363 - DNA, 607 bp, Homo sapiens
ataacaaagtcagtcacttgaccttggtgagtctcaattttctcatatgtaaaatgactccacacatctgaggtgtgatgagaatcagttgtcagttgtcagatgccgtccacagtcctctgaagttcacagttggaaatataaacgagtgcttgcaattatgttcttcatccttcagagacttagtccttcatctgtaaaataatttctctactcctcagggtcgtggtgaagatgaagcagaatgatctctgaaaatcttctctaatggtgctagcatgcgctagttgctcaataagtattacttttctacccttcaaaaccttcctgtggcccagatgcctggtctggyatagagaggttagttagggaggtatgttgtttgaaccctgaggtgtcctcctacctttctatctgttaattttgtattaattttcaacacatattaaacttgggagtttccaataaaattctggtttcctgcttctcccttttaaatatgttaccaaaagcaatacatatacagaattataaaaagtcaaatagtagataagaattagaaatatcagtttcctaccttcccgtcctaagtcagattccccagaga

SEQ ID NO: 510364 - DNA, 560 bp, Homo sapiens
acctgggtgtttatttgccatctccacaatagtagagagctaagggggcattgacttcctggcctgccccacgcatgaggagctgttgcactcctcaccaacaaagaccctcaggcagagagctacaggagcagtaggaagccatagggtctgtgtgcacctgaaggcaagtgctaaggggaaatgggtggagtacaggcaacacgtttttcaaagaccctacatgatctgacttccctcctaccccaggcacccctgcgacctcaccttctgcaactccccagcccctcacactccagccacataacctccttcttgcgtttctgagacacatcatgcacactcctacctcgaggcctttgccttgcagcccctttgccccaaatgctcttctgccagaaatctgcatttctcccgccttaccttcttcttttttgccgggggcagggatggagtctcrctcagtcacccaggctggagtgcagtgacgccatcttggctcactgcaacctctgcctccggggctcaaatgattctcctgcctcagcctcccgagcagc

SEQ ID NO: 510365 - DNA, 556 bp, Homo sapiens
gcgacatgcacatgtgtaaggggtgatgcagtgggtggcgcgggtgtgctggggtcacacacaccctgaacactgtagaggtcactgcaggctctgaccgagggatgctgagaagcaggagctgaggatcyctccctgtagacaggcagggcaccagctcaggactccccttcccaacccactcagtgatgggcaggtgggtagatgtggcgcaggcgggacagccgttgggtttgtagactggctgaccagctgaccggctgactgacaggcagctctgatgctcgactctctgacagctccaagggaattcacgaccaaggctgagctgacaggaaccacccagctgaatcgtggatcctaatcactaaggcgagggaacagaatcactaaacaaaacaagtgcggtcagagccgtcaggcgctcatcggccagagacaggaagatgcaggctccgctcctctgcagatgcaccccagtgtcgctgcgctgggggcaggagctgcgctgcgggagattcagcccctgcaaagggaaccaggtgatcagcatgcc

SEQ ID NO: 510366 - DNA, 556 bp, Homo sapiens
gcgacatgcacatgtgtaaggggtgatgcagtgggtggcgcgggtgtgctggggtcacacacaccctgaacactgtagaggtcactgcaggctctgaccgagggatgctgagaagcaggagctgaggatccctccctgtagacaggcagggcaccagctcaggactccccttcccaacccactcagtgatgggcaggtgggtagatgtggcgcaggcgggacagccgttgggtttgtagactggctgaccagctgaccggctgactgacaggcagctctgatgctcgactctctgacagctccaagggaattcacgaccaaggctgagctgacaggaaccacccagctgaatcgtggatcctaatcactaaggcgagggaacagaatcactaaacraaacaagtgcggtcagagccgtcaggcgctcatcggccagagacaggaagatgcaggctccgctcctctgcagatgcaccccagtgtcgctgcgctgggggcaggagctgcgctgcgggagattcagcccctgcaaagggaaccaggtgatcagcatgcc

SEQ ID NO: 510367 - DNA, 546 bp, Homo sapiens
agaaaccagatatgatagaccacacagtgtatgattacattgatatgaaatgtttagaaagggtagygctatagtgataaaaaggagatttgtagttgcctggggctgagggtgaaaatggggagtgattgaagtgggcacaaaagatttagtggcgggggcaatggaattatcctaaaattaggtcaggctaggtggctcatgcgtgtaatcccagcactttggcaggccaaggcaggagaatcacttgaggcaaggagttcaagactagcctgggcaacacagcaagaccctgtctctacagaaaaattggaaagttagccgggcacagtggcatgtgcctgtggtcccagctactggggaggctgaggtgggaggatcgcttgagcccaggagtttaaagctgcagtgaactctgacctgcactttagtctgggaaacacagcaccctacccctgcaacactgctaaaatacctgcttgggaggagtcagggtggaccccagaaagtccccatcaccttactcactgtgaggccccattggag

SEQ ID NO: 510368 - DNA, 520 bp, Homo sapiens
ctgccctgggctgtgcgggaggcttggctctgatgccaggtgactctcactgaagatgctcaggcagtgaatgggaacagaggtgggggaggtgtaggcacaggaggagggaaaagaagtccagccatgtggcatccctccccagcccccagccttcagtcctccttgggctcaatgcctggccctcggagcagtcccagcactccagacccgaggtaatcgtgaggcatctcatgcacagaytgtgacctccgcttcctcctcccccggtccctccaatgcattctgggccaggcagagtgggaacggggtcactccacacctgagacctgctctgggccctctgggctgtgactcacacggcaggtgaacagagccagattcatccccctcgggggtcctctggggaacaattggccactgtggagacgcaacccaacactggggctacctggggacgcaggacaagcatcggaaccgcctgcccctcctggaccctgcccaggcccccacataatgg

SEQ ID NO: 510369 - DNA, 520 bp, Homo sapiens
ctgccctgggctgtgcgggaggcttggctctgatgccaggtgactctcactgaagatgctcaggcagtgaatgggaacagaggtgggggaggtgtaggcacaggaggagggaaaagaagtccagccatgtggcatccctccccagcccccagccttcagtcctccttgggctcaatgcctggccctcggagcagtcccagcactccagacccgaggtaatcgtgaggcatctcatgcacagattgtgacctccgcttcctcctcycccggtccctccaatgcattctgggccaggcagagtgggaacggggtcactccacacctgagacctgctctgggccctctgggctgtgactcacacggcaggtgaacagagccagattcatccccctcgggggtcctctggggaacaattggccactgtggagacgcaacccaacactggggctacctggggacgcaggacaagcatcggaaccgcctgcccctcctggaccctgcccaggcccccacataatgg

SEQ ID NO: 510370 - DNA, 545 bp, Homo sapiens
atcatcataattaaaatttagggaggaggtagataaagttttttcattgtgacaaggaagtcaactcactagaatagagctcaattatgttccctatgcaaccccctgttaaactaaataaataatttgttttccaaagtttatgtagacgttaacacaccaagttcaagctaatctctgttgtaaagagaactcagaaaaattaaactatgcttaggctagactgcaaacatctttactttagcagttttaaaaattttatgcaatacttttcccagaggtgaaaccagagaaatgactcagattcatttgttgtaaccttttcctgccatttaatttcataacacatatttctgacacaaaacagagattattttcatcatttaccataaatgyttcattgatcttcatttagaacagccaaaaactcattagctgttttaccatactctatttccttccagtgttgttgagaatcctaatattttaaatggcaatgatatttgtagatgatggcaatagaaaacacatctaccactgtgggt

SEQ ID NO: 510371 - DNA, 556 bp, Homo sapiens
tgctagatctgccagaggctttaacttggacttacagcctccagaactgtgagaaataaatgtttgtaatttaagccagccaacctayggcaatttgttatattagcccaaactgactgagacaaggaaggaagagaaaaaatgaggaggaagaggactattaggaggagaaagacagaaagcaaagaattgttaacatttcatgagtgcctttcagatgagataactgagcctcaggaagattttcacccaataaatggcagaatttcaatctaaaactgattttaaaccttaatctatcttatccattctggataagaaaaggtggagggttgtgatgcttccaattttccctttagggtaagaagtgttcagatagagtaggaatatggaagactaaaggcttaaggagaatggaaattgtttcacatagttatagtggaaactgagaaagagccgactcaagaaagaaaaatatcaagggcccagaaagaattggaggttttaaagtttaaagtgacaccaatctgcacaggtaattattttctctagcaaa

SEQ ID NO: 510372 - DNA, 578 bp, Homo sapiens
caatagcttttaccttgaaactctagccattagatagcatcacaaactcatgaacatataaaagatatatgaacccaaattatttttgacaaaattgggacctgtccaaatggctacattttgtttgccccaatgggtaaatccaataaaagctatggaccacaattttgggtaaagcagttttcatggcagttcaattttttaaaatctttttaactcttctttctgttttaaatgagcttttaatgtttacattttagcttgaactggataaatgtatttaaaaaatccaaataaccttgaattagtagtactgtagtgagctttatctcaacaccagtagcttaataamtatatagcatattcaaagcaggcagaaaagaaaatgaagaaatagacatagagagcttcagaggactctatttaactctaaagttgcaggttaatcatttcagttctaaatttttcttactgtaatttgtcctttcgttttaaaacatgtgcaaaaagaaaaaaacctggcatgcctttgaatttgcccgtgtttttaaaccattaaataacaaacaaatggaaac

SEQ ID NO: 510373 - DNA, 675 bp, Homo sapiens
ggagtcacaaagctatatgctgctggatataaaactgtcggagaattaaacatttcatgtaaataaaataccaaaaattaggtactcaagcatattttaaaaatttatatcatgcagataaaaatatgttgaaaaggtctcttaagcagcatcccctgaagagaggtcagcatgttcctgatggatttagggttggtgacctttcttttcaccctggcctcccctyctgggagcccactccagtgtttttcccagatgtttctcctccgagggggttgagcatctgctcctagagtcctgtatggagagcaggtgcgatggtcgggggctcacctacagaagatgctgtgccatggtcttaggtatgcagagaaagctctgagaggttttaaaaatgtgtttcaccctttgtggttcacacccatgttacaggccatgttaaagagacatcaagttcacacccacattacaggctgatttaaagagacatgaaaagtttggcctttggatacacatcctgtagaagcaaaagtggttaaggtataaatgttgacaccaagacagcgtaaacacctagatttttatcttacacagcctcttacttttaaagactcaagattagacttagacttaggtatctggttgttaaagtgctcctaaacttgacaaggtcag

SEQ ID NO: 510374 - DNA, 539 bp, Homo sapiens
tctatttcttcatctttcaaatggaaatagacatgaaggcaacttcacaaagtagctgggagtaactcctaaggaatgatcataaagtacttggcacacatgaagggcagcttaaataccaattagtaattatgtagcgcctttctgccaaggagttccaaatgcttagacatyacctcagtgattctctgtacatctctctgagggaggcgttatgcattttacacataggtaaactgaggcatggacacctgagaactcatttgtcctatgttactctgcaagtcagcagatgatttatagagacaggcaaggattccagatattttcctgtttatcctgttgccgtttgtcaagtctgtgtaagtgttgggcccaggggattcttggttgatgtgatgaagcagtgttacataagaagcatgcttaatgctgcagtagcatcgctgaatagtacagaagtcaaagttataaggcctggcacagagtgggcatgcagttcatggacataggcatgtttgttgaatgagtattgaatt

SEQ ID NO: 510375 - DNA, 645 bp, Homo sapiens
gaaacacatttaacatttaccaaaatgtcttttaattcctttcttattatcttgttgcattgatgtcaggccacttagtggggttttctgcaaaacttgcttcctgttttagcactgcaaacatagctcacttcttgattgctatctattctttccaggtcattctgtcccactctgtagccaataaaaagggaagaatttccccmacctgctattcttataaagaaatcaaggacatagagcaaaatacttttaacaaaaaggcaaaattcttccacataagcccttcagggagtagctcttggagcagtaacattaaatgggaccagaacacaaaagcgcacaggctcatgtggccttaggaaatttctctgggaggaccaaaagtactagagttaacccgaatgtggaaaatggaaataggatagagtgagcttcgtggaattagagatacagtatataatggcagaaactaagggtgtttttgagagatgggaatgccaagaacacccgaaacacaattggatgatggattgatagaaaagtacaaatttatttaaaagcagcaaaaagcagataacaaaatcacatgacatgtagaattgtggcacgattaataaaacagtgttaggatttaaatcacct

SEQ ID NO: 510376 - DNA, 497 bp, Homo sapiens
aggatccttggtgtgggggaaacagaataaactcagaagcttggcagatctcaattcaaaccccggttgtacggcctccagcaggccttggtcagggaatagtatctagctaaagttcattgacttcattttgttttcattgaatttatgttttgctggctttccatttatgagagtgatacaaatttcctttaaacatgaagttgtaaatataaacaggtaggccattcacaggaatgkctgaattatgtcacaggaaaggtggcactctcatatggcaataattatgacagaggccggcaaatgacctgcgtgacccggagtggcctgagcactgactcccaaatgccctccataggatgttctgcatccccgagaccctttcctgggtcctcctgggccctaccaccccctagaccatccagacctcaggtcatccccctgtctgttgacagagtagtctccgttcctgaatgtgctggtcaccagcaacagca

SEQ ID NO: 510377 - DNA, 497 bp, Homo sapiens
aggatccttggtgtgggggaaacagaataaactcagaagcttggcagatctcaattcaaaccccggttgtacggcctccagcaggccttggtcagggaatagtatctagctaaagttcattgacttcattttgttttcattgaatttatgttttgctggctttccatttatgagagtgatacaaatttcctttaaacatgaagttgtaaatataaacaggtaggccattcacaggaatggctraattatgtcacaggaaaggtggcactctcatatggcaataattatgacagaggccggcaaatgacctgcgtgacccggagtggcctgagcactgactcccaaatgccctccataggatgttctgcatccccgagaccctttcctgggtcctcctgggccctaccaccccctagaccatccagacctcaggtcatccccctgtctgttgacagagtagtctccgttcctgaatgtgctggtcaccagcaacagca

SEQ ID NO: 510378 - DNA, 483 bp, Homo sapiens
gggggaaacagaataaactcagaagcttggcagatctcaattcaaaccccggttgtacggcctccagcaggccttggtcagggaatagtatctagctaaagttcattgacttcattttgttttcattgaatttatgttttgctggctttccatttatgagagtgatacaaatttcctttaaacatgaagttgtaaatataaacaggtaggccattcacaggaatggctgaattatgtcacaggaaaggtggcactctcatatggcaataattatgacagrggccggcaaatgacctgcgtgacccggagtggcctgagcactgactcccaaatgccctccataggatgttctgcatccccgagaccctttcctgggtcctcctgggccctaccaccccctagaccatccagacctcaggtcatccccctgtctgttgacagagtagtctccgttcctgaatgtgctggtcaccagcaacagca

SEQ ID NO: 510379 - DNA, 497 bp, Homo sapiens
aggatccttggtgtgggggaaacagaataaactcagaagcttggcagatctcaattcaaaccccggttgtacggcctccagcaggccttggtcagggaatagtatctagctaaagttcattgacttcattttgttttcattgaatttatgttttgctggctttccatttatgagagtgatacaaatttcctttaaacatgaagttgtaaatataaacaggtaggccattcacaggaatggctgaattatgtcacaggaaaggtggcactctcatatggcaataattatgacagaggccggcaaatgacctgcgtgacccggagtgrcctgagcactgactcccaaatgccctccataggatgttctgcatccccgagaccctttcctgggtcctcctgggccctaccaccccctagaccatccagacctcaggtcatccccctgtctgttgacagagtagtctccgttcctgaatgtgctggtcaccagcaacagca

SEQ ID NO: 510380 - DNA, 197 bp, Homo sapiens
tccaggccctgactcctttgtgtctcagcttgaccccttgagaccacccccttccttggaggtttatgccagcggtgagctsacatcctacctcctatatcctggtgggtcacaaatactaactttaaaagaagcaacgacacccccaccagacacccactcctgtcaatatggaaatatggcccgggaacctcact

SEQ ID NO: 510381 - DNA, 197 bp, Homo sapiens
tccaggccctgactcctttgtgtctcagcttgaccccttgagaccacccccttccttggaggtttatgccagcggtgagctgacatcctacctcctatatcctggtgggtcacaaatactaaytttaaaagaagcaacgacacccccaccagacacccactcctgtcaatatggaaatatggcccgggaacctcact

SEQ ID NO: 510382 - DNA, 197 bp, Homo sapiens
tccaggccctgactcctttgtgtctcagcttgaccccttgagaccacccccttccttggaggtttatgccagcggtgagctgacatcctacctcctatatcctggtgggtcacaaatactaactttaaaagaagcaacgacacccccaccagacacccactcctgtsaatatggaaatatggcccgggaacctcact

SEQ ID NO: 510383 - DNA, 525 bp, Homo sapiens
tcttacatattaccgaatgtctctgtcccgttgttcctactacttcagatcctcattccagtgtctgggacactgtcagagtctaaatagattctargtctcttgtctcgtctatcttccatctcccaatcctccttcccctgatccattagaatgacagacctaagcatatcctttctgaacataaaaacccttcaataactttagggataaactttaggctccttaacatgatgcatgaggtgcctgaacatctgacccttgacagtccttctcagcattctggcacattcagggtcctaacaataccacccttctccctgccaccatcccaaatccctccccctgctcaccactctccttgttattttccacttcaaagcttttgctccttcaatctgtaaaattaacagccactcatgtgttccttcctttctcctctcttcacagccagcacctggaggtttcttactcttaggaaaaactgcgaccttttctaagatacctcctccctctttccttagt

SEQ ID NO: 510384 - DNA, 525 bp, Homo sapiens
tcttacatattaccgaatgtctctgtcccgttgttcctactacttcagatcctcattccagtgtctgggacactgtcagagtctaaatagattctaggtctcttgtctcgtctatcttccatctcccaatcctccttcccctgatccattagaatgacagacctaagcatatcctttctgaacataaaaacccttcaataactttagggataaactttaggctccttaacatgatgcatgaggtgcctgaacatctgacccttgacagtccytctcagcattctggcacattcagggtcctaacaataccacccttctccctgccaccatcccaaatccctccccctgctcaccactctccttgttattttccacttcaaagcttttgctccttcaatctgtaaaattaacagccactcatgtgttccttcctttctcctctcttcacagccagcacctggaggtttcttactcttaggaaaaactgcgaccttttctaagatacctcctccctctttccttagt

SEQ ID NO: 510385 - DNA, 525 bp, Homo sapiens
tcttacatattaccgaatgtctctgtcccgttgttcctactacttcagatcctcattccagtgtctgggacactgtcagagtctaaatagattctaggtctcttgtctcgtctatcttccatctcccaatcctccttcccctgatccattagaatgacagacctaagcatatcctttctgaacataaaaacccttcaataactttagggataaactttaggctccttaacatgatgcatgaggtgcctgaacatctgacccttgacagtccttctcagcattctggcacattcagggtcctaacaataccacccttctccctgccaccatcccaaatccctccccctrctcaccactctccttgttattttccacttcaaagcttttgctccttcaatctgtaaaattaacagccactcatgtgttccttcctttctcctctcttcacagccagcacctggaggtttcttactcttaggaaaaactgcgaccttttctaagatacctcctccctctttccttagt

SEQ ID NO: 510386 - DNA, 572 bp, Homo sapiens
tgtctaagcatttccttattcttaaggttacaagaaattaaattcgttttatatcagcttatcctattaaaatgttctatatacaaccaatagaagcattatagtctctattttttccccccgtgaattaaatttggcaaatgaagaacctcatattctccttaagagttaagtgtgttttgtaacctccatagaaattggaataaattattgcatggctgaaggcaaatcagtggtaccggttatagttttcaaacttcagttaccaaataaaactgtgtctccctgagagtgagtgctcgcttttctttactaaggctgtctcagagaagaagctgcaagtatgaatttatttttttttccccttcccaaacttgagaggttgtgagtctcatggaaaaagtgtgatatactagaaatattgaaagccggcyggtttgtttgaatctaaacttttcctctttggggtggtatcagataaatccatcagttaagagaacttgacccatttagccatgcaacagctaaacccttaatccgaacagattcattttacagttcagattttgcca

SEQ ID NO: 510387 - DNA, 527 bp, Homo sapiens
tagttgctacatcaggaggaaattcatggcttcacaatttccatatggatctattttagatatgaaaatcccatccatatggaaaacgttataacagagaatacaagtgaattagtaatctcacagctttacacacctaaacctttagcattaaggtaattttcactggttaaatttggaaaataaaagagtaaatctgccttgctcttgagggtcactattttcttttaagtaaaaatagacatggtgccataatcatrttaaaggtaaagagataactattaaatttgaggaggtatcatttgcattggttccctttcaatctgtctgcaatcctaccctacttatgggctttctatgacccatacgttttcagaaaaaattaaatccccttaacaacgaaaattgttgcatttacttcttatctttcctcctttcttgggggaaaaacattatattgatcataacatattatataacatattataatgtatgattgataaaacatctataaaatacatatattt

SEQ ID NO: 510388 - DNA, 527 bp, Homo sapiens
tagttgctacatcaggaggaaattcatggcttcacaatttccatatggatctattttagatatgaaaatcccatccatatggaaaacgttataacagagaatacaagtgaattagtaatctcacagctttacacacctaaacctttagcattaaggtaattttcactggttaaatttggaaaataaaagagtaaatctgccttgctcttgagggtcactattttcttttaagtaaaaatagacatggtgccataatcatgttaaaggtaaagagataactattaaatttgaggaggtatcatttgcattggttccctttcaatctgtctgcaatcctaccctacttatgggctttctatgacccataygttttcagaaaaaattaaatccccttaacaacgaaaattgttgcatttacttcttatctttcctcctttcttgggggaaaaacattatattgatcataacatattatataacatattataatgtatgattgataaaacatctataaaatacatatattt

SEQ ID NO: 510389 - DNA, 605 bp, Homo sapiens
ctgtgagtattttcagtaaatatctgcaaatattatagagcacatgccatggaagaaagatcataaagctcatagactctcacgacatattgagtaatttccattggaaatctctaaaataattcttgtaggcaggatcagaggctcatctaaacaactgttttggccaacactgatgccttttcctttcgtttgggagatcagatattgaatttagcctcaaaggtggatcccattctgggtagccccataggacaggctagaggcttggttttggttgggtttttcccttgtggcagaggaattgtaaaatttatttcaagatccttactagggtggcgtgagtagtggatatggtcactccatgagtgacatcaccaggtgactttggccatgtgattccatccagtaattttgattcatcatgacagacaggctcatatattttttttggtayagaggtagaatatacttggggcacctcacaccattagaagtttcttagttatagaagggctatgatttttgggaggaagcttagtgtcaaattcttcctgtcccttgatcattgagaaggtttgctgcaagtcagcatcattggtttc

SEQ ID NO: 510390 - DNA, 622 bp, Homo sapiens
tgtaaatgtattcctggatacacttagccaagaatgatggaggagctcttcttttgactaataacacatttcatgctcttyagtatgtctttatatctgcgtcaaagctgaaatcaatgaggtatggataaaaaatgggctgaatattggaagatgccaataagacccattccactaaccccttcatttgtgccaaaataatttgtttgaaatgctgaatttatgtgctgaataatttgtttgaactgctaggctgcagatctgggggcagaactagtgaaaaatagccagctttggagctggcaggctgaagggaagaaggaacaattgggctagggtgaatccctatggaggaatcgagccttttcaggaagggaatgtcagggtgaaaagcaggagttctttttcagggctaggatggacaacaaaggctgcacaaggtgggtaatagaatttcagtttctgaaagatgacttccaggaagaaggtctcccgcagtgtggagacatatcttggggtttaaattgagccctcatcctgtaagaggtctgtgatgctgcagattctttctaccaggcaaggcctcctggaattaatcagagcccagctatgtggaggagga

SEQ ID NO: 510391 - DNA, 636 bp, Homo sapiens
ctggccagttttgaagtgaaattcttggtaacaaacaggtcgagaaagaacaaaaaacatgcatcactagtgcacctagaattctacctagaaacacattcttcagcactaaacatgctgacagcacagtgtgaacatgaccttaatcacaaaggacagcaggctaagctacccacattgcaggataggaaataagaataagaaccgtctctgatcccctgccacctagtttgagattatccatagaaactataaaagtgaagagaggagagaaatcacatactgcattagttttggataatggccagacaactccttaagtatatatatatacttccctttcccaataagaccacctattttccatttttcttaacacatgactaagctaactatatatatatatatatatatatatatatatatatatatatatatatatatatacacacacacacacacacatatgtgtgtatatatatatgtgtgtgtgtgtatacatakgtacatatatattcattcaatccctggtaagacaaaaagattcttatttctcaggaataacatggaaatttctattgtttatattcccgttttcttagcccagcagtctaacagctacatggccatgtatat

SEQ ID NO: 510392 - DNA, 636 bp, Homo sapiens
ctggccagttttgaagtgaaattcttggtaacaaacaggtcgagaaagaacaaaaaacatgcatcactagtgcacctagaattctacctagaaacacattcttcagcactaaacatgctgacagcacagtgtgaacatgaccttaatcacaaaggacagcaggctaagctacccacattgcaggataggaaataagaataagaaccgtctctgatcccctgccacctagtttgagattatccatagaaactataaaagtgaagagaggagagaaatcacatactgcattagttttggataatggccagacaactccttaagtatatatatatacttccctttcccaataagaccacctattttccatttttcttaacacatgactaagctaactatatatatatatatatatatatatatatatatatatatatatatatatatatacacacacacacacacacatatgtgtgtatatatatatgtgtgtgtgtgtatacatatgtacatatatattcattcaatccctggtaagacaaaaagattcttatttctcaggaataacatggaaatttctattgtttatattcccrttttcttagcccagcagtctaacagctacatggccatgtatat

SEQ ID NO: 510393 - DNA, 469 bp, Homo sapiens
gttaaaattgaggatgagttctcacctaatcctgaggacaaatgagatagtctgctgtcaaataaaggctacgaacttcactttgggagcccatcaggataactaaaagaaaagttcataattgtacaaagcaactggagctgaggcataatgagtgatgcatagacttcaagacaggagaaatatgccatttgtgttaagatataatagacatataaagaaataggccatttcaatgtaagtataaaatmacaaatcataaagacaggatcaagaactataaggagtctgagatttttatcctaccttcaaactagcaagttagcctatcagagttccatggatgatggcagaagatgcaagacccaaaggactttatgagttccatgtttgcatcagttcccattgcactccaagtcctactggggagatgtagagtgggccagatggatgctgtgcacacagtgga

SEQ ID NO: 510394 - DNA, 723 bp, Homo sapiens
gaggtcatctccacagctccttttacttgtaaaagtttatcagtacaaccagcccctgagggccacagaattagaggtaaaaccaagcatagctctgaaggaggaagtatcgaactgcagccaaaacaaatgttgcctgagacgagggattagaataaaactacaagaagagctggcacaataaacacacttacgctgcattattcaagggcatgaggtatgaagggcagctcaccttggagaatgcaatcgtctggtcagcttgcagccattttaagctgcattcagtgaggtgtcattaaggctttggaacattctcactggtatcatagactttttgaactcaaaaggatctttgagacaatccattcccatcctcatatctaacagttgatggaactagtgtccaaataagttcaatgacttactcaaagttatttagctggtcagtaacagaaaagtgaccagaagtcaggtgcagagcttcaataacatcaacacagattgccaagccctcaaagacactgtttatgtgcacatacacaggcacatgtatacacgtgcatatgtgcacacagacacatacatatgtgatgcaaatgtaagcacacatgcacatacatacatgygcacgcatatactcacatacatacatgcgcacacatatactcacatacatacatgcacacacatatactcacatacatacatgcgcacacatgc

SEQ ID NO: 510395 - DNA, 607 bp, Homo sapiens
aagggtgttcttaagaagctaaaagaaatgaaaaatcacaatttttaaaaatcgctgtctttctgtccctgtagccaccgaaagacgaggtacttcctcagggacagaatgctgacgccgcgcagagtcggccgaatccagcttctccaagggcgggcgggtgggatgatttgttgatttgcttgttttccaccaaaccgcagggcacctccaggagctccgggacaacttacaaatgaagacacagagcccccgtcccttgcttcagagaaccaaataacggaactgaatggtcgtttcttcagcaaagcctaaagacgcttgcgtcccgcggagaggtgcccacgcgcgactcggctgccccctcttcttgcgggtccgggtagggtagggcgggaacgcgggacgtgccctaagcgggccagccgagcgcgagacaggcgatgctgcagaagyctgcccgcctgcgggtcacacaccggccggcctcggctgcaggggttgcggggccacgggtcgcggggcgccgggagccgcgagcaggtgacggccgcgccgggcagccccgcgggccgcgattcccgagagcctggcgccaccccgcgga

SEQ ID NO: 510396 - DNA, 319 bp, Homo sapiens
gccagtcacccagtctctgagccttagtttcctcacctcaaaaggaggatgatgatacctgggccacttggtgggtgacaagatggtacctgcgaggtctgtaayaaacagatgcagggtttagtcactgtagacgtggtggtgttctatgccatgagaatagtttccagaagcagaagtggggtatccaagaaagagttttggagaggagccttcctgctgatataacttaagaaggcccccaagctgcttatctttctggagttcagggtctacaggggcagtatgcagacccctacagagagggaaggcttccagt

SEQ ID NO: 510397 - DNA, 574 bp, Homo sapiens
ggtggcatctgcctgtagtacaagctactcgggaggctgagataggaggatcatctaagcccaggaagttgaggctacagtgagccactgcactccaacctgggcaacaaagcaagaagaccctgtctcaaaggaaaaaaaaaaatagcaccagctatttttaaaaaatcccccatggaagtcaggaacacttttattcactacttcctcagcatcacaaaaggtgtttcttccccatcctggtctcccagccaaggataagcattataaatgctggtgctttgagagaagttgggctacttctaaagtggtggtttctgtttaagcctggaatttgctctcccagaggatcaaggaccatgttgaggcagtcgggctgtggaaagctctgtggcaccccagcacacttttgatttcaacagcattgtctctagccrtcaaagcatccctctttgggcagaagttttcgatgactggcattctttcacaattcttgctctatcaaatgttttttaaagcacctctgcccataaatgcaacacaaacaagttgccctgtgagtcacaggacgaga

SEQ ID NO: 510398 - DNA, 606 bp, Homo sapiens
catggcgaacactgcatagacacaagggaaccaagatgatcccggggcaaggaggtcacagtgggtgatggagacaggacaggagagcccaccatagggcgagatgcacggggagccaggaaggtgcagggcgagcgcgatggaccgtcccctcctgggtttctggaaccaagcttgtccataacagacactcacactggcttgcatgggtggcacccactgtcctcaggccagctccgaagagcccccacccagcaggtctcgactgggtcacccggctctgcyccctctggagccctgcctcactctgggaggcagcccacctgggccagccttgccccctgccttcaagcacaccccaaacagccaagcagggcgagtccccatttgtagaagtggagccagaacgtccacactgcacgcacctcagggcacagagccggcgtgcgtggcagtgaccacctcaccctggacagggatggacagtggcagaacaaacccaaacttggagagcctgcatccaaacacccctccagctccggccaccaatctgcaagaaagacactcggaacagagggcacgccgggctacacccaggagatgcag

SEQ ID NO: 510399 - DNA, 518 bp, Homo sapiens
agcccaccatagggcgagatgcacggggagccaggaaggtgcagggcgagcgcgatggaccgtcccctcctgggtttctggaaccaagcttgtccataacagacactcacactggcttgcatgggtggcacccactgtcctcaggccagctccgaagagcccccacccagcaggtctcgactgggtcacccggctctgccccctctggagccctgcctcactctgggaggcagcccacctgggccagccttgccccctgccttcaagcacaccccaaacagccaagcagggcgagtccccatttgtagaagtggagccagaacgtccacactgcacgcacctcagggcacagagccggcgtgcgtggcagtgaccacctcaccctggacagggatggacagtggcagaacaaacccaaacttggrgagcctgcatccaaacacccctccagctccggccaccaatctgcaagaaagacactcggaacagagggcacgccgggctacacccaggagatg

SEQ ID NO: 510400 - DNA, 627 bp, Homo sapiens
aagaaaggtacattgggaggatttatctgtgttgtttttcttaagctaagggttgggtatgtgggtgttcattgaattttcttttaaaaagagtaaaaataaataaaaatatcatgccagtaaactaatgttttccaaattgtgttcagtggagtgggatcctagcaggcagtgacaggtgtcctgtgtaaaaggacactaggggctgagtgtggtggctcatgcccataatcccagaactttgggaggctgaggcaggcagatcacttgaggtcagaagttcaagaccagcttggccaacatggtgaaaccccatctctttaaaaaaaaaaaaaragagagagagagagagaaagaaagaggacactaggtccaaggaaagtcagcaatggctccttttaaagagtacagactggcatgttggttgcacaggggtgtcctccagttcacagagtgtggtcgaaatttgctctaagccagtatttctgaaacatactcgaacatacttttttttcactatagtaaaatacacgtaacataaactaccatcttaaccatttttaagcatacatttcagaagcattaggtacattcacaatgttgtgccaccatcagcaccatccactt

SEQ ID NO: 510401 - DNA, 621 bp, Homo sapiens
gctaatctcaaaaagaacatgcttgtaaacacctgtgttccaattatctgaaaatcaattttagattgtagaaattattgaaaatatattcctataaaatgtgtaataaaattttattataattatgatgtaattttattatatataattatattattgtacaaaatgatacaatcatattataatttattgtagtgtacaaattatattaattatataaagttaattatcatatacatatcattatagtacagatataatcatttccattatattattttaaattttatgatctactgtgctagaaaatcttaygagaatgtactgcttaaataaaattgtagaaaaataaaaccaagagccattaaatatgtcacctttctttttccccaacttccccaataactaaagagttagcttaagagaaaatattatgcccaaataccaaagtacagattagaaaatatgctacccaatatacctaaggtatcattagcatacttttgtactggttaaataaagtatactgccttttgttctaaagtgatagtggaaagccagcttgtagatgaatggtttttatgttgcaagaaccatccgatcaactgcagtccccaagta

SEQ ID NO: 510402 - DNA, 552 bp, Homo sapiens
tagaaacattagaatttgccataatgattccaaagggtctctcagagttaaggtagatgctgttgatgaaaagagtaaaattctctaaaatatttgaagagatttattctgagccaaatatgagtgatcaatggccgctgacatagccctcaggagatacagagaacatgtgcccaaagtggtcaggctacaacttggttttatacattttagggagacataaggcatcaaytaatacatgtaagatgtacattggtttagtccagaaaggcaggacaactggaagctgagtgggggtgggggtggaacacttccagttcataggtggattcaaagattttctcactggcacttagctaaaagagttattatctaaagacctggaatcagtagagaggaatgtctggggtatgagaagcagttgtgaaaaccaaggttttattatccagatgaagcctacaggtagcaggcttcaaaaagaataaattgtaaatgtttcttatcagacttagtctattttatcagcctaagttctctgttgatgttaatgct

SEQ ID NO: 510403 - DNA, 528 bp, Homo sapiens
ttacagaaattttcattaattagaccacagcaagtttacctagatatgtttattcccatcaataagcctaaaaaaaagagaaaagtcacactctaaatagcagatcctgggtggcaggcaactgcaatagttcaggaagtgttttatttaacattcagtgtacctctcctacaagatccatgcaattttttgtttgttttaattttkcgtcacagttgagtatcattgtattattctttaagggttcagtttgttctcacggctcatctgtatcatgctcaactattttctgtaactagagaagtctcaaaacaggtgtttaaaaatgctgctattttccatttggcttgcaaagagagaacaatacaaacaagccatttcccttagctttggctctgcaccagtgagaaagtgccataacagaagaaatcactcagagagaaagtagcacgcatttcctcttttgggaaagctatgggacacttgaaagatgattggtttgtgggactggcactatgaaattggaat

SEQ ID NO: 510404 - DNA, 528 bp, Homo sapiens
ttacagaaattttcattaattagaccacagcaagtttacctagatatgtttattcccatcaataagcctaaaaaaaagagaaaagtcacactctaaatagcagatcctgggtggcaggcaactgcaatagttcaggaagtgttttatttaacattcagtgtacctctcctacaagatccatgcaattttttgtttgttttaatttttcgtcacagttgagtatcattgtattattctttaagggttcagtttgttctcacggctcatctgtatcatgctcaactattttctgtaactagaraagtctcaaaacaggtgtttaaaaatgctgctattttccatttggcttgcaaagagagaacaatacaaacaagccatttcccttagctttggctctgcaccagtgagaaagtgccataacagaagaaatcactcagagagaaagtagcacgcatttcctcttttgggaaagctatgggacacttgaaagatgattggtttgtgggactggcactatgaaattggaat

SEQ ID NO: 510405 - DNA, 528 bp, Homo sapiens
ttacagaaattttcattaattagaccacagcaagtttacctagatatgtttattcccatcaataagcctaaaaaaaagagaaaagtcacactctaaatagcagatcctgggtggcaggcaactgcaatagttcaggaagtgttttatttaacattcagtgtacctctcctacaagatccatgcaattttttgtttgttttaatttttcgtcacagttgagtatcattgtattattctttaagggttcagtttgttctcacggctcatctgtatcatgctcaactattttctgtaactagagaagtctcaaaacaggtgtttaaaaatgctgctattttccatttggcttgcaaagagagaacaatacaaacaagccatttcccttagctttggctctgcaccagtgagaaagtgccataacagaagaaatcactcagagagaaagtagcacgcwtttcctcttttgggaaagctatgggacacttgaaagatgattggtttgtgggactggcactatgaaattggaat

SEQ ID NO: 510406 - DNA, 638 bp, Homo sapiens
cactgtagatcacagggattcaatcatttttgtttatcaatttaacaaatgttgctttcctttcaagtgtcagggactatgctatgatggaaaataagacagtccctcacccccaggatcaaccattgtggatgaatgggcatccaatgatattatcatcaccacaatggctgtgagttaccagacacttaccgtaacccaggtacttgctaaggtgttaagtacatacttcagttatcttcaaaatacccagagaayatggaaataagtataaccaagatattctgatttgtcattttgggtaacaaaataaggacacttctcttttaatattcaaactgatatttcagagttctcctgaagatcccacccttttgcgatgagttccacagcccactcactcccaggggtcagtcctcacagagaagggttgcttgctgctgtccctcccatgcaggatcaccactgaaagtgttctgtcctgcctggtcggacccttccccgtctttgatggctgattcctggagtgcagccagctctgtaggcagtcactttatggatctctctcctcactgtcatgctcacctaagtagccagatgctactatagactagactcctggtgtttgcttacataaa

SEQ ID NO: 510407 - DNA, 558 bp, Homo sapiens
aactaatttcaaagcatttacattctattaggtattgtacgtaatctagagataaagtacaggggaagatgtgtataggttatatgcaaatactacatctcataagggacttggacatccaaggatttgggtattcacaggggggtcctgcaaccaatccccctcagatacaaagggaggactgtaactttagtcttagaaaagggctgttaccttagaactttgtcatgtgtaaaatacagtataaattgttttaaatgatgtatgaggtctcatgctttaaaagatcattagaaaagaattatttcatttctaagcaagcaattaaaaaaataatgtcttccatttgtttacaggataaatgtgcatcctcactaggaaaaaaaagyttgtgtgaaaagctggatccaaccattatcagttttgaaataaattcctttctgaaataaaatattagaaacataagcatttaaacaaaaaattttgtttttcaacatcattttatcctttatataccattacacttacagaatctgacacataatttctctgctgtta

SEQ ID NO: 510408 - DNA, 558 bp, Homo sapiens
cagcttgatgtggggggaggaaggggccacccaccaatcacctcttcttgtagccatattttttgcattcacagaagagatctgtcttagagctcctcaaattgacaatctttggcagccatctctattctcctggatggtgcactccttacaataataggcatcagagactccaggacctccagagaccacacagtgcccctggtaagatccacagttacactcatcacatcaccagagtgcagggacgcacacaggagtcacaaatcacacacttgctgtcacgtttttcacatagtcttccgatggcaacataagcctgcttgcggcaaaagatctaagttttcatttaatataaaatgtagctataaagtaaaaakggacaccctcccacacatccccctgaaggaaagaacactttctgtacataaaaattctgatatgattaattgaaggtcagtcatacctcataaagatcatctttcctatttttgtcactccctttcttccaggtagctccaaaagacaaggaaatatttaattttaaacaactacata

SEQ ID NO: 510409 - DNA, 555 bp, Homo sapiens
atggatgagcagtgagattagggagaggaaggccctttgaagcaacctgtccrtagcactctcttcccaaacagctctagcaaatgaggctcatgcagaccctggtctgggttgtttgtcttctgttgaaccatataggatggaagaaagttttttcctagcaaggccaaaacaagtgaggaagggaagcatgtgctctggcttgtgggaagtagaacaaaagcacacatctcggagtctggcaggcgtgatgctgatactggctcaggtacttattagctctatgtgaccttgggcaagttttctgagtcccggttttctcccatgtaaaatgaggctagtaataaaaatgtacaggctcataaggagtcaagtgtctactgtgcagtgggtggtcagtatgtgtgtgtggattttctttcccagtgaacacaaattgggcttccctggaatggtagtctttaagttggagacctgggtttggaggagtagggtgatctgctggggttgccaagtcgggggccaaacctgatgatgaggccacagggcggaaga

SEQ ID NO: 510410 - DNA, 555 bp, Homo sapiens
atggatgagcagtgagattagggagaggaaggccctttgaagcaacctgtccatagcactctcttcccaaacagctctagcaaatgaggctcatgcagaccctggtctgggttgtttgtcttctgttgaaccatataggatggaagaaagttttttcctagcaaggccaaaacaagtgaggaagggaagcatgtgctctggcttgtgggaagtagaacaaaagcacacatctcggagtctggcaggcgtgatgctgatactggctcaggtacttattagctctatgtgaccttgggcaagttttctgagtcccggttttctcccatgtaaaatgaggctagtaataaaaatgtacaggctcataaggagtcaagtgtctactgtgcagtgggtggtcagtatgtgtgtgtgkattttctttcccagtgaacacaaattgggcttccctggaatggtagtctttaagttggagacctgggtttggaggagtagggtgatctgctggggttgccaagtcgggggccaaacctgatgatgaggccacagggcggaaga

SEQ ID NO: 510411 - DNA, 632 bp, Homo sapiens
ataacgaaaaggcaaatgcagttatctgagtaatcactaatgagatatagcgtctgaatagtatatcctgcatatgtggaaatctttttccaatttttctatgggtttcatttccctggggattggttcctacagggtcatgaaggctaatggcacttacctttttggctctttgggctatgtctggtgttcttgtaagcagcttctcaatcaggtactctctgttctgcaaaacaaatattcccaacagtttaacatcaaatatgatacacataaatacacagtgatttcaaaaatagcagatttacttgggtttttaagcatgttaccttggctttctggaagaatttgcattttaaaagttctgctgctgtgggcctgaaagatcaataataaattagagttgaaacaatgaccacttaataaatgcaytgccttgatgaaacaacttaaccttaagagtatttctggaagaccaattttagtaatagcaaaactgggaaccaaattaatcataggctggcaccaaataaaatagtgccaattttccagttctttccaaatacctctactgcaaaacacataaactcctgtacattaagtgcttggggcgtaatcaattttccatcctt

SEQ ID NO: 510412 - DNA, 398 bp, Homo sapiens
attatgactcttctgttttttgtgggaaaaacaggatgaatggatgaaatggatgaaaaagattcctgggtgtcttgtctgacacatttttccaggttatctcagcctttcatcctattacataatctgtaagtggtagaaaactactaagaatgcaaggaattcttgtccatagagatrcagattagtagcatctggtggaatgcaatcattgtctaggacagatgatctaagatgggtacaggtccacagcctgttaggaaccgggccacacagcaggaggtgagggaacattacctcctgagctctgcctcctgtaagatcagtggtggcattagattctcataggagcataagcccttttgtgaactgcacgtgcgagggatctaggttgcgtg

SEQ ID NO: 510413 - DNA, 585 bp, Homo sapiens
tttgggaggctgaggcaggagaatcgcttgtacctgggaagcggaggttgtagtgagccaagatggtgccactgcactacagcctgggcaacagagtgagactccgtctcaaaaaataaattaaaaaaaaatttttttgaaagctttctacgagtccattgcatgaagtgacaataacttatttaaccatctcttatttgttggatttttgtttctctccaatgcttggctattgtaaatagtattatcacgtacaatgcagttgttcaattagttgtcttcttcccggacctggattacttttggctttcacctctgcgatgacggttctacaatgggatctttagttctgactgcagttctaagctcttggcccaaatctaaaccccttgccggagctgatgcatgctcctacatcctctctgctccccctgctgaggcagtttcktctgacccctagaatggtgtcactgtgattcccatgagccagccttttgtcttctttgacccttctcctttggccccagcctgtaggggatctccaagttgcatatgttttatgcatccaatatcccaacacacatt

SEQ ID NO: 510414 - DNA, 594 bp, Homo sapiens
gtcacagagccttgtggcaacacttctcagagctgccatcccctctgtccccaactcaaccctataccatcactcttgcctttctgcaatgctattccccaaataaacattagctcatacacttttctttttttcccccaacagctttattgaagtgtaatttattaagtatcatttacataccataaaatctacagcaatgcgcatccctcaccgaaatccaatttgagtagatttccatcaccccaaaaacacatcctcaagcccatttgcagtcatttcccgttctcactcccagccccaggcaaccactaatctattttctgcttctgtagatgtgccttctctgacccataaagttttgcctgaggcttctttgtttagggaacccaggttaagacacacagcaaataattcagaaaattccttgatgtccaagaactgccacttcctgtctccarctttgaggccagagtggactgtcccggacaacttgctagagcggagaacaaagataacgtctgaacaaatgtttagttgtttttaattaggacacgcaatgcattagcaattataagaggcaggatggaatgt

SEQ ID NO: 510415 - DNA, 593 bp, Homo sapiens
taactgagtcaaatgcccgtcattttttcttcattttcttaagagacaaggtcttgctctgttgcccaaggctggagtgcagtggcatgatcatatctcactgtaaccttaaaatcctgggctaaagtgatcctccaacttcagcctaatgagcagctaggactacaggtgcattccaccacaactggctaatttttctttttattttttgtagagatggggtcttgctgtgttgcccaggctgatctcaaactcctggcctcaagtgatcctcctgccccagcctctcaaagtgctggcattacaggcatgagccactgtacctgttaagatgctcttcatttaagagtcaactgaatttcagaatcaatcagaggtgcaacatgtagtactccttgatacaatttcccattaaaatccatgaagatacacatgcgcgcrcacacacacacgcacacacacccttgcacacacatgcatacacatgcacacatgcaatgcacacacacgcacgtgcacacatacacacaagcatgcacgcacacacacacacagaggcagcagaataggaaactgcatataatagaatttcc

SEQ ID NO: 510416 - DNA, 596 bp, Homo sapiens
atgagttaggacacacccatttaaaatacaaatttgctctatcaacatggtcattaatatttacttctcaagaaggaagagtgttgaatttacatccagacctgtattgccatattactgtgtaacaaatgactcaaaaacttcctggtttagcttgggygtggtggctcatgcctgtcatcccagcactttgggaggtgaggcaggaggataactggaggccagaagttcgagacaaaaccctgtctctacaaatactacaaaaattagcaggtacatggatggagctgaaggccattatccttagcaaactaacgcaagaacaggaaaccaaatactgcatgttcccacttgtaatctggagctaaatgatgagaacacatggtcacatagaggggaacaatacacactggggcctatcagatggtggaggcaggtaggaggagggagaggatcaggaaaaaataactaatgggtactaggattaatacctgggtgacgaaataaccctgtacagcaaacccctatgacacaagtttacctatggaacaaatctgcatgtgtacccctaaacttaaaagttgttaacaacaacc

SEQ ID NO: 510417 - DNA, 679 bp, Homo sapiens
ggatgggtctggcgcccaggtgggggtgggatccgtcttccccggacagtctgggtttactcgggttcctagtttctccggactagcgcagcgcggagtgaacttcccgagacttggtccgagggcgcctaggcagcagcaggtagttctgggccacccttggggcgagggcgagcggggacgccccatccagacgggctgggggtacagagcgtgcaccgaggggatcggcttgcgtcttagccttgggccacgtgcgcccggccaccagcccaccatcgtttcccactgctcttttttcttggacgaggcttgtgtgaggaaggcgcctttcttccatttgggtcgaagcccktagctcctgggtgaagcggtgcctgcagttccctgagtgccaagactggggcgccagccatccccaggccctgagccggttttctgcaaaaaaggagacttttttgggctcagggaatagcagcttagcgccggctgtgtgtggctgggaagtctgtttagtggtgataataactacattctagagtgacccacagtagcctctgcgacagagttgggatgaccttctcagaaagaatgggtagatttctgcgctgtgtgtgttgagacacacgcaacattcgtgcacatagaactcatgagctcctagcattttcaggttctg

SEQ ID NO: 510418 - DNA, 596 bp, Homo sapiens
ggtggatggatggattagacagatagaatgctaaaacatgactgaaatgagaaacatgcaataaataaggaatgctttcaagcagtgtgaagaaaactcctcattgagtgtcctgtctctgttggacatttttgtgaacgtgtttgcaagagttttcaaggtgaaatttgacctgggtcatgaacactgtgaccagggaatggctgataattgcttgaaattgccagctatagtcagttgaaattttgaaacgacataatgaatagtgtagtgctgcttgtagaggttgagtgacttttctggtatatctgttgtattaattgagataattcatgaagagcatttagtctggtgtctggtatgcaccctrtaactgttagctattaccattgccattaattggatatactttatttagggtttaaccctttaatgtatcctttaaaaattactgtattatcagagaaaatgagaataaattggccgggtgtggtgcttcacacctctaatcccagcactttgggagggtgtggtgggaggattgcttaagggcaggagttagaggttgtagtgagctgtgatcacaccactgtaat

SEQ ID NO: 510419 - DNA, 638 bp, Homo sapiens
gagaacaaaatgacagccacatttttttcaattcttcaccacaagctacaaaaaaatttcttcaagtcaccaagtgactgatgatcattcatattaatcaacataaaactataataagctacagaaaagcctaccacacacccatgctgtggagtcggggacccgccgaatgaactggcagaagagccacgttgtacaggtttccttgacaactgttcccatagagccagtgttcaaagaraggtttgagcaaagcaactagaaagactaattggtaatcatgctccaatatctaaagtggtattgagattcgatgatattgtgtgagctacttctaaattttggtgagtgtgttttctcctttttctcctttcactgttatttttagtggaatttctctttcgtttgtttcattccaaaattagaaaccccttttataaaaggataacaaccacagttaaattgctaccttggaaaatataacctataaaataattttgtctcatttaaaaaaattttttctgagatagggtctcactctgtcacacaggctggatgtagcggagtggtgtgatcatagctcaccgcagcttccagctccttggctcaagtgatcctccctcttcagccttctgagc

SEQ ID NO: 510420 - DNA, 638 bp, Homo sapiens
gagaacaaaatgacagccacatttttttcaattcttcaccacaagctacaaaaaaatttcttcaagtcaccaagtgactgatgatcattcatattaatcaacataaaactataataagctacagaaaagcctaccacacacccatgctgtggagtcggggacccgccgaatgaactggcagaagagccacgttgtacaggtttccttgacaactgttcccatagagccagtgttcaaagaaaggtttgagcaaagcaactagaaagactaattggtaatcatgctccaatatctaaagtggtattgagattcgatgatattgtgtgagctacttctaaattttggtgagtgtgttttctcctttttctcctttcactgttatttttagtggaatttctctttcgtttgtttcattccaaaattagaaaccccttttataaaaggataacaaccacagttaaattgctaccttggaaaatataacctataaaataattttgtctcatttaaaaaaattttttctgagatagggtctcactctgtcacrcaggctggatgtagcggagtggtgtgatcatagctcaccgcagcttccagctccttggctcaagtgatcctccctcttcagccttctgagc

SEQ ID NO: 510421 - DNA, 580 bp, Homo sapiens
aattaaatgtcataaaagagaaaattttattaacaaaattaagataaaaagtgaaatatgttatttatagaaacttgcatctgttaatgtaagactagaggaaaggtttttctacccccccaaatattcttcctagaaaattagttcgccctgattataaaattgcagacaaagaagagtatgatatagagagtgaaagccctgatatgctcctgccatccagaggtgaccattaagagtttggtgaatattccttctgtttttttccctaggtacacagtaaagtcatacagatctttgaaagatatgtagtcagacttattgagtaaaaggggttgggcatggtggctcacacctgtaatcccagcactttggaaggccmtggcaaggagattacttgagtccaggagttcaagaccagcctgggcaacatagggagaccccatctctacaaaaaataaaaaattggctggacatggtgatgtgcacctgtaatcccagctactcaggaggctgaggtgggaggatcacttgagcccaggaggtagagactgtggtgaggtgtgatttggccactgca

SEQ ID NO: 510422 - DNA, 622 bp, Homo sapiens
aattagataacagtgtatcttttgttaattataatttaatctccttaatggggctatcttttgtcttatcagcaccacattgattaattcattttgaatgcacatgtgaaatctgatgttcattcctaagctttcagttttcaacctacaccccttgtatgggtccagccctgtttactcccatgaagacgaggacagtaggattttaattcctgagaccatgtggccccatgtggcagccagaacacagaaacttcttgatagctcctactgtggtcttcaggaagcctttttgaagagcaattctrataccacaactgctgaaactatctggcagatggcatggaccactccaaaaagtagcaattctcgttgttagaagtatttaaacaaagcttggtgtattagtctgttctcatgctgctaataaagacatacctgagactgagtagttgataaaggaaagaggtataatggacttacagttccacatggctggggaggcctcacaatcatggtggaagaagaaggaagagcaaagggatattttatatggtggcaggcaagagggcatgttcaagggagctccctttataaaaccatcaggttgtcaggtgtggtg

SEQ ID NO: 510423 - DNA, 513 bp, Homo sapiens
cacatacacacattatctacatatatgaatatgcatacacacatgcacatacatacttgtgtatacatacatgtgtatgttcagacatatacatgttttagaaatcatgagttctggccaggtgcagtggctcatgcccataatcccagcactttgggaggctgaagcaggtggagttctgaggtcaggagttcaagaccagcctggccaacatgatgaaaccccgtctctactaaaaatacaaaaaaaaaaaaaaawttagctgggtgtggtggtgggcacctgtaatcccagctacttgggaggctgaagcaggagaatcactggaacccaggaggtggaggttgcagtgagccgagattgtgccactccactccagcctgggcaacaagagcaaaactccgtctcaaaaaaaaaaaaaaaaaggaaagaaataatgagttcttggctttcaacaacatcaacacatttattcatttgttcaagcatataatatgtctaaaatgtttcaga

SEQ ID NO: 510424 - DNA, 513 bp, Homo sapiens
cacatacacacattatctacatatatgaatatgcatacacacatgcacatacatacttgtgtatacatacatgtgtatgttcagacatatacatgttttagaaatcatgagttctggccaggtgcagtggctcatgcccataatcccagcactttgggaggctgaagcaggtggagttctgaggtcaggagttcaagaccagcctggccaacatgatgaaaccccgtctctactaaaaatacaaaaaaaaaaaaaaaattagctgggtgtggtggtgggcacctgtaatcccagctacttgggaggctgaagcaggagaatcactggaacccaggaggtggaggttgcagtgagccgagattgtgccactccactccagcctgggcaacaagagcraaactccgtctcaaaaaaaaaaaaaaaaaggaaagaaataatgagttcttggctttcaacaacatcaacacatttattcatttgttcaagcatataatatgtctaaaatgtttcaga

SEQ ID NO: 510425 - DNA, 650 bp, Homo sapiens
aaattattattttggtttttgtgataagtgtattgtggttaggtttaaacatttcttatattctaaagatacctgctgaagtatctatattatactgtactatctagaatttgagaactccaggaaaaatgtatgtataggtgaaaaataggttaaataagataggcaaaatattaatcattgttgaagttaggtgatgcttaaattcattcattgtattctctcttttttttttttcttttttgagaygcagttttgctcttgttgcccaggctggagtgcagtggcacaatctcggctcactgcaacctccgcctcctgggtccaagtgattctcctgcctcagccttctgagtagctgggattacaggcatgcgccaccatgcctggctaattttgtatttttagtagagatggggtttctccatgttggtcaagctgggctcgaactcccgacctcaggtgatccacccgccttggcctcccaaagtgctgggattacaggcgtgagccactgcgcccggccgtattctctattcctgtatatatttgaaaatgcacattaaaacactttttaaaaactatataaaacaaagattacatcagtgtaacaagaatagaatattattgtaagaaacattctgaaaata

SEQ ID NO: 510426 - DNA, 557 bp, Homo sapiens
cttcttgtcccaaatattaaatrtgctttattacagcactcatcattaagttattcattgtgtggcctttctttcttcctgtctttctttctctctctctctctcccttcctctctcccttttttactttcttttctcattttttttcttttatttggaatcatgaagagggaatatatctccacgttgtttgacacattacacagataaaagaatagtccctagatacataaaattctagaaagcagaagcatatgtaaaaatataatctcactgatgtgccttttgccttaagattcatgaatatcttaaaaaataatttgaatgtgcacagctaagcctaatgttgtctccaaaagcttagaggtttcaggtaacatctgtgttaaaaaaaactatagaatcatatagatgaaagtttatttaatcatgatgtagttcaggggtccccaatccctaagcattggaccagtaccagtccatggcctattaggaactgggccacacagcaggaggtgagtggctggtgagtgagtgaagcttaatctgtgtttata

SEQ ID NO: 510427 - DNA, 514 bp, Homo sapiens
tcattaagttattcattgtgtggcctttctttcttcctgtctttctttctctctctctctctcccttcctctctcccttttttactttcttttctcattttttttcttttatttggaatcmtgaagagggaatatatctccacgttgtttgacacattacacagataaaagaatagtccctagatacataaaattctagaaagcagaagcatatgtaaaaatataatctcactgatgtgccttttgccttaagattcatgaatatcttaaaaaataatttgaatgtgcacagctaagcctaatgttgtctccaaaagcttagaggtttcaggtaacatctgtgttaaaaaaaactatagaatcatatagatgaaagtttatttaatcatgatgtagttcaggggtccccaatccctaagcattggaccagtaccagtccatggcctattaggaactgggccacacagcaggaggtgagtggctggtgagtgagtgaagcttaatctgtgtttat

SEQ ID NO: 510428 - DNA, 241 bp, Homo sapiens
tgctttatcagctttccactgtgcatgtaactctgcctggcatttggtattggggtgggtgtggtgctttgagagaggcacagcagaaccactgagagaaaggwcggtgtttttccgtttagaccctcattcatcccctcctttctctattttgcaggtgcagaacattgagttatgggggtccagggtaaacttggctaccttggtaaacatggctacaaggtaaacatggctgctttaa

SEQ ID NO: 510429 - DNA, 428 bp, Homo sapiens
gatctcggctcactgcaacctctgtctacctggttcaagtgattctcctgcctaagcctcctgagtagcttgggttacaggtgcctgccaccacgcctggctaatttatttttagtagagatggggtttcaccaggtttgccaggctartctgaaactcctgacctcatgatcagcctgcctcggcctcccaaagtgctgggattaccaacatgagccactgtgcccggcctactttcctattttcatatttctgattttttatttattatctactatctctgcctagggctttgcccttatgtaaaataagagcatcagtaacttgcattctttttcttaattcttatttcaatggccagtggcatttattttctaaaatataaatctttagtatcttaacttaggtttttggtagaaacctaaaac

SEQ ID NO: 510430 - DNA, 447 bp, Homo sapiens
caggcagctggtgagtgttcacggattaccctcagtagtctcccagaggccaaaaccacccacctgatagtgacttttcccaagccaggaggaagagaaaagagcaggtcccactcacctgaatctgatcagtgagctgtgttgagatgtgcctctcatctagaaaatggtccttcaygcagagctactcacagacactgctgtgtgtctctaactgctccacaacacagaggcgatgggaactcagcaacagtgacattgtggggtgacacaacccaccaccatgggagtctgcttgggtcaacagggcccagagtcagtgtcctctatcccctgaactgacatgtgtgtatgcaatgtatttgagtatgcatgtgtgcctgtgtgtgtgtgtgtgtgtgtgtgtgtgtgtgtgtttgtcttgcttctctggacaggcctagcttc

SEQ ID NO: 510431 - DNA, 609 bp, Homo sapiens
taatatttcatttttccttaaatgattcttaatgacttgcagtttttaaaaacttaccctgagagtaarccaaattacccactaaatagtgttttcacaccgaagatgtgtaagagcatacctgttgtaaggaattataattttaaaatcgttctaaagaagcaccattgtttctaaggtgatttctactgaacaagcagttcaaacaaagtagacagggaagagaaatggctatcagtgacgtatggctcaacaggtaaaacttcctgccttctaaaatggctctacttgtaagattctgaagattccattagaaatacttgtatttaaagggtaataatgtgggaaaatgaatatgttgatttgcttgattataagaaccacttcactagaaataattatatcaaaacatcatgttgtactccttaatgtaggttaagaaaactaaaatgaatgaaaaaaaatctaggaatacttgtgtttagtaaaccagttttggatttcactcttgtacatttcacccattatctaggaccaattaaacatttggcactgaggaataattcagagcaacaactcctaggggagaactagattgtctggttggtg

SEQ ID NO: 510432 - DNA, 609 bp, Homo sapiens
taatatttcatttttccttaaatgattcttaatgacttgcagtttttaaaaacttaccctgagagtaaaccaaattacccactaaatagtgttttcacacmgaagatgtgtaagagcatacctgttgtaaggaattataattttaaaatcgttctaaagaagcaccattgtttctaaggtgatttctactgaacaagcagttcaaacaaagtagacagggaagagaaatggctatcagtgacgtatggctcaacaggtaaaacttcctgccttctaaaatggctctacttgtaagattctgaagattccattagaaatacttgtatttaaagggtaataatgtgggaaaatgaatatgttgatttgcttgattataagaaccacttcactagaaataattatatcaaaacatcatgttgtactccttaatgtaggttaagaaaactaaaatgaatgaaaaaaaatctaggaatacttgtgtttagtaaaccagttttggatttcactcttgtacatttcacccattatctaggaccaattaaacatttggcactgaggaataattcagagcaacaactcctaggggagaactagattgtctggttggtg

SEQ ID NO: 510433 - DNA, 609 bp, Homo sapiens
taatatttcatttttccttaaatgattcttaatgacttgcagtttttaaaaacttaccctgagagtaaaccaaattacccactaaatagtgttttcacaccgaagatgtgtaagagcatacctgttgtaaggaattataattttaaaatcgttctaaagaagcaccattgtttctaaggtgatttctactgaacaagcagttcaaacaaagtagacagggaagagaaatggctatcagtgaygtatggctcaacaggtaaaacttcctgccttctaaaatggctctacttgtaagattctgaagattccattagaaatacttgtatttaaagggtaataatgtgggaaaatgaatatgttgatttgcttgattataagaaccacttcactagaaataattatatcaaaacatcatgttgtactccttaatgtaggttaagaaaactaaaatgaatgaaaaaaaatctaggaatacttgtgtttagtaaaccagttttggatttcactcttgtacatttcacccattatctaggaccaattaaacatttggcactgaggaataattcagagcaacaactcctaggggagaactagattgtctggttggtg

SEQ ID NO: 510434 - DNA, 609 bp, Homo sapiens
taatatttcatttttccttaaatgattcttaatgacttgcagtttttaaaaacttaccctgagagtaaaccaaattacccactaaatagtgttttcacaccgaagatgtgtaagagcatacctgttgtaaggaattataattttaaaatcgttctaaagaagcaccattgtttctaaggtgatttctactgaacaagcagttcaaacaaagtagacagggaagagaaatggctatcagtgacgtatggctcaacaggtaaaacttcctgccttctaaaatggctctacttgtaagattctgaagattccattagaaatacttgtatttaaagggtaataatgtgggaaaatgaatatgttgatttgcttgattataagaaccacttcactagaaataattatatcaaaacatcatgttgtactccttaatgtaggtkaagaaaactaaaatgaatgaaaaaaaatctaggaatacttgtgtttagtaaaccagttttggatttcactcttgtacatttcacccattatctaggaccaattaaacatttggcactgaggaataattcagagcaacaactcctaggggagaactagattgtctggttggtg

SEQ ID NO: 510435 - DNA, 663 bp, Homo sapiens
taagtgttctgagcacattaaaggtatgccaggctaagctgtgatattcagtaagttargtattaaatacatttttaacttactgtattttcaatttataatcagcttatcaagacttaaccccattgtacattgaaaagcatttgtattgcattaaacatgttatataatatttttaattgaaattactggcaacttttgaaaaaatgtaatgaaataatgtgctttgctattggttaaaatgtttttgggcagggtcagtggcttacacctgtaatcccagcactttggtaggctgaggtgggcagatcacttgaggtcaggagtttgagaccagcctggcaaacaggtgaaaccccatctctactaaaaatacaaaaattatctgagtgtggtggcatgtgcctgtaatcccagctactagggaggctgaggtgtgagaattgcttgaaccaggcaagcagaggttgcagtgagccaagatcatgccattgcactccagcctgggcaacagagtaaggttctgtcaaaaataaaaaagaaagaaagaaaagaaaaaaaaagtttttagcttcaagtaacagaatagtcaactaattgaagaaaataacaaggagcaactttgaccaaattgcacaacaaatagatggtatcaatgcttag

SEQ ID NO: 510436 - DNA, 663 bp, Homo sapiens
taagtgttctgagcacattaaaggtatgccaggctaagctgtgatattcagtaagttaggtattaaatacatttttaacttactgtattttcaatttataatcagcttatcaagacttaaccccattgtacattgaaaagcatttgtattgcattaaacatgttatataatatttttaattgaaattactggcaacttttgaaaaaatgtaatgaaataatgtgctttgctattggttaaaatgtttttgggcagggtcagtggcttacacctgtaatcccagcactttggtaggctgaggtgggcagatcacttgaggtcaggagtttgagaccagcctggcaaacaggtgaaaccccatctctactaaaaatacaaaaattatctgagtgtggtggcatgtgcctgtaatcccagctactagggaggctgaggtgtgagaattgcttgaacyaggcaagcagaggttgcagtgagccaagatcatgccattgcactccagcctgggcaacagagtaaggttctgtcaaaaataaaaaagaaagaaagaaaagaaaaaaaaagtttttagcttcaagtaacagaatagtcaactaattgaagaaaataacaaggagcaactttgaccaaattgcacaacaaatagatggtatcaatgcttag

SEQ ID NO: 510437 - DNA, 663 bp, Homo sapiens
taagtgttctgagcacattaaaggtatgccaggctaagctgtgatattcagtaagttaggtattaaatacatttttaacttactgtattttcaatttataatcagcttatcaagacttaaccccattgtacattgaaaagcatttgtattgcattaaacatgttatataatatttttaattgaaattactggcaacttttgaaaaaatgtaatgaaataatgtgctttgctattggttaaaatgtttttgggcagggtcagtggcttacacctgtaatcccagcactttggtaggctgaggtgggcagatcacttgaggtcaggagtttgagaccagcctggcaaacaggtgaaaccccatctctactaaaaatacaaaaattatctgagtgtggtggcatgtgcctgtaatcccagctactagggaggctgaggtgtgagaattgcttgaaccaggcaagcagaggttgcagtgagccaagatcatgccaytgcactccagcctgggcaacagagtaaggttctgtcaaaaataaaaaagaaagaaagaaaagaaaaaaaaagtttttagcttcaagtaacagaatagtcaactaattgaagaaaataacaaggagcaactttgaccaaattgcacaacaaatagatggtatcaatgcttag

SEQ ID NO: 510438 - DNA, 644 bp, Homo sapiens
gttctgagcacattaaaggtatgccaggctaagctgtgatattcagtaagttaggtattaaatacatttttaacttactgtattttcaatttataatcagcttatcaagacttaaccccattgtacattgaaaagcatttgtattgcattaaacatgttatataatatttttaattgaaattactggcaacttttgaaaaaatgtaatgaaataatgtgctttgctattggttaaaatgtttttgggcagggtcagtggcttacacctgtaatcccagcactttggtaggctgaggtgggcagatcacttgaggtcaggagtttgagaccagcctggcaaacaggtgaaaccccatctctactaaaaatacaaaaattatctgagtgtggtggcatgtgcctgtaatcccagctactagggaggctgaggtgtgagaattgcttgaaccaggcaagcagaggttgcagtgagccaagatcatgccattgcactccagcctgggcaacwgagtaaggttctgtcaaaaataaaaaagaaagaaagaaaagaaaaaaaaagtttttagcttcaagtaacagaatagtcaactaattgaagaaaataacaaggagcaactttgaccaaattgcacaacaaatagatg

SEQ ID NO: 510439 - DNA, 590 bp, Homo sapiens
taatatcaatggctatgccttcagtgagttctcagaccacattacaaygtagttaactatttatcttttattacgttctagacctattatttctttctggcacaaaaatatcttctttgtagattatggcatttacctctatctccacaccattttggtctctcatccacagatcatcagcctcttgcttagtcttccatttaatgacaatttctatttagtatacaacagtccttccccctgcaatgcaatttcttcactctttaaagctctgagtctggctactggtctctgttatgtactcatccctagagccaagtcttcaaatatttctcagaacttcttcacatctaaaaatctaggattaatttattgctctctgattatattcttctggtatttcaagtatcctgtataacttcttcatctgcccttgcttttcttctacatcaagatgtcaagttcatggacttcccaattaatcattttaaaaatgtatttcaagcctttatgagtcactaaaatatacatatgttctcaggaattatggccctacaatttgtatgtgagaatagttcctgtgtcaggca

SEQ ID NO: 510440 - DNA, 590 bp, Homo sapiens
taatatcaatggctatgccttcagtgagttctcagaccacattacaacgtagttaactatttatcttttattacrttctagacctattatttctttctggcacaaaaatatcttctttgtagattatggcatttacctctatctccacaccattttggtctctcatccacagatcatcagcctcttgcttagtcttccatttaatgacaatttctatttagtatacaacagtccttccccctgcaatgcaatttcttcactctttaaagctctgagtctggctactggtctctgttatgtactcatccctagagccaagtcttcaaatatttctcagaacttcttcacatctaaaaatctaggattaatttattgctctctgattatattcttctggtatttcaagtatcctgtataacttcttcatctgcccttgcttttcttctacatcaagatgtcaagttcatggacttcccaattaatcattttaaaaatgtatttcaagcctttatgagtcactaaaatatacatatgttctcaggaattatggccctacaatttgtatgtgagaatagttcctgtgtcaggca

SEQ ID NO: 510441 - DNA, 590 bp, Homo sapiens
taatatcaatggctatgccttcagtgagttctcagaccacattacaacgtagttaactatttatcttttattacgttctagacctattatttctttctggcacaaaaatatcttctttgtagattatggcattwacctctatctccacaccattttggtctctcatccacagatcatcagcctcttgcttagtcttccatttaatgacaatttctatttagtatacaacagtccttccccctgcaatgcaatttcttcactctttaaagctctgagtctggctactggtctctgttatgtactcatccctagagccaagtcttcaaatatttctcagaacttcttcacatctaaaaatctaggattaatttattgctctctgattatattcttctggtatttcaagtatcctgtataacttcttcatctgcccttgcttttcttctacatcaagatgtcaagttcatggacttcccaattaatcattttaaaaatgtatttcaagcctttatgagtcactaaaatatacatatgttctcaggaattatggccctacaatttgtatgtgagaatagttcctgtgtcaggca

SEQ ID NO: 510442 - DNA, 590 bp, Homo sapiens
taatatcaatggctatgccttcagtgagttctcagaccacattacaacgtagttaactatttatcttttattacgttctagacctattatttctttctggcacaaaaatatcttctttgtagattatggcatttacctctatctccacaccattttggtctctcatccacagatcatcagcctcttgcttagtcttccatttaatgacaatttctatttagtatacaacagtccttccccctgcaatgcaatttcttcactctttaaagctctgagtctggctactggyctctgttatgtactcatccctagagccaagtcttcaaatatttctcagaacttcttcacatctaaaaatctaggattaatttattgctctctgattatattcttctggtatttcaagtatcctgtataacttcttcatctgcccttgcttttcttctacatcaagatgtcaagttcatggacttcccaattaatcattttaaaaatgtatttcaagcctttatgagtcactaaaatatacatatgttctcaggaattatggccctacaatttgtatgtgagaatagttcctgtgtcaggca

SEQ ID NO: 510443 - DNA, 402 bp, Homo sapiens
aaattgtccagcaatgcatttctcagacacacccctgtcattaagtgacacatgactgtattagttaacacyatgggaacttcatgggaaatggacactctagctccaccataaatagaaactgtttatgtcaaaaaaacacataaaagcatagttgcaagattacatttccttccagatatttcatttagtatctccacagatcactaacttcctgaatagcattcttgtgtctccactgcctcacatttgatttcaggtcattccatcaattgtcaaagacgcatccaacattaactttccaactactggtttggattgtgtcaacattgtcattctgggccacaacaacacaaaaggctaactcagtgaggtaacatagacactgatcagtgagatttt

SEQ ID NO: 510444 - DNA, 500 bp, Homo sapiens
ccagagatagcttcaagaacatcagtaagctccttgccagtcagtccaggaaggacctggacccagccatggacctgttggtgctgtctcagggacacaagacaaacatcctggacatcatccacatacacaaggaagctcttaccaaagtcatggagaacaggcmacatgtggcagaagggaagacagagatgcagaggctgatggcgtcattatcacaggaacaggatttctttggccactttggctgaaatttaccacttccatgcaattcactcaagtgagagacttgaaatcacagatggagcatttcttgcaacaagagatactattttttcaaacagtcacctaaaatttgatagtgttgaatgactagctattcaattgtggactttttccagttcatgggtactttctacagcagaatgataacagtatcaaagagctggtgccagctatcggtggtagtacaagcatgactttgtgctcaactgaaaccc

SEQ ID NO: 510445 - DNA, 500 bp, Homo sapiens
ccagagatagcttcaagaacatcagtaagctccttgccagtcagtccaggaaggacctggacccagccatggacctgttggtgctgtctcagggacacaagacaaacatcctggacatcatccacatacacaaggaagctcttaccaaagtcatggagaacaggcaacatgtggcagaagggaagacagagatgcagaggctgatggcgtcattatcacaggaacaggatttctttggccactttggctgaaatttaccacttccatscaattcactcaagtgagagacttgaaatcacagatggagcatttcttgcaacaagagatactattttttcaaacagtcacctaaaatttgatagtgttgaatgactagctattcaattgtggactttttccagttcatgggtactttctacagcagaatgataacagtatcaaagagctggtgccagctatcggtggtagtacaagcatgactttgtgctcaactgaaaccc

SEQ ID NO: 510446 - DNA, 299 bp, Homo sapiens
gccgccaacctcactcactgccagacgtggtacmtcagttcttctaccctaaaggtggggccaagaggcagaccacaggccatcttgaggaggactttatgttcaagtgcagaaagcaggcaggattaccaccctgggtactcgcccttctgtggcctgtagtgcatatgagccatgaggatggactagtgccatctgctttatacaaaaattaacttaagattgattaaggagttaaatatgtcacctgcttttcctcaggcctctgctccatcaggtatcaggtggcagctactcat

SEQ ID NO: 510447 - DNA, 550 bp, Homo sapiens
agctgaaaccctacaagccagaaaagatattcaacttcttaaagaaaagaaatttcacgtagtatggcagagacagatataccatataataacatggtgttattataaatggttaaaagaaaaagaaatytcaacccagaatttcatgtccagcaaaattaagcatcataagtgaaggagaaacaagatccttttcagacaagcaaatgctgagagaattcattatcaccagatctaccttacaagagctcctgaatgaagcactaaatatggaaagaaaagaccatcaccagccactacaaaaatgcaccgaagtactcagaccagtaatgttaaaaaccaaccacatacacaagtctgcaaaataactagctgacagcatgacgacaggatctaatccacacataccattactaaccttaaatggaaatgggctaaatgctccgattgaaagacacagggggcaagctggataaagaaccaagacccatttgagtatgccgtctccaagaaacccatctcacatgcagtgccatacctaggctcaaaa

SEQ ID NO: 510448 - DNA, 550 bp, Homo sapiens
agctgaaaccctacaagccagaaaagatattcaacttcttaaagaaaagaaatttcacgtagtatggcagagacagatataccatataataacatggtgttattataaatggttaaaagaaaaagaaatctcaacccagaatttcatgtccagcaaaattaagcatcataagtgaaggagaaacaagatccttttcagacaagcaaatgctgagagaattcattatcaccagatctaccttacaagagctcctgaatgaagcactaaatatggaaagaaaagaccatcaccagccactacaaaaatgcaccgaagtacwcagaccagtaatgttaaaaaccaaccacatacacaagtctgcaaaataactagctgacagcatgacgacaggatctaatccacacataccattactaaccttaaatggaaatgggctaaatgctccgattgaaagacacagggggcaagctggataaagaaccaagacccatttgagtatgccgtctccaagaaacccatctcacatgcagtgccatacctaggctcaaaa

SEQ ID NO: 510449 - DNA, 550 bp, Homo sapiens
agctgaaaccctacaagccagaaaagatattcaacttcttaaagaaaagaaatttcacgtagtatggcagagacagatataccatataataacatggtgttattataaatggttaaaagaaaaagaaatctcaacccagaatttcatgtccagcaaaattaagcatcataagtgaaggagaaacaagatccttttcagacaagcaaatgctgagagaattcattatcaccagatctaccttacaagagctcctgaatgaagcactaaatatggaaagaaaagaccatcaccagccactacaaaaatgcaccgaagtactcagaccagtaatgttaaaaaccaaccacatacacaagtctgcaaaataactagctgacagcatgacgacaggatctaatccacacataccattactaaccttaaatggaaatgggctaaatgctccgattgaaagacacagggggcaagctggataaagaaccaagacccatttgagtatgcygtctccaagaaacccatctcacatgcagtgccatacctaggctcaaaa

SEQ ID NO: 510450 - DNA, 299 bp, Homo sapiens
gccgccaacctcactcactgccagacgtggtacctcagttcttctaccctaaaggtggggccaagakgcagaccacaggccatcttgaggaggactttatgttcaagtgcagaaagcaggcaggattaccaccctgggtactcgcccttctgtggcctgtagtgcatatgagccatgaggatggactagtgccatctgctttatacaaaaattaacttaagattgattaaggagttaaatatgtcacctgcttttcctcaggcctctgctccatcaggtatcaggtggcagctactcat

SEQ ID NO: 510451 - DNA, 299 bp, Homo sapiens
gccgccaacctcactcactgccagacgtggtacctcagttcttctaccctaaaggtggggccaagaggcagaccacaggccatcttgaggaggactttatgttcaagtgcagaaagcaggcaggattaccaccctgggtactcgcccttctgtggcctgtagtgcatatgagccatgaggatggactagtgccatctgctttatacaaaaattaacttaagattgattaargagttaaatatgtcacctgcttttcctcaggcctctgctccatcaggtatcaggtggcagctactcat

SEQ ID NO: 510452 - DNA, 299 bp, Homo sapiens
gccgccaacctcactcactgccagacgtggtacctcagttcttctaccctaaaggtggggccaagaggcagaccacaggccatcttgaggaggactttatgttcaagtgcagaaagcaggcaggattaccaccctgggtactcgcccttctgtggcctgtagtgcatatgagccatgaggatggactagtgccatctgctttatacaaaaattaacttaagattgattaaggagttaaatatgycacctgcttttcctcaggcctctgctccatcaggtatcaggtggcagctactcat

SEQ ID NO: 510453 - DNA, 510 bp, Homo sapiens
tggggtggcccagtggtgttcaatggcccagtcaaaagtggacaaagcaggtgtttggatggacctrggagatcttgctcagagattctgacaggacaaaggtaaaggaagggccagagtggttggagagatagtcacagtctatggtctgcacaggatggaggaggccagggaacaggcagggtgggcagcttggtttcagggagagacaggtgcatgctgggaggtcagaccctatgagggttgtgggggcgtcaggtggtgtgggctccaggtgcaccctcagcgcactgggcaggtcttggcccaggctccttggactttggccgggtgatgtggtcacttgctgggagactgttgtcaggtgctggccacccaccctgggtagcactgtcccatctcaggactggacttcctcagatactgtagacggcacagcctcccagcccatggaggggcagccccttggtgcagcctgagctccccatgggcctggagcatcccctgcca

SEQ ID NO: 510454 - DNA, 510 bp, Homo sapiens
tggggtggcccagtggtgttcaatggcccagtcaaaagtggacaaagcaggtgtttggatggacctgggagatcttgctcagagattctgacaggacaaaggtaaaggaagggccagagtggtkggagagatagtcacagtctatggtctgcacaggatggaggaggccagggaacaggcagggtgggcagcttggtttcagggagagacaggtgcatgctgggaggtcagaccctatgagggttgtgggggcgtcaggtggtgtgggctccaggtgcaccctcagcgcactgggcaggtcttggcccaggctccttggactttggccgggtgatgtggtcacttgctgggagactgttgtcaggtgctggccacccaccctgggtagcactgtcccatctcaggactggacttcctcagatactgtagacggcacagcctcccagcccatggaggggcagccccttggtgcagcctgagctccccatgggcctggagcatcccctgcca

SEQ ID NO: 510455 - DNA, 384 bp, Homo sapiens
gggtggcccagtggtgttcaatggcccagtcaaaagtggacaaagcaggtgtttggatggacctgggagatcttgctcagagattctgacaggacaaaggtaaaggaagggccagagtggttggagagatagtcacagtctatggtctgcacaggatggaggaggccagggaacaggcagggtgggcagcttggtttcagggagagrcaggtgcatgctgggaggtcagaccctatgagggttgtgggggcgtcaggtggtgtgggctccaggtgcaccctcagcgcactgggcaggtcttggcccaggctccttggactttggccgggtgatgtggtcacttgctgggagactgttgtcaggtgctggccacccaccctgggt

SEQ ID NO: 510456 - DNA, 510 bp, Homo sapiens
tggggtggcccagtggtgttcaatggcccagtcaaaagtggacaaagcaggtgtttggatggacctgggagatcttgctcagagattctgacaggacaaaggtaaaggaagggccagagtggttggagagatagtcacagtctatggtctgcacaggatggaggaggccagggaacaggcagggtgggcagcttggtttcagggagagacaggtgcatgctgggaggtcagaccctatgagggttgtgggggcgtcaggtggtgtgggctccaggtgcaccctcagcgcactgggcaggtcttggcccaggctccytggactttggccgggtgatgtggtcacttgctgggagactgttgtcaggtgctggccacccaccctgggtagcactgtcccatctcaggactggacttcctcagatactgtagacggcacagcctcccagcccatggaggggcagccccttggtgcagcctgagctccccatgggcctggagcatcccctgcca

SEQ ID NO: 510457 - DNA, 467 bp, Homo sapiens
ggggtggcccagtggtgttcaatggcccagtcaaaagtggacaaagcaggtgtttggatggacctgggagatcttgctcagagattctgacaggacaaaggtaaaggaagggccagagtggttggagagatagtcacagtctatggtctgcacaggatggaggaggccagggaacaggcagggtgggcagcttggtttcagggagagacaggtgcatgctgggaggtcagaccctatgagggttgtgggggcgtcaggtggtgtgggctccaggtgcaccctcagcgcactgggcaggtcttggcccaggctccttggacyttggccgggtgatgtggtcacttgctgggagactgttgtcaggtgctggccacccaccctgggtagcactgtcccatctcaggactggacttcctcagatactgtagacggcacagcctcccagcccatggaggggcagccccttg

SEQ ID NO: 510458 - DNA, 166 bp, Homo sapiens
caccactcttactattcttcaaatatttttattatatttaaacacaagcctagttttatctygagtgtctgaccttgatgatattgtacactttaaacttagaaaaaatgaactctattggaaatttcctacagatcagcttttctagatgccaagcgccttgttt

SEQ ID NO: 510459 - DNA, 166 bp, Homo sapiens
caccactcttactattcttcaaatatttttattatatttaaacacaagcctagttttatctcgagtgtctsaccttgatgatattgtacactttaaacttagaaaaaatgaactctattggaaatttcctacagatcagcttttctagatgccaagcgccttgttt

SEQ ID NO: 510460 - DNA, 545 bp, Homo sapiens
caagtggccaccttccgccccacgggggacagagaaggggggccggtttgtgctccactaggaggcatcagcaagagaaatcaagaagcgtttcccaatagtgcagcctgggagtgcgatctgtctcgatgaaactgtgaccacggtggctacattttctcaggtccctggtgcctctcactcctctttctgtgtacaccgccccccaccccatcttgtccccaccrttgttgtttcagtctaatcccttatgagccccaaaagagaaagtctgaatggcctggcactctgtaaaaggagcctgaagggggcaatgcttaagcccaaaagagagtgatcccctgctggggtggcgggcactatggcagcaaatgtggagtcttcctgatgctgcagaaaaggaaggcccaaccaaactatggcagcaatgactttctcttctttaatgccttggccccttgccaaggcctccaaatgggcgcccccttgagagacaggcaagcatgcagggtgctgctgactcggctggcagtgacggtgcttcc

SEQ ID NO: 510461 - DNA, 492 bp, Homo sapiens
tgccatctcagaaagtaaggactattcctgctcctctggtccatttctaagtctgagctaaatctccacaggagaggcctaacagaaccttgagtttgattctatatgccctagagtctttgctgacatcaactacatagaatatgttttgtcttatatgttaaatgcttttcaggtctagtttcagacagcttagcctacctcatggtcttgaagttattttcctgaattgtgttctgtatactctactacatatttttgtatttatgtctatgaactgactataattaattttgtgtgtaatgtcaggtcataggtcagattttagtttctccctgtggatattcaataccctggaatattttaataaaaatccaattttcccccattcagcaacttaaatatatgcttatatatgcatacgtctgttttttaagttattggctrtttattctatctctgtgcaaataccacactcttattattaagaga

SEQ ID NO: 510462 - DNA, 620 bp, Homo sapiens
tggagaaagtggtgattgacagaagcctggtggggaagctcatctcagacaccatcagtgatggtaattacccccatgtgcaaatcaattgcctacattaacagtggggcaggagaaatagtgtgtcaacaggtagactaattattaccactggggacttgcaaacacaacaagtaattgcttgtaatagcgtacttacaccccctgggaccaatacaagtttcgactaatatttaatatcaaagtttttttcttgtcaactgttaagcttatattctgagttgttttttactttttccttaaaagaagtgaacattttttcaaaatagggttttgttttcattctttcaaaattatttctctrtaactggcacttcaaatatatattttatttccaaatgaattttgaataaataacacaaatatatcaacacaaccaccagtacacaattgatgctttggctctcataggaagattctttgttcctaaagtcttagagagattttgggctatattttctaaatagtaaagaccaatgcctaatatactggacagtcaggtcctattaagtgacatctcaatcagtctgtaattggtacaaagcacataagaaaaagat

SEQ ID NO: 510463 - DNA, 597 bp, Homo sapiens
ccttgtggaactcaagtatatgaaaagtcagtcctctgtttacatagatttcccacatactgggaatactgtattttctatttgcatttggttgaaaaacatccacctataagtggaccctacagttcaaactcatgttgttcaaggaccgactatatatactaggtcttaattttttaatgtttattttaaaactagtacattacattatttctttctattggtcacttgtctacttagaattcctatatatcctttctgatagtaaaatatttccacaagattgttaacaggtttctaaagttttttcctttgtctacccagccctactaattagaaatatatttctaataagcaatttaccaataatttcagaattgacaarggtggtaggttgaaggagattaactaatcatttaaagtccaactttgtgttggtaagttcttattcattctttttaactttttaagatattctgctaaccatatgatattactaaaagctgactttcttagtttttatgtactgtggaacatatttaaagtgatttacaggccttccaaaacaaattgttaaagttaaaatcttatagttta

SEQ ID NO: 510464 - DNA, 640 bp, Homo sapiens
gatgaacctgataaggtaggagactatacaactaaagagttgcaagaattcgacactatgtgccagcaaaaataggggagcacctctcggattggattaagaggatgcttgaacatgggagctggaatggaaaactgggtaagagtccatttatgtggaggtactttttcaggacacaggatttaacaccttactgaggagcccaagagatggagctaattgctgctggaatggctcttagatgcctggaaaaagtaatgtccaatactcaatgaagtgaaataccccaattgttatggcacaagaaaaaatggaaagcatagcagggagagtaagaatcatytgaagccgagatgagatgcagtgacagtgggttcagtttatattatgaacctcccatttcacctcccctcagttactatggaatagctgagcctatgtggaaaagtagacctattcagccaataggtggatagtggagatcttgagaatgcacccctcagatttctgacttcattcaacaaaatagaccagcagccctggctgctatggtctgaaatccattagtgcatctgcacagaacatataattcccacaggctgctcccagccaatccccagcagggattctagggcagctc

SEQ ID NO: 510465 - DNA, 611 bp, Homo sapiens
taccccaattgttatggcacaagaaaaaatggaaagcatagcagggagagtaagaatcatctgaagccgagatgagatgcagtgacagtgggttcagtttatattatgaacctcccatttcacctcccctcagttactatggaatagctgagcctatgtggaaaagtagacctattcagccaataggtggatagtggagatcttgagaatgcacccctcagatttctgacttcattcaacaaaatagaccagcagccctggctgctatggtctgaaatccattagtgcatctgcacagaacatataattcccacaggctgctcccagccaatccccagcagggattctagggcagctccctttctgggagacatggaactgcctgttattgttctttkcctagcctcaagtcatctcactctatgaatgcatagctcagagttcagccaaagactcaaggtgactcttatgtagatttatggagctctttctccacaaagcacctgcctctccagtacacaaacctgcaaattcaagctgcctcatcttccctgaactccaactaactcaaaaaactgccatgttccacttgcattccctctctttgctct

SEQ ID NO: 510466 - DNA, 545 bp, Homo sapiens
gctgctattctaggtttagttttctttggaaaagcaaatcagcacatctcctggcrttaggaatgcaactattgaattggtacgtgctatttttctgaaaatcaataaacagagaaggctagtactttgttccactaagcaacaacaatataccgttacagtcttttcacataattgagccaatgtgctggtcctgtaaaaaaattgggtctacagggactctaattttttcaccactttagaattcaacatgctagtccaccaccaggatgacacaataatgacagaagatatttcatataaaagcatgagaagcttatgtaattattgaggcacagaaaaatagtcttttatttagaggggatttaatttcatatcaaggacctattagatatatcaacttacttttaatattaaatcagttttgaaatatcaaataatctttcaaattatttgtattaggatgtgtgcagtggctcatgcttctaatcccagcactttgggaggccgagatgggttaatcacctgaggtcggagttcaagac

SEQ ID NO: 510467 - DNA, 545 bp, Homo sapiens
gctgctattctaggtttagttttctttggaaaagcaaatcagcacatctcctggcgttaggaatgcaactattgaattggtacgtgctatttttctgaaaatcaataaacagagaaggctagtactttgttccactaagcaacaacaatataccgttacagtcttttcacataattgagccaatgtgctggtcctgtaaaaaaattgggtctacagggactctaattttttcaccactttagaattcaacatgctagtccaccaccaggatgacacaataatgacagaagatatttcatataaaagcatgagaagcttatgtaattattgaggcacagaaaaatagtcttttatttagaggggatttaatttcatatcaaggacctattagatatatcaacttacttttaatattaaatcagttttgaaatatcaaataatctttyaaattatttgtattaggatgtgtgcagtggctcatgcttctaatcccagcactttgggaggccgagatgggttaatcacctgaggtcggagttcaagac

SEQ ID NO: 510468 - DNA, 606 bp, Homo sapiens
gctgtaacctatgaaattaaacaagttagctatttagaaaataactatggtggaccaggtgtagaatagacattttcatttcaaaagggaaaaaaagaaagaggtaacagtttctcagtaactacaaaacccaacaggaaaagcaaaactaactcttaaagctccagaataatcttccttgactccatgtctggccttctgggcatactggagttggggctaggccccaaagactcaggcagccccacccctacgctttgctgaagtcagcccatgcagtagctctgaaaggttgaaatattgtgcctgcaacgctggtagctctacaattctgaggtcttggaggaggcctcactcccatagcttcactaagtataaccctagtgaggagtcgctgacatggctctgcactgtgataattctctgtctgagacaaccttgaaaatctagttggggaaagwtatgcctccacaggaacattcttccgtctttcagaattagccccatgtcaacactgttaaggtttactgcttaaatcttctggaatggtggccccagccatattgggctggcttgagtcatcgctgtggtggccaaagagcacaa

SEQ ID NO: 510469 - DNA, 667 bp, Homo sapiens
acatcaaatttatttcagtttcatacacccttacccttaccttatcttcaacatagagcaccctgtggtcaaatcattaagtggttagctcaaaggtgatcacaaacaagttttctctgaccatccaatttaaaggtgtctctgccacttaattattcttcttacacagataaacacatacatacacacacacacatctctatgtctctctgatttacagacataacctgatttgattgtttttcactttatttcaatttgaggatacagtattctttaaattgaaagattatggcaactctgtgtccagcaattctattrgaccattattccaaaagcatgtcctcattttatttttctgtgtcacatttcggtaattatcacaatatttcaacctttttagttattatctgtcatagtgatctatgatcagtgatcattgatgttactgttatgattgttttggagaaacacaaactgtgccatataagatggtgaacttaattgataaatgttgtgtgtgttctgactcttccactaactggctatttccccatttctctctctcacatcagatctctctataccctgagacaaaacaattttgaaattaggtcacctaatcaccttatgatggtctctaagtgcttaagagaaagaaatagtc

SEQ ID NO: 510470 - DNA, 667 bp, Homo sapiens
acatcaaatttatttcagtttcatacacccttacccttaccttatcttcaacatagagcaccctgtggtcaaatcattaagtggttagctcaaaggtgatcacaaacaagttttctctgaccatccaatttaaaggtgtctctgccacttaattattcttcttacacagataaacacatacatacacacacacacatctctatgtctctctgatttacagacataacctgatttgattgtttttcactttatttcaatttgaggatacagtattctttaaattgaaagattatggcaactctgtgtccagcaattctattggaccattattccaaaagcatgtcctcattttatttttctgtgtcacatttyggtaattatcacaatatttcaacctttttagttattatctgtcatagtgatctatgatcagtgatcattgatgttactgttatgattgttttggagaaacacaaactgtgccatataagatggtgaacttaattgataaatgttgtgtgtgttctgactcttccactaactggctatttccccatttctctctctcacatcagatctctctataccctgagacaaaacaattttgaaattaggtcacctaatcaccttatgatggtctctaagtgcttaagagaaagaaatagtc

SEQ ID NO: 510471 - DNA, 640 bp, Homo sapiens
tattaatagtatgaagacttctctgcctatattgttactgatcatttcctctgtttacaaatgatcttattattctaaaatattgtggaaaccacatgctaagactccaataatcaactaaaaagataaatggatattttctcattgttatcaatctacatttggaagccagtgttctttattcatagcaaatacttccctttcagtccagcattttagtatttggggttttaaatccatcttatgtggtacattttggacaggccatttgtaacaattaaagattattgaggagttgtcaacaagcatgactatatttatatgtgtattttttwaaaaaaaattatatatatatatctccttaaaaatattaaccaagttaatattcatcaatcatctttgctaaagatatgtttgtgtcacataagaaaagtcattaaaatttacaaattaattacccataacataaatttacattgtgtcccagctggcatgataaacagcattttcaactaatctcttactaatttttttttttttttagtatctgtaatggtaagatttactaagtgttactgacttaaaacaggtcagtgttgcctgctactgtatattttctatcacagtgaggaagaatgat

SEQ ID NO: 510472 - DNA, 583 bp, Homo sapiens
agagttaagattaagtcttccaaagttaaaacattcagagtgatactgattcattctacttcagagtagactgaggtaacattttaatactattataaaaattttataataaacatttggaatattattatctgtttatctctttagtacaataataagtgcatgtcattacaaatattcaagcaaaaaatccagtttctttaatatcaattgaaaatgttttatattttgtgaccacaagttaaaatgatttagtattataattwttgttaaataaaattacaaaaatttgggaaaactacagtagcagtagatagattttatggtagccaagtctatgcacagaagcagaataactataatagaaaaattaaaaataaaccgatagcacagacaaacaaagcaaatgacaggctgtttcataaactccaaaatatgagcaagtggacaaaatcacctcctttaccagaccatgaaggatcaaacctgtgtaaaagcaaggcaacagggcttctggaagttttatgaatgagagaagcctctacattctcaacagaaaatcaacagatagtgtggaaagacc

SEQ ID NO: 510473 - DNA, 592 bp, Homo sapiens
ctagtagtttagagtgtttgaacagtcataattaaagttacatgaaaattacatatcaaggcaaagtatgtagtttctgaaaaatataggtacttgtgacttaaagaactcttttgaagatggcataagataatgtgtatgaaattccaacagttatatctatttctttgcagaatatcagggtattggttctctactttcatgctaaaaaygcaaattacctacaactagttgggactcatcgtgcgccttctaactacataaattattaggtgcttgatagactttcatgagagaagaaaggtgaaatctaaaaataaattgctatataaaaaagcctaggtatagcaaaagcaaagacttggaatttctgatttagattgtcactgctgaatgatactgttctttggaacaatgatctcagcacatccactggcattgtcttggaatagtttatttgcagatgtaattaagaatctgaaaatgacattaacctgaattagtttggaccttacatccaatgacaagatttctcataagagaagaaaagaggaattctcacagaaggaaaggcaatgagaagataaagctt

SEQ ID NO: 510474 - DNA, 620 bp, Homo sapiens
ccaattcccctggtacttaaactctttcatggaagtaaatgaagctacataaaattagttaagtcaagcagaggaatatttaagaagtttcagtttgaacacataaaactagtttcatccagaatgaattattgaatttatcaaagatgtcaagctttttttccccaagaaggctagccacagaaagacttccataccagtggattaaattaatttccaagtatacayttcagtttaaggtaaaggtaaatgtatctcaattggcccaaaacataagtgtcaatttatgaggtacttgtctggcatgcacaagcttttctcatgaggatgctaaatcatgaactgacaatctgatttgtccattttgtctttgatgctaatgctgtagcaggaatgcatactcatattgttatttgtaggaaatctctcacagagtagtttgagtggtgacacagaatttattgtctttatccatgcttttaataacactaacagacaattcagtgagagctggtgcaattcccaatgtacagacagaataaatgaggcaaatcacaattcatcatcaagaattagatgagccagaaaaatgcctttggtgaaacaagtttcttgcactg

SEQ ID NO: 510475 - DNA, 626 bp, Homo sapiens
tcctaaccagtacatgtttacttrtactttgggtacttcaggcacaacaaagtgcagcacacatgccgtttctctcattccctgagccaggcagacataaccaaccaatcacagaaccttgatgccaaggctttatgtgtcctcaaaatctttcttaatacagcctctagggagccactacacaatagtcaccttacgtatgtggatttcaagcctagtaagcaaagctgtactactatagttattatatctatctttagaaagcacagataagaaatcctaaacatgaacaaataagtgattcatataatattgttaccccccctccccttttttttttttttttgagacagagtctggctctgttgcccaggctggagtgcagtggcacaatctcggctcactgcagcctctgtctcccaggttcaagtgattctcctgcctcagcctcccaagtagctgggattacaggtgcccaccaccacgcctggctaatttttttatttttagtagagacagggcttaaccacattggccaggctggtctcgaactcctgacctcaaatgatctgcctgacttggcctcccaaagtgcttggattacaggcgtgatccactgtacctgg

SEQ ID NO: 510476 - DNA, 540 bp, Homo sapiens
gtcaccaatatcttcttccccttgtaagataagacagtcaagttgggagcaggcatggctgcacccttgtggaagctcaggagattgggggcttgcctctctagactgccatcccaccccctctcaagaggagcccagggggtctcacggctccaccaggtttgtctttgggaagcgtgtggagttggctcyatcgcacaaatatacggtgatggaggcatctggggtctactccaagacagtctagcctgaaaaatgtttaacgcagacgtaaccagatatccacccccacccccaccaattctgccaaaaaagaatttgagaatgtttgcccagacgccccactcttcctggtgtgtcccctgggtgcactgcttgggaaatgaactccactgtgacagcatgaggtgtgaagctgacgtttgacaatcggtttatgtggctttcagaagagttgctctatttccttgccctgtggcaataattaacaaagagaaccaactgcctattgaggcctcgcccagagcacttattctctaa

SEQ ID NO: 510477 - DNA, 491 bp, Homo sapiens
ttcttctacctgcttctgtagtcggtctttcgtcatattgcacattgcgtagcttctggaaaacaccagtgtatactcctgagagaatgaaagtgaaaaaarcaaataatatcttagtattactatgaaaataattttgatctcaggcccccacccccacccaggggtctccaaaccacactttgggaactgctgttctagtgaactctggaaataactcttccacccttcaaagattccaaaagtttcttctcactttgtagcttccttccgttttattctttctctaaccctggtctgcatcctagaccgctgggccattggagaatctcagacagggaggctaaaggctgagaatcaggagatttgaaccactgtccaggtgccagctccgtgtagcctgagaagtaccagtggtggctgggattctgtagcacctccagtgaagcacagagatggccttgttgggaccctccccgtatactatgatg

SEQ ID NO: 510478 - DNA, 491 bp, Homo sapiens
ttcttctacctgcttctgtagtcggtctttcgtcatattgcacattgcgtagcttctggaaaacaccagtgtatactcctgagagaatgaaagtgaaaaaaacaaataatatcttagtattactatgaaaataattttgatctcaggcccccacccccacccaggggtctccaaaccacactttgggaactgctgttctagtgaactctggaaataactcttccacccttcwaagattccaaaagtttcttctcactttgtagcttccttccgttttattctttctctaaccctggtctgcatcctagaccgctgggccattggagaatctcagacagggaggctaaaggctgagaatcaggagatttgaaccactgtccaggtgccagctccgtgtagcctgagaagtaccagtggtggctgggattctgtagcacctccagtgaagcacagagatggccttgttgggaccctccccgtatactatgatg

SEQ ID NO: 510479 - DNA, 491 bp, Homo sapiens
ttcttctacctgcttctgtagtcggtctttcgtcatattgcacattgcgtagcttctggaaaacaccagtgtatactcctgagagaatgaaagtgaaaaaaacaaataatatcttagtattactatgaaaataattttgatctcaggcccccacccccacccaggggtctccaaaccacactttgggaactgctgttctagtgaactctggaaataactcttccacccttcaaagattccaaaagtttcttctcactttgtagcttccttccgttttattctttctctaaccctggtctgcatcctagmccgctgggccattggagaatctcagacagggaggctaaaggctgagaatcaggagatttgaaccactgtccaggtgccagctccgtgtagcctgagaagtaccagtggtggctgggattctgtagcacctccagtgaagcacagagatggccttgttgggaccctccccgtatactatgatg

SEQ ID NO: 510480 - DNA, 537 bp, Homo sapiens
aaaaaaaattgaggcaagatcttggatgcagttactttatttgggagcaggaagaaggcagcaggggagcacaacacgggaggaggaaaaactaacatggggtgcattattgaggtcgttgttaggtgcaatgggagctcaatttctaaggtgtcagaatgaataccagaattgcccatctgaaggatgggagttggagcaggttctgtagtgttagagaaggtcctcagacagaagatggaaagacacactgctcatgcttgaggtgaattgccattacagcactagaaagtttctgggctttgtgggataccactgttatgacagaaattagagttacaccgamgtcatttgtcagggaactagtggcaattgcttcagcccattctttaagctgctcacatctgccttgccaatacattaagtccgatctgtcctttaactcttcaagtagatgactaattacagtctccggaagggttagtggaacataatagactccccttggttgaaattgttttcaagtttttaatttat

SEQ ID NO: 510481 - DNA, 574 bp, Homo sapiens
cagggtggctgcggtgactgcaccctgactgggtccctgaggtaggcactgctcccacttcccgtcctgggcccacgaaacaaggccccagccccacctcctgcctgaaccctccccatagcagtggcggccagtgtccagagcatgggggctctggacctgggggtgggtcctacctggctgcactagggtgggggcrgtgcatttggctgccttggggacgtggggcacagtggacccaccaccgccattgctgttcccacaggcacttctgccgccaccaccacctcccgcacctccctgctgcagacagcccaccactgccatcactgacatggctgagaacagaggctctataacacccacccaatgggtggtctcgtcacctggttgtcacctggtttttgagtatcttttctgtggtggataccttatgatgagcattagtatgaatcaaaaaaagatttacatactctgtggccattaccactggtccattcaaatgcctcttctccagattttcttgtctctaatcttgcagacttgttcctcctgagccctgaccaaccacttt

SEQ ID NO: 510482 - DNA, 642 bp, Homo sapiens
ctgttgcctaaatctggcctttgkgggccagggtgaaagaaaacacaactagaggtgaaataagcaggtgttttcctttatttgtttgctctcattatttgagtgggaagagcaagataacttcctatatggcaaagtacacagaagaattcaaacttttcatcaaatttctttgtttcttaatggcaaattgacagtgttctttctggaaataaatttaccgtcatggctatagagtacaagaatgaaaacaaaaaagtctttgttggtctgagctaaaactaaaatacacttatgacactaaatcctactctgcccactccttaaatattaaacaaacattaatacagaacttactccagcccaccttttattacagataactgtaatttcctcatctcccctatcagaaataaactccttgaggtcaggaatgatattattcatttgtgttccaaacgcagatcttgcataaatatttatgaaatgatttgcatccagccaacacaccaaaatatctgtagaatgaatccgttctgagtccctcagggaaatgctatgagaacaagatcttttttggaattatgatatttgagacgagtgtagtctattcacacgggtaacaagttttgcttactagta

SEQ ID NO: 510483 - DNA, 642 bp, Homo sapiens
ctgttgcctaaatctggcctttgggggccagggtgaaagaaaacacaactagaggtgaaataagcaggtgttttcctttatttgtttgctctcattatttgagtgggaagagcaagataacttcctatatggcaaagtacacagaagaattcaaacttttcatcraatttctttgtttcttaatggcaaattgacagtgttctttctggaaataaatttaccgtcatggctatagagtacaagaatgaaaacaaaaaagtctttgttggtctgagctaaaactaaaatacacttatgacactaaatcctactctgcccactccttaaatattaaacaaacattaatacagaacttactccagcccaccttttattacagataactgtaatttcctcatctcccctatcagaaataaactccttgaggtcaggaatgatattattcatttgtgttccaaacgcagatcttgcataaatatttatgaaatgatttgcatccagccaacacaccaaaatatctgtagaatgaatccgttctgagtccctcagggaaatgctatgagaacaagatcttttttggaattatgatatttgagacgagtgtagtctattcacacgggtaacaagttttgcttactagta

SEQ ID NO: 510484 - DNA, 599 bp, Homo sapiens
taaaatgctatagcttctttcttaatcattccacattattgaatattggttggtatataacttagcatagaactggtggttttgttaagcacaaaatttcagtggcttaaagaatgcaatgaaagtctatttcttgctcatttaaaggtctggtgcaaatgttcgtggtttccaggtaactttcttccatgtggtgattcaggaacctaggatgtttccacttgaggctctactgccccctcaggtcttggagtcttctgtgttcagtcagcggacggaaaaagagagtagagaatagatagttcctacctgagcagtcacttcctcttctatgggaagaaagcacttagctgatctttgtatgtatgatttctattttttgtaagttgccaatggcagtacttttaaatagctttgcacaaatggattttttttctattttagattaatgtatttgagatgtatttctagaagtaagtgtattagataggttttaattataaaattatattgaattatattttatttaatacatcaattaaaatcataatttatatacctrtaaagttattggatatgaaccatctcacttcattatt

SEQ ID NO: 510485 - DNA, 511 bp, Homo sapiens
caccatcgattccgaagaccgccccccccccyccaatcctctacctcctgggacagagataattgtggaggaggaggagcgggtgctaggcaaatgccctgagtgggagtttccacttctcagtggtcacgtggcctgtacagagccaagacgtgcaatgtcccatccagcctcggcttaggacatggggagcactgccttgccactgtctgtgggtcccaactagaccattcactaaagtcttggatagagctgaacccccatcccggctcccaggcaagtgtctctgggacatttccagatccaagacccccggttctctcacaggcctgttcctgcagtcaacctcagctccccactccaggcccatgaaaatgtatagggtctgccacaccactgcacaggcaggacctcctctggggctgtctatggccctctcagacctacttggcacctgccgctcttctgcattctgctgtcctgccaggccctgtggggttacgcttctttc

SEQ ID NO: 510486 - DNA, 511 bp, Homo sapiens
caccatcgattccgaagaccgcccccccccccccaatcctctacctcctgggacagagataattgtggaggaggaggagcgggtgctaggcaaatgccctgagtgggagtttccacttctcagtggtcacgtggcctgtacagagccaasacgtgcaatgtcccatccagcctcggcttaggacatggggagcactgccttgccactgtctgtgggtcccaactagaccattcactaaagtcttggatagagctgaacccccatcccggctcccaggcaagtgtctctgggacatttccagatccaagacccccggttctctcacaggcctgttcctgcagtcaacctcagctccccactccaggcccatgaaaatgtatagggtctgccacaccactgcacaggcaggacctcctctggggctgtctatggccctctcagacctacttggcacctgccgctcttctgcattctgctgtcctgccaggccctgtggggttacgcttctttc

SEQ ID NO: 510487 - DNA, 511 bp, Homo sapiens
caccatcgattccgaagaccgcccccccccccccaatcctctacctcctgggacagagataattgtggaggaggaggagcgggtgctaggcaaatgccctgagtgggagtttccacttctcagtggtcacgtggcctgtacagagccaagacgtgcaatgtcccatccagcctcggcttaggacatggggagcactgccttgccactgtctgtgggtcccaactagaccattcactaaagtcttggatagagctgaacccccatcccggctcccaggcaagtgtctctgggacatttccagatccaagacccccggttctctcacaggcctgttcctgcagtcaacctcagctccccactccaggcccatgaaaatgtatagggtctgccacaccactgcacaggcaggacctcctctggggctgtctrtggccctctcagacctacttggcacctgccgctcttctgcattctgctgtcctgccaggccctgtggggttacgcttctttc

SEQ ID NO: 510488 - DNA, 540 bp, Homo sapiens
ctggtgcctgtgcatccaggtatagcaagtcatcccaagggggtttgtccagtgctacagcccaktgctgctatccagcccactgactattacacaaggggacttcataaccacacccaagggtgaattgagaaaagcaaacttctccatggaacctacagaaaatgctgcagagcaagaggaaggtagatcgttctgaggactcagaagaaagattcccgaaaatggttcatcgcaagagtccagatgaaacctcagaaaattgtctggcaacctgaagaagatgcaagaagacagggcgtccaggaaacaaggacccggaggggaagaagttgggctgaaaagccagagaggcacaagggaaatgggagggaggatgatgaaggaatcacttgtaggagaagaaatgaggtcctccacagcagtaaagagtcccatgggctgtgacaaatcaaattgatgatgtagaggacatacttggcatgtgttcccagattgctgagaaaaacgaaaaaaaaaatagatgccaatgatgaaaat

SEQ ID NO: 510489 - DNA, 540 bp, Homo sapiens
ctggtgcctgtgcatccaggtatagcaagtcatcccaagggggtttgtccagtgctacagcccattgctgctatccagcccactgactattacacaaggggacttcataaccrcacccaagggtgaattgagaaaagcaaacttctccatggaacctacagaaaatgctgcagagcaagaggaaggtagatcgttctgaggactcagaagaaagattcccgaaaatggttcatcgcaagagtccagatgaaacctcagaaaattgtctggcaacctgaagaagatgcaagaagacagggcgtccaggaaacaaggacccggaggggaagaagttgggctgaaaagccagagaggcacaagggaaatgggagggaggatgatgaaggaatcacttgtaggagaagaaatgaggtcctccacagcagtaaagagtcccatgggctgtgacaaatcaaattgatgatgtagaggacatacttggcatgtgttcccagattgctgagaaaaacgaaaaaaaaaatagatgccaatgatgaaaat

SEQ ID NO: 510490 - DNA, 233 bp, Homo sapiens
ataatgaggacagatcacagagagcctggcagagccccctgcttctgtcagggatggccctggtcatggctttcatcttccacaagyatgtgtgtatgcatgtgtatgtgtgtgtgtgtgtgtgtgtgtgtgtgtctgtgtatgtctatgtctatgtttgtgtgtgcatgtgtctgcgtgtatctctgtgcatatgcatatgtgtgagtgttcctgtgtgcatgtgtgtgtgt

SEQ ID NO: 510491 - DNA, 590 bp, Homo sapiens
ctcatattacgtttacctttcagagaatctcctactgccaaaayacaggggctagctagataaatacagaactgaacaaacagcctcttacaaggaactctgtttgcctagctatcaacatgcagcctttccttgctatgtaactatagtagctagttatgtatttacagtgttaacacaaatgactttgtacaagacaccatatttgcctggctatttcgtacctgtatgacatgaaattcctgaatcagccctctagctgcgtaatctgtaaatagagagcttgctttttaaagaaactagcagagggaaaggccatgcactaaaccactttacaaattgctgctactgtttacacagccacctgctatcacacatccatggccctgccatgggactgtttaaccaagggtggttatttaaagtgtttggaagggatcatccaccaaagcctttctttatctcttgaaagacacttatctcttgcatggattgactgtttgcccaaacaatcaaaacatcaaaaagttttttttgttttttgtgtttttttgactggagctggcagcctgttctgcggacagctctca

SEQ ID NO: 510492 - DNA, 590 bp, Homo sapiens
ctcatattacgtttacctttcagagaatctcctactgccaaaatacaggggctagctagmtaaatacagaactgaacaaacagcctcttacaaggaactctgtttgcctagctatcaacatgcagcctttccttgctatgtaactatagtagctagttatgtatttacagtgttaacacaaatgactttgtacaagacaccatatttgcctggctatttcgtacctgtatgacatgaaattcctgaatcagccctctagctgcgtaatctgtaaatagagagcttgctttttaaagaaactagcagagggaaaggccatgcactaaaccactttacaaattgctgctactgtttacacagccacctgctatcacacatccatggccctgccatgggactgtttaaccaagggtggttatttaaagtgtttggaagggatcatccaccaaagcctttctttatctcttgaaagacacttatctcttgcatggattgactgtttgcccaaacaatcaaaacatcaaaaagttttttttgttttttgtgtttttttgactggagctggcagcctgttctgcggacagctctca

SEQ ID NO: 510493 - DNA, 626 bp, Homo sapiens
gtccatctattcttccaggtgcaggaagatcgcttggaagaattgcatgggatggaggagtgttagcatgatctgatattgtcatggcaggcctcctacaatatgacactcacaatgtttcatttccccaactttttgttgtaattaattttcttgttttagaattaactttatttaccaaaattatacagtgtatgcatacagtttttgaatcaactattactaaaaggcttatgcaggagccctgtcagccccttccctgccaacatacacaaagcaatggcttttttgttttcttcagacaggttctctctctgttgcccaggctggagtgtggtgatgcgatcatagctcgctgcagcctccaactcctgggctcaagcagtcctctctcctcagcctcccaagtagctggactactggtactcaccacaatatctggcaaattttttaaatttttagtagagatggggtctcaytatgttgcccatgctcatcttgaactcctggcctcaagtgatcctcccgcctcggccttccaaggtgctagaattacaggcattagcaccactcctggccctggatttgtttttgattcttgactcttttagctgtttcttcttgtg

SEQ ID NO: 510494 - DNA, 626 bp, Homo sapiens
gtccatctattcttccaggtgcaggaagatcgcttggaagaattgcatgggatggaggagtgttagcatgatctgatattgtcatggcaggcctcctacaatatgacactcacaatgtttcatttccccaactttttgttgtaattaattttcttgttttagaattaactttatttaccaaaattatacagtgtatgcatacagtttttgaatcaactattactaaaaggcttatgcaggagccctgtcagccccttccctgccaacatacacaaagcaatggcttttttgttttcttcagacaggttctctctctgttgcccaggctggagtgtggtgatgcgatcatagctcgctgcagcctccaactcctgggctcaagcagtcctctctcctcagcctcccaagtagctggactactggtactcaccacaatatctggcaaattttttaaatttttagtagagatggggtctcattatgttgcccatgctcrtcttgaactcctggcctcaagtgatcctcccgcctcggccttccaaggtgctagaattacaggcattagcaccactcctggccctggatttgtttttgattcttgactcttttagctgtttcttcttgtg

SEQ ID NO: 510495 - DNA, 660 bp, Homo sapiens
tttggaccatgaagaaaaataaaacaaaaataaaaataaagaaaatatttgtttttcctttactaatacattgctgccccaaaagcaaatggctatgatatccaagttttgaattggttaatattttaaatgactactttacccaaagacataattacacagagagctcttattagagaaatgttaacagttacataaatcctctttagatagtaatgacttctgggatcatacccatgatttgtggcagtagactttgtggaaatagcatctactgaagtgcatttttgtgaatgatatacccgctcattgcaccatgaatagctatttttgtcacgaatagctaatattattagatttgttttaattggaggcatgtagaaaagtgagataccctatttctacatgaaaaggagtgtttaagccccattacacaggtgaagtgaacatggttaaacaaaggtttggaaacacaytgtcaactttaagaaatactctaccagcttgcctaagagtatttgggaatactctacaggtagcacagaaatactgtataactaacctatgctttgagcaacataaaaaaaaaagccctcagccatcctcctatctagaattaaactcaaatctgcagcatgtcagggtcttgctggaatgaat

SEQ ID NO: 510496 - DNA, 570 bp, Homo sapiens
agcacctattaaatatttactacaagataaatgaaatgctatgttctttacgtatattacttccttaactgactgtagcaatttatgatataaacactctaagtcctattttgcaaagaaggctcaaggtttttcagaagacaaataacttgyccaagctcaaactataattcaatggtggaatctgaatttgagcttccaaaatcaaaaagccaagtttttacccatggctatactaccaccacacagatacttcatttttcaaggacattcaattattttgcctgcttttaaattgatataataatcttttggttattcttttaagaatgccatatattcaatatttattttcccatagatttgccataccatctttgtcttatattaattaaattcaggactcattggctagatttctaatttgtcaatattttgataattacagtgactacaggttaatatcagcaaagttacatttcacccccctcacccctgctgcttctcctcccccaataactgtctgttttcactcgtttagatgaatcttgagtttgttttgttaaattt

SEQ ID NO: 510497 - DNA, 454 bp, Homo sapiens
ctgctgggacacaggtgggtgcctgcggaggacggcagagggaacacaagtggttccgggtgtggggggaacaaagaaaggccttttcttcagaggccaggagagcgacctcagggctgtaacgatctgagcagaagggcaaggggtcatgggcagccccctcccagcagggcaggctgcagagtcccagagctggaggaagacacacctggcttccaggagagagcgtgtcagtgatgcacagggaagcactggggaaatcacctctttgagcctcactttttgtcttcctaaactggaattaataatatctgcatctgtgtgatgccttcagcattaaaggaggcactgtgtgtgttacacstcctcactaggtgaggagcagggcagacgtgggcgcttgccagggcgtgcacagccccaggcacctgtgccgagtctgctgtagtgcttt

SEQ ID NO: 510498 - DNA, 607 bp, Homo sapiens
ggaggcaaatataatggggcacgtccagctgatacagtttgactgtgtccccatctaaattgcatctggtattgtaatcctttcgatttaggctattgcgccacagagcctgcttgcgggaattgtaatcctatttgtaatccccatatgttgagggagggacctgctgggaggtgattggatcatgggggtggtttcccccatgctgttctcctgatacagtgttctcacgagatctggttactggataagtgtctgggctcctcccttctctctctccctctcctcccttctctctctccctcctgccaccccktaagacgtgccttgcttccccttctgccatgattgtaagtttcctaaggccatgtggaacagtgagtcaattaaaaactttttttaaaaataaattacccagtctcaggtagtatctttccagcagtgtgagaacagacgaatacacagaccacccttccatgatggcctgaacaagtttttcaggttaattttgtagtgccttcgccgggaggagggatctgttcaaaatgactggggggcttagaattttatatttggtttaaaaaaggaataaaggaataaagaagga

SEQ ID NO: 510499 - DNA, 596 bp, Homo sapiens
gctgtggggtccccagttccctctttctcaccaggggcttttgtattttatctgagtttcccaaatatacgcgaagcagggtctcaaatccgcgactgtggtccctaggctaccttctcctaaggctggcagcaaatttgggatttcctgatccctttccgcattttataacacggatttcctttagttcacaacagtatcacttcttcgtcctccaggctatgtttcaaacacaggcagtattttaatcgtcatttttttagagggcagtatatggccsttttaaaaatatttgttttgtgtttgtgaacgtttcagagaaaaaccacctgacactccgctgtaaacaatctttgtgtctctttttatctgccctaggcacagacaccttctgagaatgtcttgggttgagattcccctttggaaactttacagtgatgcgacctcagcccaccctctgccttttcctgatcctgggtttcaggactacctggggctggccccaagatgcctacagctgccaagtctcttgggaaagtctagtgaatatcagcccctaggtcgttcctcccaaagagcctgaggtgtggcggtga

SEQ ID NO: 510500 - DNA, 557 bp, Homo sapiens
cctgcctcggcctcccaaagtgctgggattgcaaataggagccaccacactcagcaatgagggttttttttttgttttaaacaagatatccgtacatgtttctgaccaatattttatttaaaatctttaagaactacatattaacaaaggttattctgtttttcattttctgttttccattttcattatgactacttgtttttctttcttattctcatttttttcctagatcattacaataattttccatgtagtggccctggcatgcattttgatccttcatgcaatcatacagctacctcgatgtccattctctctgccattctgaaattggacctcactcctttttgactctagctctccatctgctatgtgataaagtcctgtcttgtgatggttactatgggactgaaygaagaagggcagatgcagaaataaagacaaaagatctatgttaaagaagggatcagggggctccttgcttctagtgagcaagggccctgagcttctatagccctttgtttttattgggtagaaagagcagggaggaggaggta

SEQ ID NO: 510501 - DNA, 610 bp, Homo sapiens
atgattattttctctactacaaaagcttctgcctccgacgccctcacttgctcttctctctgattggaatacactgtccccacaaaacttactgacccctcttttagtttatgcagctctctgctcagttttaatatcatgggagaggtcgtctccaagcaccttattgaaaatactatcctatctttactcttcttggcctgcctgtrttgtgtctcatgtatttttgtctactgataagtcgcccctcccctttgcaatgtaatctcttgaaggcatttatctgtttctttatgactgcatcttcagcacctagaatactcctggtacatggcagttatctgtaaatatttggtattcttatgaatgaattaatggatgagaggacttgactgtctgtaagaatcatggagatagctaataagtaacagacatacaagagtgaatgttatatagtcatgccttggtagccgtggggtttgattccaggacccccttgtggataccaaaagccaaggatgctcaagtcccttctacatgtaaagtatttgtgtatatcctacacacaccctttcatatactttaagtcatgtctatattaggtataaca

SEQ ID NO: 510502 - DNA, 610 bp, Homo sapiens
atgattattttctctactacaaaagcttctgcctccgacgccctcacttgctcttctctctgattggaatacactgtccccacaaaacttactgacccctcttttagtttatgcagctctctgctcagttttaatatcatgggagaggtcgtctccaagcaccttattgaaaatactatcctatctttactcttcttggcctgcctgtgttgtgtctcatgtatttttgtctactgataagtcrcccctcccctttgcaatgtaatctcttgaaggcatttatctgtttctttatgactgcatcttcagcacctagaatactcctggtacatggcagttatctgtaaatatttggtattcttatgaatgaattaatggatgagaggacttgactgtctgtaagaatcatggagatagctaataagtaacagacatacaagagtgaatgttatatagtcatgccttggtagccgtggggtttgattccaggacccccttgtggataccaaaagccaaggatgctcaagtcccttctacatgtaaagtatttgtgtatatcctacacacaccctttcatatactttaagtcatgtctatattaggtataaca

SEQ ID NO: 510503 - DNA, 567 bp, Homo sapiens
gacaacctactaaccccctggacccctaaagaccaccgacttctcccctgctaccaccaggacaccccttccctcagaacctcaggcacctcccaggactgctgagtcctgccaggacgccagagagccctccagggctccatggacccctcaccttggtccttgagggctccccgtcctagaaccccagtgamcccccaccctgctgatgccccctttggcccctgtgtaaccagtgactccgttgacctacgtgatcccccatgacctctgctgaccccttctgatcttcaaagactccctgccccactctgaccccccagtcatccctctttggccatatttgacctttgatgagatcctcttgtcaccctttgcctcttcccagacctccacgaggcccctcgaatccttactgtatcttcaaggtgactctgtgaccctccggcccctctaggaccccttctgaccccgtcaacctctgcatccttttgtttctctcagacccccacccccaccccagaaaaacctcttcagttcctggggtgctgggcctggaaggaaagg

SEQ ID NO: 510504 - DNA, 589 bp, Homo sapiens
ctggctcagctcggggtctctcctcctggtctttcccatcctctagaaatagagaaactggccttcatctcactggccgacatgttcctgagtgcctggctgctctatatgtggcccctggactcattcttgcttccatygggtcctgccacctccctagagtgaccttggagtcctcctcgtcccaccgggagagccgccaaagtcccgctgggggccacaactcctgccagcatagccacgtctttccttttctatcccgcccacctcatggtccttttgtctgcctacccccttctttcttcctgccaccttcttgctcttactagccagtaaccttgacaatgacataatgtctctgtgcctcagtttccacagctataacacaggcataactacctacttcactgaggtattgtgaggatgaagtcaatgctaagtttgaattactgagaccagcacccacacaaagcaaccgctaggtgtccatggtcatcactatgcccctcctctgtgccctaagcttgccagagcccacgggcagagcctcccccagcccaagacaccgggtcattctaaggtttaatga

SEQ ID NO: 510505 - DNA, 590 bp, Homo sapiens
gatcccatggcaaatgtaatcaccgctcaaccaatcccaggtaacggtgccatgttgcttcccaatcacactgcagctaatttgctctattaaccaaagaatgagcaaggctgctgccttctcttgcttcttgaacactcactgctgctctgggccggcctgccttcctacattctcaatttgaggcaatgaataatctagaaaagatattactcctcttcaggtagaaaagggttagcttgcaagttgcagcgccatttaactgaccagatagggaagaaacattctgattcagtgttagctggaygtggaagcactctgccagatgcagttcaaggcttttcattgaatcctccccaaaattctgtaagagctgtcattcccttttagtgggtagacaactgagttaaatgattagtccatgttcatgtggagttcaagggccaagccagatctgaaatgtgatttgtttcatcctaaaacctactcgttttccacagtagacattgagctactactatggtgaagcagatcctgtttgaggcaccgggggtaggtgctagacaggctaggtttctacccttgcagag

SEQ ID NO: 510506 - DNA, 608 bp, Homo sapiens
atggcagactcgcggggaggcgactactctccctcgacaaccaggaggttaaacaataactcggtcccacatggccaggacttgactcacaactgatagccgtcctaattcgtgcccccgctttccagttaggatcatttggagaaagccaaatacatccctaaccaatcacacgggacgccccccttctgggagccgcctccagtcccccgaggccgacagcctccatgggggctcaccaggagccatcctttcccctcagaggcttcccaaccacttgcctgcctgtgtgggcaactcccttgccacagcggctctgagaaagttgcctccacttgtcctcacgtcttcctttatttccacagcagtctaacgccagctccccctgtcttggtctgggttcccatgaagccggccttgagaccaggctgtgggtgcgatggtctatttcggggaccccaggcaccaggccagagcgaggagtgggaaagatgaaagctggtggcaggtgtgttgttgagctgctccccatgtgggagagggaactcactggggccgtccaggaaacccygcgtagcatgtcccagctcatcccgtggaaggaaggg

SEQ ID NO: 510507 - DNA, 487 bp, Homo sapiens
tgggggctggtggtttctcccaggacctaagtcctcccctccgagcgccagtttcctcggtgaggacctgccgctccccgaggagaccaacaccaggaaggatgcccctcacagaagaccccccagcctgctgcaaaggcctggccccaccccagggctgacaggcagccgtgtcctctaacatgcagccaagcagcatccacaggcttggcrgggaggctagaggtggtatgttccctggagcatgtcgatcctcttgctgggcactggaggcagttcttccctccaggagcacccagccaacaaagaaggcatgcagtaagcgatgacactccatgagaaagcacttctcagggaggcaggctgtggggccagagagaaagtgaacctggcctgagagagaaatcctggcaggcttcctgaaggaggtgacatccaaccaagtaggagttagccagacaaagcagtgggagaagggcacctgaca

SEQ ID NO: 510508 - DNA, 222 bp, Homo sapiens
cagattgctgccactggggattctctcaaagtgtcctttggtgcctctgaaccctccaacccaccgtgtgctcactgagcatgttgatggcatggaaggtggggcctggccaggccgggccggggagcctggaggctgggcccctaaggggcttgggcctcacctgggccatcctcgagttcttttcrgggcagcgaggggcatgcctagggcatctgcagc

SEQ ID NO: 510509 - DNA, 620 bp, Homo sapiens
gtggccactccccaggcccttggccgcccccactgtctttgtccctgtgaggcatgggcttgtccacttgtccggggttcatgccctttctgtctgtcttccttgaccagggactcccagagcagggactgtctcacccagctcaggatcccttgagccagtgagcccctaaagcagagtgggggggtcctagcgcctgctggggactaagggcctgaggagtgcccaggtcagtgtatgagtcagcccggctgccgtgacaaataccacagcctgggcggcttacaaagacagacgttgaactctcacacttctggaggctggaagtcccagagggaggcacggagagtgggctctgttgggggccgcctcctcatagatggggccttctcactgtgtcctcctatggaaggggacaatgagctctttgggccccaccctcatgacctaatcacctcccaagggcccagctcctaatacattgccttgtgagttaggatkttctcacacaaatttggagggggagccacaaacattcagaccatagtagcgagtgacaggacttggtttcctgaggcctgagcggggaggccccgctgtgtgctctggaaggttgcagc

SEQ ID NO: 510510 - DNA, 535 bp, Homo sapiens
gggtttgtcccctgtgcacctcagccctggcccaggctgccgtccccatggcccctgtgcctatttgtgacgctggaagggggactygaatgtgtccttctgtgtcttctgacaggcgacggagcactgttccgggagcacggtctgttgggtgtgacggcccagcaaagaggcagtgaccggctcctgaggaggggcacaaggcacccaggggttctgcctcgacagggaaggggactccaggcagaaaaccagcgagaggaggccccgtggaggaagggagcacagcaaacccgagatagggaggggaggcgcagcagcggtgcgggatcacgcccaccacaacacggtgcacggtgcggtgaggggctcgctggatctgaaaggtgcaggcgctcagcaacgctggtgttctctttctggaccccaggcctggacacaacctccgtgctggttctggaggggccacctctcctgaccacaccccctctgtccacagggccaggcatgtgaggtctctgcgggtcatggagaa

SEQ ID NO: 510511 - DNA, 548 bp, Homo sapiens
gctgggggaccaccaagcagcctgcaggactctctccttcctgccttcatcctgtttgttcagtttatcatcaggacaaacccttggggggccctggatgggtcagaacaggctccagccccaggccagcctccagccccgggggaaggggtggagtttggctccagaacacggagacgtggggccaaaccccggtgtctgggaggcctctccatgcctcaatttactgagccagaaaatgagaatgagcacgcacaccgcacaagtgggtcgagtgggttaaagggacagtgctcctggtccacagtcagagtttggtgaatgtgggttggaagaagaagggagagggccgcggccagccctgaatgggtttgggaagctttggccaagctttcgccaggctcttacggaacaaatacttctagggccaytgagacctcacctatgccaccaagcacctccggagggttggcttgtcacctcgcatcctggggtgacactgtcctttcaaaattcatgcccccagaaacctcagaatggggccttat

SEQ ID NO: 510512 - DNA, 513 bp, Homo sapiens
atgaggatggccctaaatccagtgcgtggtgtccttgtaagtaaaagagaggacacggagacacacagaggagccgggcaggaggccatgtgaccaccagggcggagagtggactgatgtaatcacagccaaggagcgccctgagccacaggcagcgggaagaggcagggaggagccgcccagtagccttctgagggacgccttgagttcggaattccgacctccagagccgcgagagaacacgaccgagagggctgtgtcctgcgctctggcagcaggggaaaccggcgcacccgtgcgctgctgggccctgccttgctcttctgtgttgtgcggccatcgtcacccgtgttgctggaagagtgagtgacgtctccatgcaaaaaacgctggcccagcgccccacacgggacacagttgtcatcactgtcaacaacagtgttgacagtcacataatyatggccatccagggtgctcacagcatcctcggctcacctggaggagggaggcaca

SEQ ID NO: 510513 - DNA, 577 bp, Homo sapiens
tgcggtgactctgcctgcccaaggtcacacagccaagcagcacaggtggggttgaacccaggtggtcagagcccagcccccacatacccatcctaaacccagacctgactcgggcccagccttgcctccagccacaagctcagccgcagccccgctgcctggcgctgggaggccacaccctgagtggccggcccacatgcaggctgcccctggccctggcactggccgacaccgctaacaccccccagcgtcactttgctattcatctcatctgagcctcgtcaacggcaaaaggtyggaaactcccgcttcacagacagggcagggctcccagggctcctggggatcacgcacaggcccagagggggtctcagtggtgtacacacacaggagcacacgccccggcacacctgcagttgaaggctgggcccagaccctccctggaattttcaggctgaagcccctggtccagttgctggtccatttggttgttggaaaagaggcccaggtggcggcatcagagtggccagttatagccactgcggtgccgggtgaggctgaggcgctgggctcgccc

SEQ ID NO: 510514 - DNA, 500 bp, Homo sapiens
tcagcctcccagcattgaagcgaggctggctgggctcagaggcccctgcggtgtgcttgcctctttcacacctctgtgagcctgggccccacaggcggggaaccgctgagcacaccgtgacatgggcacagcttggtgcagatgcccatggtagaggccggccttctttacaactcccagggctgaggccctagccgagcttggcccctgcaccaggccatctatttctgcttcacaaagcccctctggccaggaccagggccgccttcagcccgagctgacgaggccagggacacaagtagcccctgtcgcagatggaaccctgggggagcaaaaccaaatgtcacgtctgccacacacggcatcatgttgggggaatggggctcaaagccggcccctggcrttcccacacgtgctcctcccgtgcagccaggctccaaacccacaggctcacgggcctctcccaaagccaaggcgctgggaacggtggaaagctgctg

SEQ ID NO: 510515 - DNA, 573 bp, Homo sapiens
ctgcccggcctaagacccacagcctgctccccaggccgggcgctggacacagggcgtgtgagttgactgcggccaagctccctggaaacacagtctggatcactgatggcgccaactggagtccaagggcacctttatgcccaaacagtgtcacccggacacacttctccactcacgtgggagacccttgtggcctgcttgaacccctctgcagacggggagctcacttctgcctgaggtggcctctcccatctccggagaaccctgctcaggagagagtttggcctcacgctgggccgtaaaccacctcctctcaactcctgggctccgtggcgaaggtaaggctgatgtagacttgctgggcacccttggaatggtggcctgtatgctgcccaatcctgcctagaactgggtggccctgctgttcccttgtgtggagatggtgctctctccattcaagggaacagcagcaggtcagccagttcccttgggatgctgatcattccatacccttrggatggtgaccctccctctctgagcctcggctccctcatccaaaatgagggtccaact

SEQ ID NO: 510516 - DNA, 617 bp, Homo sapiens
tcaaggaaggctccctggaggaggtgacgcctatackaattctaaagaatttggccaggcagcagggagtgtgtttggctggtgtcataggcagacagcagcatgcccaaagacaagaaggagggagggtttgatgccttcaggaaccaaaataattgaacatgcctgaacccaatttcttaaccagtgagcattgtaagggtagactaaaaggggctgtccttgtgacttgctgacacaaacccttttcccggtgaagaggtgcctgagcaatactatttaattgtatttcctggccagacaacttccaccatctccttaggagacagggtggtcaggaagcaggaaagactaagatgatggggactctctgctgtccccaccttccctgtccattgtagggtctctgcagcctcataccctatgtccagcgacctcccccaccccgccgccagtggaatgcctgaaagtggggtttggcctgggaaagtccaggtaacacttcagattaagctcctcttgtcaatttcctgctacacaagactttctgaatccaagtctctttcctatgaatagagggcgggaggccagattgcccagttggaggtgtggcttca

SEQ ID NO: 510517 - DNA, 475 bp, Homo sapiens
ttcttcatggtcttatgaggctctagccaggagcacccaacattcctaaatgcttgcttcttccacccccaacaaaccccaacctgttctctcagaatggaaagggcatttctgggatggggagagaaggtgaatgctttaacatgcctcacatggcccgggctgcctgtgcagcatgatgcttcagaatgcagctgtcgaaagcatagtcacaaacggaagcggttccagctgactggcccctgagtgctagattcagaatctccgccctggcgtggcagcagccctttcctgcttggacattagtgcakgcccatcatttccacaccatggtgttttttgcacagtagtgacaagtttgcccctggagccaggagaagctccaagctctgtaatctgaagctccaagtaaatgaactctaaaagggaggcccatcacacctgccacctactcccaaactgtcccctacttgga

SEQ ID NO: 510518 - DNA, 636 bp, Homo sapiens
tttctggaaatgttaggtagcaaaatgggtcagctgattggtgtaaagaatgttaaacccaggggccaatgaggcaccggagggcagggcgtgtaaatgaaagtggaggaacggcgggcacsgaggcctcggtgtttatactgtttgtactatgtttgtactgggtgctccaaggtaactgcccatcaaacagcaacgctacccctgaaattgaaaccagatgtcagagacttcaaaggaaaggaggctgggcagaggggaacgctcctcaactctgatcttccaaggaatggccaggcagggctttgaaataagaaacctgtcactgaccatcaccagtgtaatttggggcatgttgggattggggagcaatgaaggaaagaggtcattagcaactgtcccactggccagactgggagggcatggcactgaagggcaagggatggggggaagaatgaggtggacttcatccagctgagtgacctctggcaagtgacttctaccttctggggctgtttccttgtctatgaaagaggaattggcccaggtctgtgatatttcccaaaccacgcatcactctcatcattgggttgtggaatccgtcgaataggtcatgaccagcttttaaaacatacc

SEQ ID NO: 510519 - DNA, 636 bp, Homo sapiens
tttctggaaatgttaggtagcaaaatgggtcagctgattggtgtaaagaatgttaaacccaggggccaatgaggcaccggagggcagggcgtgtaaatgaaagtggaggaacggcgggcacggaggcctcggtgtttatactgtttgtactatgtttgtactgggtgctccaaggtaactgcccatcaaacagcaacgctacccctgaaattgaaaccagatgtcagagacttcaaaggaaaggaggctgggcagaggggaacgctcctcaactctgatcttccaaggaatggccaggcagggctttgaaataagaaacctgtcactgaccrtcaccagtgtaatttggggcatgttgggattggggagcaatgaaggaaagaggtcattagcaactgtcccactggccagactgggagggcatggcactgaagggcaagggatggggggaagaatgaggtggacttcatccagctgagtgacctctggcaagtgacttctaccttctggggctgtttccttgtctatgaaagaggaattggcccaggtctgtgatatttcccaaaccacgcatcactctcatcattgggttgtggaatccgtcgaataggtcatgaccagcttttaaaacatacc

SEQ ID NO: 510520 - DNA, 520 bp, Homo sapiens
tgacaatcatttggattgtttctaatttggagtaaatatttttgagggcatttatcttcaactctkgtgggaaaatacttgggaatggcattgctagatcagagagttaagtctgtgtttaactttataaaaaacaaccaaacaataaactaaatggttttccaaagttattatgcccttttgcatttccaccagcaacacatgaagtgtttcagttatcatacatcctcttcaactcttggtatggtcattttttaaaccattcagtgtagtttacaaacaataaaatgcatccctttaagtggacagtttgatgagttttcacagatgggtacacccatgtaactacccatcataatcagggtatagagcattgtcatcatcccaaaagttgttatatgcccctttacagtcaatcttctcacccctagtgctttaaaattactattttgctttctgtcactacagattacttttgtcttttatctgcttttttacttctagtcattccagtgaatga

SEQ ID NO: 510521 - DNA, 520 bp, Homo sapiens
tgacaatcatttggattgtttctaatttggagtaaatatttttgagggcatttatcttcaactcttgtgggaaaatacttgggaatggcattgctagatcagagagttaagtctgtgtttaactttataaaaaacaaccaaacaataaactaaatggttttccaaagttattatgcccttttgcatttccaccagcaacacaygaagtgtttcagttatcatacatcctcttcaactcttggtatggtcattttttaaaccattcagtgtagtttacaaacaataaaatgcatccctttaagtggacagtttgatgagttttcacagatgggtacacccatgtaactacccatcataatcagggtatagagcattgtcatcatcccaaaagttgttatatgcccctttacagtcaatcttctcacccctagtgctttaaaattactattttgctttctgtcactacagattacttttgtcttttatctgcttttttacttctagtcattccagtgaatga

SEQ ID NO: 510522 - DNA, 592 bp, Homo sapiens
tgctgaatgttaccatttttctgaagactgtggagtttcaggaagataagagacaaacctggaacgttggtctttggcaggaacaaacccaatactcttccaggaaatgtagcagacaatttcctgtggctattgcccttgcctgagccaagtgtggagaagttcctgccttggtctccctccctgtctgctgtaccaaccccaagggcaccctaacttaaccttaccactggtattctggaaataatcagagcagacttaaaggaagagggcttggctcacgcctgtaatcccagcactttgggaggccaaggcaggcggattacaaggtcaggagctcaagaccatcctggctaasatggtgaaaccccgtctctactaaaaatacaaaacattagccgggtgcggtggcacgcacctgtaatcccaactactcaggaggctgaggcaagagaatcacttgaacctgggaggcggaggttgcagtgagccgagatcatgccattgcactccagcctgggtgacagagcaagactacgtctcaaaaagaaaaaaaaaagaagagggctaagcaaagccactgcaacacaca

SEQ ID NO: 510523 - DNA, 598 bp, Homo sapiens
gatttctggatagttctttctttgatttgcataattgtatyacagacaggcaaattgcattatattcttcattaacaatagatggtttatataactattgtatttttgaaggcactgttcttacattcatcctgcagtttgtcattttctgacattgctggggagcttagttgggagagaatagaacctaaaaaagattacttgattttcgctgagtccagtaataccttggcatcctattgcactgcggttatgctattgtttgttttaacaaattgcaacctagtggcaaagaacttcttttaaaaatcttctaatgtgaggacaattcagcccttatagatttccacagtgaaatgtcagccttctaacaaactccacgtgtaaaaatgtgaattaaaattaagttagaaccatacgattgattttatgttttcactctggcaaatgctctctctgagggaacttccctttcctctctccggcccagacaaaagctaacaagttgcctgatgctccgaatattcttcagggacacatggtgtttacagtcactcagtgatgattataaagcaactcccttcttagtgctcagcta

SEQ ID NO: 510524 - DNA, 598 bp, Homo sapiens
gatttctggatagttctttctttgatttgcataattgtatcacagacaggcaaattgcattatattcttcattaacaatagatggtttatataactattgtatttttgaaggcactgttcttacattcatcctgcagtttgtcattttctgacattgctggggagcttagttgggagagaatagaacctaaaaaagattacttgattttcgctgagtccagtaataccttggcatcctattgcactgyggttatgctattgtttgttttaacaaattgcaacctagtggcaaagaacttcttttaaaaatcttctaatgtgaggacaattcagcccttatagatttccacagtgaaatgtcagccttctaacaaactccacgtgtaaaaatgtgaattaaaattaagttagaaccatacgattgattttatgttttcactctggcaaatgctctctctgagggaacttccctttcctctctccggcccagacaaaagctaacaagttgcctgatgctccgaatattcttcagggacacatggtgtttacagtcactcagtgatgattataaagcaactcccttcttagtgctcagcta

SEQ ID NO: 510525 - DNA, 595 bp, Homo sapiens
gcaagaatggccataataaaaaatttaaaaaataatagatgttggtggggatgggctgaaaagggaacacttttacactgctgctgggaatgtaaactactgcaaccactatggaaaacagtgtggtaattccttaaagaactaaaagtagaactaccatttgattcaacaatcccactactgggtacctacccagaggaaaagaagtcattatatgaaaaagatagttgcayacacatgtttatagcaacataataagatgttttataaatataagttataaaattcctctattaaaagtttattagagttcatcagtgttgatatcatctttccaaattaaaaaaatgttttctgttcgttgttttggttttcgtttgtttgttttgatgcatggtcttgctctgttgcttactgtagcctcagcttcctgggcatgagtaatcctcccacttcagtgtcccaagtaactggaactacaggtatgcaccaccatgcctaattgatttttagaaattttcttatagagtctcactgtgttgcctaggctggtctgatacatctgtgttcaaacaatcctcccaccttggactga

SEQ ID NO: 510526 - DNA, 595 bp, Homo sapiens
gcaagaatggccataataaaaaatttaaaaaataatagatgttggtggggatgggctgaaaagggaacacttttacactgctgctgggaatgtaaactactgcaaccactatggaaaacagtgtggtaattccttaaagaactaaaagtagaactaccatttgattcaacaatcccactactgggtacctacccagaggaaaagaagtcattatatgaaaaagatagttgcatacacatgtttatagcaacataataagatgttttataaatataagttataaaattcctctattaaaagtttattagagttcatcagtgttgatatcatctttccaaattaaaaaaatgttttctgttcgttgttttggttttcgtttgtttgttttgatgcatggtcttgctctgttgcttactgtagcctcagcttcctgggcatgagtaatcctcccacttcagtgtcccaagtaactggaactacaggtrtgcaccaccatgcctaattgatttttagaaattttcttatagagtctcactgtgttgcctaggctggtctgatacatctgtgttcaaacaatcctcccaccttggactga

SEQ ID NO: 510527 - DNA, 420 bp, Homo sapiens
gggctcttgtgaggattaaatatgttaattcatatcaaactctwagaatgatcagcactcaatgtttaaatactatctttattactcatgcccaagttctccctcatccgtttctgcatttattgaacaaatatcagggcatcttcgagcagaatttgccaatgaatgaaggaaatattgtctccctgggaaaaaaggatgataagtactactcaggtgagactccgctgccaagtgccaaagggttattccctccttctccctgcagcctttttcaagaagtcaaggctaaagaaggaaaggaggatgggagaaatcagaactcctgcatgaattacagtggactgcccagacagcccggagtgatcctctcctaaagaaaaatctctcagtgatcagaaaagggccagggatactctg

SEQ ID NO: 510528 - DNA, 560 bp, Homo sapiens
atcttgttacaaaacaccagagatttgttctaggtcctgttgctcaccacacagaaaaccagccactgaaatgagtgtcgtcaggaaagaaggctttaatcgggtgctgcagccaagaagagtgggaatgagtctcacatccatctctctgatgactaaaattgggaggtttgtatagtggagaaggagggaaaacaggaattagggaggagtaaggaagcagttatgatggattaagggtctgatgactcactgcctagatgcagtgatctgatgagtttcagttcatctcctgaggaaggaactcagatgagacaaatgtaagtttgaagtgttaagaccaaggagaatcagcttctatgtttattcaaaaaactgtaaatattagttccatgagacaattgaggcagtttcaatcytcactttctatgtatcaattcctcagtcatggggaatctgctggtcatttcttttggctgcttcctgcggaagagggggcattgtgggatgatcatgaggaatgaaaacattacccctgtaaatggaagtactcatgagta

SEQ ID NO: 510529 - DNA, 589 bp, Homo sapiens
ctatttgcagcattggagccttttgcttgctctgagtttcctgagtcagcctaaggtctttaaaagcatagcctcatcatgccaatgtgacaaagctgggcctcatcatttgaagttgtgcttcagggaatccttaaaatagtccttctgtcccattctgcttgtggctgccctacttagctcacaattttgaaagttccttgagtgtttggtggtcaactgttttccaaatggggccagttctttaaagccatgctaagatgaatgtcactttactgctggagtctctggctggccatttcctgttcaataggttcattgagaatgctgttggaaatgctcaagcaagaagtgacttctgaggtaggcatcactctcaccatgttcagacgggctttaacctctgaaatcacattctgcctgctgtcatctcaaagacgttagccttcttggttaggtgttcttctttgtccatctgtgcaatattggtttgacgattttctgacacattacagggattgcttctccctctgcatgactgaagaaactcttyacatatggaaagattcccctgaagcagtatagcaca

SEQ ID NO: 510530 - DNA, 646 bp, Homo sapiens
ttgtcagagcccctcatgagagaaaaagggggccacaagcctgtcacatagggctgcacaggttgtgcactgcacaacttcaggggatcctgttcacatgaactgatggtgtgaatttgtctcttggagttgtgtgacctagcagccctgggagcacagcctcaactgagtatgaggacagaggctggttcaaatatcaggccccctggttccttcgatgcagctcggcattcacaagaatctcctgcagaaaatcgaagagcaagtatcctttccattccttggatggtgcagcactgggagaagggcctcaggtactggcaggtggctggtgggcatgggtaacccccgccttctctgagcccaggccatgcagctaacattgctcagttggtggtggtaatcagctgaggstttaaatgaaatttccttcatttcagatgaaaccattcttgcagaggagaaaagcagggaacactgcataccctgcaggaatctatctttccctagcacctctgtcctgtaaaactccacagggacacccaacaaacggggcaaggagtcctggaattttctccatgaaggacaggggtctgtagggggctgtcctgggagtcagggaggctgttaaccactagaggtcagg

SEQ ID NO: 510531 - DNA, 503 bp, Homo sapiens
ctgctacataaggggtagggcaggattcacactgggggctgactccaaagcccatgttcttttatttttttaaaaatcaaccttattgaggtataacttacaataaaatctaatcttttaaagtgtaccatcagatacattttgacagatgtgtacatgcatgtaaccacctcagtgaaggaagataacatttctatcactccagaaagttcctcgtgctrttcccaaacaatcccacctactgatctgcttttgatccctggagatgagtttctgcctatcctagaacttcatccagtatgtattctcttgagtctggcagagcccatggtcttgctctgccatctctctggcacaatactagtgtcagttacttcacacattcccattgtcagtgaagaaggccagggaaggacgtgtgctcaccttcctacagctaagacattggcagtggagggccttccacaatgccactggctttgggagatagtatgcccaggaat

SEQ ID NO: 510532 - DNA, 332 bp, Homo sapiens
ccacttctaggtgtgagtcaggaggctgaagatgccagggcaggcaagggcaggccattaacctcgttagcaagacagcaggggagacagctcgccccagttcccatccccctccagcgtatcaacagcaggcctagccgatgagacacagagacttctagaacggaggcagagtcaggaagaggaaggggagaagcacctgctcaccggagacagggagactgcagaagatgagctcttgtgggaatggtgrgatagtgtggggcagagacatcaagggaaaccctggggcggggctcttgacccctcttcacatgtgactctaggaagtg

SEQ ID NO: 510533 - DNA, 527 bp, Homo sapiens
ccagtttccagtgagaattacgttcgtgaataatcggtgcaaaataaaaccaacaccagctaatatttcacgtggtaaactttgaaagaatcgtatcttggggataaaaaaccaacctggcaaaaaaaaaaaaaaacccaaaaacaaacaaacaaacaaaaaaacaaaattagacttgctaagcaatagtagccacaaaagaaaatayacgaaggtcaagctataatggaaaactagtgaggattagtgagtggaataaccaagtgtacctcggtattctcatttttctacatcttaccttgattgtaatttaaaaaataaatacagagatcagaatggggtcgttcaagatttcttttggtagatgtgttttgtgcttagtcaaggtgaaaggatgcccaggcactgccattcagaggtctctgccctgtccggggcatctggggggcacctggaagaggtctcttcctcatagctctgcccaccccactgtgcaggtgagacccagaatggacgctgctttgagg

SEQ ID NO: 510534 - DNA, 527 bp, Homo sapiens
ccagtttccagtgagaattacgttcgtgaataatcggtgcaaaataaaaccaacaccagctaatatttcacgtggtaaactttgaaagaatcgtatcttggggataaaaaaccaacctggcaaaaaaaaaaaaaaacccaaaaacaaacaaacaaacaaaaaaacaaaattagacttgctaagcaatagtagccacaaaagaaaatacacgaaggtcaagctataatggaaaactagtgaggattagtgagtggaataaccaagtgtacctcggtattctcatttttctacatcttaccttgattgtaatttaaaaaataaatacagagatcagaatggggtcgttcaagatttcttttggtagatgtgttttgtgcttagtcaaggtgaaaggatgcccaggcactgccaytcagaggtctctgccctgtccggggcatctggggggcacctggaagaggtctcttcctcatagctctgcccaccccactgtgcaggtgagacccagaatggacgctgctttgagg

SEQ ID NO: 510535 - DNA, 223 bp, Homo sapiens
ggtgcagaaactctttgagctgccaccctggcagggccggccttggggratgtgcctgaggatggtgggtgagcaaagccacctgccccggcacagagcctgcgggttgtgctctgcaaagccctcccggtttcattcccagagaccgggcgagaaagggcaagccaggcagcagacgctggggggcgcgtggccaggctacccggatcgtccagcgcggcat

SEQ ID NO: 510536 - DNA, 442 bp, Homo sapiens
tgctaatgcggtgcagaaactctttgagctgccaccctggcagggccggccttggggaatgtgcctgaggatggtgggtgagcaaagccacctgccccggcacagagcctgcgggttgtgctctgcaaagccctcccggtttcattcccagagaccgggcgagaaagggcaagccaggcagcagacgctggggggcgcgtggccaggctacccggatcgtccagcgcgrcatggagtctgtgtgtcctcaccagtgctgcgtgacaggagccgggcaccaccgacgccataggcttgtcggtgtctcagcactgacaccgtgtggccctgagaaaaagcagtgaggggtccgctgaaagtcttggagacgggaggttgtcccatttcctttcctcgggatgttaatcagcatccctgggactttcctggttatcgctgatgg

SEQ ID NO: 510537 - DNA, 522 bp, Homo sapiens
gccaggatggcttctcccacaatcatgatctcctctgccccctgcgattggaggcacctggctgttccacgctcactcaaggttcattcccacagaccagcccccaccccgaggagggctggagtcagagaagagctcactttttctcctgtggctctctgctgggaggcacgtacttctagttcctcttccctcgtccataccgcccaggtggacaagtcgtttttctgctagtagaagcccaaggcattgttcggggcacattgtactagcgcctgggattcatgtgggtgtcttccccatctttctgtgcccaggcagtgtcaggttggcctgtcctccgcccctccttgactgctcatgaccaggtggcaggtagaataaccaacttgccccactttgcccaggaccttctccatttttgcactgaaaatctcccatctcaggaacycccttggctccaaacaagctgcctttccccctggatcttgggaaagtcaggcccaaattgcaccacagatt

SEQ ID NO: 510538 - DNA, 619 bp, Homo sapiens
gaagaagaaaaaaggacatctcattaaagtgccaagatacaatgccggctcctacgtgcaccttgttttggaccctgaatgtaaawgatcactttcagcgtgttttaaaaagcattcgtgatttcagcgatcctttctgaaatgtgtaaaaataccatcgtctccaatgataaaaacaacaacaacatctgccgatggcaaaatatagtcaactttcagggccaagtttttggaagcagccaatgcgtttgcatgtgtgattttctttttcacatataagtttctgtggatacaaaaatatatgtttgtatgtactgatcaggtgtctgtgtcttaaatttacatagctatggtttccctgcacctaaatattgaggcttttaaaatttgtagtgtgaaggtataaagcttttaatttgttgttggtggcatttggcatgatatcttgggtggttttattacttgtatttttaaagcaaatatacttaaattttcaaagggatcacttcctgtcaatatgtatattgtttccccacttttctcccaagttaataaacaactacaatgataataccatatattttgatggtttttctttttttttcttttggtctataac

SEQ ID NO: 510539 - DNA, 466 bp, Homo sapiens
gtgcggctctcaaggtgccacctcctacctgctatgtgggttcttaagaaatctgcgttgtcagataacaaaaagcctgaacgactttaggggattctgtgctttctgcctcttgcctacagtgctgacctccaggaaccatatgtcctaagagaaaacacaaggtcacatgactgccctggcagtcagggctttttgcttttgcarttatttcctgggactcgatttctctgaatggacctagacaaatggtcaggagggaacagaaaatctgaattctgtcctcctcagaaaggaccgggaagcaacacctgtctgtgttaggatccccataactttgatatctggcaccaacataaactcttggccttcaatcacaaatgaatccccagcactgtaaggagagactgataccagaaagacaggagaaagtggccttgaggaggacaagggaggcttttctggt

SEQ ID NO: 510540 - DNA, 524 bp, Homo sapiens
tgtccttttcttttagtagcactttactggaatagctgacaccctaaccatggaacatctcagcagaactgactttacagaaggtcctcaacaacaccaggaaggaagtgttctacctttgtggagatctagaattttgaacattaataattttaaaaatacrtaaacattgttttcttaatatttgatgtggttttccttcttcaaggagagctaagatcctgctagccttgaacttttcagccttgactatttgttaagttcggagagtggaaagaaaaatcattgcaggctttttttatagaatggaaattttttttaaattcatcttgatgtagccgagaaaggagctgaatgaagtcccataaatttttttttaaaagaaattcaccttagagttcagaggaagtgtggatatctttagtttgagaaggacttatttttaaggagactatgggaaaacttggaaaataggcttggggtgaataatctcttttacttgatgttattcccaaaaggatttc

SEQ ID NO: 510541 - DNA, 524 bp, Homo sapiens
tgtccttttcttttagtagcactttactggaatagctgacaccctaaccatggaacatctcagcagaactgactttacagaaggtcctcaacaacaccaggaaggaagtgttctacctttgtggagatctagaattttgaacattaataattttaaaaatacataamcattgttttcttaatatttgatgtggttttccttcttcaaggagagctaagatcctgctagccttgaacttttcagccttgactatttgttaagttcggagagtggaaagaaaaatcattgcaggctttttttatagaatggaaattttttttaaattcatcttgatgtagccgagaaaggagctgaatgaagtcccataaatttttttttaaaagaaattcaccttagagttcagaggaagtgtggatatctttagtttgagaaggacttatttttaaggagactatgggaaaacttggaaaataggcttggggtgaataatctcttttacttgatgttattcccaaaaggatttc

SEQ ID NO: 510542 - DNA, 524 bp, Homo sapiens
tgtccttttcttttagtagcactttactggaatagctgacaccctaaccatggaacatctcagcagaactgactttacagaaggtcctcaacaacaccaggaaggaagtgttctacctttgtggagatctagaattttgaacattaataattttaaaaatacataaacattgttttcttaatatttgatgtggttttccttcttcaaggagagctaagatcctgctagccttgaacttttcagccttgactatttgttaagttcggagagtggaaagaaaaatcattgcaggctttttttatagaatggaaatttttttwaaattcatcttgatgtagccgagaaaggagctgaatgaagtcccataaatttttttttaaaagaaattcaccttagagttcagaggaagtgtggatatctttagtttgagaaggacttatttttaaggagactatgggaaaacttggaaaataggcttggggtgaataatctcttttacttgatgttattcccaaaaggatttc

SEQ ID NO: 510543 - DNA, 573 bp, Homo sapiens
ctgtgctggaaagctattgttgtcttatatttactattactttaatattactttctaaattatctccagttgcatcagtaaaatagcaaatgacaaagtccacttctaaaatttaagcaaatgttactttcaaataatcctgaagcacacaaaatgactacaacttcataattccactctttgtccccatctcctctgagaaatttaggaaaagagaaatattaaccccgacttgtaccatatttgttcaaagagtgatagcctcttacctacatctttaagtcagacagtaaagggagcagattttataaattcgaaattaaaaaacaaaatttataaagcctccagtgatttcctgagaaaccagacaacataacttattaaggacgcaaacaaagctccttgatcccactgttccagaaaatgttctttcagtacataaggaaaagcagggaagaaatgaacatgaagactaaaagcaagagagaaagtgagagtgattgtcaatctcaacagcggcattctctatggacagaagactttactgtcmcttctgtaaaagatcaaaaaagc

SEQ ID NO: 510544 - DNA, 573 bp, Homo sapiens
ctgtgctggaaagctattgttgtcttatatttactattactttaatattactttctaaattatctccagttgcatcagtaaaatagcaaatgacaaagtccacttctaaaatttaagcaaatgttactttcaaataatcctgaagcacacaaaatgactacaacttcataattccactctttgtccccatctcctctgagaaatttaggaaaagagaaatattaaccccgacttgtaccatatttgttcaaagagtgatagcctcttacctacatctttaagtcagacagtaaagggagcagattttataaattcgaaattaaaaaacaaaatttataaagcctccagtgatttcctgagaaaccagacaacataacttattaaggacgcaaacaaagctccttgatcccactgttccagaaaatgttctttcagtacataaggaaaagcagggaagaaatgaacatgaagactaaaagcaagagagaaagtgagagtgattgtcaatctcaacagcggcattctctatggacagaagactttactgtcccytctgtaaaagatcaaaaaagc

SEQ ID NO: 510545 - DNA, 523 bp, Homo sapiens
ctgatggaatattctctgcagtatcattcaggttggttgattgacatcatgacagtgttaattatttagcttatacatcattttttctcttagtgtttggttttcagatattctctgtagttcaattatcacctcaactaatgtggagaatctgtatctgaattattttcaatacagcctataagagggcaagcaatatcattctttaggcacctactataagccagctccacgtttggcttaataagaatctaaagttcaattaagtaaatactgattttcccatcattttgaatctactrttagctgtgagttcactaactaggcagatactaaattttcccaatgaagaggtcaaataacaaattacataatggcaggatccaagtatctattaccgattcaataaaactacccatgcacatctatgcatcgttctttaatatgactttgtcatttatatgatcagctcataaactatcttagcatgagccactgtcaaataagtctttattttttaatg

SEQ ID NO: 510546 - DNA, 606 bp, Homo sapiens
caccgatgccgtatcaccgttgcgccagtcaagtagccctccttaccaaacctttggaccctaggttcacagaactgggtgacttataatctttggcccatgacagagacatcattagtctgtgcgtggactaattgtgtatttatttttaatgatgtaataggaatcatgaaaccacgactttaagcaaaagctaggaccctggtagcactctaagtctaaagkagtctaagtctcagtcatcctctggctccctcaactcaaagcagttaacattctgaatcctatgttcagcattcccttcctttctttttctctaggaaaagtttattgagttataagaaatgtacacggaagtgcacaaatcttaagtatatagctcaataaaattgaagttgttctctaaaaactctaataaactagataaaattctggcaaggtttattctgatggcaaagacagagcaaataataataggaataaaaagggaacaaagctatagatgcagtgggtattttcaaaaagaacatccatgaacaactttgtgacaacaagtttaaaatatgaaatagactattatctagaaaaataaaatttaaaaaacgg

SEQ ID NO: 510547 - DNA, 575 bp, Homo sapiens
ctgctcctttcatcgcactccttgcggcatgctggagatgaagacatrgggtgtgcacagcatcttcattttattttctaatgtgcctggcacaaatgccaaagacagctacaagtaattgctatccaagctccagtgaactagaacatcttcatttaagtcatgcatagcctggaattttttttaaaggagagaaagatgactttatgtagcagttgctaagcagccaggctctcgggagctcaacacacactcagctttgcaaaatctcagcagcaagccacactgccctctttaaaaagctctccttaggcaaaccttgtgattttcactacatcccaaaatgtaagctgctcttgtttgtttttaactacacaccactcccacaccccatgaactagtaataaaactgggagatgattgtgataaccaaatatcctacctcactgagggccttgaggcagcctaatctttgggcagaactccagtgaaagtactggaagaaatgagatttcatagtggttcatttattgctttacatgtacatgggggggaaatgaaaaacacagagaagt

SEQ ID NO: 510548 - DNA, 449 bp, Homo sapiens
ctgctcctttcatcgcactccttgcggcatgctggagatgaagacatggggtgtgcacagcatcttcattttattttctaatgtgcctggcacaaatgccaaagacagctacaagtaattgctatccaagctccagtgaactagaacatcttcatttaagtcatgcatagcctggaattttttttaaaggagagaaagatgactttatgtrgcagttgctaagcagccaggctctcgggagctcaacacacactcagctttgcaaaatctcagcagcaagccacactgccctctttaaaaagctctccttaggcaaaccttgtgattttcactacatcccaaaatgtaagctgctcttgtttgtttttaactacacaccactcccacaccccatgaactagtaataaaactgggagatgattgtgataaccaaatatcctacctcactg

SEQ ID NO: 510549 - DNA, 613 bp, Homo sapiens
tcctttcatcgcactccttgcggcatgctggagatgaagacatggggtgtgcacagcatcttcattttattttctaatgtgcctggcacaaatgccaaagacagctacaagtaattgctatccaagctccagtgaactagaacatcttcatttaagtcatgcatagcctggaattttttttaaaggagagaaagatgactttatgtagcagttgctaagcagccaggctctcgggagctcaacacacactcagctttgcaaaatctcagcagcaagccacactgccctctttaaaaagctctccttaggcaaaccttgygattttcactacatcccaaaatgtaagctgctcttgtttgtttttaactacacaccactcccacaccccatgaactagtaataaaactgggagatgattgtgataaccaaatatcctacctcactgagggccttgaggcagcctaatctttgggcagaactccagtgaaagtactggaagaaatgagatttcatagtggttcatttattgctttacatgtacatgggggggaaatgaaaaacacagagaagtatagagcaataaataaaaattataaaaatctcaaggttcaga

SEQ ID NO: 510550 - DNA, 511 bp, Homo sapiens
caccaggagacaaaatatggttctctgagaataacacataccaaatgaaccaatctaattttcttttttttcataaarttattaaatgagaggaagtcagcgaacagattgaaccaggatttcacaaattcatttatttggtaaagtctctcacgatgtccttctaggtaaaatattgaaatgtagatggtagcatagaattggggctatttgaaattagagtataaaattggttctgtgttctgaggaggaattaatcaggagagactcttaattctttctataaatatttttatcagtaatcaggatgaaggcctgcacatcaaacttcaaaatgtcacaaagctggaaaagagaaaaatcaaaaagccaaaaatatcaaaattttaaatgatcctaatagcttgaagcataaggcagaattaaaaaaaaaaacaatatagtaagtaagtgaggtcttacataaatctatcacagaagtataggatgaggtgacttgactggcttggca

SEQ ID NO: 510551 - DNA, 539 bp, Homo sapiens
ccaccatacctggctaatcttttgtgtttttagtagagacggggtttcaccatgctggtcakgctagtctcgaactcctgacttcgtgatccgcccaccttggcctcccaaagtgctaggattacaggtgtgagccaccgcacccagccagaagctatctgaagtggctcaagctaccttcccctgtgacctctaggcccatgggtgacatgttcatacttgccttggtcacacccccaccctgccctgccatctctcagttctctttctcctgcttagtggggcccagagcagatcagcaagtcatccaactgggggccaagatgtcagcctccctttccaaggcacctctaatttctacaagtaattttcttggagcctcgcctcactgggctggctgggggtgagagggtggggatataaatttcacctcagggggaagagaagaaataatttctcaacacaaatgcctcacactcatggctttcttccccattcctccttcttcacacaatcccatcctagttgattcctgctgc

SEQ ID NO: 510552 - DNA, 539 bp, Homo sapiens
ccaccatacctggctaatcttttgtgtttttagtagagacggggtttcaccatgctggtcaggctagtctcgaactcctgacttcgtgatccgcccaccttggcctcccaaagtgctaggattacaggtgtgagccaccgcacccagccagaagctatctgaagtggctcaagctaccttcccctgtgacctctaggcccatgggtgacatgttcatacttgccttggtcacacccccaccctgccctgccatctctcagttctctttctcctgcttagtggggcccagagcagatcagcaagtcatccaactgggggccaagatgtcagcctccctttccaaggcacctctaatttctacaagtaattttcttggagcctcgcctcactgggctggctgggggtgagagggtggggatataaatttcacctcagggggaagagaagaaataatttctcaacacaaatgcctcacactcatggctttcttccccattcctccttcttcacacamtcccatcctagttgattcctgctgc

SEQ ID NO: 510553 - DNA, 539 bp, Homo sapiens
ccaccatacctggctaatcttttgtgtttttagtagagacggggtttcaccatgctggtcaggctagtctcgaactcctgacttcgtgatccgcccaccttggcctcccaaagtgctaggattacaggtgtgagccaccgcacccagccagaagctatctgaagtggctcaagctaccttcccctgtgacctctaggcccatgggtgacatgttcatacttgccttggtcacacccccaccctgccctgccatctctcagttctctttctcctgcttagtggggcccagagcagatcagcaagtcatccaactgggggccaagatgtcagcctccctttccaaggcacctctaatttctacaagtaattttcttggagcctcgcctcactgggctggctgggggtgagagggtggggatataaatttcacctcagggggaagagaagaaataatttctcaacacaaatgcctcacactcatggctttcttccccattcctccttcttcacacaaycccatcctagttgattcctgctgc

SEQ ID NO: 510554 - DNA, 631 bp, Homo sapiens
atccaggccatctggagaggtgcatttaaatatgcatttctaacacgttcccaggtgatgcaatgctgctggtctgaacactgcattttaaaacaacactgagttagcactggctatttcaaacggtcaggggagcggtcacagaaggggaaaaacagagagatgctgtgcaggtgaattcagtaaggacgctgcactggttggctgaggagagggttgcggggagggaaaaggagaggaagaagtgcgtgatgatgccgaagtccagatgtgagttgtccaagataatgagcagccccccttttaaggtttttattttagctcctctgttaaaagcaaaagagcgtctttgttttctctacacaggctcttgcctttttccctactaaatagtacaataaattccactgccttatttgttycatcaaataaaagaatgcctgccaatatctgtgaggctaatattatagctcaattccagaacatcttgtagtggttatttctaacatattctggaatctgtacttagggtactcagtgccttaaccaacccatatttgaaattgagttgctagtgcacaagcttatcaaggttattatgcctgcagaaaaatttatagcagatgcagtc

SEQ ID NO: 510555 - DNA, 627 bp, Homo sapiens
gcttatctgtaatagtgaggacagtggtagctaacctttattgagcattactatatgccgggcactgattttttgtactttatatgtattaattcatttaactcttacaaaagaagtagatactattattcccattttacagtggggaaacagaggtggtgagaggtgagtacctcacctaccataggtagakttgagaaccaagtcgcactgggtgcggtggctcacccctgtaatcccagcactttgggaggctgaggtaggaggatcacttgagcccaggagttcgagaccagcctaggcaatacagtgagacttcatctctagaaaacattttaaaaattagctggacatggtggtgcacacctgttgtctcaggtactcagaaggctgaggcaggaggaatcacttgagcccaagagttcgaggtcacagtgagcactccagcctgggcgacagagcgagaaccctgaccctaaaaaagaaagaaagaatattaccagtaccattgcttctttccagttgcatctccacagcagtcactcttagacttttggttatttatgtacctactttctgttcatagagtcaaatctgagtcccagaaaagggcatgtgtctgggcag

SEQ ID NO: 510556 - DNA, 474 bp, Homo sapiens
atttttgcagagaagcaaagaccaatcagtaaactagcawcacatccaaaccttggcttctagaccctgttccgctactgtcaggcttgccaagggaacacggcccacttaacctcaaaagtgaagggactgtttcttacgaggcaatgccatgtagaatgttcctaagggaacagcagcaaggacagttcaatgatccctcctggagacaccttctgattcctaagtctcctccctacatcaatcgtggcatcaaattgattgtaactgtaatccactttatgtctaagagaaaaaagggtctgaaagttagacaacttagccaagatcattcagcagttaacaggcaagagctaggatttaaaccaagttcctgggacatggaatggacactgcatccatttcccctattcccttttgtttcattttgaattcattattacctccctccagaccactacaaaagcctccacc

SEQ ID NO: 510557 - DNA, 520 bp, Homo sapiens
gggaggtcggggatctggctggattgaaggggtctcatttgaagggagacataattatagcaactctattaattgctcaatatgtattgggcatcttgctaagattttcacacattattttttaatgatgagtattattaccttcattttacagatgagaaaattgaggcccagggaatttaaataatttgctaaagttacacagcattaagtttctgacctggaatttgaactcaggatcacttgatttatggtgaccatatatttgtcatttaaaccggcaccttttgagaataaaagagagcgckggtaatgattatgctagaacagcagatgtaaaccagggctgtctggacaaatcaagatatgtgtttggtcactctgactccaaagcctgatttcactttgatttgaattggaagggtagggttacattgtgggtagctttaaagacaattgatggaggccgcgtaaaaggggttagatagactgattaacttgatagcgctgtatagaatgg

SEQ ID NO: 510558 - DNA, 568 bp, Homo sapiens
ttttatgcttgctcatgggatgtaggcaagcacagcgttccaccttttgttgaaaagagacgggtaatctttagtgccagtgatggtgtgaggagctggcaccctcctacaccactggtgggagtggaaattggtgccacctttctggtgggcaaccaggcaaaatagatcaagagccatctgccctgtctagctatatattttttgttcagtagaactgggtagatagctaccccttgtcccttctctttagactctatgagctcagtgaagctggatggctctcaaarataaatgcctggcccttctcagaaagacaattaatgagctcagagactgcttaaactgagatgaaatgtgagattaacagacacagggccatccatccaccctgccagcaggctatctcctcctcactacactgtttcattaggttctgccaaggaaacccaccaaatgcaccgtggccaccaggtctatttttgagataattacaaggctcgggcttgaatccacttaaaggcagaaatatgggacaggcaaggattaaggcagactctgccccttt

SEQ ID NO: 510559 - DNA, 667 bp, Homo sapiens
tggctgagtgtccctgtgacaaagactggggataaatgggtttggcagtgtagtaccactaagtctagtaaatgatagttattttctccaatcttctccctcttccttccctcccattatccaccctccacccttccagaggccccaatgtcagttgttcccctctatgtgtccgtgagttcatcatttagctcccacttataagtgagaacaagtggtatttggttttctattcttgtgttagtttgctaaggataatggcctctagctccatctatgttcctgcaaaggacatgatttcgttctttgtatggctgcgtaacatttcatggtatatatggaccacattttctttatccaatctaccactgatgggcactgaggttgattccatgtctttgctattgtgaatactgataatgtaggttctaataaggtttggggcagggctaggattgtgtattttattttattttgagacagagtttcactctgtcacccaggctggagtgcagtgkcgtgatcttggctcactgcaacctctgcctcctgggttcaagtgattctcctgcctcagcctcctgagtagctgggattacaggcgtgcaccaccatgcccagctaatttttgcatttttagtagagatggggtttcaccatgttggcc

SEQ ID NO: 510560 - DNA, 626 bp, Homo sapiens
ctgaaaatattttctacctggcccttaataggaagagtttacagatcccccgattatatacacaatgaaaaagctgctcctcacacagttggccccttctctccttccctgtggtttggtttgaagcacagcagacgtagaagttctacagggcccgagcttctctcctggagkcaagtgcttcagtgtactgtcatatgtcgcataatgacggggacgtgttctgagaattgtatagttggttgattttgtcaatgtaagaacatcacagggtgcacttatacaaacctagatggtatagtctgctacacacctaggctatattatggtgtacttatcactcctaggctgcaaacctctacagcatgttattttactgaatctggtaggcatttgtaacacagtggttagtatttgtgtatcatatctcaacatagaaaaggtacagtaaaaatacagcattataatcttatggaccaccattgcaagtgcattctggagatgtctgaaacagcattatgcagtacatgactttgtaagagttaaagacagaggaaaggaacacaaaaagtggctcaacaagtcaaagatgggtttattttggtgaataaacctgagaggtgctt

SEQ ID NO: 510561 - DNA, 626 bp, Homo sapiens
ctgaaaatattttctacctggcccttaataggaagagtttacagatcccccgattatatacacaatgaaaaagctgctcctcacacagttggccccttctctccttccctgtggtttggtttgaagcacagcagacgtagaagttctacagggcccgagcttctctcctggaggcaagtgcttcagtgtactgtcatatgtcgcataatgacggrgacgtgttctgagaattgtatagttggttgattttgtcaatgtaagaacatcacagggtgcacttatacaaacctagatggtatagtctgctacacacctaggctatattatggtgtacttatcactcctaggctgcaaacctctacagcatgttattttactgaatctggtaggcatttgtaacacagtggttagtatttgtgtatcatatctcaacatagaaaaggtacagtaaaaatacagcattataatcttatggaccaccattgcaagtgcattctggagatgtctgaaacagcattatgcagtacatgactttgtaagagttaaagacagaggaaaggaacacaaaaagtggctcaacaagtcaaagatgggtttattttggtgaataaacctgagaggtgctt

SEQ ID NO: 510562 - DNA, 626 bp, Homo sapiens
ctgaaaatattttctacctggcccttaataggaagagtttacagatcccccgattatatacacaatgaaaaagctgctcctcacacagttggccccttctctccttccctgtggtttggtttgaagcacagcagacgtagaagttctacagggcccgagcttctctcctggaggcaagtgcttcagtgtactgtcatatgtcgcataatgacggggacgtgttctgagaattgtatagttggttgattttgtcaatgtaagaacatcacagggtgcacttatacaaacctagatggtatagtctgctacacacctaggctatattatggtgtacttatcactcctaggctgcaaacctctacagcatgttattttactgartctggtaggcatttgtaacacagtggttagtatttgtgtatcatatctcaacatagaaaaggtacagtaaaaatacagcattataatcttatggaccaccattgcaagtgcattctggagatgtctgaaacagcattatgcagtacatgactttgtaagagttaaagacagaggaaaggaacacaaaaagtggctcaacaagtcaaagatgggtttattttggtgaataaacctgagaggtgctt

SEQ ID NO: 510563 - DNA, 488 bp, Homo sapiens
tgaggtgggcggatcactcgagggcaggagtttgagaccagctgcctggccaacatggggaaaccctgtctctacaaaaaatacaaaaattagctgggcatagtagtgcacacctgtagtcccagatactcaggaggctgaggcagagaattgcttgaactcaggaggaggaggttgcagtgagycgagatcatgccactgtactccaccctgggtgacagagccagactctgtctcaaaaaaaaaaagtatggactttggaattaggcaggtatgttagaatcccagcttcaacattttccaggtatagtgaactcaggcacagtattcagcatttctgagtctctgtttcctcatctgtatatggaggagggggtgataattgtacctgtccaggtcattttggctgggctagagattcatgggcagaggctacacccacatacaattgtaaggttagaatcgattcccaatttatgaacaacttg

SEQ ID NO: 510564 - DNA, 510 bp, Homo sapiens
caataagaaaaatattaatgccccaatagaaaaatgatctatgaacaaaaatggaacattagtggaaaaaatataaatggcaaataaacacatgaaaatatgaccacttctctcctatcaaagtggcaacatttttttaaaaagacctgttgggggtggggaagaaaagggaggcagggaatgaaagtttttacaatcttccttaaaagcaatttaacaaaatayactgggaatccttcaaaagtttacacagcattatttgtaatagaaaaaaaaatcaatcatgcccaactggaaggggaaattaaactatggcccaggcataatatggaatattatgtaagttttaattttctattttcagagactttttaatgagaagggaatatgttcaagagataatattttttaatcaggatagaaatgatacatggtatgatttcaattttgttttgaaagagaataatatatatgcatagataaaactagaaaaataagtatttatgcttt

SEQ ID NO: 510565 - DNA, 510 bp, Homo sapiens
caataagaaaaatattaatgccccaatagaaaaatgatctatgaacaaaaatggaacattagtggaaaaaatataaatggcaaataaacacatgaaaatatgaccacttctctcctatcaaagtggcaacatttttttaaaaagacctgttgggggtggggaagaaaagggaggcagggaatgaaagtttttacaatcttccttaaaagcaatttaacaaaatatactgggaatccttcaaaagtttacacagcattatttgtaatagaaaaaaaaatcaatcatgcccaactggaaggggaaattaaactatggcccaggcataatatggaatattatgtaagttttaattttctattttcagagactttttaatgagaagggaatatgttcaagagataatattttttaatcaggatagaaatgatacatggtatgatttcaattttgttttgaaagagaataatatatatgcatasataaaactagaaaaataagtatttatgcttt

SEQ ID NO: 510566 - DNA, 654 bp, Homo sapiens
tgtagggatattggtgagagcagtaacatctaattttcgtgcatttataccttggtaacatttcagatgccttgtttcacrtaaccattgcaaagaggattacctatttagcataagtattaatatgcccattgagttagttactgatttgctacataacagattatcataaccctgggggcttaaaacaacacacatttgttatctcacagtttctacaggtcacaggtctaggcatggcttagttgggttctctccctcagctctaaccaggctacacaattcaggcaacagtggggctgttgagcccacaggcttaaatggggaaaaatctgcttccaagctcccgagggttgtcagcaaaatttatttcctggtggctgcaggaccaacggcttcagtttctttctggagaccacctccagcccctagaggctgcccacagtgccttgctacatgggcttctcccaaatggccgcatactccacagatgcctgcttcttcactgtcagcagtggaaagaatgcgagtctgctgggaagatggagttttatttaacataatcagaggtgcaacagagcatcccttttgccacattctgttggctaaaaacaagtcacaggtcccatccacatgcaacgggaggggatcaca

SEQ ID NO: 510567 - DNA, 392 bp, Homo sapiens
gttttatttaacataatcagaggtgcaacagagcatcccttttgccacattctgttggctaaaaacaagtcacaggtcccatccacatgcaacgggaggggatcacacaaagtcacagacatcaggaagtggagatcctaaggaccacctgaacgtctccaccacatacattatacgtaagttttaaaaacctaaggctagaaaacctaaagagtagaagaaatttccctcaaccacgcagccaagccacagtggaggacctggaattagaagccaagtctgaagaactccaaggcccatgacctcacccrcaactgcgttattcacagaacccatcactggcctctctaggagtcatggtctccctcacctacaacagaggcaaaaacaaa

SEQ ID NO: 510568 - DNA, 520 bp, Homo sapiens
ctggaattgttacttccatggtaaaatttgtcttccttcattccccattaatgtcctacaagactgcagtacaaccctgacatctccaagtgggtcttgcccagggtaaaaatttacttccaagaccatttacatccatcaacaaaaaatcaatgtgattgttaaagggtcttttacttgttagagcaataaasattcttcaaactcaatgttcttcttactcctcacattcccactcaaagcatacctggggagtaaaataagaaagaaaaagaactaaccctgaggaaagatgttttattttgcagacgacagaacttcttcgcttgtttaaaagcgatttagcatatagtatgggtcagcatgttcctctttaagccatctagaaaaatttagtggcaatgatccaaattagctgagttaaatgaataaatatgctctgaaaatgtgaacactgagtaacaggctgctaagttccaggcagccccaccagagtgactcagatgatgctacagaaata

SEQ ID NO: 510569 - DNA, 634 bp, Homo sapiens
gtgaatcgtgctgtggtaacatgggaatgcagacattacctctttaacatactgatttcagttcctttgtatatatacccagtaacgggatttctggatcatatggtagttctatttttaattttttgaggtatctccatactgttttccatggtggctgtacccattttcatttctacaacggtgtacaagggttcccttttctccatattatcactaacacttgttgtcttttgcttatgatggcagccattctaacagatgtgaggtggtatctcactgtagttttgatttgcatttcactaatgattagtgatgctgagcatcttttcatatacctattggccatttgtatgtcttctttggagaaatgtctattcaggtcctttgaccacatgttttttttaattgtctgtgttcagccactgtaggcaaatgtttcattaaaagaaaatgtaagttcaaggcatttgcagcctacaaraaattttagtttctgagattttcccttgaggactggtccagcctgaacgataaggtcttggagagggaacgtggagaagcacagactgcatatatgtctcactaactaggagttttacagcctcctccacaggaatctgttctttgggga

SEQ ID NO: 510570 - DNA, 633 bp, Homo sapiens
agctccggctctcagttcctcgcctcctagactcaggcttgcaccccggaagctgccatcctcagggctcctgcctgctccagaggcttcccgacaggccttcctagttcccatcttgctgtgattcttgtttatggctcctttctgtgcacttggagtctatggacacccagtgacagtcagctctagctgtgagagaggtagtctatcttttctagaaaaagtggagcttttcaaaataaagttactctcatctgcctatggcatcagaggggtctggaggcaggatcttgctcragtgccctttttgggaactggataatgagtcttagacatcataagtctaaaaatgaattagctgtaatctctgggtgtcagttgttttcttcatttgtgaaatgaagggccaggtccaatggcctctaggatcctttcacagtcaaaaatcagtgaatatgagattcaaatcctgataacttgaaaatctaaagctggaagtacctttctggaggagaggcccaggcctggagaaaacatcactgttgaagggccctagtttgggaggtggcaggaggacaggccccgcctgcactatgcttcctctctgttcatggcagggaactgacagttcat

SEQ ID NO: 510571 - DNA, 633 bp, Homo sapiens
agctccggctctcagttcctcgcctcctagactcaggcttgcaccccggaagctgccatcctcagggctcctgcctgctccagaggcttcccgacaggccttcctagttcccatcttgctgtgattcttgtttatggctcctttctgtgcacttggagtctatggacacccagtgacagtcagctctagctgtgagagaggtagtctatcttttctagaaaaagtggagcttttcaaaataaagttactctcatctgcctatggcatcagaggggtctggaggcaggatcttgctcaagtgccctttttgggaacyggataatgagtcttagacatcataagtctaaaaatgaattagctgtaatctctgggtgtcagttgttttcttcatttgtgaaatgaagggccaggtccaatggcctctaggatcctttcacagtcaaaaatcagtgaatatgagattcaaatcctgataacttgaaaatctaaagctggaagtacctttctggaggagaggcccaggcctggagaaaacatcactgttgaagggccctagtttgggaggtggcaggaggacaggccccgcctgcactatgcttcctctctgttcatggcagggaactgacagttcat

SEQ ID NO: 510572 - DNA, 506 bp, Homo sapiens
aagggtttgaaccctgcttccactatttatcaataatggagccatatgcatcttctagaatctttgggatccttagtttccttatcaggaaaatggacatttgaatagcaactttgtgaaactgtggtggtagcaggaaaatgagatgatatgagttgagcaatcagcaaagaggctggcatgasagaaactccttgattatcttttctttcttgccatacccttccttcaaaaaggacagacgtcagtttatgggaaatcctttggggcttgagtctaatctctcatgctgccaacagacatagactaaaaacatccttcatattttttaccaaatcacagtggacacagcgactagtctgactgcatttcagaaaatgttattaatagtctctaaaccataagagttacaggggttattttgaaaagcactaaatgcataatgatttatatagattttatagattgaattcagccatgtcaatttcctaatgctgtgaatttta

SEQ ID NO: 510573 - DNA, 506 bp, Homo sapiens
aagggtttgaaccctgcttccactatttatcaataatggagccatatgcatcttctagaatctttgggatccttagtttccttatcaggaaaatggacatttgaatagcaactttgtgaaactgtggtggtagcaggaaaatgagatgatatgagttgagcaatcagcaaagaggctggcatgagagaaactccttgattatcttttctttcttgccatacccttccttcaaaaaggacagacgtcagtttatgggaaatcctttgrggcttgagtctaatctctcatgctgccaacagacatagactaaaaacatccttcatattttttaccaaatcacagtggacacagcgactagtctgactgcatttcagaaaatgttattaatagtctctaaaccataagagttacaggggttattttgaaaagcactaaatgcataatgatttatatagattttatagattgaattcagccatgtcaatttcctaatgctgtgaatttta

SEQ ID NO: 510574 - DNA, 521 bp, Homo sapiens
gagttttgagcatccctctgtctctgcaatattgagaaaagaatctgtgttctcttaactaggggtgacataaaataaggaattcaggggaatgaaattgatatcttaatgaatgagatataggctgagtattccttatccaaaatgcttgggaccagaagtattttgaatttctaatttttttttttttgggattttgggatgtttacatatccacaatgatgttatctcaggggacggaacccaagtctaaacaagaaaaccatttacgtttctgatacactttgtacacatagcctgagggtaattttctacaatattttaaagaattttgtgcatgtaacaaagctttgactacgttttgactgtgacgcatcaaatgaggtccggtgtgaaattttccacttgggtcttgtcggtgctcagaaaccttcagatttgaagcatttcagattttggattttccgatgagggaggctttcagaagggttgyggcaatatatgtcacaaggtggtgaggg

SEQ ID NO: 510575 - DNA, 642 bp, Homo sapiens
  misc_feature (1)...(642): n = A,T,C or G
cctatgctgcatgcaagtgtcagtcctgaagaaatcaacttgtggccctagtgccttcacagggcatacaagaacactgatcagggcttctcatgatcagatactgttgtcargaattagatgtgaatgggcaaacctctcagcctaactcatctgggttttcagcccctgccttagtcttcctagcaagcactcaaccatccaggagtacaatgagctgcttccttctccaatatgataggcagcccaacccttatcttcactgtttctcaatgaaggtggccacaaggatgttctgaggaagcaatagtgcccagaactcagagagggcttcagtcatgagacgcttgagggtgcttgggaaccacagtctcctggaccacctatcatctaggggaggcacagggaagtggctgtatcatgtctgtgtttgggagagactgttgagcacatgtgtgatgacacacagcctcctggcccctctgaccttggaacaggaatgcagcttttcatatctgagaggtcagcagagctggagcagatctggggcattttcagtcttgtccaaaggtcttccaggaatttgcagcagtaatgacctgctttcgaaagcaaatgctgagacnnnnnnnnnnnnnnnnn

SEQ ID NO: 510576 - DNA, 642 bp, Homo sapiens
  misc_feature (1)...(642): n = A,T,C or G
cctatgctgcatgcaagtgtcagtcctgaagaaatcaacttgtggccctagtgccttcacagggcatacaagaacactgatcagggcttctcatgatcagatactgttgtcaggaattagatgtgaatgggcaaacctctcagcctaactcatctgggttttcagcccctgccttagtcttcctagcaagcactcaaccatccaggagtacaatgagctgcttccttctccaatatgataggcagcccaacccttatcttcactgtttctcaatgaaggtggccacaaggatgttctgaggaagcaatagtgcccagaactcagagagggcttcagtcatgagacgcttgagggtgcttgggaaccacagtytcctggaccacctatcatctaggggaggcacagggaagtggctgtatcatgtctgtgtttgggagagactgttgagcacatgtgtgatgacacacagcctcctggcccctctgaccttggaacaggaatgcagcttttcatatctgagaggtcagcagagctggagcagatctggggcattttcagtcttgtccaaaggtcttccaggaatttgcagcagtaatgacctgctttcgaaagcaaatgctgagacnnnnnnnnnnnnnnnnn

SEQ ID NO: 510577 - DNA, 642 bp, Homo sapiens
  misc_feature (1)...(642): n = A,T,C or G
cctatgctgcatgcaagtgtcagtcctgaagaaatcaacttgtggccctagtgccttcacagggcatacaagaacactgatcagggcttctcatgatcagatactgttgtcaggaattagatgtgaatgggcaaacctctcagcctaactcatctgggttttcagcccctgccttagtcttcctagcaagcactcaaccatccaggagtacaatgagctgcttccttctccaatatgataggcagcccaacccttatcttcactgtttctcaatgaaggtggccacaaggatgttctgaggaagcaatagtgcccagaactcagagagggcttcagtcatgagacgcttgagggtgcttgggaaccacagtctcctggaccacctakcatctaggggaggcacagggaagtggctgtatcatgtctgtgtttgggagagactgttgagcacatgtgtgatgacacacagcctcctggcccctctgaccttggaacaggaatgcagcttttcatatctgagaggtcagcagagctggagcagatctggggcattttcagtcttgtccaaaggtcttccaggaatttgcagcagtaatgacctgctttcgaaagcaaatgctgagacnnnnnnnnnnnnnnnnn

SEQ ID NO: 510578 - DNA, 642 bp, Homo sapiens
  misc_feature (1)...(642): n = A,T,C or G
cctatgctgcatgcaagtgtcagtcctgaagaaatcaacttgtggccctagtgccttcacagggcatacaagaacactgatcagggcttctcatgatcagatactgttgtcaggaattagatgtgaatgggcaaacctctcagcctaactcatctgggttttcagcccctgccttagtcttcctagcaagcactcaaccatccaggagtacaatgagctgcttccttctccaatatgataggcagcccaacccttatcttcactgtttctcaatgaaggtggccacaaggatgttctgaggaagcaatagtgcccagaactcagagagggcttcagtcatgagacgcttgagggtgcttgggaaccacagtctcctggaccacctatcatctaggggaggcacagggaagtggctgtatcakgtctgtgtttgggagagactgttgagcacatgtgtgatgacacacagcctcctggcccctctgaccttggaacaggaatgcagcttttcatatctgagaggtcagcagagctggagcagatctggggcattttcagtcttgtccaaaggtcttccaggaatttgcagcagtaatgacctgctttcgaaagcaaatgctgagacnnnnnnnnnnnnnnnnn

SEQ ID NO: 510579 - DNA, 486 bp, Homo sapiens
cgggcatggtggcatgcacctctaatcccagctacctgggaggctgaggcaggagaattgctggaacccgggaggtagagaccgcagtgagtcaagactgtgccactgcactccagcatgggtgacagagcaagactctgtatcacacacacacacaaaaagtccagcctgggcaacacagtatgttatccttgccaccaaaaaaaaaacaaaaaacaaaaaacaaaaaaaaaaacaacccacaaaacacaaaacatacacacacacagacacataaatagccatagaataatctgtattctaragagggtcctcctgggtatcacttctttttctataataagggcaagtcttctgcttttaaaaataacaggctgttatgggatcactcataattcttaatccaggagtcactaaccagctttgtctctaacaaaaacctaagaataacctcaagtgtgctgtggctacaaggtaaaaataagt

SEQ ID NO: 510580 - DNA, 486 bp, Homo sapiens
cgggcatggtggcatgcacctctaatcccagctacctgggaggctgaggcaggagaattgctggaacccgggaggtagagaccgcagtgagtcaagactgtgccactgcactccagcatgggtgacagagcaagactctgtatcacacacacacacaaaaagtccagcctgggcaacacagtatgttatccttgccaccaaaaaaaaaacaaaaaacaaaaaacaaaaaaaaaaacaacccacaaaacacaaaacatacacacacacagacacataaatagccatagaataatctgtattctaaagagggtcctcctgggtatcacttctttttctataataagggcaagtcttctgcttttaraaataacaggctgttatgggatcactcataattcttaatccaggagtcactaaccagctttgtctctaacaaaaacctaagaataacctcaagtgtgctgtggctacaaggtaaaaataagt

SEQ ID NO: 510581 - DNA, 596 bp, Homo sapiens
aaactaatacaccatctcctctgcaattcctccctgatcatcacgatttccccttcctcccttctcctggtatttgatttgtatctataaattagcacttatcacttcccaggattaattatagtaatttagtgtagcatttaatattcgttttggtccaaataagacaagacttcattgttatttaatgtaaacgcaattgggatctctcagtttaggaatttaggtatttagattccttgctcaaaatgatccagtcttagattctattttttggtgtttgcccaacctagcactttcatcctgaaartcacctaattgttcaagctggctgataaagctcaaatcatacatattccagtaaacaggagaaaggaagtcagaaggaaaggaataaaaaggccctcttctcaaacgaattagctccccttcgaaagccttctaaaaatcccaaacaatacttctgcttacatttcattaatgggaatctaataatatgtaacacctaattgccaggggtgtgcagccatttagctggatgtttaaaagagacatttattagtaaatagcagtctctgccatatttacattatttg

SEQ ID NO: 510582 - DNA, 596 bp, Homo sapiens
aaactaatacaccatctcctctgcaattcctccctgatcatcacgatttccccttcctcccttctcctggtatttgatttgtatctataaattagcacttatcacttcccaggattaattatagtaatttagtgtagcatttaatattcgttttggtccaaataagacaagacttcattgttatttaatgtaaacgcaattgggatctctcagtttaggaatttaggtatttagattccttgctcaaaatgatccagtcttagattctattttttggtgtttgcccaacctagcactttcatcctgaaaatcacctaattgttcaagctggctgataaagctcaaatcatacatattccagtaaacaggagaaaggaagtcagaaggaaaggaataaaaaggccctcttctcaaamgaattagctccccttcgaaagccttctaaaaatcccaaacaatacttctgcttacatttcattaatgggaatctaataatatgtaacacctaattgccaggggtgtgcagccatttagctggatgtttaaaagagacatttattagtaaatagcagtctctgccatatttacattatttg

SEQ ID NO: 510583 - DNA, 667 bp, Homo sapiens
ttagtggaagaaatagaaaaatgactagtaactaaagtacaatgtaaaaagtgttctttatatggtgttatggaaatacagaatggaagaggagttagggaaaagttcacaaagaaagggttttgagctgggtcttaaaggaagaacaggagttcagtaagtagaaagaagaggaaagtatctccatcaaagagagcagcaagtgtaaacacataggatgttcaaaagcatgacatatgtaaagaacagtgaggacttaggatatgatgtcctaaacaatctcgaaatgcaaaggaaacaaatcgggaagggagttggacagaagttaaagcagaaaagatagattttattcatgaattattgcaataagggaaaagtaatagaactgagctccattctgaatataacaagaacaaatggggatttacagtcaaagatcatcatgcgggtatgtggataaaaaatwacaaagagaaaacatcaagggtaaaggggattctggctaaaccagctcaccaggattctttcagaagacaagacaaggtgatcagatattgagggtaaggaattaggaatttgatcagataccaaggatgggaaagtcttgataaactgacccagcaggaaccttactaaaactgaactaagggccgggcacggtggctca

SEQ ID NO: 510584 - DNA, 596 bp, Homo sapiens
tataatattcagggtttttttgttgtacttactgagagtaataaaaaaaatacatgtactccgtcttcacaaaagtagcagtttcatgatttacattttaaaggttacactggttgttaacatggggaatagaccacaacagaaatggagcaagagagcacataaactaggctacagtagatgttatccaaaagaagttctacaacttattagctataatctgggcatgttatttgatcctttaacatattagttgaatagattacttgataaattacatcatatattttgcagtgaggccaagaggattttttggaatattaattgtggagggtgaagagaagagaagatttaaagataattcctgggtttgaaactgaatggtgatactattgactgacagagatgagagaaataagagcaaggaggatcaagagttcrgatttagacatgatgaattgtggatgttgatgttgatattgccaaatatttaaaaagcagctggagctcagggaagagattgggactagagatgtaaatctaggattaatcagcctacaaaatcaggtatacaactagatgagtatagggatcga

SEQ ID NO: 510585 - DNA, 658 bp, Homo sapiens
gtgacttatttcatttgtgacctccctaagtgtctcgctatttagtaccattagcacataccctttttgatctatcctatttttccatgactaattaaacctactttacaaaacacttaggttcaactgtttcttcaggcctttatttccttatgaaggctcccatactatgtaaaacttttattaaataaatttgtgtgctcttctcttgttaatccgtcttgttataggagcctctgctaggaacataggatggatragaaaaatatatttttccttcactataatttcaggaaatcatagttcttgattagtgacagacacagttatcatttatacttgcatggtacagttgatttgttccgtaatgcagatgaatccaccagacaactaaaaacaaaaaaattgacagctttcatcgacttgtgtgctccttttttaaattacattttcttatcttaattttgtgtttcttttgattttcttcggtagttttaccctaaatctattagcctaaataagaaattatttaattttaattgtttttaaattcaacaaaatgatatcagtctcataaagcttcttactcacttaatattaacgaattgcattttatctagattattatgggtagctatagtttatttattttcatggc

SEQ ID NO: 510586 - DNA, 491 bp, Homo sapiens
tactgcttagaaattttgtagaaaaactttttttttaaagcaaaaacagttgtaaacatattcaattaatacaaatgcytaatcaagaaaagggttttgggggagttttttgtttggctttttgtttgtttttttgctgtctgggtttattttctttgcttaatttacagagaattcacttcccagccaactttgcttatttttgaaatactatgcaatttggtcttctaagaatagttgaagctagaaaaaagctacaaattatttcagatatgctaaagcctttttgggttttactgattcttctttatacttaacgaatcaccagatatttaagacatttagataataaatctcaattatgttttctggagaaaaataaatatttcttaaaactttctaccttcccaataatagaaatggagatttcttttttaacaccattcatcagatcttccttttcattactttgctggcattctttatgaaca

SEQ ID NO: 510587 - DNA, 589 bp, Homo sapiens
atattaatataaaaattatatgaaaattaggcaaccgtctgataataaaaagtctccttgtggaatactgttaggttaaactttacctacagattgttaaatccttagcactaatgttttccccagaaaagattaatggaaacatcatttgcttttctgactagatagttgctgcttccaaaggtggttttacacaaatacaaaattaaaaacacctttagtacagaaataattgcttgtatttcggtatacattcacagtacagttcagcatttagtggtcctgctagcaatttgccaggaagtcaagcctgccaatttcctgatattcctgctgtgcaccccaacttcttaatccctgctgaggatcttgagaagcagcagcaccaaaaccaaagtaggcaccaaattcaaggttcttttggttccggttgtcacatttcaagctagactccaatagatggaaggatratcacatgtgagccctgtttaaaacttcaatttttaagagcaagcacaattgcaggaaaagaaaacaattcagagggatcatgtgtgcttacagttgtcttcatgtggccttttcccag

SEQ ID NO: 510588 - DNA, 675 bp, Homo sapiens
ggcaaaaaaggatgggtgggtgaggagaagggtgaactgacatggaagagtgaaatgtgtacaaacttctctccttttttcttttctttcctttttttctctgctcctcctcctcctcctcttcttcttccttcttcttcctcttctttcttccttcttcctcctttttattctcctcctctgccaccgctgcttcttcttcttctccttcttcctcttcctcttcttcttcttcctcttcttcataatggttaraatttaattctcacatctcttttattgatcactgtttcttgcacctcagatagaaaaagggagaactttgataagacaggtctatgcaaagtattttatcaaatgtatgcctttgtctaagcctgagagcagagtctgagacaagaacttgtgggcaggtaagggaaagagagggagctgattcacaggttcctcatcaggatgtagaatgcatctcagaattgtccacctgagtatcacagaagggtggcatttatcttctggcccccatcctctattgctccagtgttgccccatggatcgtaatttgcccaggcttccagattgcacatatataacagccatggtgtcagagaagtgctggggcaaaggggaggagctgtcaacagtacctgtgccaagggcatgtaacctgtgcag

SEQ ID NO: 510589 - DNA, 675 bp, Homo sapiens
ggcaaaaaaggatgggtgggtgaggagaagggtgaactgacatggaagagtgaaatgtgtacaaacttctctccttttttcttttctttcctttttttctctgctcctcctcctcctcctcttcttcttccttcttcttcctcttctttcttccttcttcctcctttttattctcctcctctgccaccgctgcttcttcttcttctccttcttcctcttcctcttcttcttcttcctcttcttcataatggttaaaatttaattctcacatctcttttattgatcactgtttcttgcacctcagatagaaaaagggagaactttgataagacaggtctatgcaaagtattttatcaaatgtatgcctttgtctaagcctgagagcagagtctgagacaagaacttgtgggcaggtaagggaaagagagggagctgattcacaggttcctcatcaggatgtagaatgcatctcagaattgtccacctgagtatcacagaagggtggcatttatcttctggcccccatcctctattgctccagygttgccccatggatcgtaatttgcccaggcttccagattgcacatatataacagccatggtgtcagagaagtgctggggcaaaggggaggagctgtcaacagtacctgtgccaagggcatgtaacctgtgcag

SEQ ID NO: 510590 - DNA, 527 bp, Homo sapiens
tacgtgaccgtcttgtgtgtgctaggttcgtgcttgtatctgagagatgagaaatggcagaaggaacagccgtgaaatcagcagattaactcttcaaagaagacacttacattttccattgatggcctcctccctctcctkttagttcaagctggacagaaacaaaagtgctgcgtgatgagggttagatgctctttgtaattctacagcaatgagtcttctttttaaaacacccagatgtcagtactattttgggcagatgtactggggagcagttggtgatgacctcacgaggctgtgactttaaagaccaaatgacacagcttttgagtaaagcaggctccggtctcctaatccccgggctccagggttctcgaattcagagcaaaagtggtactccacactgcccgtgtccctgctcatcgccatatccccaacccctccttgccccaagctgctgagtgtgcacagaacttgtgtggttggtctggggctctaagacaagtttccttggacagacagcctgt

SEQ ID NO: 510591 - DNA, 572 bp, Homo sapiens
gcctgtgaaagacatctagaagttccagagaacaatatcctctgggaagggaagtgggggcaagttaaattgagctggagcgaaaaggaggctttaactctgtaatgtttttttcctttttttttaaaaaaaaaaaaagaatctggggagtgactgcttaatgagtatgtgttttctttgtggtcatgcaaatgttttggaacaatatatctataggtggtggttgcataaggtgaatgtattaaatgctgttgaatgcagaaaaaaaaggaatcaaaataataagagacctaaaggcaatgtcacagaatttgttaaagttgagagttgattatgctaattaaagttgagggtcagttatactaatttaattattttctgtattwttgtgtttaaaaggcttcgttgaagcaacagccatcagcacttttgagatgtacccagagaaactgttagaaatctgtctcttagcagagaacgttctctttaggtctgtccctgtgtaccggaaggtgtttgtgcatgagtgctggtaccttgcctgtgtgcacacacgcttgtacgcttgtatt

SEQ ID NO: 510592 - DNA, 386 bp, Homo sapiens
tgttaattaataaggagcatgttcagasgcttgctttagtatgaggcctctgtgctgtcttgatcaaagtgactggagcgttgtggccccagcaagcatgagaagagcagggttaatttttaaaaatttctctagaaacttaaacttgagagtaaatgatgaatgataattatttgaaccaggtttgcaatatgaagtggccagaggaagctcatgcatcccagtgtggttgggctatgaatgaatttagttatagcgctgaaacgctgtcttaattaggtttggattctgcttcccttttctgaagaggaaagtagaacagagtaaaccatctgattcatctctgaaagtgggagtaaggtgggggtgggggaatggactcacgt

SEQ ID NO: 510593 - DNA, 386 bp, Homo sapiens
tgttaattaataaggagcatgttcagaggcttgctttagtatgaggcctctgtgcygtcttgatcaaagtgactggagcgttgtggccccagcaagcatgagaagagcagggttaatttttaaaaatttctctagaaacttaaacttgagagtaaatgatgaatgataattatttgaaccaggtttgcaatatgaagtggccagaggaagctcatgcatcccagtgtggttgggctatgaatgaatttagttatagcgctgaaacgctgtcttaattaggtttggattctgcttcccttttctgaagaggaaagtagaacagagtaaaccatctgattcatctctgaaagtgggagtaaggtgggggtgggggaatggactcacgt

SEQ ID NO: 510594 - DNA, 619 bp, Homo sapiens
aaatggaaatttaaaataaggtacaaatgatttggcatgtggttggtcaccaaatgaattgcagagacactcctcagaggattaaagtagtgggcagaaaggatttcaggatagggcactccaaggaggagatgaaatttctgctagacattatagggttttatcaaaccccaagaagagagttagacattctggacaggaagatgatgtgcaaaaagcccaaagatgtaaggctgggagatagcaaaccaggtcttgatgttgcagatttgttgtatatatatttatatagatasatagatagatagatagatagatagatagatagatagatagattagatagatagatagatagatagatagatgttatagatatatatattatgtatttgatataaactaatgcatatcaaacattgtttttttggtagagatgagatctcactgtgtttcctaggttggtcttgaactcctagcctcaaacaatccccccaactcagctgggattatagacttgagccactgagcccagcctgaagaaggctttgaaggctaaaggaaggaatgtcgtcctgatcccttgggatctaggcagtggcaatctctatggcctttgt

SEQ ID NO: 510595 - DNA, 589 bp, Homo sapiens
atggtttattgcacattgctagtgtgcttaaacagccatctatttttgccaagatatataactctgaatgtggcatttaatttattatttttttctttaactgctaaaatgccaagaaaaaaatgaaagaaaggaagagaggaagggaggaaggaagacaaggagggagagagaggtaaggaaggagagaaagtgaaaaagaaacttttgaccagtgctgctggtcaagaaatacaatataaaaatggaatttgaaatggaaagccataaattataaatgcttactgtatgcttttaaagctttgccccagatttaccatgaagatacgtggtgaagatttttaagaaataaattctatgtggagggcaggaagagcacaggctgtgatgggatcctttggcccctgcccagccctgtgtcctggagctgcccttcatccctcctgcyttcaggaactcagcaccccccattctggagaaggggttacagtccagtgggagcatcttgagctcctcacaccaggggccaatgcctggcacgaggctcagaggctgcccctcacctcatgggtgaggccggccctggggc

SEQ ID NO: 510596 - DNA, 564 bp, Homo sapiens
cttccttcttgcatctcatgaaacaggttcgctcagtctatacacacatccttggtatctttccaacaccgcaggcctgctgcgctcagcagagaaaaccaccttcccctgtctggggcacacggggggtgcagttaatacaggacgttgggggattttcatccccagtcacagaggcccaacaccacccatcatctccatgggagacggcccgagatgtttctcataactgccaccccatccctgtgcaggggctgcaccccagggatgacagccacgcctcttccagacctgcactcctgtcgatgggcctgtcaggtgacccccaccagcaccccaaaccaccactgagggtggtcatttcagggtcagaggtcttctgtgcccaaacactgctgcacrctccctcagagaaagccacagagtccaaagacttcccggggtccttcgtctgaggactgaagacgcacatgaaacacgtacccaaacaaacccctctcagaacccaccagccacacaccaagaaatgtgccatggaaacttacctggacacaaggacagcag

SEQ ID NO: 510597 - DNA, 382 bp, Homo sapiens
ctggcagttcccattagcacagcccggatgcataacccacacccacaacctgccctggcaaatgaccagctttgaaaggacaatgacagccgcctgtctgacgtggtctccaccamacgctgacttccttcacagcagcacttggcccttctcccgaatctattctgctcccgtggatggcactccctttaccccatacttcagaactgggggtggggcagggtagggtagtaccttagccagtggggttgctataatgaaaataccataagctaggcagctcctaaacaacagaaacttgtcatcacagttctggaggctggaagttctagatcaaggtccaggcagagccagtgtctgacgagggctgcgtcctggttca

SEQ ID NO: 510598 - DNA, 382 bp, Homo sapiens
ctggcagttcccattagcacagcccggatgcataacccacacccacaacctgccctggcaaatgaccagctttgaaaggacaatgacagccgcctgtctgacgtggtctccaccacrcgctgacttccttcacagcagcacttggcccttctcccgaatctattctgctcccgtggatggcactccctttaccccatacttcagaactgggggtggggcagggtagggtagtaccttagccagtggggttgctataatgaaaataccataagctaggcagctcctaaacaacagaaacttgtcatcacagttctggaggctggaagttctagatcaaggtccaggcagagccagtgtctgacgagggctgcgtcctggttca

SEQ ID NO: 510599 - DNA, 382 bp, Homo sapiens
ctggcagttcccattagcacagcccggatgcataacccacacccacaacctgccctggcaaatgaccagctttgaaaggacaatgacagccgcctgtctgacgtggtctccaccacacgctgrcttccttcacagcagcacttggcccttctcccgaatctattctgctcccgtggatggcactccctttaccccatacttcagaactgggggtggggcagggtagggtagtaccttagccagtggggttgctataatgaaaataccataagctaggcagctcctaaacaacagaaacttgtcatcacagttctggaggctggaagttctagatcaaggtccaggcagagccagtgtctgacgagggctgcgtcctggttca

SEQ ID NO: 510600 - DNA, 585 bp, Homo sapiens
caactggaaacctggtgtcctaaaactgcctagcagtttctccttataggcttgatcactttcagagactttcatgtccaccttatgcaagggaccccaggattgtgggggtggaaagccagcaaccttaaaccttaaacaaacgaagtcttaaagatgacttctaaatctttcaaggtttttgtttwtttgaatatttgaaaactggctgtgtctgaaatcttcaagccttctaataagttggggttctctccaggtcgtatcttttggcttttacacagccaaagcaaacgacaggtcgaaagttcaaaattaaattttaaacgttttcattcaggctctggaaagcttcacagttaaaaaggatgtctctacacccaaggaagttgaactcactggctgtgtgactatgggcagtttacccaacctttctgatttggggtcccaccttaaaacactcacttcccagagagacaggaagaactcagtgtgtgtttataagcctctcttctttctcctggtgtcatgcattccagcgaagagaaagtacacagctccactacttggaaccagtgttgtacccag

SEQ ID NO: 510601 - DNA, 674 bp, Homo sapiens
gctggctgctgcctcagtcctgttccaacaagctgtttccttgcttttttcctttctttttctttttttttytttgagacggagtctcgctctgtcacccaggctggagtgcagtggcgcgatctcggctcactgccagccctgcctcccaggttcacgccattcttctgcctcagcctcccaagtagctgggactacaggcacccgccaccacgcccggctattttgtatttttagtagagacggggtttcaccgtgttagccaggatggtctcgatctcctgacctcctgatccgcccaccttggcctcccaaagtgctgagattacaggcgtgagccactgtgaccagcctcttttctttttcttttttttgagatggaatcttgctctgtcacccaggctggagtacagtggtgcaatctcggctcactgcaacctttgcctcccaggttcaagcaattctcctgcctcagcctcccgagtagctgggattacaggcgcctgccaccatgcccggctaatattttgtatttttagtagagacagggtttccccatgctggccaggctgatcttgaactcctgacctcatgatctgcctgccttggcctcccaaagtgctgggattacaggcatgagccaccacgctcagcctacttttttttttaagaca

SEQ ID NO: 510602 - DNA, 674 bp, Homo sapiens
gctggctgctgcctcagtcctgttccaacaagctgtttccttgcttttttcctttctttttctttttttttttttgagacggagtctcgctctgtcacccaggctggagtgcagtggcgcgatctcggctcactgccagccctgcctcccaggttcacgccattcttctgcctcagcctcccaagtagctgggactacaggcacccgccaccacgcccggctattttgtatttttagtagagacggggtttcaccgtgttagccrggatggtctcgatctcctgacctcctgatccgcccaccttggcctcccaaagtgctgagattacaggcgtgagccactgtgaccagcctcttttctttttcttttttttgagatggaatcttgctctgtcacccaggctggagtacagtggtgcaatctcggctcactgcaacctttgcctcccaggttcaagcaattctcctgcctcagcctcccgagtagctgggattacaggcgcctgccaccatgcccggctaatattttgtatttttagtagagacagggtttccccatgctggccaggctgatcttgaactcctgacctcatgatctgcctgccttggcctcccaaagtgctgggattacaggcatgagccaccacgctcagcctacttttttttttaagaca

SEQ ID NO: 510603 - DNA, 644 bp, Homo sapiens
atagggctcagccaccaccacctgtgttttagcagacacgccagggatcctgtggactcacatctcgctctgcatcgcacgtgccacacgaggcactgtggggcctgctggggacaccagcagagaagcccaccagccagggtggagacacgtgcagctatctcaggcattcagattccatagacccacacggttctcaaaggcaatcgtggggaccaaaatgtgattgccaagaaggatcgtgaaacacagyttttctggatcatcaagatcttcaagagagaaggggccgttcaataccaagagaataagaagtacttaacttggaaatgcagggcagaccttcccccaaaaaggacagtgtgcagccctcctcctcaagtatctcggtctttatttatctggtccgcgtcgaaggtggtggttctccatcgggggcgattttgccccctgggatagggtatgtctggagacattttggttgctacaacttgtggggggagggtactcttggtatcaggggggcaaaggccagggatacctctaaatgtcctccagtgcgcagggtgcacctgtggcagcagtgcccagggtgaggaacctgctcggaggtcaggaattgggaaccccggctcctttcatgc

SEQ ID NO: 510604 - DNA, 644 bp, Homo sapiens
atagggctcagccaccaccacctgtgttttagcagacacgccagggatcctgtggactcacatctcgctctgcatcgcacgtgccacacgaggcactgtggggcctgctggggacaccagcagagaagcccaccagccagggtggagacacgtgcagctatctcaggcattcagattccatagacccacacggttctcaaaggcaatcgtggggaccaaaatgtgattgccaagaaggatcgtgaaacacagcttttctggatcatcaagatcttcaagagagaaggggccgttcaataccaagagaataagaagtacttaacttggaaatgcagggcagaccttcccccaaaaaggacagtgtgcagccctcctcctcaagtatctcggtctttatttatctggtccgcrtcgaaggtggtggttctccatcgggggcgattttgccccctgggatagggtatgtctggagacattttggttgctacaacttgtggggggagggtactcttggtatcaggggggcaaaggccagggatacctctaaatgtcctccagtgcgcagggtgcacctgtggcagcagtgcccagggtgaggaacctgctcggaggtcaggaattgggaaccccggctcctttcatgc

SEQ ID NO: 510605 - DNA, 578 bp, Homo sapiens
tgtgtaactcttctgacctttcacatcttagggacatcctttctgcctcagagaacatggggaggcataaatcgtgtgatctgcacaggaactcaaaagcctgttcttcctcttgacaggtagggcagaagaaaataaagtagtcaaaaagcaggtaaaccaagaagatatttgggggtagtgtacaacagtttagtaccaaagaatttagtctagcatttcatggaggcacagactctggagctagaaaaggatcttgaaacgccttctcagccaaccctccttttgtagaggagggacaggtgtctcactgtaacgatcctcaggtatgatgaaaccttggaataaaattctaattcaccaacaaaaaacatggctgagaaatgtgaaagggatctttcagcaacaaagtactatccaagtgttagtttatttctatgattataaattaatacacatggagaaaaagcccaatgcaatgtaaggtcactttatgtagcttaaggtgaagcactgcagggtagtttgcaaatytgacagactgacttcagacttttagcatgctaccattgtaagca

SEQ ID NO: 510606 - DNA, 525 bp, Homo sapiens
tgctttttagtgatacataaaaaattaattaatgacacagtctatgaaaaacaagtagagcagcttgaaataattcacatatttttcatgtaaaacttttaggagaagtccagtgatgtcacgatagctctaygatgttgatttattttgttgcttttatatgcttattttatatataaagtagctgaaagcagctatgaattctaaagcatggtaacaggggtaaaaggtcacacacatttcttttagatgctgcaattattgcttctgttcacacgttatcgtccaaaaattagttacattgcctcatcaaagtgcaaggaggctggtaaatgtactttaatttgctaaatgccttgcaagatatagggatgtatatcgagaagacaaagaatggaagtgagaattacttgttattttgacttccaactatcggagaacattcccaaagaaatatcatactaaatttctgcctgaataattatttcagcatctctttcatggtctttgcttaagggcagtgct

SEQ ID NO: 510607 - DNA, 525 bp, Homo sapiens
tgctttttagtgatacataaaaaattaattaatgacacagtctatgaaaaacaagtagagcagcttgaaataattcacatatttttcatgtaaaacttttaggagaagtccagtgatgtcacgatagctctatgatgttgatttattttgttgcttttatatgcttattttatatataaartagctgaaagcagctatgaattctaaagcatggtaacaggggtaaaaggtcacacacatttcttttagatgctgcaattattgcttctgttcacacgttatcgtccaaaaattagttacattgcctcatcaaagtgcaaggaggctggtaaatgtactttaatttgctaaatgccttgcaagatatagggatgtatatcgagaagacaaagaatggaagtgagaattacttgttattttgacttccaactatcggagaacattcccaaagaaatatcatactaaatttctgcctgaataattatttcagcatctctttcatggtctttgcttaagggcagtgct

SEQ ID NO: 510608 - DNA, 525 bp, Homo sapiens
tgctttttagtgatacataaaaaattaattaatgacacagtctatgaaaaacaagtagagcagcttgaaataattcacatatttttcatgtaaaacttttaggagaagtccagtgatgtcacgatagctctatgatgttgatttattttgttgcttttatatgcttattttatatataaagtagctgaaagcagctatgaattctaaagcatggtaacaggggtaaaaggtcacacacatttcttttagatgctgcaawtattgcttctgttcacacgttatcgtccaaaaattagttacattgcctcatcaaagtgcaaggaggctggtaaatgtactttaatttgctaaatgccttgcaagatatagggatgtatatcgagaagacaaagaatggaagtgagaattacttgttattttgacttccaactatcggagaacattcccaaagaaatatcatactaaatttctgcctgaataattatttcagcatctctttcatggtctttgcttaagggcagtgct

SEQ ID NO: 510609 - DNA, 525 bp, Homo sapiens
tgctttttagtgatacataaaaaattaattaatgacacagtctatgaaaaacaagtagagcagcttgaaataattcacatatttttcatgtaaaacttttaggagaagtccagtgatgtcacgatagctctatgatgttgatttattttgttgcttttatatgcttattttatatataaagtagctgaaagcagctatgaattctaaagcatggtaacaggggtaaaaggtcacacacatttcttttagatgctgcaattattgcttctgttcacacgttatcgtccaaaaattagttacattgcctcatcaaagtgcaaggaggctggtaaatgtactttaatttgctaaatgccttgcaagatatagggatgtatatygagaagacaaagaatggaagtgagaattacttgttattttgacttccaactatcggagaacattcccaaagaaatatcatactaaatttctgcctgaataattatttcagcatctctttcatggtctttgcttaagggcagtgct

SEQ ID NO: 510610 - DNA, 431 bp, Homo sapiens
ctgtatacagtcgcatattccatagactaactgtctagggtaattcagacttataacctaagtttatgttacaacttttctaacttatgttcctttgatggagtttatcctcattgccccaccccacaaatggtttactaatatagtctaaaacagaaacattattctttttatattctttaatctccattgaaataaacmcaatttgtagaattaactaatagaaattaattgaaaagaagcatctttcttttatatgaacaatgacacagttcaaatttatcttgaaaacagttttaagcacaagtaattaccctgaatatgtaaataacccatttataagtaggtcaataggaaaacatttcaacaaatttcaaacgtgacatcatttctagatcttatgaaataatggaacatgttttggaagataa

SEQ ID NO: 510611 - DNA, 502 bp, Homo sapiens
gctgtatacagtcgcatattccatagactaactgtctagggtaattcagacttataacctaagtttatgttacaacttttctaacttatgttcctttgatggagtttatcctcattgccccaccccacaaatggtttactaatatagtctaaaacagaaacattattctttttatattctttaatctccattgaaataaacacaatttgtagaattaactaatagaaattaattgaaaagaagcatctttcttttatatgaacaatgacacagttcaaatttatcttgaaaacagttttaagcacaagtaattaccctgaatatgtaaataacccatttataagtaggtcaataggaaaacatttcaacaaatttcaaacgtgayatcatttctagatcttatgaaataatggaacatgttttggaagataagagaagtttacttagccaataataacaggtctcaatcaatgattttttaacagctagtttatccctcgat

SEQ ID NO: 510612 - DNA, 540 bp, Homo sapiens
ctgcagttctagtcctctcttttccactacactttctgatcttcttagtatgaattccaacaagaggcttccttttcttctgactgctgagtgaattcaatgagttaaagtgaatgatttgtattctcaggaaagcagagagcaagatcaagtatttttaacactggcttcccacgggtgattggctttgtcccttaagcttaggtggttgctcttttcctgatgagtctactttatcctaaagttagtaaacttgctttgccactggccctttcaaactaggggtgataaaaatcactctaaccaaaggttactgcagtctcttgtgttctttctcatcccttcaacagctttgcaaagartctccaaaccctctctgcattatccttattaaattgcactatcagtttctttatatgaccccaacaaatacatgaatctcctagttagggaagctgatagactaagagtacttttctttcatgttcaaagctagaaggtaagtattttctaataatgtgaagcagctgaaatgacaat

SEQ ID NO: 510613 - DNA, 540 bp, Homo sapiens
ctgcagttctagtcctctcttttccactacactttctgatcttcttagtatgaattccaacaagaggcttccttttcttctgactgctgagtgaattcaatgagttaaagtgaatgatttgtattctcaggaaagcagagagcaagatcaagtatttttaacactggcttcccacgggtgattggctttgtcccttaagcttaggtggttgctcttttcctgatgagtctactttatcctaaagttagtaaacttgctttgccactggccctttcaaactaggggtgataaaaatcactctaaccaaaggttactgcagtctcttgtgttctttctcatcccttcaacagctttgcaaagaatctccaaaycctctctgcattatccttattaaattgcactatcagtttctttatatgaccccaacaaatacatgaatctcctagttagggaagctgatagactaagagtacttttctttcatgttcaaagctagaaggtaagtattttctaataatgtgaagcagctgaaatgacaat

SEQ ID NO: 510614 - DNA, 540 bp, Homo sapiens
ctgcagttctagtcctctcttttccactacactttctgatcttcttagtatgaattccaacaagaggcttccttttcttctgactgctgagtgaattcaatgagttaaagtgaatgatttgtattctcaggaaagcagagagcaagatcaagtatttttaacactggcttcccacgggtgattggctttgtcccttaagcttaggtggttgctcttttcctgatgagtctactttatcctaaagttagtaaacttgctttgccactggccctttcaaactaggggtgataaaaatcactctaaccaaaggttactgcagtctcttgtgttctttctcatcccttcaacagctttgcaaagaatctccaaaccctctctgcattatccttattaaattgcactatcagtttctttatatgaccccaacaaatacatgaatctcctagttagggaarctgatagactaagagtacttttctttcatgttcaaagctagaaggtaagtattttctaataatgtgaagcagctgaaatgacaat

SEQ ID NO: 510615 - DNA, 506 bp, Homo sapiens
agctgtctgaagatggcagagctaaaggagcactgtaatatgcccactggggcttcaggaatcacaggcacccccyctaacaccaggggctgctatgaggcccacatggagtttgctcctgccaacaccccagagctctcttcctggctcctatacctgctcacctgcatgctctctcctgcaagaggtggaacacagcaggtcagagtgggtgagttcactccttctggcaccaaagaggccactggttccagcactcatgtactccagttcctgccttattcaattacacactccctcccttgaggagttgagagcagtgggctgagtaaatggggcacccctgtcacgagtcccatgaaggggtcagggaaatgccctgcttcaggaggatctcgagcccaggaggtgaaggatgcggtgagccaggatcgtgcaactgaactctggcctgggtgacagagtgagactctgtcccaaaataaataaataaataatttaattaa

SEQ ID NO: 510616 - DNA, 506 bp, Homo sapiens
agctgtctgaagatggcagagctaaaggagcactgtaatatgcccactggggcttcaggaatcacaggcaccccccctaacaccaggggctgctatgaggcccacatggagtttgctcctgccaacaccccaragctctcttcctggctcctatacctgctcacctgcatgctctctcctgcaagaggtggaacacagcaggtcagagtgggtgagttcactccttctggcaccaaagaggccactggttccagcactcatgtactccagttcctgccttattcaattacacactccctcccttgaggagttgagagcagtgggctgagtaaatggggcacccctgtcacgagtcccatgaaggggtcagggaaatgccctgcttcaggaggatctcgagcccaggaggtgaaggatgcggtgagccaggatcgtgcaactgaactctggcctgggtgacagagtgagactctgtcccaaaataaataaataaataatttaattaa

SEQ ID NO: 510617 - DNA, 623 bp, Homo sapiens
tgaaattcatgattatgatccctagttacatctctctttaagtccttatgtttggttccctgggagtttcagcgcatttatatagcagcacccaagtttttataatctgttaagtattactatctaggattagctactgaagaatcaagaaccggtagttgatgaacttgaaagacaattatcctatatagtgtttcttgaggacactaatttcttgagattgaatgagaggaaaacataatatccacaaacaaataaattttggaatattatatgctttagcttcctcttggatatttacaaaaatattagcatattaacgattacagaatgaagaaacctttttagctacatttaaactagtcctagagtttgaatatatttcctccaaattcatgtttaagtttaatcctcaaagtgatgaggaagtggggcctttggaggcaattaagtcataatggctgtgcactcatgaatgagattaatatcctaataaaggaagcttctgagagcttcctggctcttccatttcttctgccatgtgacaacatggcatttgtccattttgtccctttgcttttcctaccatrtgattaagtcatgcaaaatgacatctatgaaac

SEQ ID NO: 510618 - DNA, 282 bp, Homo sapiens
tattccttagttttttcccataatcatctcattttcaagtaaagacaattttgtttttcctattcaatcattatgccctttatttttcttctttttataatggttagtgcttacagtaatgtgtagaagaatagyagtgagatgaacattctttcttttttcctgattttatgtggaatttttcaatattgcacctttaaatagtaccctgcctgaagattttttgtaggttgtggaaataaataacacctaataataacagagagaatctatatttattca

SEQ ID NO: 510619 - DNA, 373 bp, Homo sapiens
gagattgaagaaaagtatgtgaggggtgtgaaatgaggaaagaatccataagttaatcttacataagaggaagaaggcaatggctaacaaaagaaaaatgggcttgtttggccgcmttaaaggcacatttgccttttcaaggttgtggttttaaagagataacaatcaacacaatttggttatgtgtttttctcccactgcagtttgggtataaaagcaattccaaaattgatggagacatgcatgaaactaaggctatagttttgctaagtcagtcatgtttagtagatagaaatttatttgatgaccaaggatggcacaaaatgtttaaaagactgaatatgtgacataataaagcacatttatgaaacag

SEQ ID NO: 510620 - DNA, 593 bp, Homo sapiens
agctggcattgagattgaagaaaagtatgtgaggggtgtgaaatgaggaaagaatccataagttaatcttacataagaggaagaaggcaatggctaacaaaagaaaaatgggcttgtttggccgcattaaaggcacatttgccttttcaaggttgtggttttaaagagataacaatcaacacaatttggttatgtgtttttctcccactgcagtttgggyataaaagcaattccaaaattgatggagacatgcatgaaactaaggctatagttttgctaagtcagtcatgtttagtagatagaaatttatttgatgaccaaggatggcacaaaatgtttaaaagactgaatatgtgacataataaagcacatttatgaaacagtaaattgcttttcgtaaaggtggattatttgatgtattttgaagaagaaataacaactgtgaatcaaatatttatgaaattggcagagagtaaatgattaaagttttaatgatcagattgtcattttagagtaattatcattatacgacagtgaagaaaagtttgaagaagttatagaaaaaggatgctattgttttaaattaatgcact

SEQ ID NO: 510621 - DNA, 373 bp, Homo sapiens
gagattgaagaaaagtatgtgaggggtgtgaaatgaggaaagaatccataagttaatcttacataagaggaagaaggcaatggctaacaaaagaaaaatgggcttgtttggccgcattaaaggcacatttgccttttcaaggttgtggttttaaagagataacaatcaacacaatttggttatgtgtttttctcccactgcagtttgggtataaaagcaattccaaaattgatggagacatgcatgaaactaaggctatagttttgctaagtcagtcatrtttagtagatagaaatttatttgatgaccaaggatggcacaaaatgtttaaaagactgaatatgtgacataataaagcacatttatgaaacag

SEQ ID NO: 510622 - DNA, 593 bp, Homo sapiens
agctggcattgagattgaagaaaagtatgtgaggggtgtgaaatgaggaaagaatccataagttaatcttacataagaggaagaaggcaatggctaacaaaagaaaaatgggcttgtttggccgcattaaaggcacatttgccttttcaaggttgtggttttaaagagataacaatcaacacaatttggttatgtgtttttctcccactgcagtttgggtataaaagcaattccaaaattgatggagacatgcatgaaactaaggctatagttttgctaagtcagtcatgtttagtagatagaaatttatttgatgaccaaggatggcacaaaatgtttaaaagactgaatatgtgacataataaagcacatttatgaaacagtaaattgcttttcrtaaaggtggattatttgatgtattttgaagaagaaataacaactgtgaatcaaatatttatgaaattggcagagagtaaatgattaaagttttaatgatcagattgtcattttagagtaattatcattatacgacagtgaagaaaagtttgaagaagttatagaaaaaggatgctattgttttaaattaatgcact

SEQ ID NO: 510623 - DNA, 593 bp, Homo sapiens
agctggcattgagattgaagaaaagtatgtgaggggtgtgaaatgaggaaagaatccataagttaatcttacataagaggaagaaggcaatggctaacaaaagaaaaatgggcttgtttggccgcattaaaggcacatttgccttttcaaggttgtggttttaaagagataacaatcaacacaatttggttatgtgtttttctcccactgcagtttgggtataaaagcaattccaaaattgatggagacatgcatgaaactaaggctatagttttgctaagtcagtcatgtttagtagatagaaatttatttgatgaccaaggatggcacaaaatgtttaaaagactgaatatgtgacataataaagcacatttatgaaacagtaaattgcttttcgtaaaggtggattatttgatgtatyttgaagaagaaataacaactgtgaatcaaatatttatgaaattggcagagagtaaatgattaaagttttaatgatcagattgtcattttagagtaattatcattatacgacagtgaagaaaagtttgaagaagttatagaaaaaggatgctattgttttaaattaatgcact

SEQ ID NO: 510624 - DNA, 342 bp, Homo sapiens
cacatgctgttgtactgaatgacacagccaatgtcaacaggaaggaccagctacataacttctgtaacccagtgaaaaatgaaaagcaaggccccttgctcaaaaattattaagggttcmtttagtgaaaccattgcgtcctgagactaatatgagaaataaatcacaaaatccactgtgccttactaatatcaagaggtagtaatgagggagtgaaggagaatgcaataatatataactttatatctttcccacctctaatacttttatttggcctctaatggtggtgtcaaacccagttttaaatttacttgcaccagaggaagattatacaatacccaa

SEQ ID NO: 510625 - DNA, 342 bp, Homo sapiens
cacatgctgttgtactgaatgacacagccaatgtcaacaggaaggaccagctacataacttctgtaacccagtgaaaaatgaaaagcaaggccccttgctcaaaaattattaagggttcctttagtgaaaccattgcgtcctgagactaatatgagaaataaatmacaaaatccactgtgccttactaatatcaagaggtagtaatgagggagtgaaggagaatgcaataatatataactttatatctttcccacctctaatacttttatttggcctctaatggtggtgtcaaacccagttttaaatttacttgcaccagaggaagattatacaatacccaa

SEQ ID NO: 510626 - DNA, 392 bp, Homo sapiens
gctgttgtactgaatgacacagccaatgtcaacaggaaggaccagctacataacttctgtaacccagtgaaaaatgaaaagcaaggccccttgctcaaaaattattaagggttcctttagtgaaaccattgcgtcctgagactaatatgagaaataaatcacaaaatccactgtgccttactaatatcaagaggtagtaatgagggagtgaaggagaatgcaataatatataactttatatctttcccacctctaatacttttatttggcctctaatggtggtgtcaaacccagttttaaatttacttgcaccagaggaagattatacaatacccaagacatgatayttgtgtcatttaatttgactgtgccttttctgaaaggtaatttgt

SEQ ID NO: 510627 - DNA, 464 bp, Homo sapiens
ccagggataatgcaatacaaagtcagcctgttgacacgcagaaaaatctcgagtgaacttgaccttccttccccagttccataagcttggcatggatgtagtcaacttctgggagaaaagatccagatcagacaagactgagtatcctggatctggtaaggatccacattggtcacagatgttctggcccaaccccagagtcccctaaaccaacaatatcacttttgagtgaatttggactctttttctggaaccctagagtccatcgggttacctcctgaccactttcccggggtgcagttcctcctcctaggayatcttttacagggaggttgccccattgcctgcattaattagcactggaaaaaagaaagaaagggtaattgtcaagacaatcatcccatggtacttgttccaaccattttattcttgctttttttttttttttcaacaatgacatcagc

SEQ ID NO: 510628 - DNA, 541 bp, Homo sapiens
tggagtgctgtgcggaggcgggctcacccgggccctgggttcgctctgattgcagcggtttcccgccagctccttggagagctggcagatgacccagccccacagcaggagctgtgaatggcagaacgagatacaacaatttgatatccacttgccagatgagccgggtgtcgtcagtcgcctggcyctgcgccaacctctttttgcacaaacacttatgaattcagccaggaggaaaagcactctgattatgaattgagcagaaggaaacaaagttctgcggataaacaccaatgagacaaaaaaccacgaataagaaaaatgacagaaaaggagaaccttcccagaagcctcctgccagtgaacagccaccgtagcaagagcttggaggccctgggttttgaactgtgagataaggaagatgatgaaaacctccctagcagccaggcaagcacaagattcctgtaaaatccaggtctaagtgttttaaccacagaagtaatattatgtcataggtgagagctgtgagttgctgaaccca

SEQ ID NO: 510629 - DNA, 541 bp, Homo sapiens
tggagtgctgtgcggaggcgggctcacccgggccctgggttcgctctgattgcagcggtttcccgccagctccttggagagctggcagatgacccagccccacagcaggagctgtgaatggcagaacgagatacaacaatttgatatccacttgccagatgagccgggtgtcgtcagtcgcctggccctgcgccaacctctttttgcacaaacacttatgaattcagccaggaggaaaagcactctgattatgaattgagcagaaggaaacaaagttctgcggataaacaccaatgagacaaaaaamcacgaataagaaaaatgacagaaaaggagaaccttcccagaagcctcctgccagtgaacagccaccgtagcaagagcttggaggccctgggttttgaactgtgagataaggaagatgatgaaaacctccctagcagccaggcaagcacaagattcctgtaaaatccaggtctaagtgttttaaccacagaagtaatattatgtcataggtgagagctgtgagttgctgaaccca

SEQ ID NO: 510630 - DNA, 541 bp, Homo sapiens
tggagtgctgtgcggaggcgggctcacccgggccctgggttcgctctgattgcagcggtttcccgccagctccttggagagctggcagatgacccagccccacagcaggagctgtgaatggcagaacgagatacaacaatttgatatccacttgccagatgagccgggtgtcgtcagtcgcctggccctgcgccaacctctttttgcacaaacacttatgaattcagccaggaggaaaagcactctgattatgaattgagcagaaggaaacaaagttctgcggataaacaccaatgagacaaaaaacsacgaataagaaaaatgacagaaaaggagaaccttcccagaagcctcctgccagtgaacagccaccgtagcaagagcttggaggccctgggttttgaactgtgagataaggaagatgatgaaaacctccctagcagccaggcaagcacaagattcctgtaaaatccaggtctaagtgttttaaccacagaagtaatattatgtcataggtgagagctgtgagttgctgaaccca

SEQ ID NO: 510631 - DNA, 541 bp, Homo sapiens
tggagtgctgtgcggaggcgggctcacccgggccctgggttcgctctgattgcagcggtttcccgccagctccttggagagctggcagatgacccagccccacagcaggagctgtgaatggcagaacgagatacaacaatttgatatccacttgccagatgagccgggtgtcgtcagtcgcctggccctgcgccaacctctttttgcacaaacacttatgaattcagccaggaggaaaagcactctgattatgaattgagcagaaggaaacaaagttctgcggataaacaccaatgagacaaaaaaccacgaataagaaaaatgacagaaaaggagaaccttcccagaagcctcctgccagtgaacagccaccgtagcaagagcttggagkccctgggttttgaactgtgagataaggaagatgatgaaaacctccctagcagccaggcaagcacaagattcctgtaaaatccaggtctaagtgttttaaccacagaagtaatattatgtcataggtgagagctgtgagttgctgaaccca

SEQ ID NO: 510632 - DNA, 178 bp, Homo sapiens
aggtgcagggctatgcatcaggggtcagggtgcacacayccctgcaggtctcggggctcctgggttgcttctggaagggcccagatggggcctgactggagctgccgaggggtggagcttctgggaaaaggatccctcctagggggagtgtcttgggcctggggccatgtggcaggga

SEQ ID NO: 510633 - DNA, 178 bp, Homo sapiens
aggtgcagggctatgcatcaggggtcagggtgcacacacccctgcaggtctcggggctcctgggttgcttctggaagggcmcagatggggcctgactggagctgccgaggggtggagcttctgggaaaaggatccctcctagggggagtgtcttgggcctggggccatgtggcaggga

SEQ ID NO: 510634 - DNA, 178 bp, Homo sapiens
aggtgcagggctatgcatcaggggtcagggtgcacacacccctgcaggtctcggggctcctgggttgcttctggaagggcccagatggggcctgactggagctgccgaggggtggagcttctgggraaaggatccctcctagggggagtgtcttgggcctggggccatgtggcaggga

SEQ ID NO: 510635 - DNA, 582 bp, Homo sapiens
ccagctggctgcaggtgcagggctatgcatcaggggtcagggtgcacacacccctgcaggtctcggggctcctgggttgcttctggaagggcccagatggggcctgactggagctgccgaggggtggagcttctgggaaaaggatccctcctagggggagtgtcttgggcctggggccatgtggcagggacagagacgggtccatggcagtgtctgctcttctctgtgaaggcaaagggcctctgarggagtattacagccgcctcatccaccagaagcatttccagcacatccaggtctgcacccactggctggagggccgaggactacccccgcttctaggtgagaggccagcaggaggctcagggaggaggcggggacttaagcaggggtaacaggcatgggcatgatgtactttttctgaaaaggtggctctggaggccacttggggacaggacttgggctctggcttaactcccaggaggaggctacttcctggtgtgccagcccctccctgccaggtggccccagaggccctttaccaaggggtttgaggaggccacgtcctttcagcctgccatg

SEQ ID NO: 510636 - DNA, 554 bp, Homo sapiens
ccaagtagctgcgactacaggcatgcgccaccatgtccggctaatttttgtacttttttttgagacagagtttcgttcttgttgcccaggctggagtgcaatgccgcaatctcggctcactacaacccccacctcctgggttcaagagattctcctgcctcagcctcccgagtagctgggattacaggcgcccactgccacaccccgctaatttttgtatttttagtaaagatggagttgcaccatgttggccaggctggtctcaaactcctgacctcaggtgatccacccgcctcagcctcccatagtgctgggattacaggcatgagccaccatgcccggcccaatttttgtatttttagtagagacacggtttcaccatattggccaggctggtctcgaacttctgacctcggatccacccgcctcagcctcccaaagtgctgggattacaggtktgagccactgcgcctggccctgtcaagtattctttgaggactgggcaccaggtccttgtgaagcaggtagtgtgtgttacctattggacaaatgcc

SEQ ID NO: 510637 - DNA, 519 bp, Homo sapiens
aaatgagaggccatgagagaatggaaactgcagttacagaaaccaaaattcctctttcttgctctcagaagcccatggtctctttcttttttttctttttttcttcttttttttttttttttttgagacggagtctcgctctgtcgcccaggctggagtgcagtggtgcaatctcagttcactgcaagctgcacctcctggggttaacgccattctcccacctcagcctcccaattagctggggctacaggcacccgccaccacacccagctaatttttgtatttttagtagagatgggctttcaccgtgtgagccaggatggtctcgatctcctgacctcgtgatccggccatcctggcttcccaaagtgctgggattacaggcgtgaaccaccgcrcctggaagcccatggtctttcttatcagccctgtggactttcttatctcttcttctcactcacaaccaattttccctttttgctggtggcccaccctggcagccagcagagcccaccgcca

SEQ ID NO: 510638 - DNA, 496 bp, Homo sapiens
atgttgtaaggcattaaacatgcattcatttcagccttgcagttttcacatttaggagccaattgtcttaggtctaaagcattcatgmcgaagcattgttatgggccccagacactatgcttcccagccttaatggcctctgcaatgctggttcctactggcccacccctgggttctggccggctagcccgcgccacctcactgctcccccattcaagtgtgccttaaatgtgtggtttccaaactcatctacactttagggtcacctgagattttttttttaaatcttccaaaacccaggccacacccaagaacaattaaacctcaacctctggaatgggacatagactccgttttttgttttgttttgtttttgagacagggcctcgctctgttacccaggctggagtgcagtggcacaatcatagctcactacaggctccaactcctgggctcaagaaaccctcccacttcaacctccacggtagctgggatc

SEQ ID NO: 510639 - DNA, 508 bp, Homo sapiens
gatcacttgacaatgttgtaaggcattaaacatgcattcatttcagccttgcagttttcacatttaggagccaattgtcttaggtctaaagcattcatgccgaagcattgttatgggccccagacactatgctycccagccttaatggcctctgcaatgctggttcctactggcccacccctgggttctggccggctagcccgcgccacctcactgctcccccattcaagtgtgccttaaatgtgtggtttccaaactcatctacactttagggtcacctgagattttttttttaaatcttccaaaacccaggccacacccaagaacaattaaacctcaacctctggaatgggacatagactccgttttttgttttgttttgtttttgagacagggcctcgctctgttacccaggctggagtgcagtggcacaatcatagctcactacaggctccaactcctgggctcaagaaaccctcccacttcaacctccacggtagctgggatc

SEQ ID NO: 510640 - DNA, 451 bp, Homo sapiens
atttcagccttgcagttttcacatttaggagccaattgtcttaggtctaaagcattcatgccgaagcattgttatgggccccagacactatgcttcccagccttaatggcctctgcaatgctggttcctactggcccacccctgggttctggccggctagcccgygccacctcactgctcccccattcaagtgtgccttaaatgtgtggtttccaaactcatctacactttagggtcacctgagattttttttttaaatcttccaaaacccaggccacacccaagaacaattaaacctcaacctctggaatgggacatagactccgttttttgttttgttttgtttttgagacagggcctcgctctgttacccaggctggagtgcagtggcacaatcatagctcactacaggctccaactcctgggctcaagaaaccctcccacttcaacc

SEQ ID NO: 510641 - DNA, 508 bp, Homo sapiens
gatcacttgacaatgttgtaaggcattaaacatgcattcatttcagccttgcagttttcacatttaggagccaattgtcttaggtctaaagcattcatgccgaagcattgttatgggccccagacactatgcttcccagccttaatggcctctgcaatgctggttcctactggcccacccctgggttctggccggctagcccgcgccacctcactgctcccccattcaagtgtgccttaaatgtgtggtttccaaactcatctacactttagggtcacctgagattttttttttaaatcttccaaaacccaggccacwcccaagaacaattaaacctcaacctctggaatgggacatagactccgttttttgttttgttttgtttttgagacagggcctcgctctgttacccaggctggagtgcagtggcacaatcatagctcactacaggctccaactcctgggctcaagaaaccctcccacttcaacctccacggtagctgggatc

SEQ ID NO: 510642 - DNA, 559 bp, Homo sapiens
cttgacaatgttgtaaggcattaaacatgcattcatttcagccttgcagttttcacatttaggagccaattgtcttaggtctaaagcattcatgccgaagcattgttatgggccccagacactatgcttcccagccttaatggcctctgcaatgctggttcctactggcccacccctgggttctggccggctagcccgcgccacctcactgctcccccattcaagtgtgccttaaatgtgtggtttccaaactcatctacactttagggtcacctgagattttttttttaaatcttccaaaacccaggccacacccaagaacaattaaacctcaacctctggaatgggacatagactccgttttttgttttgttttgtttttgagacagggcctygctctgttacccaggctggagtgcagtggcacaatcatagctcactacaggctccaactcctgggctcaagaaaccctcccacttcaacctccacggtagctgggatcacaggcgggcaccaccacgcccggctaatttttaaattttttatagagacagtatc

SEQ ID NO: 510643 - DNA, 496 bp, Homo sapiens
atgttgtaaggcattaaacatgcattcatttcagccttgcagttttcacatttaggagccaattgtcttaggtctaaagcattcatgccgaagcattgttatgggccccagacactatgcttcccagccttaatggcctctgcaatgctggttcctactggcccacccctgggttctggccggctagcccgcgccacctcactgctcccccattcaagtgtgccttaaatgtgtggtttccaaactcatctacactttagggtcacctgagattttttttttaaatcttccaaaacccaggccacacccaagaacaattaaacctcaacctctggaatgggacatagactccgttttttgttttgttttgtttttgagacagggcctcgctctgttacccaggctgsagtgcagtggcacaatcatagctcactacaggctccaactcctgggctcaagaaaccctcccacttcaacctccacggtagctgggatc

SEQ ID NO: 510644 - DNA, 511 bp, Homo sapiens
gctcaagaagctgaggtagcaggatcacttaagcccataagttcaagggtgcaatgagctatgatagtacccctgcaccactatgtaaacatatwtatgtatatatgtatgtttatatatacacatgtatattatatatgtatatatatgcatatgtatacatgtacatgtgtatatgtgtgtgtatatatatatatataaaacacacatgcacaaattcaccaccaacaactcagaaattaccgtctccttctattctaaggaactatttttcattttgccatctctgaagttggaatacaccttacaatcactagaatgtcacagtctcgttggcagcatttttctgcttagtagcccataaaataatagcacatcttgtaactaacagtgttgtagatgctatgagatcctggggaagcccagaatctaactccatcctgtctgactccaaagaccacatatttcctatgcctttggactggggcacagatgtagacaacttgagctt

SEQ ID NO: 510645 - DNA, 600 bp, Homo sapiens
aattctagtagcctctacaagctggaagacgcaaggaatggattctcccctagaacctctgaaggagcattctcctgctgacatttgattgattttggacttctggcctccagacaattaattttttttttttttctttttttttttcagacagaggcttgctctgttgcccagtctggagtgcagtggcatgatctcagttcactgcaacctccacctcccaggctcaagccattctcttgcctcagcctcccaagaagtggggactacaggtgcctgccaccatgcatggctaatttttgtatttttagtagagacgaggttttggcatattggccaggctggtctcgaattcctggcctcaagtgattcacccaactcagcctcccaaagtcctgagattacttaggtgtgagccacggcaccygacacagacattgtttgaagccacccatttcatggttctttgctgcagtggttgtggaatatgaatgcactcgtgctgttggttagactttgctgaccttgtgtctgttattccctggcagttctacaaggcctggagctgataggaaaaacctcccttctttcccaaatggt

SEQ ID NO: 510646 - DNA, 600 bp, Homo sapiens
aattctagtagcctctacaagctggaagacgcaaggaatggattctcccctagaacctctgaaggagcattctcctgctgacatttgattgattttggacttctggcctccagacaattaattttttttttttttctttttttttttcagacagaggcttgctctgttgcccagtctggagtgcagtggcatgatctcagttcactgcaacctccacctcccaggctcaagccattctcttgcctcagcctcccaagaagtggggactacaggtgcctgccaccatgcatggctaatttttgtatttttagtagagacgaggttttggcatattggccaggctggtctcgaattcctggcctcaagtgattcacccaactcagcctcccaaagtcctgagattacttaggtgtgagccacggcacctgrcacagacattgtttgaagccacccatttcatggttctttgctgcagtggttgtggaatatgaatgcactcgtgctgttggttagactttgctgaccttgtgtctgttattccctggcagttctacaaggcctggagctgataggaaaaacctcccttctttcccaaatggt

SEQ ID NO: 510647 - DNA, 530 bp, Homo sapiens
taaaagcatatgtaaaaaatgcataaatgaatggacctggttttattccaataaaacttaatttataccaacagtcagagggccagatttggcccttggtctatagtttgccaaccctgtttagaccagtcacaatttattccctggggctgggccaaatttttcttaaaaaaaaaaaaagcaacctactgtcagaataaaatagggtttctatttaaaaagaagaagaggctggtgtggtggctcatgtctataatcstagcactttgagagggtgaggcaagaggagtgcttgaggccaggagcttgaaaccaacttgggcaatatagtgagatcctgtctctgcaaagaataaaaaaattagccaggcacggtggcacatgtctgtagtcttagctacataggaggctgaaggggaagatcacttgagctcaggattttgaggttacagtgatctctgactgtaccacttgtactctagcctaggcaaagatggagaacccaaaaacaaaacaaaataaaaaaaagg

SEQ ID NO: 510648 - DNA, 530 bp, Homo sapiens
taaaagcatatgtaaaaaatgcataaatgaatggacctggttttattccaataaaacttaatttataccaacagtcagagggccagatttggcccttggtctatagtttgccaaccctgtttagaccagtcacaatttattccctggggctgggccaaatttttcttaaaaaaaaaaaaagcaacctactgtcagaataaaatagggtttctatttaaaaagaagaagaggctggtgtggtggctcatgtctataatcctagcactttgrgagggtgaggcaagaggagtgcttgaggccaggagcttgaaaccaacttgggcaatatagtgagatcctgtctctgcaaagaataaaaaaattagccaggcacggtggcacatgtctgtagtcttagctacataggaggctgaaggggaagatcacttgagctcaggattttgaggttacagtgatctctgactgtaccacttgtactctagcctaggcaaagatggagaacccaaaaacaaaacaaaataaaaaaaagg

SEQ ID NO: 510649 - DNA, 530 bp, Homo sapiens
taaaagcatatgtaaaaaatgcataaatgaatggacctggttttattccaataaaacttaatttataccaacagtcagagggccagatttggcccttggtctatagtttgccaaccctgtttagaccagtcacaatttattccctggggctgggccaaatttttcttaaaaaaaaaaaaagcaacctactgtcagaataaaatagggtttctatttaaaaagaagaagaggctggtgtggtggctcatgtctataatcctagcactttgagagggtgaggcaagaggagtgcttgaggccaggagcttgaaaccaacttgggcaatatagtgagaycctgtctctgcaaagaataaaaaaattagccaggcacggtggcacatgtctgtagtcttagctacataggaggctgaaggggaagatcacttgagctcaggattttgaggttacagtgatctctgactgtaccacttgtactctagcctaggcaaagatggagaacccaaaaacaaaacaaaataaaaaaaagg

SEQ ID NO: 510650 - DNA, 530 bp, Homo sapiens
taaaagcatatgtaaaaaatgcataaatgaatggacctggttttattccaataaaacttaatttataccaacagtcagagggccagatttggcccttggtctatagtttgccaaccctgtttagaccagtcacaatttattccctggggctgggccaaatttttcttaaaaaaaaaaaaagcaacctactgtcagaataaaatagggtttctatttaaaaagaagaagaggctggtgtggtggctcatgtctataatcctagcactttgagagggtgaggcaagaggagtgcttgaggccaggagcttgaaaccaacttgggcaatatagtgagatcctgtctctgcaaagaataaaaaaattagccaggcacrgtggcacatgtctgtagtcttagctacataggaggctgaaggggaagatcacttgagctcaggattttgaggttacagtgatctctgactgtaccacttgtactctagcctaggcaaagatggagaacccaaaaacaaaacaaaataaaaaaaagg

SEQ ID NO: 510651 - DNA, 452 bp, Homo sapiens
aaagaataaaaaaattagccaggcacggtggcacatgtctgtagtcttagctacataggaggctgaaggggaagatcacttgagctcaggattttgaggttacagtgatctctgactgtaccacttgtactctagcctaggcaaagatggagaacccaaaaacaaaacaaaataaaaaaaaggttggttggggtgggttggagaagaaagtatttctgaatttctgggtaggttactggtagtatcaggccaaactagctctacagtcatattcattataaataaaggcaactagaagatctccatctagctattaaaaattggttaaaatctacagagataaaggacggtgacccttgtatcagttagttgttgtcacaaaatgcwgcataacaagtcactccaaatctcagtggcataatacaacaatcgtttattttcatggacctatg

SEQ ID NO: 510652 - DNA, 547 bp, Homo sapiens
gccatggctctccaaacgccgcgtgcttctcaaattctgagcctttgtgcggttgtttcttcttcttggattgagcgtcacttgtctcttttggaaaccatactccacctttcaggactcagctcaaagcatgggcttaaccatcccctaagaagtatcccctcattccccgtgtccccgtctagtccctattccttggccttctgtgctcccctctcatcacgagcccggaacttaccttggactcttctgatgatgcggtgacatttccctaatgccattgggagcccatgcaggctgggacttcgcacccctgtcctaataaagggtttggcacatggtacttgctcagcggtaattacatgctggattcaatgaaagaagaagaaagataaagagatacttggcaagaggagagattgccaatgtgaaaagaaagggcaatgggatgccggtgaagtccagcgtagtgagatcgctccacgttgttaagaggcgasagtgggaggaggcaatgggaaggcggaattcaatggctttcctcctg

SEQ ID NO: 510653 - DNA, 172 bp, Homo sapiens
caggctataaatgcttcaatatctttgccccttggatggaacaactttgaaatgtattccacatcacctctcagaggtccccagtggggtcaaatcctagttgcctagagtggtaagctgctcattgaarccccctgtgtggcctcctacctttccatgaatcaattcctca

SEQ ID NO: 510654 - DNA, 316 bp, Homo sapiens
agtcacacctggatttctaatccacagaaaccgtgcagtggtaactgtttgctgtctcaagycacaaagtttgcagtaatatttttgcacagcaatagataactaatataaaaactgtcctacatcatgtacattactgagcgaaaagtagaacctggatttgagctctgatttcagagttgactccccagggagacctgtcctgggagacagttatgccaggctgtgatgctgtgatgattgttctcttcctactcagaagctttcaataggcatgtcaagcatgtgaacccagctacatataccaaatatattt

SEQ ID NO: 510655 - DNA, 316 bp, Homo sapiens
agtcacacctggatttctaatccacagaaaccgtgcagtggtaactgtttgctgtctcaagtcacaaagtttgcagtaatatttttgcacagcaatagataactaatataaaaactgtcctacatcatgtacattactgagcgaaaagtagaacctggatttgagctctgatttcagagttgwctccccagggagacctgtcctgggagacagttatgccaggctgtgatgctgtgatgattgttctcttcctactcagaagctttcaataggcatgtcaagcatgtgaacccagctacatataccaaatatattt

SEQ ID NO: 510656 - DNA, 548 bp, Homo sapiens
gtatcaggaattagccttactgctctgaagtcaaccaaatacaaccttctctgaycaaaatcatgaccacccagtccctagtgaggtttctgctattgtttgctgagaatacacccattaccaggcttcctcctccccactgggcacatacatagcccaagtgtgaaatcaaggtccagtccctagggcttgaccttgatttcagtcttggactgtgccaactccaaactggaggtcttgctttggcttctgccaaaagctgaccctgaggcaaagaccgggggaaggtagtttggttggaagattatctaaggaagcataacgagagagtagggaaaggaggcaggaagggaagaaaagtctagaaatcatgggctaatgagcaggttaccactgcaggcacctggaactcaatctggccaggaatcctcagagagacaatgtagaacatatcccttaaaactcagacaccaagaagggaagacgctgagatattcatccaccagggctaaggattaatcttgggagagttaattctcagaactcct

SEQ ID NO: 510657 - DNA, 617 bp, Homo sapiens
gttgttgttgcttaaaggaagtgatttttgtggtttggtgaccctggtacatttttcagagtggcctggccacacattggtactggttggtgcctttggttggaacagccagtttcaatgttggtatgtgggatagcatattactgcagccctgggagatataaagtgtatcttcagggtcttagaggctaacactgagaagctgtaagcttttctttttcttggctttgatagcaatgaccattgacctaacaccaggaatcctgtgtctccagtggagagtgaaaccaggattaaagtggaaaatcttgggggcccaggtcaccacatgtacrctccaggggtgcctgttgcattccttatctgtgaatggagcctgctgggctgaccatggaggacctgagggagggggccgagaggtcagactggctgattggatgtctgtgttccagattcctgcatccatgagtctgagacattcttgctcctcactgtattccatatggttgcccctctgcctttatggggatactcctgacatttattgtctcctgcatgccaggcactgtgttgagctgttgcactactgttaacttactcagttcccactacagcca

SEQ ID NO: 510658 - DNA, 529 bp, Homo sapiens
tgtggcattatgaagagtgtggaatagtgtgtgtgtgtgtgtgtgtgtgtgtgtgtattctatatgcaataaaaaagaayatatattctctatttagagaacacaaagatccttggatacttattaataatttttattgatttattattcaaatcctctctatcataattaatggtttgcataatctttcaaagactcagatagagtctgtacaattaaacaggagagtgtaaccactgatatttcttcagttgatgcccgtgcttctttgatctcatttctattttctgctctatgggctctgcctgcctatgggtgccaatgagggccattgttacggactgaattgcgttaccccgaatttatatattgaagccttaaaactcagtgtgactataatttggagataaggcctgtaaggaggtaattaaggtaaatgaagtcataaggataggcttctaatccagtaggactgtggctttataagaagaagaagagacaccagtgctctctcttcacatgtgtacag

SEQ ID NO: 510659 - DNA, 529 bp, Homo sapiens
tgtggcattatgaagagtgtggaatagtgtgtgtgtgtgtgtgtgtgtgtgtgtgtattctatatgcaataaaaaagaacatatattctctatttagagaacacaaagatccttggatacttattaataatttttattgatttattattcaaatcctctctatcataattaatggtttgcataatctttcaaagactcagatagagtctgtacaattaaacaggagagtgtaaccactgatatttcttcagttgatgcccgtgcttctttgatctcatttctattttctgctctatgggctctgcctgcctatgggtgccaatgagggccattgttacggactgaattgcgttaccccraatttatatattgaagccttaaaactcagtgtgactataatttggagataaggcctgtaaggaggtaattaaggtaaatgaagtcataaggataggcttctaatccagtaggactgtggctttataagaagaagaagagacaccagtgctctctcttcacatgtgtacag

SEQ ID NO: 510660 - DNA, 589 bp, Homo sapiens
gccgcgcgcagcccgggttcccgctggcgcctctccctccacacctccctgcaagctgagggagccggctccggccttggccagcccagaaaggggcctcccacartgcagtggtgggctgaagggctcctcatgtgccgccaaagtgggagcccaggcagaggaggcgccgaaagcgagcgagggctgtgaggactgccagcacgctgtcacctctcatttctttaccaagaggaaactaggtacttattttaagcatttcacttttagaacctataattcatgttgtaattaagataaaattagtattagactcttatttttcagtaatgaaaatcatctttagaaaatgcaatgttttatgatataaaactaaagaagttttatgaagcatgacttacatttcagtgtctttatggctttttgttgacaatctcaagcacctaatagccccaactgtaatagtcactaaacaatatgacaatctccatggaaaaatacagcaaaatatggctgtagtagcataggttaatgtattagcgtattttaataatgtagaatctcctcagtgaaacaaagaattgcttct

SEQ ID NO: 510661 - DNA, 636 bp, Homo sapiens
tgtacttagcaattttcaccattgctcatttttgtccatgtatttggtctcttcaaattaaaacttgtttattaagctcttcaaacttacattcattgtaaatactgaagtaaaccttcagtgatggtaaatgacaagttaaccctgaagccagcagataaatttattttgtatgtggacataattaaagagaaagctctgaaatttctcaaaagtgaatagcactctttctyagctgccaatcccactgaaggacctacactatttgtacattcttggacatttctacaattatgtgtatgagagttctttgaaaggtgtgcactcatgttatcttagtcattttgccttgtatccttagaagtgcagtgtcttcagaaaatattccaaatttacctcttaagattgattctacaggtattatttattagaaaccaatttctttttaagaactgttatttctcacctacatacactaactttaaaacattatatttactctgctaaccttttgtatattgtcatataattttgtctttcctgctcagcagccatataaataatatgatgaattacctacaatgagaaattaggatataaaaaaagacaaactaattgctgccaatgagctcataa

SEQ ID NO: 510662 - DNA, 469 bp, Homo sapiens
atctgggtgtgccatgaccagtttctgtsttgggtgccggtgtttggatgaaggggatgtgacagcgaccaaaaactctcagataccagcaaccatggagccccaagggatgttacagctttttctcagggagtcccaaggtttaagccaccaggaagtgttttagctctcattcagtcctgctgcccacagcttgctgagtgggggcatgtggtgcttagcggttttttcacttccatagctcagcaaacaggagaaagggtgacagcccttttctcacctgccatttggcaggttccagtttctttccctgtgaccaagaggaatgaggtacacggacaccagagagtgagcaaagcagagaagaattatattcagtgacagagaagctcttgacaacgagaggggacctgaagtggatagccctttgtctgagagggggcctgaaaatgcgtagctgtcgtgtctg

SEQ ID NO: 510663 - DNA, 469 bp, Homo sapiens
atctgggtgtgccatgaccagtttctgtcttgggtgccggtgtttggatgaaggggatgtgacagcgaccaaaaactctcagataccagcaaccatggagccccaagggatgttacagctttttctcagggagtcccaaggtttaagccaccaggaagtgttttagctctcattcagtcytgctgcccacagcttgctgagtgggggcatgtggtgcttagcggttttttcacttccatagctcagcaaacaggagaaagggtgacagcccttttctcacctgccatttggcaggttccagtttctttccctgtgaccaagaggaatgaggtacacggacaccagagagtgagcaaagcagagaagaattatattcagtgacagagaagctcttgacaacgagaggggacctgaagtggatagccctttgtctgagagggggcctgaaaatgcgtagctgtcgtgtctg

SEQ ID NO: 510664 - DNA, 622 bp, Homo sapiens
gccaagacacttggtcataaaacaattccttctcaaagcccacaaaagaatgrtcaggaatacagcaggggagaagatagtgaaaaacaatgctgggttcttgagaatacacctgctacatttttctatggtaatctattcttcccatcctatgtgaaattctttatctataactgtgtacatgttcatccacattgggaaaatccctgaaagaccatgtaagattacctggtgagctagtatgtgaagaatgtaatttattttaactcaatgaaatgcactttaaatttctttctttcaaaacatgaaatggaagtgcagcttcaaagttttaaaattgattgtgaaataattttggacaagtcttctaagaagaaagaaagaaaaaccagaactagttggcatttcctgactgtaatcttactgcttaatttatataggcactagagtactaacctattgcataaattcacctacaaaattgttcaatatgtgcacccacatggatgacttcatgtttcataaacatgttgaacacatcaaacattcaaacaaatccaggaaatcttggagttcaaataccatgttgagttttttgacacaaacaaatattgtttataaa

SEQ ID NO: 510665 - DNA, 449 bp, Homo sapiens
ttgagaagcacagtgcttctgtaatctttgagaaaacacatggcrtcatgaggtcaaagagctgaaacgcccagcccatagtcagtcaactctcacttcattgcagtcaagagtggtggctgctgctcacagagcaatggatgcacagtgggtctgtttgctgtgacaaggagtgaggacttcatgctggcagtgatggggtcactggagctgtcctaatggggtttgacatgattagatttgctttctagaaagatttctctgggagctctgtagagaagcacagctctgtagtggagcacagctaaggtggaggcaagacacaaacatgcacataagtacacaccacaggcatgcacatggatacacgtatgggcacacatgtgtgtgtacacccatccacatgtgtgcactggtacaagccatacatgtgcacacatgagctcaca

SEQ ID NO: 510666 - DNA, 449 bp, Homo sapiens
ttgagaagcacagtgcttctgtaatctttgagaaaacacatggcgtcatgaggtcaaagagctgaaacgcccagcccayagtcagtcaactctcacttcattgcagtcaagagtggtggctgctgctcacagagcaatggatgcacagtgggtctgtttgctgtgacaaggagtgaggacttcatgctggcagtgatggggtcactggagctgtcctaatggggtttgacatgattagatttgctttctagaaagatttctctgggagctctgtagagaagcacagctctgtagtggagcacagctaaggtggaggcaagacacaaacatgcacataagtacacaccacaggcatgcacatggatacacgtatgggcacacatgtgtgtgtacacccatccacatgtgtgcactggtacaagccatacatgtgcacacatgagctcaca

SEQ ID NO: 510667 - DNA, 449 bp, Homo sapiens
ttgagaagcacagtgcttctgtaatctttgagaaaacacatggcgtcatgaggtcaaagagctgaaacgcccagcccatagtcagtcaactctcacttcattgcagtcaagagtggtggctgctgctcacagagcaatggatgcacagtgggtctgtttgctgtgacaaggagtgaggacttcatgctggcagtgatggggtcactggagctgtcctaatggggtttgacatgattagatttgctttctagaaagatttctctgggagctctgtagagaagcacagctctgtagtggagcacagctaaggtggaggcaagacacaaacatgcacataagtacacrccacaggcatgcacatggatacacgtatgggcacacatgtgtgtgtacacccatccacatgtgtgcactggtacaagccatacatgtgcacacatgagctcaca

SEQ ID NO: 510668 - DNA, 615 bp, Homo sapiens
tgcagagctggttttctttgaggggtaacatttgaagaactggcaaagcattgtgaatttgcttcccaaagaggggaagcgctcctggagagctgctttctctgtctgtttattttgcggaggtaagattytaagaaagatgataatgtctgtgttgccaacctatattaccatatcagcagaatctggattttatatatctttctaaccaggatatgaactatcaatcagatgagtttaattgataggtaaatttatattaatttgtctgactaatagaggtaaggccaatctgtgtataacaagttaggagtttagaaaatgtgatactagattctgatttggcatatatatatatatatatatatatatatatatatatctcatatatatctcatatatatatatatctcatatatatatctcatatatatatatctctctcagatatgcatatatatatatctcagatatatatatctgagatatatatatatctgagatatatatacatacctgagatatatatatatgagagagagatatatatatacctgatatatacacatatatatacatacacacacacacaaacacacacacacacacacacac

SEQ ID NO: 510669 - DNA, 615 bp, Homo sapiens
tgcagagctggttttctttgaggggtaacatttgaagaactggcaaagcattgtgaatttgcttcccaaagaggggaagcgctcctggagagctgctttctctgtctgtttattttgcggaggtaagattttaagaaagatgataatgtctgtgttgccaacctatattaccatatcagcagaatctggattttatatatctttctaaccaggatatgaactatcaatcagatgagtttaattgataggtaaatttatattaatttgtctgactaatagaggtaaggccaatctgtgtataacaagttaggagtttagaaaatgtgatactagattctgatttggcatatatatatatatatatatatatatatatatatatctcatatatatctcatatatatatatatctcatatatatatctcatatatatatatctctctcagatatgcatatatayatatctcagatatatatatctgagatatatatatatctgagatatatatacatacctgagatatatatatatgagagagagatatatatatacctgatatatacacatatatatacatacacacacacacaaacacacacacacacacacacac

SEQ ID NO: 510670 - DNA, 615 bp, Homo sapiens
tgcagagctggttttctttgaggggtaacatttgaagaactggcaaagcattgtgaatttgcttcccaaagaggggaagcgctcctggagagctgctttctctgtctgtttattttgcggaggtaagattttaagaaagatgataatgtctgtgttgccaacctatattaccatatcagcagaatctggattttatatatctttctaaccaggatatgaactatcaatcagatgagtttaattgataggtaaatttatattaatttgtctgactaatagaggtaaggccaatctgtgtataacaagttaggagtttagaaaatgtgatactagattctgatttggcatatatatatatatatatatatatatatatatatatctcatatatatctcatatatatatatatctcatatatatatctcatatatatatatctctctcagatatgcatatatatatatctcagatatatatatctgagatatatatatatctgagatatatatayatacctgagatatatatatatgagagagagatatatatatacctgatatatacacatatatatacatacacacacacacaaacacacacacacacacacacac

SEQ ID NO: 510671 - DNA, 615 bp, Homo sapiens
tgcagagctggttttctttgaggggtaacatttgaagaactggcaaagcattgtgaatttgcttcccaaagaggggaagcgctcctggagagctgctttctctgtctgtttattttgcggaggtaagattttaagaaagatgataatgtctgtgttgccaacctatattaccatatcagcagaatctggattttatatatctttctaaccaggatatgaactatcaatcagatgagtttaattgataggtaaatttatattaatttgtctgactaatagaggtaaggccaatctgtgtataacaagttaggagtttagaaaatgtgatactagattctgatttggcatatatatatatatatatatatatatatatatatatctcatatatatctcatatatatatatatctcatatatatatctcatatatatatatctctctcagatatgcatatatatatatctcagatatatatatctgagatatatatatatctgagatatatatacatayctgagatatatatatatgagagagagatatatatatacctgatatatacacatatatatacatacacacacacacaaacacacacacacacacacacac

SEQ ID NO: 510672 - DNA, 626 bp, Homo sapiens
ttggtaatttcctaaatagtctatagaaccaagtatagcatttgaagggttctgcctgattggtaagatagtaaccataccaccgaatttgcaaaattatgctttcaaatatttactttcagttcctagttctgctagtagtttcttcttttcttgatttgtacttgttttaatcaactgacttctatctagccgtattgcaggagctgggttttatgacccatttgattgacattaacacctcttgmattaataataattcatatttaaattaggggggtttaattacaaatgttatggtttgatttactttagaactatggttattttattctttttcaatctttaaataagaaaatttatattttaggtacaacaaagaagtgaaaaaaaacatcaagacagacgtttctcacctgcatcagttctgtgttttctgcatttggaatttcccaaactgttattgtttgttaattggatagtctttacttattcaagttttatcagttttttttaattgtactcccttaaattgtttgctctcagactagagctaaatctagatgaaaatgtgttgtcaccaaacagtgaaataaaataaaacacaaaaagctctttatggccca

SEQ ID NO: 510673 - DNA, 626 bp, Homo sapiens
ttggtaatttcctaaatagtctatagaaccaagtatagcatttgaagggttctgcctgattggtaagatagtaaccataccaccgaatttgcaaaattatgctttcaaatatttactttcagttcctagttctgctagtagtttcttcttttcttgatttgtacttgttttaatcaactgacttctatctagccgtattgcaggagctgggttttatgacccatttgattgacattaacacctcttgcattaataataattcatatttaaattaggggggtttaattacaaatgttatggtttgatttactttagaactatggttattttattctttttcaatctttaaataagaaaatttatattttaggtacaacaaagaagtgaamaaaaacatcaagacagacgtttctcacctgcatcagttctgtgttttctgcatttggaatttcccaaactgttattgtttgttaattggatagtctttacttattcaagttttatcagttttttttaattgtactcccttaaattgtttgctctcagactagagctaaatctagatgaaaatgtgttgtcaccaaacagtgaaataaaataaaacacaaaaagctctttatggccca

SEQ ID NO: 510674 - DNA, 626 bp, Homo sapiens
ttggtaatttcctaaatagtctatagaaccaagtatagcatttgaagggttctgcctgattggtaagatagtaaccataccaccgaatttgcaaaattatgctttcaaatatttactttcagttcctagttctgctagtagtttcttcttttcttgatttgtacttgttttaatcaactgacttctatctagccgtattgcaggagctgggttttatgacccatttgattgacattaacacctcttgcattaataataattcatatttaaattaggggggtttaattacaaatgttatggtttgatttactttagaactatggttattttattctttttcaatctttaaataagaaaatttatattttaggtacaacaaagaagtgaaaaaaaacatcaagacagacgtttctcacctgcatcagttctgtgttttctgcatttggaatttcccaaactgttaytgtttgttaattggatagtctttacttattcaagttttatcagttttttttaattgtactcccttaaattgtttgctctcagactagagctaaatctagatgaaaatgtgttgtcaccaaacagtgaaataaaataaaacacaaaaagctctttatggccca

SEQ ID NO: 510675 - DNA, 565 bp, Homo sapiens
cttttcctaaggaaaaacatacacttatttatgtatttatttattttgagacagagtctggcttttcgcccaggctagagtgcagtggcgcgatcttggctcactgcaacctccgcctcccgagttcaagcaattctcctgcctcagcttcctgagtatctgggattacagccatgcgccaccacacctggctaatttttttgtatttttaatagagatggaatttcaccatattggccaggctggtctcgaactcctgactttgtgatccacctgcctcagcctcccaaagtgctgggattgcaggtgaacatccactttttatacgcatatctagcatgcatcatatactaaggaatctcctacactctgtggggctctgcttctctggagattcagatcaaagtcacataggaagcttagctgctcccaatgcaacgaagatgaacatgctgttataacctgttaaacgatatgaaaatgtgtgaaaattctgagtcacaatctaaagtcattgccagcaracttccccttatgcatgctccaatgccctcttatctgaagt

SEQ ID NO: 510676 - DNA, 604 bp, Homo sapiens
tcctcagagtgcagccaggcattccagggccacaagcctttcacagagttagacacaccccttcctcacagtgtctgaggaagcacacaggtagggttagggctgtgcagccaggcacagccaggtggtcagagttttattttgtttcaaatcttctaaaagaactctgctcttctttgccacctttgggacgtttatgtgggctctgcctgaaagcaaagtagtgcacccccagggctccaagggtagaagagaagaggattctgtatttcagtctctgctgcttgacccctggtacatctttgccagatgcctactatgggcttctctgtcagggtgcaggcgacagcggagaggacgggagcagagccaggaaaccgcggtgctccagtaggaactggatgttcrgtctgctgttcctttcctttcattctgtccaccaagtcagcaacaccaggaggagaatcttctactccgagataatctgtttcttcttccaggaaatccccacagaggatggggaggtgtccagccaacgccacaggcagtgtctgtgcttcaggagggagagtggcttcatggctatgccctgcccactgtcaca

SEQ ID NO: 510677 - DNA, 618 bp, Homo sapiens
gccatgaattccagcaaatatatgcatagcatttacatgtcaagcacttttgtcccaagtgctccatataattcttgtaatagtttgacaagatgaattttatttttatcttcaacttgaagataagaaaattcaagcaaagagaaattagatgacttctcagcatcacatagccaagaagtgacagaaactagtttcaaactcaggtaactaatgcatgatcttcaactttaccatatgytgtttctctagttctcattcttccctatacaacaagagaaagaagtgaatctagattttgtggaggcctgaaggtgacaaaatttggctggtgggggtgagggtgtggttcactttaataaaagaaatgtaaaattagaaatattaaattaatcatgaaataaacaatgaaaattagaagagaaaatcactaaaatatattaaagacaaaaataccaaaacaaaattcagaataatacagtcaattaaataaccacttgacatatacttgcctagaaggttttactttctatttttaatcacctcttgataagacaaagatttcaaaacatatatattttatgtagactatagaaaaataatttagtactgctattg

SEQ ID NO: 510678 - DNA, 654 bp, Homo sapiens
cttgggtgcatttgccaaaaataagtttgattttctacatttgcaaatacgctaaaagtaggaaaattaaaccatccatcttttattataaactttcattcactagacatgtgtaataggcaaggtatgagcacacgcctggtctccaactgcctggtttctgatatgcattcatataaatgaatcccaatggctatatctaaggagaatattaaaagctgcttctgaacacttttattctattgtatttcattttatttattcatttattgagacagggtctcattctgtctcccaggctagagagcagtggtgtgatctcggctcactgcaacctccacctcccaggttcaagtgattctcctgcctcagcctcccaataagtagctggtattacaggcatgcaccaccatgcccggctaawttttttttgtatttttagtagagatgcgattttgctatattgggcaggctggtctcgaacttctggcctcaaatgatccgcccgctttggcctcccaaagtgctgagattacaggcatgagccaccgtgtccggctggctcctgaacacttttaaccacatctgagagagtttaaagaaaatatttacctactttggaaaagaataaaggctattattcatactcataga

SEQ ID NO: 510679 - DNA, 654 bp, Homo sapiens
cttgggtgcatttgccaaaaataagtttgattttctacatttgcaaatacgctaaaagtaggaaaattaaaccatccatcttttattataaactttcattcactagacatgtgtaataggcaaggtatgagcacacgcctggtctccaactgcctggtttctgatatgcattcatataaatgaatcccaatggctatatctaaggagaatattaaaagctgcttctgaacacttttattctattgtatttcattttatttattcatttattgagacagggtctcattctgtctcccaggctagagagcagtggtgtgatctcggctcactgcaacctccacctcccaggttcaagtgattctcctgcctcagcctcccaataagtagctggtattacaggcatgcaccaccatgcccggctaatttttttttgtatttttagtagagatgcgattttgctatattgggcaggctggtctcgaacttctggcctcaaatgatccgcccgctttggcctcccaaagtgctgagattacaggcatgagccaccgtgtcyggctggctcctgaacacttttaaccacatctgagagagtttaaagaaaatatttacctactttggaaaagaataaaggctattattcatactcataga

SEQ ID NO: 510680 - DNA, 585 bp, Homo sapiens
gttggattttagacaaattttgtcaatgcattttaaatatatttaatgcatttaaaataacatatttagtgattagaatgatatgatcaggttgggcgtggtggctcatgcctgtaatcccagcactttgggaggtcgaggtgggtggatcacctgaggtcaggagtttgagaccaacatggccaacacaacgaaaccctgtctccactaaaaatacaaaaattagccaggtatggtggtgcacacttgtagtcccagctacttgggaggctgaggcaagagaattgcttgaacccaggaggcaracagctgagatcacaccacagcactctagcctgagtgacagagtgagactccaactcaaaaaaaacaaaaaaaaaaggaattatatgatcaaagcagtatttttcattatatttattattgcagtcttattagagtattgaatttatttcaacccgtatagtttcagaaacatggaaaattcgtagaatgccaggagaggaaaaacagaaatgataaaagggttggaactagaaccaaagaagaaaaatgagcagatataatttggcctgaagaagagaa

SEQ ID NO: 510681 - DNA, 642 bp, Homo sapiens
tgtccaccatgagaattctgaaacattttcccagagaacaatgtgttgaaacatgctaattttaccaccttgtgagagagtcatattagcctaatgttcatggcctaaaattkttaccttcagatggatcaggttgaaattggacattaaaaagtgggaggtttatttctacctcaaccagttctctgattctccaacaccaactgggtgtccaacaattcaattcaattctgatcattcagagttagcccactctacagattaagggctcagtccaacaagactgtccctacttcagacactgcaaacagggtgcccaggctactcacctgtctacctggctaactgcaaattcagagcttcctaagatccctctatcaggttcaataatttgctagaatgactcatggaactcagaaagcactttacatactattaccagtttattgtaaagaatataacttgggaacagccaaatggaagagatgcacagggcaagatgtggggaaggggcatggagcttccatgccttctctgggttcgccatcctcccaggatcttgatatgaatgccaaccagaagctctccaaaccgggtggtttagggggttttatggaagcttcatgacagaggcatgattga

SEQ ID NO: 510682 - DNA, 642 bp, Homo sapiens
tgtccaccatgagaattctgaaacattttcccagagaacaatgtgttgaaacatgctaattttaccaccttgtgagagagtcatattagcctaatgttcatggcctaaaatttttaccttcagatggatyaggttgaaattggacattaaaaagtgggaggtttatttctacctcaaccagttctctgattctccaacaccaactgggtgtccaacaattcaattcaattctgatcattcagagttagcccactctacagattaagggctcagtccaacaagactgtccctacttcagacactgcaaacagggtgcccaggctactcacctgtctacctggctaactgcaaattcagagcttcctaagatccctctatcaggttcaataatttgctagaatgactcatggaactcagaaagcactttacatactattaccagtttattgtaaagaatataacttgggaacagccaaatggaagagatgcacagggcaagatgtggggaaggggcatggagcttccatgccttctctgggttcgccatcctcccaggatcttgatatgaatgccaaccagaagctctccaaaccgggtggtttagggggttttatggaagcttcatgacagaggcatgattga

SEQ ID NO: 510683 - DNA, 642 bp, Homo sapiens
tgtccaccatgagaattctgaaacattttcccagagaacaatgtgttgaaacatgctaattttaccaccttgtgagagagtcatattagcctaatgttcatggcctaaaatttttaccttcagatggatcaggttgaaattggacattaaaaagtgggaggtttatttctacctcaaccagttctctgattctycaacaccaactgggtgtccaacaattcaattcaattctgatcattcagagttagcccactctacagattaagggctcagtccaacaagactgtccctacttcagacactgcaaacagggtgcccaggctactcacctgtctacctggctaactgcaaattcagagcttcctaagatccctctatcaggttcaataatttgctagaatgactcatggaactcagaaagcactttacatactattaccagtttattgtaaagaatataacttgggaacagccaaatggaagagatgcacagggcaagatgtggggaaggggcatggagcttccatgccttctctgggttcgccatcctcccaggatcttgatatgaatgccaaccagaagctctccaaaccgggtggtttagggggttttatggaagcttcatgacagaggcatgattga

SEQ ID NO: 510684 - DNA, 640 bp, Homo sapiens
tccaccatgagaattctgaaacattttcccagagaacaatgtgttgaaacatgctaattttaccaccttgtgagagagtcatattagcctaatgttcatggcctaaaatttttaccttcagatggatcaggttgaaattggacattaaaaagtgggaggtttatttctacctcaaccagttctctgattctccaacaccaactgggtgtccaacaattcaattcaattctgatcattcagagttagcccactctacagattaagggctcagtccaacaagactgtccctacttcagacactgcaaacagggtgcccaggctactcacctgtctacctggctaactgcaaattcagagcttcctaagatccctctatcaggttcaataatttgctagaaygactcatggaactcagaaagcactttacatactattaccagtttattgtaaagaatataacttgggaacagccaaatggaagagatgcacagggcaagatgtggggaaggggcatggagcttccatgccttctctgggttcgccatcctcccaggatcttgatatgaatgccaaccagaagctctccaaaccgggtggtttagggggttttatggaagcttcatgacagaggcatgattga

SEQ ID NO: 510685 - DNA, 396 bp, Homo sapiens
agcagacttgtgggagaccagaagcactgatcaatggcctratgccccttcctccaccttctctactggaatccttcccgattgcctttccttcctgtgaccctaagcacaagtgctagtcacaccagacccattgacactatccactctctccttggaagggaaagcatcacttgaccactttagagcagaattttaactgattggagctgaaaataaaaacgaccaaggtctaagggtaaactctgggggttggggaaaggaagtcatgattctataggaaaaaaaaaaaaaaaaacgtgatttcgagctgttgaatccaagagatgggaagagattttagtaatgtcatggaggcaaacggaaccagattgagcaaccactggaagatagggc

SEQ ID NO: 510686 - DNA, 570 bp, Homo sapiens
tgttccacaaactgaagtgatgcccaacagtggttctattgatctatggccaaccttgctacgggtttcctgggttcaactgtggggaccccactccatacaagatcactccagaaaatccttgagctaatttgggggatgttcagagccaactatattgactctggcataattataggtatgaggccccaaagaatcattctatgcgtgttggaagcataaactatagagagtactgttaaagcaaagaccacctgccagaaagaccacttaattttaaaacccagggtggtctccatatgcagatttcatagttttacgttatgagcaacaaaaggttaaatatgttgtgctgggtggtatgttaagagtgagcatgctgaataaaagtggagtcagaaagaaaattccacctaattatttaaagaaataaacttcaagcaacacagcagcaaacaagagcggtaattgagcctacctaccactagaaatcagagttgctgtggagggggtsaattcaaaggaaaaggttcaggtactagaacaagaaacacagtaggccttccctac

SEQ ID NO: 510687 - DNA, 619 bp, Homo sapiens
gaatctttataaatggtaaaaagacaattcccaattccctgtggtcattttctttattcttagtaaccatccaagtattacagatatggtacagtagttcatggtccatgacgccctcagagttattttaggtagactctgaaaaatatgcatcccaaatgttatctgtagatgtgataaatatcaggcctagcagatacatgaactattttacaaatctatatttattttagtgaataaaataatgtattattgaataattaagttgtggtgtattagtttaaccattggctagtaaaagcattgtcactctatacagaagaaagggaggagaaaaactatagattaaaatttatttaagagatatggtcacaattgcctgtatggattttgyttaaatttagagaaaattgttaaaaagatacttatgagacaattggggaaatttgagtgatgattagtagttgattattattattatagtagtagatgattattaatgtaagcattataatggtattaacttatttttacaaagtaaatccttgtcttagagagatacataatgaattatctacagatgaaatgttataatgtctggaatttgctttagaataat

SEQ ID NO: 510688 - DNA, 462 bp, Homo sapiens
attttttccccttatcactcactttaaaattatctccaacaagtactgtcttgtttattaagtcctcagcatatgaattacaaatgcaagaatgttgttacttctcttcctggaatctttttttggggggggataggggaaatatatttgtttgagggaacctccctctctcattgactaatcttctctccccartctcccagcccattgtaggatcagggaagggttttgctctttttccaggaattggcctgtcctcagtatcaatattgctttgtgaaaaactaccctaaaacagtcgtttttaaaagacacaatcatttattttgctcacaaatgtgagagttgcctaggctccaccaggcatttctcacgtgggttgtcttgcaaagctacagtcagactatggcttgggctggggtcttcattcacatgtctagcacctggcctgggaagagtcaa

SEQ ID NO: 510689 - DNA, 564 bp, Homo sapiens
ctgtgtgtgtaagtgccactgagtatagattcctggagcttaggttgatccccagtaaatgttaaatgcaggtctccctgtgcctgtggaaatgcctcaacatcaattggttcaattgtatccttcaacttgatcactaacaggtctttaatgaaaagtctccagagatgctattcccattctgtactatcctcatcattaccattcttatttcttctttgccaatgcaaattctctatttcatttttttctttaagtacttctctatgaagctttttaaaagtatgcttcattttagggccagacatggtggctcatgcgaggcccatgcgggtggatcacctgaggtcaggagtttaagaccagcgtgaccagcatagtgaaaccccatctctactaaaaatacaaaattagtcgggtgtggtggcgtgcacctgtaatcccagctactcaggagactgaggcaggagaattgcttgaacccaggaggcagaggttgcagtaagctgagacaccgcagcctgggggacaragtgagactccatcccaaaaaataaaaataga

SEQ ID NO: 510690 - DNA, 544 bp, Homo sapiens
taaaaatagaaacacacagtttggcagacaacatcggggattacagatgccaccgaatcagctatggatctctctagaagtctgcaggtcacaggatgagagttattacattctccatcccctgaagctgttccccagacctcaccctctcctgtgtggatcaccatcccagcttatcagcttcttcctggcctcccctctcgccyctggactgccccgtctgacacacaaaggttctccctccttccctcccacccctccctcctccttccctcctttctttctctttctcttttcttttccttttctttcttttctttctttctctttctctttctttcttttccttccttcttccctttcttcctttctgtctttcttctttctttctctctctctttctcctttcctgtcctccttccttccctccctccctcccttccttccgtctttccgtccctcccttccctttcttttttgaggcagggtctcactccatcacccaggttggaacgcagtggtgcaatcacagctctctgcagcc

SEQ ID NO: 510691 - DNA, 542 bp, Homo sapiens
ctgtgccacgtgcggccagagtttcaagcacttcctgggcctcgtgactcacaagtacgtgcacctggtgcgacggaccctgggctgcgcctctgcggccagagcttcgcgggcgcctacgacttgctcctacaccgccgcagccatcggcagaagcggggtttccgctgcccggtgtgcgggaagcgcttctgggaggcggccctgctgatgcgccaccagcgctgccacacrgaacagcggccgtaccgatgtggcgtgtgcggccgaggcttcctgcgctcctggtacctgcggcacaccgcgtggtgcacactggcgagcgggccttcaagtgcggcgtgtgcgcaagcgcttcgcgcagtcgtccagcctggcagagcaccggcggctgcacgctgtggcccggccccagcgctgcagcgctgtggcaagaccttccgctaccgctccaacctgctggagcaccagcggctgcacctgggcgagcgcgcctaccgctgtgagcactgcggcaagggcttcttctacctgagctccgt

SEQ ID NO: 510692 - DNA, 451 bp, Homo sapiens
attttgataaaagttcttaaatctaatgaagtttaacttattaawctttttctttatgactggtgttctgtactattcacaaaatctctgcctatctccagatcataaatagaatatcttgtgttatcctctttaatctttcacatttaggaacaggaaaagacttttgtgtatggtatggggtagtgattttttttccttgttgaatatccatcattaattaaaaatttttaaaaacaggcctggtaaaatttcagccagcatcaaaaaattaaaatataaaacatttcaggcacttaaaaaatacaaagatatattaatactttttcctcacttcccatccccttctacctaatggaagtagatgagggtagattaagcagttgtgtcacatatatgtttcagcccatcttggagtttgcttatatgggcttctcatatttgataacag

SEQ ID NO: 510693 - DNA, 151 bp, Homo sapiens
acaaaagcaatgtgatcatctgctaccactgaaacttcctaagtgctatagaagtrgaagtttcaacttaaaacgagatttattaaaaactgttccattccactcttcaaggtaatttcatggattttctttttcttaccaagatagtatt

SEQ ID NO: 510694 - DNA, 501 bp, Homo sapiens
tttaaaaaggcataacatattggtttctacaaaayagcatcaagacataaaaaatacacctaccctgaaatacagaatacgtagctttaaaacaaatttcatgctcagtagtaaaaccttctatatttatgagaagaggccaaaaacttcttccttaactagcaaaggtcacaaactatcagctggcagactgaatttggtccaaagatgtgttttctttggcatgcaaagtactgttttttagttgcattagttgacattaagaaatgacaagatttcccataaatactcagtttttctggtttattttgataaactgcaagtgtgaacaacactaggtttccggtcccaagtagcaccagccccttgaagacaagcagtctttctccttcagaaaagcaaccaaacagggctcatcagttatctatctacagaccacactgtccttgtggatttgagactcttgtcacataggtttccaattaagtagccctttgttta

SEQ ID NO: 510695 - DNA, 651 bp, Homo sapiens
tggttttttaaatttttaacaatatattccagaacattagttttcagaaaatgcatgaagatacttacccatccttggtttgatcagctactcctgccaagagctgcacgatctttgggttactatttggatcattatacagtccaagatagcgctgaacaaagtcttctggggtcatrtaacgctctccatcaacctcagtactggcatactaaaaaaataaataaataatgcatactgaaaaattatccaatatcattttatatccaataaatggtttgtgaaaaggtaaattaaaggccagtattaaaatcaaaataaagataataaatgcagaatttttctctggataccgaaaaatcaaatattcagagcctgatttaaaaacattttatagtactaatacatgcacaacatgtaggaaccttgaaaacattatgataagtgaaagaagacagacactaaaggccatatattatgtgatactattaagtggcatgtccacaataggcaagaccatagaatcagaaagcagaatattggttgccaggagctgaaaggagagggggaatgggagttaactgcttactggttatcagatttctctttggggatgatgaaaatgttctggaattagatagtggtaacatc

SEQ ID NO: 510696 - DNA, 543 bp, Homo sapiens
tgttaagtctggaagctgagggctgtcaagcacagtctcctgagaggcaacgagttgtcgtacaatgtaaattcccaggttgcttgccttttggctgaggatataaagcacaggctctgccttaaggtaaggcaacaagatttccaggcctctgaaaaatttggtacatggtgtcctttctgaagtagcaactttttcagcctcctgagtagctggaattatgggtgtgagccacatgcctggctttttttttttttttttttgagatggagtctcgctctgttgcccaggctggagtgcagtggcgcaatctargctcactgcaagctccgcctcctgggttcaagggattcccttgcctcagcctcccgagtagctgggactacaggcatgcaccaccacgctcagctaattttttgtattttttagtagagacggggtttcaccatgttagccaggatggtctcgatctcttgacctcgtgatccacccgcctcagcctcccaaagtgctgggattacaggcatgagccactgtgcccgg

SEQ ID NO: 510697 - DNA, 541 bp, Homo sapiens
ccagcagcactgagtccaagagggagcctggatcagcagcaatctcctacactggccaaataactcaggggcctgcacagctcacacagycaggagaaagggctcaacacagaaggacagggagggcaatagccagatattgccaagtacctatcacactctctgcacaggtcttcagagaagaaacatgcagggctggaagcaggcaaaatagagtaaggtggtggggctggacctgaaccccaccctcttccacagtgacagagccaggcagcaggacatccctgcccatcactgccacctgacccaactccagtggacagaggattgcatggatgatcctatatacacaaaattgttaggtcccctgcctaaaattcacgtgttgaaacctaatccccagtgcaatggtattaggaggtgggacctttggcaggtgattaggtaatgagggtggagcctctcacacaaatgggatctgtgccctataaaagggaccccaggagtgttccctcactcctgctatgtgagaacacagaga

SEQ ID NO: 510698 - DNA, 541 bp, Homo sapiens
ccagcagcactgagtccaagagggagcctggatcagcagcaatctcctacactggccaaataactcaggggcctgcacagctcacacagccaggagaaagggctcaacacagaaggacagggagggcaatagccagatattgccaagtacctatcacactctctgcacaggtcttcagagaagaaacatgcagggctggaagcaggyaaaatagagtaaggtggtggggctggacctgaaccccaccctcttccacagtgacagagccaggcagcaggacatccctgcccatcactgccacctgacccaactccagtggacagaggattgcatggatgatcctatatacacaaaattgttaggtcccctgcctaaaattcacgtgttgaaacctaatccccagtgcaatggtattaggaggtgggacctttggcaggtgattaggtaatgagggtggagcctctcacacaaatgggatctgtgccctataaaagggaccccaggagtgttccctcactcctgctatgtgagaacacagaga

SEQ ID NO: 510699 - DNA, 559 bp, Homo sapiens
ctgtccatgaaccaggaaggggactcttgccagacaccaacctgccaacgccttcatcttgaactttttggctcccagaactgtgagaaaggcactgctgttgtttgtgagccgcccagttcatggtattctgttagagcagcctgacaggactgagacctatccccacctgcaggcacctgaaaaacaggaggatggacttgggccttccagagagtgcagtcagatcctgtgcctgcttcttcaaaccttggaacaagtgaccactgagtcagcttcagctcaaaaggaaggtagcaagagggtgcagggcatagaaaggtgtaggagtgtggaagggtgtgtatctatggcaattaggcatctgtaccatgggaccatcagaagaagtcgaagctcaaatacaggggctgtggttcatagagatgatccagtctagacagtgactgaaatctgctgctggggccaattcctcagcaactatgaagggtgygtgagacgtaaggcttggataatatgggatcggaactcctgacttcatatcagtaccctgtactag

SEQ ID NO: 510700 - DNA, 620 bp, Homo sapiens
agtgccgtccccagtggcgaactcctagggtcatgggcacatccgctgtttcttttctaataaccctgggacccccacacagagcaggtgcccagcagcctttgctaacccggacagggaaccataaggatgatcgtactggtgagatgggcttcgatacgggaggaacaacctcttcttgttcatgtgaaggtctctcctattttccaataaaagtgtaagtttatctgtgtaaacaaggaggagataattactaaaatgggggaaagggggctaaaagtggacataatctatttgaattctcttttagctactcaggtacttacgggaataaagcaataaaaattatgttaaaaataagccgcaagtctcctggcaacaagtacatctgtgcctgtgsgtttggctctcactgtggtcactgacaactcaggaagtcaccttagattgggaaatcgatacctttcccagagagtcttccttaaaggtcacaaacaggatgtgtacatttaaaaataagcatacagaatctgtaatatttacccttgtctagaggaacaatgtataaacatttggttaaaaagaaaatctcactgcctaggactcatgagaatagacaa

SEQ ID NO: 510701 - DNA, 620 bp, Homo sapiens
agtgccgtccccagtggcgaactcctagggtcatgggcacatccgctgtttcttttctaataaccctgggacccccacacagagcaggtgcccagcagcctttgctaacccggacagggaaccataaggatgatcgtactggtgagatgggcttcgatacgggaggaacaacctcttcttgttcatgtgaaggtctctcctattttccaataaaagtgtaagtttatctgtgtaaacaaggaggagataattactaaaatgggggaaagggggctaaaagtggacataatctatttgaattctcttttagctactcaggtacttacgggaataaagcaataaaaattatgttaaaaataagccgcaagtctcctggcaacaagtacatctgtgcctgtgcstttggctctcactgtggtcactgacaactcaggaagtcaccttagattgggaaatcgatacctttcccagagagtcttccttaaaggtcacaaacaggatgtgtacatttaaaaataagcatacagaatctgtaatatttacccttgtctagaggaacaatgtataaacatttggttaaaaagaaaatctcactgcctaggactcatgagaatagacaa

SEQ ID NO: 510702 - DNA, 605 bp, Homo sapiens
tgtcatttctcattgctatcagtatgtttcccatagcagcttctctatcccctctaatttgctgttattaatcggctgcaggtttagaaaccagactaccaaatgaggcagggttgcacattgaagtaaaaacaaatgcgtgctgtttaacacacatagggctctgctagatgtaaaagacaggagcctgcattcgcagcatctattttggctgccgaaagactcttttgtggcgtatttcctrgttcttagttgacgcagtacacttctgaatagatgatcttactatacttgagagagagccattacttaaggtgatggcagcagaaactctgttataaaatacattcacaaataaataggtgtacaattgaaagtcttaattcaacccatatattacataactgtgaactgtcaaataaaaaatggattgaatgcattgtataaaacacttacatattcgatatgtgggaaatacactgcacaatttaaacgaagagatctatggattaaatgatatgttgcccttagttatagctaaatcagcctaagatactataacacaatataattaataagtaacttattaataagcaattaaagtc

SEQ ID NO: 510703 - DNA, 555 bp, Homo sapiens
ctgggcgcagtgtgttcccagcaagctgttgttaatactcaccagcaccaggtcacttgttgttaatactcactggcatcaggtcgcttgatgcacacccaggggggttcactcaattttgctcattctgaccccagattccagactctaacaaagaggccctatcccagagtataaattggagactctagactgtctcttttgtgattcaggactttgagaagacataggatttctggagaactgcaggccctgtggtctgatgtgatttttgtgtgagatcccgtcacacatccaggataaggtgccctgtggtctgtgctgtccacctgcggcccccagtttrcttgttggttagggcctcaggccacgtgggctggccacccaggtcatctgctctgcccttcagggctctgagctctggatggggggagccctgggactgaggtttgtgccatgccctgtgatctgtatatagaagatcagggttctcccaagcactgtgttgggcagatcttggtgggaactaaaaccagaggtcctattgtgtcatgc

SEQ ID NO: 510704 - DNA, 507 bp, Homo sapiens
atcaaggggcatccctactatgcagggtaactagttatggtaatgggtatcatggtactatctttatttctgtcagctgagccaggatttctgtcaaggatatcatatacactgaagacaaaacaaaacaacaacttttaaaacacctcgtagaagtcaagtattacaagaaacccagtatgtcaaatccagagagataaatcattcaaggattgttacaaaaccagaggtgcgtgagaaaacataaattcaaagaaccaagaattagtaggagatctacttcaggagctaagaattcaagcatttaagggaccaggaatcaaaagggaacacctgggctgggcatggtggctcatgcctgtaatcccaacactttgggaggctgaggtgggcggatcatgaggtcaggagatcgagaccatcctggctaacayggtgaaaccctgtctctactaaaaatacaaacaattagctgggcttcctggcccgcgcctgtagtcccagatc

SEQ ID NO: 510705 - DNA, 605 bp, Homo sapiens
ttccattaagagaatacttcagtaatactttttccaccattaccaccaccttaccccctcttaggatacttagaggatagarggctcttaatacatactgacgggtaatttgatgttttggaagatcctatctcattgattctttggcagaagaaacagttgcaatgaaagagaaatgcaagtttggaatgacatccacaatccccagtgggcatgtctggagaaacacatggaatcctgtctcctgtagtttggctacagtcaaaatgaaggaatgcctgagaggaaaactcatatacctaatgggagattccacgatccgccagtggatggaatacttcaaagccagtatcaacagtatgcctcagtctaagctataattcttacccctttcagaaacttcttttccatttcaaaggggagaagggaatatgggaaattcctctttttttcatattcttcaatcacaacacaccaaaatttttcacaaggcattgttatccttcctttaaaaaaacaatacagctatctaactggaaggaaagcagtgtagaaaaaggtttattacatccctatctctgcagaattcacacttcagtatgtac

SEQ ID NO: 510706 - DNA, 661 bp, Homo sapiens
tggaatatacattctttcccagtgcacatgaaacatgtaccacattgtgctctgttgtttgcattgttgatatagaaaatgataatatggtttttaaaaagaaaagtcaagtgaggggatagcaaaaggaaaaactctaaaattgaatcatgaaatagtatgtattgataacatgattgtatctagttaatttttaagtcagtgactcctaaagaaaaccatctgctggcarcagaggaagtcatactacatggaaaccatttctgaagattccataactgaaaaccagttagtatcgatttttgatatttaatttatcacactgaaagatgtaaaataagccataataatttatattgaaaagcaagccctattgtttgctgatgatattttcttttccctttcaatatttcagttctcgttcaacttggaaaaccatattatcctgaaccaagggaacatcttcaaaaaatattcacactctgaaacaccactgtgtccagcagtttcaccaaaagagactgaacttagaataaaggacattatggagaaactagaccagcagatcccacccagacctttcacccatgtgaataccaccaccagtgccacacacagcacagccaccatcctcaaccctcaagatacgtactgcaggggg

SEQ ID NO: 510707 - DNA, 430 bp, Homo sapiens
gtctattatcacaccaatattttatttttaaatacatgactgatgtcattaagatggcgggttagaagctaacctgttcatatacccccacaacaataagaattctgcatccatccacagttaaaagtctttgtgcaggagcctcagaattcaggtgggagttggtgaagtcctagtagaactcaagacctacaagagggttgttttgagastgcagaccaacacccagttggctgatctgccttgctgagtttgcttccaggttcaaacctggaaacagtcgagtccctcaaagggctaggctacagccctgtttggcattgagcttgcaaccaaaaccatctgtgaaagggtccagaaagaactatgcacactactaccttggtggacaggctggctacccattgatattggtttccacagtgaacct

SEQ ID NO: 510708 - DNA, 591 bp, Homo sapiens
aaataggtgagaactatagccttgcttgggcatgtgtttaaatgtattgaatggagaaaatgctttaatgaagggtaatttcttctatcacatgcatatataagcttctctcatctacccagaagtggatagtgaagtaaatttataattatatttgctgatctgtccaagtactatatagatgaatgatggcaaactaggcaaattatgaactaaatcacaatttatttgtaatagagaaaggaaatatattcattgaaagaaaggggtagatattttcagtgctctagaaatagagttctaattaatttatagatttaaaaggccactctgactcagcctcataatttgagtaataaaactcttctaatagctttacagcaaatttataaaataaatgagcaaacttaatcaaaccacagtgcttggtcaatacaagcatttctgttkttagcaattttactctatcaattcagaaatttagcaatgaatttgggtggacgcatgcctcatattccatgaatatattagcaggatcttcataaatgcattctctatagtaaattgagaaaggcatatgcttagtgatca

SEQ ID NO: 510709 - DNA, 608 bp, Homo sapiens
ggttctctttatcctgtctgacccttgattgtaaaccccaacacttggtttgggaaggaggcagcctctccaccccgtggctggactatagggtctgtgatgcgaagtggtgagaagtaccttagtgcctatggggcagcaggaagcttggggaagggctgatctaggagctggcctgggctctggtaaactgaatggctttggaatccaggaagctggacttcagatcctgtatagaccactcacraatgatggggctctgtgggcattattcgtttctgtcagtctcagggttagcatttctcagatggagctaaaacatccttaatatggttgttgtgagactgaatgatagaaagagctcttagattgttcctggcccattttagaggctccatagatgctaactataatagatccagatttggatttccctgcttggggcggttctcttctgtagctttgctctattccagtgtgggccagagaccaggaccacatatgctactccaggtgcaagtgaactacggttttatgggagggagggataatgactcctctctgctttccaggctgcccttcctgacatggccagcagtttgttggtg

SEQ ID NO: 510710 - DNA, 527 bp, Homo sapiens
acgtgaggctttagttaaagagtaactggtgagaaagaggaggactgagctcataaacttttatttaagggagattgaagactgctcagatgactgttttgtagagyagaaatctgcatgtatctgtcagaatggtgctgaaaaccaggttcctgccaacgggagtgtccactgcatcctgtgttttgctagatgctttttaggcactgcctctggtccctagtgggtaaggtagactgcatatatgagagcactgaggctcagaggggtgacgggactctgccaagaccctgcagtggtgagctattgagatggaaagtcaccatcagaactcatttgcaaagaccctaacagttaccaaaactgcctcagcacacatctaattttgatcgaactagattcaaatgggactgaaaggtccctttaaagaaatttcggagcatgaattgagctggtcctaactgcagcaaatgagtcgttctttaagaaatgacactgatgtataaagtgtgactgacattcataag

SEQ ID NO: 510711 - DNA, 657 bp, Homo sapiens
ctcagctgctgcctctggttctgctttagagaagctgatatttctacagcctatgttcaggctgactttggagaccaaaaattttattccaggagatttttgttaatccaagcagctagcaagaacaactcctagcctgggcaacatggtgaaaccccgtctctacaaaaaaatacaaaaattagccaggcgtggagatgtgtgcctgtagtcccagctatttgggaggctgaggcagaaggattgcttaagccagggaagtggaggctgcagtgaactgaagtcacaccactgcactccagcctgggtgacagcaagaatttatctcaaaaaaaaaaaaaaaaaaaagcaagaataacttgtaatcccagcacttttggaggctaaggcaggaggatcgcttgagaccaaactgggcaacaaagcaaaaccctatctcaacaaaaaataaaaataaaaaattagcagggcatactggcatgcacctgtagtcycagctacttgggaggctgaggcaggaggattgctcagcccaggagtttgaggctgcagtgtgccgtgatttcattccagcctatgtgacagggcaagaccctgtctcaaaagacacacaaacacacacacacacacacacacacacacacacacacacacgtg

SEQ ID NO: 510712 - DNA, 576 bp, Homo sapiens
gggctcatgacataaagcccctcgtggcctctggaatgtgcacagacttgctggttgctctcccaggctcataaacatgttctccattgtttccagcagcagagcatattctatatgcgtcaaagaaaacgctaaaccgtcacagctacatttgatgcactactacctttctacccccrcatcctcacgtcctcaccacctgcttctttgtttgatcaccaataaatagtgtgggctcccagagctcgaggcctttgcagcttccataccagcattggccccctggacccaacttatgtactcttaacctgtcttttctcattcctttgactccgccagacttcgaagcccccatggcctggtgttgggtctgatcaccccaacatatgctagctttagcttacctaagaaatattataattgttccagatggcccctgcattacacgaggaggtagggcaagaaagaatactgtgtacctactttccctaaactacctccaatgattcactcaacacccagcagtagaattctctccttcaggatagatgtgaaggctggatgcagtagtaataa

SEQ ID NO: 510713 - DNA, 576 bp, Homo sapiens
gggctcatgacataaagcccctcgtggcctctggaatgtgcacagacttgctggttgctctcccaggctcataaacatgttctccattgtttccagcagcagagcatattctatatgcgtcaaagaaaacgctaaaccgtcacagctacatttgatgcactactacctttctacccccgcatcctcacgtcctcaccacctgcttctttgtttgatcaccaataaatagtgtgggctcccagagctcgaggcctttgcagcttccataccagcrttggccccctggacccaacttatgtactcttaacctgtcttttctcattcctttgactccgccagacttcgaagcccccatggcctggtgttgggtctgatcaccccaacatatgctagctttagcttacctaagaaatattataattgttccagatggcccctgcattacacgaggaggtagggcaagaaagaatactgtgtacctactttccctaaactacctccaatgattcactcaacacccagcagtagaattctctccttcaggatagatgtgaaggctggatgcagtagtaataa

SEQ ID NO: 510714 - DNA, 610 bp, Homo sapiens
ctggaatctacttaagcctactgaaaactcctcgtgggaggggtgaccaatttaagttgttgagtttcaggtatgcacaaaatatccagatgaagatattgaagattagttggagaaatttatccggttttcaggagaaaagttgggactggagataggaaattagcgatttcagaggtggagtagtttgtgtgatgaggatatggccatagaaatacgtggcaagtgtaatggagaaagacgtagaagatgagagaatcaaaggtctttgggggtggatgttcaatggctcttctatgtagttaaaaatataccttgggactggcatggagaggaatattgagtcaggagtgatcagaggtggttacataactatttttaatagagccaaatgatacaaatgtcaaaggaggatgggttttctcaggaaaacagaaatacaattcagaagacgtatgggggaatgaagagaatattaatttatttgtctgaccaccraagtacttgaagtatggtagaaaatgcagcctctgtttcagagaagatgtggcttgggggagaatcagaatttgcataagataggaaatttagggccagatccctttcagtg

SEQ ID NO: 510715 - DNA, 610 bp, Homo sapiens
ctggaatctacttaagcctactgaaaactcctcgtgggaggggtgaccaatttaagttgttgagtttcaggtatgcacaaaatatccagatgaagatattgaagattagttggagaaatttatccggttttcaggagaaaagttgggactggagataggaaattagcgatttcagaggtggagtagtttgtgtgatgaggatatggccatagaaatacgtggcaagtgtaatggagaaagacgtagaagatgagagaatcaaaggtctttgggggtggatgttcaatggctcttctatgtagttaaaaatataccttgggactggcatggagaggaatattgagtcaggagtgatcagaggtggttacataactatttttaatagagccaaatgatacaaatgtcaaaggaggatgggttttctcaggaaaacagaaatacaattcagaagacgtatgggggaatgaagagaatattaatttatttgtctgaccaccgaagtacttgaagtayggtagaaaatgcagcctctgtttcagagaagatgtggcttgggggagaatcagaatttgcataagataggaaatttagggccagatccctttcagtg

SEQ ID NO: 510716 - DNA, 621 bp, Homo sapiens
ttattttttccttttcttttcctttgaatatgtcttaattccctagtaaccccaagccarggattaagtcaagtaggatctcagtaagaatctgatccaaccctgttttggatagaattcatagaaaggcttgaagctggggaagcatggcttcctacgaggaaccaccagggagtgtttggtttacaaccattttattttatctggttacctctcaataaatgggcctttgattggtttgggaagaggatctcagtactgattcttcgccttaaaatatcatgcaaaatttgtgtacttacctaatgatatctaattgatagttactcttaacttcctctttgaagcagtatgatacatagtagaaaaggatgaaccctacactgcaaatctgaatacttgagttttaaccatgtctctgcaataggtgaccttggaaagtaacctaatgtcatagggcacaggaagagattatctctaaatctttttatagctgagtcaatgattatatgatctgtgagttccagttttatccttgtgaaacataattataaatagtctatcatatccatatactagttgctttgacaattttataaaaacgactggcatccagagttg

SEQ ID NO: 510717 - DNA, 635 bp, Homo sapiens
tttcagcaagattttattcttttccatgtgacaaaatgaactgtcattaggtgtctaacagaatggtcttctaaaaatcaggcctcttgttgggatttattgggctcatgatatctttccatatgtataagccagtttttatttcttacattctgaaatttctttttaaaaatggaccagattatatttcaatacatgcttgaggattgtgacttatagatcttggcagtttacaatcacctagtgcagagaaggcaaagatgtaccatgtgttctgcyattctccttcctcttttccttgcacatagttatatatatatggcacataattatatataacatatataattatatataaaatgtatatatggtatataatatgtatatataattgtatatgttatatatattattattatatatatattagtgtttaccatatgctgggaattattataggcactcaaaatgtgacaaagaacacaaagttcctgacctcacgattgcttataatcccatgaggatagaaatattataaacttatcccagtatcatttcttcctgagccctgacacagccacatgatccttcttaacctttgcagtagatgttcactaccaatcaataagactagg

SEQ ID NO: 510718 - DNA, 635 bp, Homo sapiens
tttcagcaagattttattcttttccatgtgacaaaatgaactgtcattaggtgtctaacagaatggtcttctaaaaatcaggcctcttgttgggatttattgggctcatgatatctttccatatgtataagccagtttttatttcttacattctgaaatttctttttaaaaatggaccagattatatttcaatacatgcttgaggattgtgacttatagatcttggcagtttacaatcacctagtgcagagaaggcaaagatgtaccatgtgttctgccattctccttcctcttttccttgcacatagttatatatatatggcacataattatatataacatatataattatatataaaatgtatatatkgtatataatatgtatatataattgtatatgttatatatattattattatatatatattagtgtttaccatatgctgggaattattataggcactcaaaatgtgacaaagaacacaaagttcctgacctcacgattgcttataatcccatgaggatagaaatattataaacttatcccagtatcatttcttcctgagccctgacacagccacatgatccttcttaacctttgcagtagatgttcactaccaatcaataagactagg

SEQ ID NO: 510719 - DNA, 594 bp, Homo sapiens
tggtctttcaataacacttagagaaccactgggatagaatatagttggcaaagggagactaggagaawgtaaggttgaaaaagcaggtccaaactaagatcctgggagcttttaaagaacaagaaatacgcatagcatttggaattcctgaagattttttttttttaccagaatgataatgtagactgtattgtgatttaagagattttagtgtgtatgcagttgatggtgttctgctgagtattagattgcctgtaaacagtatattccatctagagtgaatccacagtccaacctggcaggcacttcacatacatgttttaggaatttgattaaaagtttaaagtgttattttaatttgtttttcttttaaaggacctttctgggaacttttcgggtgaaagaactatgtcgcagggtattgtgttagtggatatacaactatgtgcatttgtcaaaatccatagaaatgtgcatcacaaaaagagaacgttattctatgcaactttaaaaaattaaacaggatatttgagaaacacaagatggaatgcagactctgagaaatgaatctaactgtgtaacaaatgaatcaca

SEQ ID NO: 510720 - DNA, 594 bp, Homo sapiens
tggtctttcaataacacttagagaaccactgggatagaatatagttggcaaagggagactaggagaatgtaaggttgaaaaagcaggtccaaactaagatcctgggagcttttaaagaacaagaaatacgcatagcatttggaattcctgaagattttttttttttaccagaatgataatgtagactgtattgtgatttaagagattttagtgtgtatgcagttgatggtgttctgctgagtattagattgcctgtaaacagtatattccatctagagtgaatccacagtccaacctggcaggcacttcacatacatgttttaggaatttgattaaaagtttaaagtgttattttaatttgtttttcttttaaaggacctttctgggaacttttsgggtgaaagaactatgtcgcagggtattgtgttagtggatatacaactatgtgcatttgtcaaaatccatagaaatgtgcatcacaaaaagagaacgttattctatgcaactttaaaaaattaaacaggatatttgagaaacacaagatggaatgcagactctgagaaatgaatctaactgtgtaacaaatgaatcaca

SEQ ID NO: 510721 - DNA, 640 bp, Homo sapiens
atattcattgggtgcctatgtcaggaactctatatttaagcatgttagtaataaccttttgcagcaaagccttaacagaaagaagttaactatggaaattccagggttcatggctggtaaaaggtaaggaggaggctaaagtgtggtgctgcacagggtggggtgaggggacttggttagaataaggacttttcattttcctttctatatttcaattagtcacatccaaacatctgatttgttttcagtgaatctagttattaactttttttttaaccagtggttacaatatcaccaggtgtgctattgaatagtatggtatttctcagaataacccacagtatgtgtcaatggtaagakagtgtgtaatgttgtgtaataactagaactaaacctcttaaattttaattccttgagaaagcacattcacaggtaatctccatgcttttattgtttagccaatgatttcaaagcaccttttcattaaggggccaataatcctactgaagcaggaactttaatattttagtaaaacaaatagaaactaaataaggaagttaagttacagcaggttaaaaaccatagacttttatatttggaatataatttctatagattttaagacttcttggcaaaagga

SEQ ID NO: 510722 - DNA, 530 bp, Homo sapiens
  misc_feature (1)...(530): n = A,T,C or G
gatgactgtaataacaatagcaatactaaaatggcttcaagatacacacacacatacacacacacacacacacacacacacacaaaagcataccccatacatatgtaaagttattaactgtaataattattaactgcaataaactgaacaaaaaatgaaataaaacaaataaaagaatatatgcatttgcatttgtatgtactttggaaggacacataagaaactaataacaaaggtccctgctgttggagaggtgtggcggggtggagatgagaagcggagacgtgtgtgggagagagcttcactgtgcttgttctaaaaatgtwctgcctttcgaaacacaggacaattgtatctattaaaaataagaaaagaaataaataagaaaagaaataaaatttgtgaaaagtattatttgaatgagtcagtgactcttcacacaaaaagattatagctgatgggcccactgaaacttagactaaatctgtgaattaggtagatgtttcttgctcgccagtgtcagaaaannn

SEQ ID NO: 510723 - DNA, 609 bp, Homo sapiens
tttctgttcttttatttttaggctgatcttcagtaagttttttatagatgtctgtggttgactcttgctttttaaaatctcatataacaacttttgctttttaattgaagcatgtagatctgtgctgtcccatatatgtgactacagttggcccaacatatattcaggttctgcatcagcagattcaaccaaccacagattgaaaatattcagaaaaaattataatacaacaataaaaraaggccaacaaatttaaaaatacagtgtaacaaccatttatgtagcatttacattgtattaggattataaataatctggagatgatttaaagtgtatagtaggatgtacatagttttcatgcaaatactacaccattttatatatgggacttgtgcatcctcagattttgttatccacaggaagtcctgtagccaatccccacagatagcaagggacaactgtatttaaatgtaacttagttaaaattaaaatttaatttcttaatcacagtagccgtttttaatgatctcaatatatgtggcaggtggctacaacattggacagtatggctctagaacataggagggtttactgccccttgtcttgatg

SEQ ID NO: 510724 - DNA, 609 bp, Homo sapiens
tttctgttcttttatttttaggctgatcttcagtaagttttttatagatgtctgtggttgactcttgctttttaaaatctcatataacaacttttgctttttaattgaagcatgtagatctgtgctgtcccatatatgtgactacagttggcccaacatatattcaggttctgcatcagcagattcaaccaaccacagattgaaaatattcagaaaaaattataatacaacaataaaagaaggccmacaaatttaaaaatacagtgtaacaaccatttatgtagcatttacattgtattaggattataaataatctggagatgatttaaagtgtatagtaggatgtacatagttttcatgcaaatactacaccattttatatatgggacttgtgcatcctcagattttgttatccacaggaagtcctgtagccaatccccacagatagcaagggacaactgtatttaaatgtaacttagttaaaattaaaatttaatttcttaatcacagtagccgtttttaatgatctcaatatatgtggcaggtggctacaacattggacagtatggctctagaacataggagggtttactgccccttgtcttgatg

SEQ ID NO: 510725 - DNA, 337 bp, Homo sapiens
atagccttatccatttgtttatgtattagctatggctgctttcatgctacaacaggagaagtgaacagttgcaacagagtctgtatggtcctcaaagcctaaaatatgtattataagcccctttctagaaaaagtttgctagaccttgctctaggtatatgtttctccagtraggtccagagaatgttagttcaatccatgctagtctgtacgatctgaaaaaaaaaaaaaaaaaaaaaaaaaagggttctatagtcaaataagctttagaaatgttaaggaggttgatttattctaggactactacttaaaagactttggcttttaatatactcat

SEQ ID NO: 510726 - DNA, 564 bp, Homo sapiens
tcttctgaaaggccctgcctcaattctgaaactctactctgtcttaaaagtagcagtgatgggagacatccttcatctctatgtgatcttcaagagaatgtatctaaagtttctccaatgagtatgatgtttgcaatagatttttgatatgaaacctttatccttggttgctgaaattcatgtttgtttttgttttctcttgtgatcagaagtagacactgaacatatcacatgattttcttcacgtatcaggtaatcatatgcagttttcttttatatatkgatacagataaattatttttatagattatctgatgttaaaacatacattcattccccccaaaaaccttacttaagtataagatatattcttaattggctagtgaacttgtattattcagatcaggtaatcacctattgatttttggatatttcatctgttgtgttttttaaagagaggtgtttaaaaatctctaattataattgctgctatatgtgttgcttctcacagtctcctcactcatatatatgtatttggaggctacattttagaggcctatgtgc

SEQ ID NO: 510727 - DNA, 375 bp, Homo sapiens
tggtcctaggtttggttgcattcagcctctgaactggttgttctgggtattgccatagccacctagaataaacactccccatggggctgcagtggcagttcccatttacatcagtctctgaagctttaagaatgagaacttgaagagctgaaaatagtaggtcttcatcctgctcatgaagattycagatggtaatgtcttctgaactttttaataactgactcttcttccttttctctcccttctgattcttttttttttttttttttatttgaggcagagtctcactctgtcagccaggttggagtgtagtggacgatgttggctcactgaaacccccacctcccaggttcaagtgattctcatgtgtcagcc

SEQ ID NO: 510728 - DNA, 375 bp, Homo sapiens
tggtcctaggtttggttgcattcagcctctgaactggttgttctgggtattgccatagccacctagaataaacactccccatggggctgcagtggcagttcccatttacatcagtctctgaagctttaagaatgagaacttgaagagctgaaaatagtaggtcttcatcctgctcatgaagattccagatggtaatgtcttctgaactttttaataactgactcttcttccttttctctcccttctgattcttttttttttttttttttatttgaggcagagtctcactctgtcagccaggttggagtgtagtggacgatkttggctcactgaaacccccacctcccaggttcaagtgattctcatgtgtcagcc

SEQ ID NO: 510729 - DNA, 250 bp, Homo sapiens
acttatgccatttccaagagtaacagtcctagatccctgaattatgggagtttaggtttcattaattaggttaagtgccaaataattagtatttttaagtgcatgtacaacgttgtcagaagaacacaagccaccagaagagaaayttcattccactctgccatgattaggatttccactctcatgagcacagctttccaccacacattcttgttttagtggtccatgcctttggaaatttgtagaaaat

SEQ ID NO: 510730 - DNA, 638 bp, Homo sapiens
tgacccatcaatttggtttctacatatagtaacctaaggaaaacacacacacacacacacacgcaaagaacaaactcaataatttccgctgcagcattactttgtgcaggttattyttactagagagtaaatgtcacaggatatgacagggcagttaaagtaggccagctagatctatgtccacatggataaggctcaaaaccatactaggtgaaaagttatagaattacatgtattgtatgataccatttattttgttttataagaatacatggaataccacattatttatggataaatgtatcatgaaaatattaaaataggaactgaatataaatcaaattagtggctgtgtttgcctttatggaggagaaaacggaatgatctacagacagaagcctaagagaagtatctgtaatcgtttatttatttaagaagatgtaagggaaatatatgttaacatttattaaatttaggtggcgggtacatgggtgtttataacattattttttgtgtataacactcaaaatgttcatatttttcctttttaaggaaagtagtgcatttcccttagcttcctggatttgtttttggaaaagtgaaaaccactcaacttggagtcaaacacaggttaagtc

SEQ ID NO: 510731 - DNA, 419 bp, Homo sapiens
gaagtatagagatgccacaatactcttggttttcagcaaatgagcctaacaggtcgtttctagtgagaaaaaaataaattgagtattttaagaagtgttataggccaggcgccgtggctcacgcctgtaatcccagcactttgggaggctgaggcgggtgcatcacttgaggtcaggtgttcaagaccagcctgaccaacatggtgaaaccccatctctrctaaaaatacaaaaattagccagtcatggtggcacacacctgtaatcccagctactcgggaggctgaggcaggagcatcacttgaacccgggaggtggaggctgcagtgagattgcaccactgcactctagcctgggcgacagagcaagattccatctcaaaaataaataaacagataagtgtcggaatacattttctt

SEQ ID NO: 510732 - DNA, 606 bp, Homo sapiens
gcacaataacagcagtgctgatcctcctgagatgcgataggcgtctaccctgtgcaatgtcatgatgatcaggaggccttttctaccacacacacccagggcaaaacatccagcttctcctgttgcctgttcctttggcttcagattgcgatttgcaaatctggtttggccatgacttaggattctttgcagtacctctggtttgcatctggatttccctggacttgttaaacattcacccaagttaggtcttgtaccatcttccccacaatcctctgggggagtcagtgaatgtgaaaattcctagtctccaccccagacccactgaagcagcacctctggcagtagagcccaggagtcagcattaccaacaacccaggtgattcctttgaaaagatttttgtaaagctcaagaaagtaaaataatttatcaagcatacrtataaacctaaccaaaaaagacataattttttgttttgagtttttcataaaagatagcaaattgcagatacaacttaagcttcttttatactcatccctctacctcttcttagtagtaatcacaatcagaaatatggtatctccttagtccatatttcatagtgt

SEQ ID NO: 510733 - DNA, 625 bp, Homo sapiens
tgaggtctatttcttttaaactgatgtgatcctaatggctttggttgttttctttcccttagcagagggaaayagttcaatggcttaatttttcatgcttttatggattcaaaaataaataatttattgcctttgggtaattttattattcatcatgttgcttaatcttaaatccctggttaagttttcctataatttccacatacactttttcctgctccataatacttcagataccagttaataaatgtgtgtgctggcgtgttgattgctgggtttaaatgcatgaatatgcttatcaaatccaagggattaattattataagctttctactgcattgaggagtattttgctgggaattgaatattaaaaatgcaaaagatctctctatgcaaaatgtaaactgatttattctcataagaacagatagtataagctgaaagaaaattggcaaaagaaaggaaatatattctaattggcttccttgaatctgctttggttttccttctcaatgaagagttggaggaaaagacatttaaagtagcatgtgcagaaagaccaaaaaccaacaatcacatgatactgaaaatgcttccagaattcctcagactacattttgaagtt

SEQ ID NO: 510734 - DNA, 621 bp, Homo sapiens
tgtgttcttacaataaagtaaggtagagaaaaaatgttactaagaaaatcataaggaaaataaaaatatttattcctcaagtggaagtggatcatcataaaagttttcatcttcattatcttcacatcgagtaggctgagaaggaggaagaagagraggcattggtcttgctgtctcagggctggcaaaggcagaagaaaatccatttataagtggacttgtgtagtttggattcaagttattcaggggtcaactgtatcctaccatgactttttccttttatttagtttttgttggttactaatcacattttgctacttctttgcacatctttataattttcgattggatgctagacattttcaagaatcaatattttgctgtcttttttttaaaatgtgcaattttattttatcagtcagccgagataaggctgtagttttgaggcttgttctgaatcttttttagtatggatcttgagtagtccttactgtagccctagttagtcctattgctagggcaagacccttttggggtctctattcaatggcctagtgcctcaataaagtctttgctttggctaattggaacttggatatctcccagccccatgtgaacatt

SEQ ID NO: 510735 - DNA, 498 bp, Homo sapiens
tcgagtaggctgagaaggaggaagaagaggaggcattggtcttgctgtctcagggctggcaaaggcagaagaaaatccatttataagtggacttgtgtagtttggattcaagttattcaggggtcaactgtatcctaccatgactttttccttttatttagtttttgttggttactaatcacattttgctacttctttgcacatctttataattttcgattggatgctagacattttcaagaatcaatattttgctgtcttttttttaaaatgtgcaattttattttatcagtyagccgagataaggctgtagttttgaggcttgttctgaatcttttttagtatggatcttgagtagtccttactgtagccctagttagtcctattgctagggcaagacccttttggggtctctattcaatggcctagtgcctcaataaagtctttgctttggctaattggaacttggatatctcccagccccatgtgaacattgaa

SEQ ID NO: 510736 - DNA, 498 bp, Homo sapiens
tcgagtaggctgagaaggaggaagaagaggaggcattggtcttgctgtctcagggctggcaaaggcagaagaaaatccatttataagtggacttgtgtagtttggattcaagttattcaggggtcaactgtatcctaccatgactttttccttttatttagtttttgttggttactaatcacattttgctacttctttgcacatctttataattttcgattggatgctagacattttcaagaatcaatattttgctgtcttttttttaaaatgtgcaattttattttatcagtcagccgagataaggctgtagttttgaggcttgttctgaatcttttttagtatggawcttgagtagtccttactgtagccctagttagtcctattgctagggcaagacccttttggggtctctattcaatggcctagtgcctcaataaagtctttgctttggctaattggaacttggatatctcccagccccatgtgaacattgaa

SEQ ID NO: 510737 - DNA, 595 bp, Homo sapiens
attgaggtgcccatcaaaattccaacttttactgcacaaattataggatacgaatccaattatgaatccaaatgtatttcactgattgcatctaggccgctacaggacrgttttataggttgcttcttttttcccagggggaagtagctggaaggtgggacaggatatattctctcttaaatcatgtcaccactcaaccaaggatacatccattgtgtatccaggccccagctcctttccttcaatgaggtggaggattggtaacagcttaaagctgaggcccctccagagactcctaggttcataagcaaaagggacaggatggacaggctttcctacttacaagagtagcattcttgcctgttctgggggttgtttttaattgtcttgctggagcacatataccctttccttatggtacataagccctgactctaggggtaacacatatggagatctacctgtcctgtggccgcccaagaccacgcttctgtttgtaccttcccctaataaagcaccttttattaaatacaacaacaacaaaatctcaacctaagctttgagagagatgtgcgattgggggagtgcggtggaa

SEQ ID NO: 510738 - DNA, 516 bp, Homo sapiens
ctgtggcagtgtgtgtctgtttcctctgtggctcgtcygtggcagaatgtgtctatttcctctgtggcctgtctgtggcagagcgctggctatttcctccgtggcctgtccgtggcagtgtgtgtgtctgtttcctccttggcctgtccgtggcagagtgctggctatttcctccgtggcctgtccgtggcagtgtgtgtgtctgtttcctccgtggcctgtccatggcagagtgctgggctccaggtcagcaggtctttgctttcctggtctcaggctctcttccccaggaaaatgaacattacacatgggtacgagattttgcatatcacttcagtgagtttctagaccctctgttaaccctctagaccctctgcatgaataactccagatattataatacattgatcctgttcttgaggaacttaaaatccaggaagtgaagcttggggagggggagttgttaatgttaacggttcagcacaacagaaaggaggtggtgtgataatggagtgg

SEQ ID NO: 510739 - DNA, 661 bp, Homo sapiens
gttttatgagggtttccacaaactacaggctagaccacaagtaggtgtgtatatctggaggcatgtrcatgtattttgaaacaccatattgtagtggaaagaacaagggctttggagtcaaaaagacttgtgatcagtcccctggctcaaattaaataacatggaaaatgcctcgtggtgaacattgagtagctgggcattatttgatttgtgtgtgcatgcacctgtctgtcaagtgtatttgattgctagtcctttcccaaagacccttgacatggacagtatgctctctctgtggtcttgcataagagccaacagtgtgtagaaagaaacaccatcctactctgcagatgccccagtgcatgctgggactatgctgctgtttgtggtaactgtgaattgccgtggtgatggctgggttgggagagacttgcatctgttctgagcctgagtagcacacacattctctccccagttgctccattttcagggaaaggcttggagggcagcccaggataacatcatgagctcctccccatagaccttggtgtcgccctggggcctgctaggagccctacctgcccccttcccccctcaaaccctacttgcgcgcacacacacacacacacacacacatacacacacttcactcttgcagctg

SEQ ID NO: 510740 - DNA, 636 bp, Homo sapiens
cttggaaatcaggattttgaagaagtcttactagatctagattcccctggggcctttagttccttgcaaatttgattacagcagattaccacagagtgataagcagtggttgcaaaggctctaaagcaaccctcttaagcagcagcccctaaattccccaaagttggggaacatatgctatttcctagatggattttcactggtaccatggactactaytaatgggcatgcctccccgagctgggaagagcaaagatctgaaccaactccattgtattagggtactcaagagacatcatcaggttttggcaggggagggtgtaatatgtaccatttaattctgagtgcttcttcccagatagcccaaggtcagagagtaatactgaaaagaaaagtagaaggaagagaacaaaagagaagggatgggattgacagggttggcagacagtggggtagaaatgaggagaatgcagtttcatcaatgaccaactgaggaggaaggtgcacaaagcaaggaaaagtgtggagaggaaagcctttctccataaaggcaagggaaagtgtggagaaacaagttaaaggcaagaggctggaaagaaatcgtggggagggaaaggagaagactggaaaagggga

SEQ ID NO: 510741 - DNA, 636 bp, Homo sapiens
cttggaaatcaggattttgaagaagtcttactagatctagattcccctggggcctttagttccttgcaaatttgattacagcagattaccacagagtgataagcagtggttgcaaaggctctaaagcaaccctcttaagcagcagcccctaaattccccaaagttggggaacatatgctatttcctagatggattttcactggtaccatggactactactaatgggcatgcctccccgagctgggaagagcaaagatctgaaccaactccattgtattagggtactcaagagacatcatcaggttttggcaggggagggtgtaatatgtaccatttaattctgagtgcttcttcccagatagcccaaggtcagagagtaatactgaaaagaaaagtagaaggaagagaacaaaagagaagggatgggattgacagggttggcagasagtggggtagaaatgaggagaatgcagtttcatcaatgaccaactgaggaggaaggtgcacaaagcaaggaaaagtgtggagaggaaagcctttctccataaaggcaagggaaagtgtggagaaacaagttaaaggcaagaggctggaaagaaatcgtggggagggaaaggagaagactggaaaagggga

SEQ ID NO: 510742 - DNA, 544 bp, Homo sapiens
acaataatctttcttcaacaaaatttaaaactaccatctctgaagatgcatttatgtgttaaaagtatttttatgcaaatgcttaagaaataatgaggagttctttaaaaattgaatctgctgcctttctaaatatctttcttgtttaaaacacaaaatacatatgccaaaatgaatcaataacttccttgtctggtacagaatgttaaggcttgaatttgaacaaagaagctgaacttagctttggatatctattataaaagatatccaaatgaagaacgcattgacacaatcgttaattagtattcattatactactcctcaaatagaacgatatcaggtctcctatatatcagtgattatttctcttagcttatccaagtttttccttttctactgcacataactgttacacatttgaatctgtaaccaggttttatgayttaatatatgctctgactgtaacacctatattttctgactaaatgcctcctgtatttcaatggacatctcctgtagcccctattaaaagtccctctcccta

SEQ ID NO: 510743 - DNA, 539 bp, Homo sapiens
  misc_feature (1)...(539): n = A,T,C or G
tggcagctgtaaaccacctgtgggatactgaagaactgatagtggagcacagacccgaacgatgggaaaaatcctggcatggaaatacctggaaaggagcatgtgacggcaaccagccccaacaatcgtttcctacacagcaattagcccagaactgcgatgccacccaagccaggccaatcacaatttgaagtcaaagagaagagccttatctttcagttggggaaagactgccaaaactcatcttcttcaaagggtgcagaaagcccatcctgtactcagagagaatgaaaccaagaggagtgagtccctagatacagcacacctgaagtcagaccaccatgtaacagatcacccttcaagatccaccatggaatcagatcccccttcaagaaaggacctgctttccacctttgaggagtgtgcttggctgctagttggtagagacagcctccagctattagcttcatgggccaccagcctttagaytgaggtcacactcttctgaggctgccccagccatgactgagcaanggctc

SEQ ID NO: 510744 - DNA, 647 bp, Homo sapiens
tgctcagtgaaacactgtggtttgaaacaaaaaagggtaagaaaaaacagataactggagggtttttttttgtaagatagatgatacagaaatctagggttttctttctctgatcgctttatagaacttgaagaaataactcattttacaaatcatctgcttttaaccacttgtgcatgcattttaaaaatagcctatataaagaagtgagatgtagctaactaactcaggcaagggtgaaacctaaaacccatacatttttgaagactccttttaaggaaaataacataaattacaaaagcaaaatttgatacagggcctggaaagggctatggcaaatgaagcttttgcatcattggttttatggcaaatccacgcacaagctgaaatttttaaaattaagtgacgaattaaaataagggttgaaaattttctagatataatctcactttgctccatggcccaattaattgtgaatcagttgtctataaccagatgtagcaacgatccatcaaaactgtgtttttcagttcctatgttctgaaccatgtatcttgttgcatactcctgctttgaatgtattcatctctgyttatgtaagagaggacaacaagaattttttaatgagaacacaaatatggatactg

SEQ ID NO: 510745 - DNA, 626 bp, Homo sapiens
tcaacagattatcaataaaggccacaaagcaaatcaatgggaaaagaagactgttttcaatatggtattagtgcaacaggatatctacatgggggggaaacagacctaaatatgaaatctgaaactataaagcttctagaagaaaatatacgataayatattcacaaccttggggtttattaattaagatttcttagaaaagctgtaaaaataaaaaaaggaggggaatgaagaagctttctggggtaatggaaatgttttacgtcttaacctgggtggtggttactaaagcatatataatggttaaaaaaaaattgaactgttcacttcagatctgtgcatatcacttcacataaatgatacctcaataaaatagagttaagatgcaaaaaaaaaattcattcaattgagaataacaaaagcaactcatcacagaaagtttcttgggtttttttttaaactaggatcctctccaacatatgttctaatctgactgcaatcaaaccagagggttttgtctacttacatttctgtaaatataaatatcaggcacacaaactaaacacaaaaatattcttcactctagtttcctcataactgcattttcaaagacaactatagaaggt

SEQ ID NO: 510746 - DNA, 633 bp, Homo sapiens
gctgttaaatgaagaggtggaaaatctctaggattctccccagagtaatattccacagatgtagctgtagaacagctacagtatctgaccatcaytctgacacgcatttggtacctctgtgttttcctttttaattaataaatgtcttgaaaataagtatatctcacttgaaaattcatctctaggaaacatgaaatattacaaaatacggaataacttaaaagtaatcagcaactaaaaaggagcattcaagaaatcttttgagttatctggttgagggaaaataatgagtttaaccactggcttgagtaacatgtagtgaactggttgaggtatgtagttcaaattttgaaagagatgtaacattagaacaaagttaatgcattctctaaaactggggctattattagttttcattctaccaactaatattgctcataactcctgacatcatgaactaatgataaatcgtgactttttaaaatctgatgatataaaagctttatattgggagaaaaggtacaaatagtacttgagcttcctttgcattgcctgttctttctcatccttccgatcaaatggcccctccccgaagtttctccttgaccactctagcttaggtcacatcccgcc

SEQ ID NO: 510747 - DNA, 633 bp, Homo sapiens
gctgttaaatgaagaggtggaaaatctctaggattctccccagagtaatattccacagatgtagctgtagaacagctacagtatctgaccatcattctgacacgcatttggtacctctgtgttttcctttttaattaataaatgtcttgaaaataagtatatctcacttgaaaattcatctctaggaaacatgaaatattacaaaatacggaataacttaaaagtaatcagcaactaaaaaggagcattcaagaaatcttttgagttatctggttgagggaaaataatgagtttaaccactggcttgagtaacatgtagtgaactggttgaggtatgyagttcaaattttgaaagagatgtaacattagaacaaagttaatgcattctctaaaactggggctattattagttttcattctaccaactaatattgctcataactcctgacatcatgaactaatgataaatcgtgactttttaaaatctgatgatataaaagctttatattgggagaaaaggtacaaatagtacttgagcttcctttgcattgcctgttctttctcatccttccgatcaaatggcccctccccgaagtttctccttgaccactctagcttaggtcacatcccgcc

SEQ ID NO: 510748 - DNA, 547 bp, Homo sapiens
tgcagactagatgccaggcagggagtgaatacacattctgtattatggtacctgtttaccataataccccggaaattagcaatgggaactgaaacagtacccaaatcctacattaaattagggtactaaattaggcatcagagaccgcaccatacatctggagtttctagatcttcttataatacaaggtaagtgtcctaggtgtgttgatgttcctgtgaaaggccaggtgcagtgagaataatgtgtaggcaataccagtacagttaaatgaaaatcgcccatttcctgcctaggcccatgaaacaggcatgtcagccctccagcagtattcaggggcaagccttcttcagcctgcagaggagcagcctctctggtgagggcagaaggaataaggcttgatttctctcctgcaacagccgcccgtcagtacacagttctctctgcctgtggagagctyacaggacatggggatgcaccactgggcctgcggtgtccagcactctgtctgggactggatgagtaaatgcaattcaggacagaccag

SEQ ID NO: 510749 - DNA, 606 bp, Homo sapiens
cccggcagcaccttggtcttggatctccagcctccagaatggtcagaaatacatgtctgtcgtttaagccacccagtctgtgatattttgaatggcagccctaggagactaaggcaattggtaaaaggatagccctggaaatagtatgctcagaataaaatactagagcggggtcaccgaccaatcaatcagatggccataaagatgtcactgctggggtgagtgggtttgtgcagtcagtctctatgactcttatctgtgattgattgggatgggggacaggtgatggtgaagcatcrggttagtgacaatcattaaaaaggaaaccacacatgtcattcattctgcatttatcacactcatagaataagcagcatcaaccttgaaccctgatgtaaagtatggacttcagttcctaccaacatatcaatattggctcattcagttgtaatgaatgtacccccctaatgtaagacattaataataaaagaactgtgcatgggggtaaagggaggggtacatgggaactctctgtactttcatttttcctgtgaatgcaaaattacccttaaaaagtctattaatttaattttagtcttaaaaatt

SEQ ID NO: 510750 - DNA, 501 bp, Homo sapiens
gcctctctgcagacgtatcccagggctatttggagagaaacaggataaagtgatagttattttaaaatatttttgagaaaaaaatttagaagcaatagctgaaactatagattatcagcaagttaatgccttttcagggggaggttatctaaaaaacgttagctgtgacatttgattagtaaagtaagtaatctgccataaaatggccatcatgtggtctgaatgtctgccttcaataaacctctgtaataaaccactgctataaacccataaaactttccaggtgcaatctgctgatccttctgcaaattggcaatgcrccttgtcccaattccaaccttaatcatcggtaaagtaggctgtacaaaaacactgtattcattgtttttgaagcaacttttaaaaccaaaaccaatttcttaactatttccttgcattggccaaggaaactagtaaacatccacggtttaaaattaaaaatatttaaaaataaattctatt

SEQ ID NO: 510751 - DNA, 276 bp, Homo sapiens
gtcataactgcactgtgccttctccagcgatacctcatggggatggttccccagggcacctgcctcactgtacacaggtaggatgaccgtcttctggatgtgcacgtctcccagcaatcaggtgtgtaggtcattctgtgttagtgcttcaaggacacaacatatgaaatttaataacatattaaagaaaaatgcacayagcaaacagaacagaatctatatctgaaccagataatcctgtggttccttaataatctgtggttcatgggtcaagga

SEQ ID NO: 510752 - DNA, 529 bp, Homo sapiens
actggttctatttctttactgagagcttgtaactttctatttgtttcaagagtgttcattcttactttatggagtatggttgtcatacctgctttaaattctttgtctgataatgccaaaatctgkgttatcttgtggttgctgggatgtatctggttcttagtatgttgagtaaatttagattgtatcctggatatttttgaatattatgttatcatgctatgggcactgttaaaatcttctgataaatgttgattatttcattttagcaggtaatcaagctggttaggaatggaccacaagtccctgtgcatcttttgtgggccggagtttcaatgtcagtttgattttcaaaggctctgtggtgctatttggatatgtcctgtgtggggaccacccagggtccagtctgggtcctgagcagtggatgtacagcagttaaattctcaaagccttgtctatgctactttatgtcagttccatacgtgcacagctcagagaggagctgtgggcttcaaacagatttagg

SEQ ID NO: 510753 - DNA, 600 bp, Homo sapiens
ctctagggactttcaaaaaaattctatttgtatgtttcagtttttaaaactttccacttggttctttcctactggttctatttctttactgagagcttgtaactttctatttgtttcaagagtgttcattcttactttatggagtatggttgtcatacctgctttaaattctttgtctgataatgccaaaatctgggttatcttgtggttgctgggatgtatctggttcttagtatgttgagtaaatttagattgtatcctggatatttttgaatattatgttatcatgctatgggcactgttaaaatcttctgataaatgttgattatttcattttagcaggtaatcaagctggttaggaatggaccacaagtccctgtgcatcttttgtgggcyggagtttcaatgtcagtttgattttcaaaggctctgtggtgctatttggatatgtcctgtgtggggaccacccagggtccagtctgggtcctgagcagtggatgtacagcagttaaattctcaaagccttgtctatgctactttatgtcagttccatacgtgcacagctcagagaggagctgtgggcttcaaacagatttaggg

SEQ ID NO: 510754 - DNA, 600 bp, Homo sapiens
ctctagggactttcaaaaaaattctatttgtatgtttcagtttttaaaactttccacttggttctttcctactggttctatttctttactgagagcttgtaactttctatttgtttcaagagtgttcattcttactttatggagtatggttgtcatacctgctttaaattctttgtctgataatgccaaaatctgggttatcttgtggttgctgggatgtatctggttcttagtatgttgagtaaatttagattgtatcctggatatttttgaatattatgttatcatgctatgggcactgttaaaatcttctgataaatgttgattatttcattttagcaggtaatcaagctggttaggaatggaccacaagtccctgtgcatcttttgtgggccggagtttcaatgtcagtttgattttcaaaggctctgtggtgctatttggatatgtcctgtgtggggaccacccagggtccagtctgggtcctgagcagtggatgtacagcagttaaattctcaaagccttgtctatgctactttatgtcagttccatacgtgcacagctcagasaggagctgtgggcttcaaacagatttaggg

SEQ ID NO: 510755 - DNA, 411 bp, Homo sapiens
cctggtttctggaaccttgggcacaggcaagaggaaatttgccagcattaatagttgactttggaaagcattttggaaatggaggtggtgtcttagaaagctgcttgctaatgtacaggaaatgacgtcctctcccttggaattctrtagggagtttacctggacaaaacactttggatttaactcttaaagtaagcatataatttgacatgaaggattgcttgttaattgtttaggtatgctaatagcattgtgattgctttttaaagtacttattgaaatatttacaaacacagcttcctaatccttacacactcccattttgcccaggagaagacatttccatccaaaagccaaatgcagcaaaacacactgaaaagagaaggaaagcttaaatgtgaagcccttttc

SEQ ID NO: 510756 - DNA, 411 bp, Homo sapiens
cctggtttctggaaccttgggcacaggcaagaggaaatttgccagcattaatagttgactttggaaagcattttggaaatggaggtggtgtcttagaaagctgcttgctaatgtacaggaaatgacgtcctctcccttggaattctatagggagtttacctggacaaaacactttggatttaactcttaaagtaagcatataatttgacatgaaggattgcttgttaattgtttaggtatgctaatagcattgtgattgctttttaaagtacttattgaaatatttacmaacacagcttcctaatccttacacactcccattttgcccaggagaagacatttccatccaaaagccaaatgcagcaaaacacactgaaaagagaaggaaagcttaaatgtgaagcccttttc

SEQ ID NO: 510757 - DNA, 373 bp, Homo sapiens
acccagcaccagtgcttagcaggttcttggtaacggcctgtggaatgaatgaaaggttcacaggaagaccagcacataagcgggcaggcacactggaagctttcattaaaaaggtttttacagcaattgacaaagtaaagtgagrtggcaggtgcagtcttcctatttgcaaacgatgatgaagttaaagctcaggaaactgagccatgattccagatccccaagttgatgagccctaaacatgggtgttaggcccagtcttcagactcccagtctggggctctcttccactttcccccttagcactacccccagtgactgccagaacccaacatacatgtctcctgcctacaccaccctaccatgcccagga

SEQ ID NO: 510758 - DNA, 489 bp, Homo sapiens
tcctgtcataatcactttccattgcacagcatcatgtagttccagcaatcagtacaaacatctactggatggtgacgatgggccagacacaattctaaactactatacttgttttatttcatttaatcaacactatgaggtatcattattattcctgctttacagataaggaaactgaagcacatgaaatcaagtaacttgctctcagtcacacagaaagtggcaaacttcttcactgctaagcttactcccccttcaatgrcaggaagacaccacctggcaggattttcatctcccctgcaagattatgcttctgagcacggaaggttaagagcacttcccagttcactcacaggtagaatgaggctccaaacccaggcatcctggtcactatactgtgctactaacagcagaagaaagggaagggaagttgaaagatatcaaagctaataaataagtagtggaggtacaggaacatttaacaatgca

SEQ ID NO: 510759 - DNA, 572 bp, Homo sapiens
gtgcttttgtggaataatcttagtaaagttcagaatttcaaaaccaattctgggaaaatgtgaaggagacttagaaagactcataaaccaatcaaaacgaacaggctttgtttggatcttgatttaaacaaccttggggaggggggaataacaggggaaatgtgagcactgaccagatacttgacaatattaaggaatattttattttgatataataatggtaatgccttatgtttgtaaaagagtgcctttattttttagagatacctactgaaatctttacaaaggaaatgctatgatgcctgggtttarcttcagtaatctgggggaggaggagaaagagaggaaagatgtggatgaaacaggaactggttaagtgtcagagctgagatgggtccatggcgatcctgggcagcttcctccctaattctgtatgtttgacatcgtttaagaatgaaattcaagaaaaaaagaaaacgatgttaaaagctaaaatttgaaagtttgatatggtcaaacattgatcagtgaagcaagtatttatcataaattgctaatccctgtgaagataa

SEQ ID NO: 510760 - DNA, 628 bp, Homo sapiens
ctgttagccttgttattcaaatctttatctttgctgatttcttatctatctaatctatccacaattgagaaaagttttggtgatgatagaattgtgtaattctccttgtagttctagacaacaagctcaaataactaaattctagtctaaaagcaaagactgaacatccagagactctgtacagttgtgctaaaaggattacttagatcttatagcctagtggctaagaaagctggcaaccaaattccaattttggtctaagtgttcccaaagtataacatagctygaattctcaactttgccaggtgtcattaggatgttaggtggaaaaacaaacaaatgaacaaaaaacaactaaaacaggttctgtgggaaacatgagagcagatttagaagatggaagactcaggggcctccctagtctcctgcccacatcagcacccttgggcatcctaactgaaccaagtggcattgccgccgtctgtcttcatcaccctactgctcacttctggagggcctggatgaccctgtactgtgagttactaaaggagcccaccctgctgctcctcctccagtacgtggcacccacatgtgctgtgctgggggctggaacgccaagggagagcag

SEQ ID NO: 510761 - DNA, 628 bp, Homo sapiens
ctgttagccttgttattcaaatctttatctttgctgatttcttatctatctaatctatccacaattgagaaaagttttggtgatgatagaattgtgtaattctccttgtagttctagacaacaagctcaaataactaaattctagtctaaaagcaaagactgaacatccagagactctgtacagttgtgctaaaaggattacttagatcttatagcctagtggctaagaaagctggcaaccaaattccaattttggtctaagtgttcccaaagtataacatagcttgaattctcaactttgccaggtgtcattaggatgttaggtggaaaaacaaacaaatgaacaaaaaacaactaaaacaggttctgtgggaaacatgagagcagatttagaagatggaagactcaggggcctccctagtctmctgcccacatcagcacccttgggcatcctaactgaaccaagtggcattgccgccgtctgtcttcatcaccctactgctcacttctggagggcctggatgaccctgtactgtgagttactaaaggagcccaccctgctgctcctcctccagtacgtggcacccacatgtgctgtgctgggggctggaacgccaagggagagcag

SEQ ID NO: 510762 - DNA, 628 bp, Homo sapiens
ctgttagccttgttattcaaatctttatctttgctgatttcttatctatctaatctatccacaattgagaaaagttttggtgatgatagaattgtgtaattctccttgtagttctagacaacaagctcaaataactaaattctagtctaaaagcaaagactgaacatccagagactctgtacagttgtgctaaaaggattacttagatcttatagcctagtggctaagaaagctggcaaccaaattccaattttggtctaagtgttcccaaagtataacatagcttgaattctcaactttgccaggtgtcattaggatgttaggtggaaaaacaaacaaatgaacaaaaaacaactaaaacaggttctgtgggaaacatgagagcagatttagaagatggaagactcaggggcctccctagtctcctgcccacatcagcacccttgggcatcctaactgaaccaagtggcattgccgccgtctgtcttcatcaccctactgctcacttctggagggcctggatgacccygtactgtgagttactaaaggagcccaccctgctgctcctcctccagtacgtggcacccacatgtgctgtgctgggggctggaacgccaagggagagcag

SEQ ID NO: 510763 - DNA, 574 bp, Homo sapiens
ctaacactaacttatatatcaacaaaggtagaactcttgaagggtgtttaagatcaaagaatcagagtaaggagctcaactatgatgaccaggaaagacaataagaggtatgggagaattatttcttctacaacatactctttgtaaaacaagacctaagaaatctggggaaatatttctcatctaatttcatttttctttccaaagaaacaccacatgtagtaaacccaagggaatgtactaaaataaaaaataagatacattaagcamtcagtgagggctaaggataacttcttagtaatataaccgacagtgagaaagataataaaggtagtaacaaacatgtgcaattcaggggagattgtttgggttttgaagctccatgtgcttgttaagaaatacaattagatgatttctcctctatgaagaatctccccaaatatccacctaaaaggtagttattatctagcatacttctctgcttttggagaaaacatgaaagaaaaaaacagttttgtctctttcttaaatgtgctatcctctgcaaataccaatggaggttaagccttgcctt

SEQ ID NO: 510764 - DNA, 477 bp, Homo sapiens
acctgaacagaccaataatattaaatcaattaaaatgggcgtcaaacaatctttattaaaaaaaattctaagccaggcgcaatggcacacacctgtagtcccaactacttgagaggctgaggcaagaagatcgcttaagcccaggagttcaaggctgtagtactctataatcacatctgtgaatagccactgaactccagcctgagcagcacagtgagaccttatctcaaaaaaatatatatatctttttaattagccaggagtgatgrtgtgcacctgtagtcttagctacttgggaggctgagacaggaggatcacttgagcccaggagcttgaggttatagtgagctataatacaccactgcaatccagcctgggcaacagagtgagactctgtctccaaaaacaaacaaacaaacaaaagttccagatcatttttcaattttccagttgaatttactaaacttttttaaaagc

SEQ ID NO: 510765 - DNA, 607 bp, Homo sapiens
acgcctggccaaaaaattaatatccatgatacataaggaagaaagggcggactcctgataggaaaatgggcaaaagctatgaacaggctatttacagaagtgaaaactcaaaaggctaactacatataaagaaatgctcaaagccattagtaaccagagaaatgcaaatttaaatgaagaggtgtcatctgacaactattagctgggcaaaaatcagagagctggatggtgtcaagtgttgatgacggtgtggagttttggggcaccccagcactgctggtgaggattcagatgggtaccacccactgggagagcagacgcatgctcctgacattcccaaacatgtgtctgtcataattaaaggtttatataaaagacataaaagattatgagtccaatgaaaataaatttaaaataagtttagctgaraagcattttttattaaaatgcttgtgccaatagagaatattacattaactcaggacacaagtcactgaaacaatttctacatgttaccgtttgaaaaagtaagacttggcaaaaccaacctaacagatttttttttcttttctactgaattgaatgaatcgatccttttttatggcat

SEQ ID NO: 510766 - DNA, 615 bp, Homo sapiens
ctgcagcagtatgtgcaaaggccctggggcaagagagagtataaacagtattaggaattgaaagaaagaacacggagaacgcaaggcaagcaagggtctcgtagaacgtgatggggattttgttaatactaagatagcacaatatttaatataagaatacttaaaataagagctattttaagcagggatgacatgatcatatttcattagaaaagtaagctcttgcctgcaagatagatgggggagcaatttagatgccagggggcctgagagagtgaactggggtggtggcaggggaggtggagagagttggatacattcttgaaaatgcgggagttaaaattgacagaacttggtgatggattcaatataggggaatgtgttattctgttttcatactgctatggagaaatacccgagactaggtaacttataaagaaaaggagatttaatggactcacagttccacatggctggggaggcctcacaatcacggtggaaagcgaaagaggagcagtcatgtctcacctggcggcaggcaagagagcgtgtgcagggaaactgccctttacaaaaccrtcaggtcttgtgagacttattcactatcatgagaat

SEQ ID NO: 510767 - DNA, 427 bp, Homo sapiens
aattattttagaattaaaaaaaaatgggccgggtgcggtggctcatgcctctaatcccagcactttgggaggcgaggtgggcggatcatgaggtcaggagattgagaccatcctggctaacacgatgaaaccctgtctctcctaaaaatacagaaaattagacgggcgtggtggtgggtgcctgtagtcccagctacttgggaggctgaggcaggagaatggtgtgaacccgggaggcagagcttgcagygaaccgagctagcctgggcaacagagtgagactccatctcaaacaaacaaacaaacaaacaaacaaaaaagggcaaaaaggcaagctgaaggggcttgctggaaaactatggatggcctaagtgtgtgaagctctctgacacttgaagtattacaaaacaagacaaaggtccctgga

SEQ ID NO: 510768 - DNA, 427 bp, Homo sapiens
aattattttagaattaaaaaaaaatgggccgggtgcggtggctcatgcctctaatcccagcactttgggaggcgaggtgggcggatcatgaggtcaggagattgagaccatcctggctaacacgatgaaaccctgtctctcctaaaaatacagaaaattagacgggcgtggtggtgggtgcctgtagtcccagctacttgggaggctgaggcaggagaatggtgtgaacccgggaggcagagcttgcagtgaacygagctagcctgggcaacagagtgagactccatctcaaacaaacaaacaaacaaacaaacaaaaaagggcaaaaaggcaagctgaaggggcttgctggaaaactatggatggcctaagtgtgtgaagctctctgacacttgaagtattacaaaacaagacaaaggtccctgga

SEQ ID NO: 510769 - DNA, 510 bp, Homo sapiens
tcaaagaaagcaacgcattatttgtccatttagaacaatttcagaaagctgttttcaacccccartggtatttttctgcagccttctaatctctgcaaagggtttaaaagatataataacccatgcttgtatcgggcctgaggttaccaccagagcatggagacacagtgagcaagttcatgtgaaaggaattagaaccattagaattttatttcctgcagaatgtagcaccatggcacataatcatatgtggctgtcttggctcaaagtcagcaacagtatctactatttgtttctcaactacatgacaaatattataagataaaaaccagtgctgtgtgtgttccttgcttaactaaagagttggaaaccaactattaggtgaatttctatcttaagcattttatcttacagagcggctgagactggctagttttatgagcttgtaatgatatgaaatacaggcaacacagtctttctttttgacttaatgctcaaaccattttggtt

SEQ ID NO: 510770 - DNA, 620 bp, Homo sapiens
atgtccccatgttgtttattctgcaacgattttttttttttttttttwagacagagtcttgctctgtcacccagagtggagtgcaatggtgcaatcttggctcactgcagcctctgccttctcagttcaagcaattttcctgcctcagcctcctgagtagctgggacaacaggcacacaccaccactccttgctaatttttttttctttgtttttgtatttttagtagagatgaggttggtcaggctggtcttgaactcctgacctccctcccagtgatccacccgcctcggcctcccaaagtgctgggattacaggtgtgagccatcgcgcctggcctattctgcaacaattcacattttgaagggctaaactattttccttctctttgttatgaaactccaattttacacaaaatactgagttttatatagaaagtggtcatccttcccgttccatctggatgttgcctggctccctttaagtctgcacaaagacaagcaggtgtcaggcaaatgcagcaggatcgtgttgcggggcagaacaccactggcccaagcgaggagaggagctgtatcaccttgggccatctacctggtcactcgtcacgtgacaggttct

SEQ ID NO: 510771 - DNA, 512 bp, Homo sapiens
taactagtcttccaattagttcatactcccttgcaacaatatatctgggatcattttttttcctgtgattgcatttttttgtatttaataaattttctttcaagactcattcaagtgtcaactgcccagtgaagccttctctgatctttctagaagaagaaaaggcctcacctcttctctcttaggccatgggtatatctctggtaaaacacatgactttgtgcacayatttgagtacccctttaaactttgaactttttaaaggcaaaacccatgccttccttttttctctagatacacttagtgcctggcacacagcggaggttcagcaaagaactgtttaatgaatggactccaatcactgactccgaatattataattgaagttacagttccttgggtgatcatttctatctactttgattatagaaatgagtataactgaagataagttatcttttcttcagaatcagattcacttcatttgccttataaagacaaatgtgccagat

SEQ ID NO: 510772 - DNA, 604 bp, Homo sapiens
aaaaatgaatatgaaatacagattatgttctaaatttctaaaattccttattaagaccaatttgtaaattatgatttttctcctccatctttagcggttgaaaaattgaagaaaaaatatattaacatttctttactgagaaaatattttgtgactacaccaatcctcacctattttaaatccttactgttaacattggtatgatggaagagacctccattatagtgtgctatgctatatgttatttttacttgaatttgggatacagatgatacaatagttaakacttgtttggtgcttattatatgccagatgcttttatatgaaatttgactattgaaatccatataattctctcaaacaacctgtgaaatttacactagtattttcttcactttgtaaaacctgaggtccagggagttttaggttataacactatgtgaagaaaatattcaaaccctatagagcagtgatattaaccacactactacagttagtttgtggatatatcatggattgagatatttatgtgaaatgttataaccatacataatagattacaaatacaaaacagtacttcttgtcactaaatcaggcaattatt

SEQ ID NO: 510773 - DNA, 604 bp, Homo sapiens
aaaaatgaatatgaaatacagattatgttctaaatttctaaaattccttattaagaccaatttgtaaattatgatttttctcctccatctttagcggttgaaaaattgaagaaaaaatatattaacatttctttactgagaaaatattttgtgactacaccaatcctcacctattttaaatccttactgttaacattggtatgatggaagagacctccattatagtgtgctatgctatatgttatttttacttgaatttgggatacagatgatacaatagttaatacttgtttggtgcttattatatgccagatgcttttatatgaamtttgactattgaaatccatataattctctcaaacaacctgtgaaatttacactagtattttcttcactttgtaaaacctgaggtccagggagttttaggttataacactatgtgaagaaaatattcaaaccctatagagcagtgatattaaccacactactacagttagtttgtggatatatcatggattgagatatttatgtgaaatgttataaccatacataatagattacaaatacaaaacagtacttcttgtcactaaatcaggcaattatt

SEQ ID NO: 510774 - DNA, 583 bp, Homo sapiens
cagtctcaagtacgtcttctctaacaactaaaatgagaggttcatatatcaggaaagaaatgtaattacatgtggggaaaacaagaattaggaagtggtaaggaagagaggagttggtcaatagcaagcaggtggttgtttaggcagtaaaaacaggtgagccatctgctgtctcattgtctagatgcagtgatctggtaagtttcagttccttgatactctctagaaggcctgataggaactctaaaaasacaaatgcaactttctcaagttttaagacttggaaggtaaatttctatgtttattcagaatgaaccataaacatcagctctatgggacaactgggctgattttactaccacttagcccctcggaaaggtttacctaataaagcaggaactcaggcggagggagaaaatttcagaagtctggtacaaacaatggaaaaaacggttgaaagggagaggcaattttgagtacttttgtgtgcgtgtgtcactcagattgtcttctgacccagttgatagtgacttgtaaaaaaggcttggacacaagaagataaaggaaaggtggtgtcaaagaa

SEQ ID NO: 510775 - DNA, 570 bp, Homo sapiens
ttggtatatctacaaagcatacataatctaatattgtgttgccattattattttgaacaaactgtatcctgttaggtcaattaagaagaaaaaaattatagtatatattttaacttcactcattcttactctgatgctcttcctttctttatgtagatctgaatttctgacctataacatttttcttccctctgaagaacttcttttaacatttcttacaaagcacgtccactagcaacaaatttcctcagttttcatttgtcccagaaagtctttacttttctttcacttttgaaggataactttgcagcgtacagaatttaaggcttacattgcccatctgttcttgcatactgtctactttatcccttagagcctctagcatattaatcagggctgttttaaatttctaatctaataatttcaacacttctaccatatctgagtctgggtctgatgatttctctgtctcctcaaactgtgttttttgccttttagtatgtcttgaaatttttctttygaaagctagacatgatgtactaggcaaaaggaactatcgcattgaaatgc

SEQ ID NO: 510776 - DNA, 630 bp, Homo sapiens
aatccacgcctgagttggttttctgtatcatttaccctacaagtggatttgaagctggcatgctctttcttgagtccctaaatgccttgaggataaagtgtccacatagcctgacagggcagaatctctccagctggggtttccaggaagctttgagcaagaggtgtggaaatcagagcttcagcagctgctgcctgctgggaacaataagctgtggccctcccttcaagcagagttttgttttctgctggtgtcatatcaaatatgccatcagtgtctccatggtccagcagtaaccagtgagtagcctcacagcaacaagaagccagagaattaagkgtctcaaggtcaaggaagcagggccttcttggatcagctatggagcattaccttagccttgttggcttgggcctagggagagctatacatcacatcctaatgagcaaatatgaaaggatcagagaatgatgaaatgacttctgctcagaaggtcacagagtaatggctctcctgatgttgtcttgagccaagttacaacaggacagaatctgctaatcttgaaagaaaaggctttgtcatatgtcagtgttcatctttttttctctcacattctcttcctcaccaaaatca

SEQ ID NO: 510777 - DNA, 630 bp, Homo sapiens
aatccacgcctgagttggttttctgtatcatttaccctacaagtggatttgaagctggcatgctctttcttgagtccctaaatgccttgaggataaagtgtccacatagcctgacagggcagaatctctccagctggggtttccaggaagctttgagcaagaggtgtggaaatcagagcttcagcagctgctgcctgctgggaacaataagctgtggccctcccttcaagcagagttttgttttctgctggtgtcatatcaaatatgccatcagtgtctccatggtccagcagtaaccagtgagtagcctcacagcaacaagaagccagagaattaagtgtctcaaggtcaasgaagcagggccttcttggatcagctatggagcattaccttagccttgttggcttgggcctagggagagctatacatcacatcctaatgagcaaatatgaaaggatcagagaatgatgaaatgacttctgctcagaaggtcacagagtaatggctctcctgatgttgtcttgagccaagttacaacaggacagaatctgctaatcttgaaagaaaaggctttgtcatatgtcagtgttcatctttttttctctcacattctcttcctcaccaaaatca

SEQ ID NO: 510778 - DNA, 551 bp, Homo sapiens
ctggaaaatgagagacttcgatcacttggtgkctgcggtctgtttcactctgacattcaacaatattgttgctctgtggcctgtaaagggctgaactcctgggaagtgttggtgtggctacctgttccttgagcccctactccatctggttctgctgtcttcaccgtgagacctattagtggccagaaaagcaaatcatgcacaatacagaatcaggccacccaagtctcagtgaccaccaacacatgcacgtatactgccacccaccagggcccggctcctaggagcctgctacttccacccatgttcaattgttctccacgtagagataggcaggggcacctggcttaactctgaagctccgtggtacataagtaaaggctctctgtctctccccttccttctctagggcaattgtgggtgggtgtgaatctctcttatgtggatccttctgtgcctgatgtaaaatgcaggaggatggaatgagctgtgttgtcaagagggcagattcagagaaccacttccctccgggcacacttggattggcttcc

SEQ ID NO: 510779 - DNA, 574 bp, Homo sapiens
accttctcagagagtgcttctctgacctctaaaataaactagccactcagctacttactatcgcatcactcatttaaaaaaaacttttcatcttaaagtaactatagattgatcagttgaaaaatcacacagagaggttgttcttgtggtgtttggttggggtagagtggttattgtctaaaagtttctgtcttgctggattgccccttttcctagtcctgtggctagagaaaataggtcttrattatttgtttgtttatgtgcccctcagcatttccatgtggttggcttctccagcacacagtttgagatttatgaagcaaaagaaaatccagggagtgcatgagcatgtcgttccttgagttctgagatgccctagttggtccgcctttttctatctcccagtctcttcatatgtctgtggttttatacatatcgtccaggatatatatatattttttttgagttggagtttcactcttgttgcccaggctggagtgcaatggtgccatcttggctcactacaaccttagcctcccaggttcaagtgattctcctgcctcatcctcccaaa

SEQ ID NO: 510780 - DNA, 574 bp, Homo sapiens
accttctcagagagtgcttctctgacctctaaaataaactagccactcagctacttactatcgcatcactcatttaaaaaaaacttttcatcttaaagtaactatagattgatcagttgaaaaatcacacagagaggttgttcttgtggtgtttggttggggtagagtggttattgtctaaaagtttctgtcttgctggattgccccttttcctagtcctgtggctagagaaaataggtcttaattatttgtttgtttatgtgcccctcagcatttccatgtggttggcttctccagcacacagtttgagatttatgaagcaaaagaaaatccagggagtgcatgagcatgtcgttccttgagttctgagatgccctagttggtccgcctttttctatctcccagtctcttcatatgtctgtggttttatacatatcgtccaggatatatatatatwttttttgagttggagtttcactcttgttgcccaggctggagtgcaatggtgccatcttggctcactacaaccttagcctcccaggttcaagtgattctcctgcctcatcctcccaaa

SEQ ID NO: 510781 - DNA, 637 bp, Homo sapiens
caaaggttgccagcaaaccatcagaagctaggaagaggcaagaaaggattgctttataggtttgagagggagcatggccctgctgccaccttgagctcagatttcttgcctccastactatgagcaatacatgtctattgttttcagccacccaatttgtgaaactttgacatggcagtctgggagattaatacagaattgtaatataaataagtcagtactagatttagctctggttattacatcacaaagtttaatgttctgaaacttctttggtgaataggatctagataatctacaaattcaaactaacttcattactcgaattaaactctttattacaaaaatctaacttatcctttagctctattatccattccttcattttagtcggctgagcacctgctctgtgccaagttcctgggtgtaccatcttggacaggaagtctgccctgtctttacagagcttagatcctagagagagagatttactcagtgccaattcttctccctacacttactattctcaagcacaccaacacaagctctatgatgatatgcttgagatatttttcgggcagtcacaaagtgctggagcccacttggcccctgaaccattggggatcaactcttaatc

SEQ ID NO: 510782 - DNA, 637 bp, Homo sapiens
caaaggttgccagcaaaccatcagaagctaggaagaggcaagaaaggattgctttataggtttgagagggagcatggccctgctgccaccttgagctcagatttcttgcctccagtactatgagcaatacatgtctattgttttcagccacccaatttgtgaaactttgacatggcagtctgggagattaatacagaattgtaatataaataagtcagtactagatttagctctggttattacatcacaaagtttaatgttctgaaacttctttggtgaataggatctagataatctacaaattcaaactaacttcattactckaattaaactctttattacaaaaatctaacttatcctttagctctattatccattccttcattttagtcggctgagcacctgctctgtgccaagttcctgggtgtaccatcttggacaggaagtctgccctgtctttacagagcttagatcctagagagagagatttactcagtgccaattcttctccctacacttactattctcaagcacaccaacacaagctctatgatgatatgcttgagatatttttcgggcagtcacaaagtgctggagcccacttggcccctgaaccattggggatcaactcttaatc

SEQ ID NO: 510783 - DNA, 525 bp, Homo sapiens
taccctctttaaatcttaatttcctgatgcataaaatgaggattattaaaaacaatcttttccttctactatacgatcacatgactatcaaaggtaatgtcagtgagacccttttctaaaccgtaatgtgctgctcaaatgtgaaattatcacctattagaactttatcttaatggaacaaggtttctcgccaagtaagagattctctttcacttgagtcacggtggccattcacactgggccttccatattagctggaggttaggatgagtgctctcaagggtctcctcaaactgggagatcatctggttttattcctgtgaaactcttcattttgcaggtaaggaaatcagagaggtaaggtaactttccccaatgtaattgctagagccagaactctcttatcataaatgrcatcatttttttttttctggaatcatgtgggcttcgatcttagctttatcttggcttcctttagccctttctgtcatcttattttgattgctgttttcttgcctactgacc

SEQ ID NO: 510784 - DNA, 588 bp, Homo sapiens
tttaccatagatatgaggaaagttctatctaagggatctcctttggcaatatattaaaactttaaatatacgtmactttttactgcaatttcatttcttacggagtattacagatatcccacatttacccaagtgaacatggaagcatggatgtgacacaacgaacagaaaataatactgcagtttaacaggaaggaaagttttccaaacatattacattaacaaataagtttgtagaacaatatatacagaacctctgatttttataagaatgtatgtatatatacatttatgtaaatatgcagccatgtaatgtaccccttttctctatcactcttgtcaatttagcctgaaatatattcctcatcacatgttcctttgagatttttatctttctatttgcttactatccaatgactctctcttctgaccagaatataggttccatgacagcaggatttatattaatttcatcactgatatcccctcagtacctggaatagcagttgactcataagaggcccagcaagggtttttcaaataaatgcaaaaagttatatggcattaattaactaattgattacacag

SEQ ID NO: 510785 - DNA, 566 bp, Homo sapiens
ttctgccactgtactggttgacttaaactatgttgccatccaaatttatgttgagccaaaacccttttattcacagtaatgcratggcaaacagaatattgtgacatccaggctatactgccatatcaatagccaacatctgtgtggtctttgcaatttacgatgtacttttacatcatttatcctatttaaacctcacaatatccttgtgaactaggaaagtgtgacctccttttggaggtgaaacagatatacagattacatgactcgtaaaaggtctaatggtggatctggaactatctggcttctacttccttcttcattgtcatcctcatcatctatgcttcaggatttgggtatctgtagaaacttcaggtggatttttcctattttcttatgtgagctgtgctgaagtttctacctttgcctatagcagagtcatttgaataacaccacacagcgctcctcctctaactacctttgattgaacaccattggtgctttgacccattgtacatgggggtcagcccaagttaattggcaattccaaaccaccattctctgtt

SEQ ID NO: 510786 - DNA, 566 bp, Homo sapiens
ttctgccactgtactggttgacttaaactatgttgccatccaaatttatgttgagccaaaacccttttattcacagtaatgcaatggcaaacagaatattgtgacatccaggctatactgccatatcaatagccaacatctgtgtggtctttgcaatttacgatgtacttttacatcatttatcctatttaaacckcacaatatccttgtgaactaggaaagtgtgacctccttttggaggtgaaacagatatacagattacatgactcgtaaaaggtctaatggtggatctggaactatctggcttctacttccttcttcattgtcatcctcatcatctatgcttcaggatttgggtatctgtagaaacttcaggtggatttttcctattttcttatgtgagctgtgctgaagtttctacctttgcctatagcagagtcatttgaataacaccacacagcgctcctcctctaactacctttgattgaacaccattggtgctttgacccattgtacatgggggtcagcccaagttaattggcaattccaaaccaccattctctgtt

SEQ ID NO: 510787 - DNA, 644 bp, Homo sapiens
cagtgacaattaaaggatacacatacatgcacgtacatactcccagtcactctagtgcatttttttttttatggagcaaatagaaataaatatacatacagcyaggctcagtggctcaggcccataatcccagcactttgggaggccgaggtgggcagataggttgagctcattagtttatgactagcctgagcagcatggagaaaccctgttgctacaaaaaatacaaaaattagccaggcatggtggtgcatgcctgtggtcccagctacttgggaggctgaggtgggaggatggattgagcccaggaggcagaggctgctgtgggccgagatcatgccactgcactccagcctgggtgacagtaccagaccttgtcttaaataaataaataaataaaatatgaattacaagtgtttaaaaaggaagctgggagtgtcttataggtttttatattaggtattgattttatacgtagtgcaagaatgtgaatttccgcatgtggaatggtgcaagttaggggttctgcattcccttggatgcctctttcccttcatatccagaggatcacttgtagagaaaacgcgggtttattttttcctgactgtgagatgcatagcctcagtttctaggcttacacaggc

SEQ ID NO: 510788 - DNA, 620 bp, Homo sapiens
ctgtttatccaaactcttccttcccacacccttgccagtagttgcaccctgatacggtttggctgtgtccccactcaaatctcatcttgaattgtagctcccataatccccacgtgttgtgggagagacctggtgggaggtaattgaatcatggggtaagtttttcccacgctgttcttgtgatcgtgaatacrtctcacaagatctggtggttttataaaaggcaattcccctgcacatgttctcttgcctgccattatttaagatgtgcctttgcccctccttcaccttctgccaagaggctgccccagccatgtggaactgtgagtccattaaatctctttttctttataaattacccagtctcgggcatttcttcatagcagtatgaaaacagactaatacacaacctcacctcccagcctcaccactatgtttcagaagttgaccacccctttggaacaaagtcaggattggtctaggccaatcatgatgctcacaactctatgtggcactttgaacggatgctgccatatcactaccagcttcaggataaaggcaatagatggaggactggagagtaagagaactacaaagagcatgagatggagcccagctta

SEQ ID NO: 510789 - DNA, 612 bp, Homo sapiens
gtatgtttggtctaaaagaaatctgacaagattgaatgctggggtgaagaaacatctgataaaatttaacacatggcagaagaaacaactgacaatagaatggttgacagagggarcatttaagaagattgcacattgggcagaaggaacaactgggaagattgcatggtcacagcagaaacatttaaacagatttcatggtgggcagaaatagtatccaagaagactgcatggttggcagagagaaaacctgaaaatgtgcatgacctgtaaaagaaacatgtaaaataattcaatatttggcagaagaaaacatctgacaagattgaatattttcccaggaaaaatgctgacaagatctaatgtttggcaataggaattttagtgattgtggatcagtagaagcctgctgaagcctcaattcttgcccccttagaagaaataattcaactgaggggcattaggcaaagtgagagaccgaggcaagttttagagcaggagtaaaatttattaaaaagtaagagcaagaaagaaacgaagtaaagtacacttaaagagggccaaacatgtgactttagatatcaagttcatgatttgaccttttacttgggg

SEQ ID NO: 510790 - DNA, 516 bp, Homo sapiens
tgctctgtgctgcttctgtctccacctgatagcatctgacctgtttggagccagtgtgaaataaatctatctaaagccaaggggaagagatccctttcactttgttaagttgtgctccttttgtaggttatttaaaaaaattgacaaatcaaatgctttaaaaataaaaaataaaactatttcattcaaatagcctccaattgtacaatgccttgttgttctaaagggggagaggtggagatatttagggtttcaaacctgatggwtgagttgctggacagagtaactggacggaaattgctcagcaggcatggcgcctgcaggagctcataaggcacctgtagtttctcctaggtgcttggccactaactcatcaccagggcatgctggcacatgctaaggagtaaaccaagtcctgggtgttgagcccttttcttctcctggctattggtggtcattatcttttcttctgaactagtatcttatgactgggattgagaaagagcaacttaataa

SEQ ID NO: 510791 - DNA, 429 bp, Homo sapiens
agctgcagtgatacacaggtccattaatgctcccctgggcacggagaagtggaaatgtctacttaaagctggagggctctttggccggggtgtcagagctgcatttttcttatgcaactgttttctcccggtttgtaataactgtgactgtcttgcagaaaacaacacactacagtgacaaccggctgatctttcttttttttttttttttttgagatggagtctcrccccgtcgcccaggctggtgtgccgtggcacgatctcggttcactgcaacctccagttcctgggttcaagctattctcctgcctcagcctcctgagtatctgggattacaggcatgcgccacgatgcccggctaatttttatgtttccagtagacatggggtttcaccgtgttggccagactggtctcaaactcctgatctt

SEQ ID NO: 510792 - DNA, 397 bp, Homo sapiens
ttcaccatcacccgcctccagcctgcaggctagaggagaggcaggaagaaatgtgtgttggaagaattgttgcccactgggacakgtgggctcaccgggagtccttcgagagagcttctcgccgtgtccatgcctttgtagctccccagtctgcggcatctctgcctgcctgagctggcaggtggggcatgaatctgttcctaggagccaaaggcacttctgagtggcaggacacagatgttcgcgttttcccttgggtaagaacacatcccagaggtgaccagactggggccatcttaaaaacccacccaagaggtctgcctgccactgttggaggacaccaggggccaccccatggcaggggagccggggtcccaggggaggacatgaggctcca

SEQ ID NO: 510793 - DNA, 639 bp, Homo sapiens
tcattgggagttcatccaatagctgtaagaaacaaagatagataacaggcttgaatatcatggagcagcaattattatgcaaatcaaaataaaacatcaaaatgattaagattttcagctcttagaccaggcacagaggctcacacctgtaatcccagcactctgggaggccaaggttggaagatcgcttgaacttaggtgtttgagatcagcctgagtaacacagtaatatcctgtctctacaaaaacttttaaaaaaaatcagcagggcatggtagtggcatgtgcctgtagtcccagctatttgggaggctgaagcraaaggatcgcttgagcctgagaggtcgaggctgcagtgagccatgattgcaccactgcactccagcctgggcaacagagcaagaccctgtctcaaaaaaaaaaaaaaaaaaaaaaagaaaagaaaaaaaggtttcagctcttatttcttttactaattctctttatatatttgtcatcaaatttactctgagtatgtgtgtgtagtttactgtttttgaacaaacaaggttatcatccaagtgtcctaatgtacatactaagcagggtacctgactcactattcctggagggcagacttgtcattgtgctgctcatatc

SEQ ID NO: 510794 - DNA, 614 bp, Homo sapiens
cttatatatgaaatactatcaaatactaaatttccatatgtaatcaggtatatttctagattttctattctgttccaatggtatatctgactaatttgaattttatttctctcttctcaaacttccttttctgtttcagttgctaaagattcacaatttcttttaaggtaggaagtatgaaaacaaaacgaaatgaaataaaacaagaggccataaccattctcatgctaaataattgctccatccatacaaaccttactactaaaagcaatagtgatttttttttttttttttttagatggagtctcgctctgttgcccaggctagagtgcagcggtgcaatctcagctcacckcaaactctgccttctgggttcaaacaattcttgtgcctcatcctgccaagtatctgggattataggagtgcaccaccatgcctggctaatttttgtatttttagtagagatagggtttcaccatgttggccaggctggtcttgaactcccagcctcaggtgatcctcccgccttggtctcccaaagtgctgggattacaggtgtgagcaaccgtgtccggccagcaatagcgatttttcagcatagaatgatcctaatt

SEQ ID NO: 510795 - DNA, 587 bp, Homo sapiens
agtcataattttttccttgactgctaacatctgctagctaaagcctgcacacatccccagagtgctggggtttgtaaacattacttgatgatgacaccctgaatattacgaaaatgtgtcyctcaatccacacccaaaaccctccgaagaacatttcatattttcagactgtggtcagcaggctttttggggatgatttgtagtttgttcactgaaagttaaatagattctttattaaaaatgaattcctgggccaagcttgcaggaaacacggtggccataagccactaggtcaatgtggaagtaaaatgctatagaaataaagttgttttatctcctgataagaattgctccaaattataagaatgtattatttatggaaataaacatataaatagccagacaggtatttatgtggcttttacagacctcaagactacaaaccacttttagaagtcaaaaataaaattgtaacatttctgccaattctcaacattcatgtaacattcgttcttctttttagcaacacagaatatacagtttgatgtgagaaaaaacatgcaacacttctaaggaagtaaaattta

SEQ ID NO: 510796 - DNA, 587 bp, Homo sapiens
agtcataattttttccttgactgctaacatctgctagctaaagcctgcacacatccccagagtgctggggtttgtaaacattacttgatgatgacaccctgaatattacgaaaatgtgtctctcaatccacacccaaaaccctccraagaacatttcatattttcagactgtggtcagcaggctttttggggatgatttgtagtttgttcactgaaagttaaatagattctttattaaaaatgaattcctgggccaagcttgcaggaaacacggtggccataagccactaggtcaatgtggaagtaaaatgctatagaaataaagttgttttatctcctgataagaattgctccaaattataagaatgtattatttatggaaataaacatataaatagccagacaggtatttatgtggcttttacagacctcaagactacaaaccacttttagaagtcaaaaataaaattgtaacatttctgccaattctcaacattcatgtaacattcgttcttctttttagcaacacagaatatacagtttgatgtgagaaaaaacatgcaacacttctaaggaagtaaaattta

SEQ ID NO: 510797 - DNA, 391 bp, Homo sapiens
ggttttcctcctatgaggatgctgtgtgtgccaagcacagagagagctcagaaggcagccgtgtaccaggttgcctcgcggtgggggtgtgctggacagttatcaggtgtttcatcacattcccacacagttctcaaagaagttttggaagcawtttcatccactggggcatgataatgaggaagagagttctcctggcctgtagcacatatctcctcaaattcgtcatcaccatcaaaaggttttcatttacacctttatgcatctagtgctttggtgtaacagtgtaagtggaaaacattgggggtaaaacactttttgggtgtgaaaacgagaatttccttggtttgcattgttttctatatccctttaatgccgcaacttggaaagt

SEQ ID NO: 510798 - DNA, 239 bp, Homo sapiens
tgattgcaaccaatgggaaacgcggaagttgaagatgtcagagatgacaaagaatgccacatgcgtgtgtatttgtttgtttttctctttgcatagtgcattttacaatgtgagcttgttctgttgtcatttyctactttttctttaaagagagcttgcgcttctcataaacactcctattttcaaacaaccatcaccgaaaaaagtaaaatctatttaatgagcatttggagtagttg

SEQ ID NO: 510799 - DNA, 613 bp, Homo sapiens
cacatacttgagtcccaccattagcccaaagcaaatcttcgatacaagaagtcagccatcaatatcaggtgtttcatattctgtgaatactgctctttccctctgcactcttggttgcagatgtggaaacatcagatacagagagacccctgtatttattgggaaaaaaacccctctcatattaatgggcccctgcaattcaaatccacattgttcatgggwcaaccttatttacatataaatgtgttatttttaatttttccattgtaagctttaggtattacttctttgtaatttttccaatttatattttaattcttagaaatcatctgaaggaccctaaatcttttatgtgaactttaaatatttcttctcttcctccagaagatcctattgggaatttgataagattgtatattatatctatattaatttgggacgaacaaaaaatttaaaactagtaagacttccacctcagaaaagaaagtatgtctcactattgcaaggttttatttatatctcttagtaaattttgacagtttcatttgaatatttacacttagccttaggtatttgaaatggaattttgagagaggcctggagaagaacttga

SEQ ID NO: 510800 - DNA, 613 bp, Homo sapiens
cacatacttgagtcccaccattagcccaaagcaaatcttcgatacaagaagtcagccatcaatatcaggtgtttcatattctgtgaatactgctctttccctctgcactcttggttgcagatgtggaaacatcagatacagagagacccctgtatttattgggaaaaaaacccctctcatattaatgggcccctgcaattcaaatccacattgttcatgggacaaccttatttacatataaatgtgttatttttaatttttccattgtaagctttaggtattactyctttgtaatttttccaatttatattttaattcttagaaatcatctgaaggaccctaaatcttttatgtgaactttaaatatttcttctcttcctccagaagatcctattgggaatttgataagattgtatattatatctatattaatttgggacgaacaaaaaatttaaaactagtaagacttccacctcagaaaagaaagtatgtctcactattgcaaggttttatttatatctcttagtaaattttgacagtttcatttgaatatttacacttagccttaggtatttgaaatggaattttgagagaggcctggagaagaacttga

SEQ ID NO: 510801 - DNA, 647 bp, Homo sapiens
ggagctttctgtaataggcaggggcaacaataatctgctaaattggggcaggggggcagggagggtagggttagataaataaaagggcataacataatttggttgcatcaggaattttttcacagacattaaaactatggtaaacataacagcggggaagcttgcactgccgcacagtgggaagcttaaagcgtctgcctgcactgtgcctggctcaactacagctagaagtctccgactttcattagcactcaacaattcacccagttccccagaaaaggaggaaacccaaggcagcaaagcccctcgctaattattgtaaatgctcccaggttacagtatttgggtgacaataatggcaagagggtgtgaaactagaaccaaagagtcattctgaaatgaaaaagaatgaaggagttgtttgttgcttgttatttttatttgttttaaaccagkgtagcccttcgtttgatgggtaaagcagtatgttggaatattaggccaccattttacaatgaaattttagaagactgcaccaaattgtgtgcaacttcttttgagcaacggaagtacaggttaatttcacaaatgacctcctccccttggcctccaaatttatgtgagtatatttcacaagtctctgcaac

SEQ ID NO: 510802 - DNA, 615 bp, Homo sapiens
ttccctatgacatttgttgaataaaccaccactctccattgatttgtggtactgccttttttgtgcagattgcctgcagtcagccacacaccctggtatacggtactgtgctgataatctctatgtatgtatgtatgtgtatatatatatatattttctttttsagacagagtctcactctgtcacccaggctggaatgtagtcgcattgtctcggctcaatgaaatctccacctgccaagttgaagcgactctcatgcctcagcctcccaagtagctgggattacagtcacgcgttaccatgcctggctaattttttgtatttttagtagagacggggtttccctatattggccaggctggtctcaaactcctgatctaaagtgatctgcccatctcagcctcccacagtgccgggattacaggcgtgagccactgtgcccagcctctgtgtgtattttgattcagtactctgctgtttaaatcactgtaactttactgtatattgggatatttctcttcccattttttttttcttttgtttagacgtaagagaaaattttcaggtgaactttttcagatgaacaaaatgaccctgagaaagactgaaaatttg

SEQ ID NO: 510803 - DNA, 539 bp, Homo sapiens
gcctcaaatcttcagggacaaaatcggtgcaggcttattaggaagagaagcggcaagccttagaacaccaaccaaaaatccatagaaagacatgattttattgctggcatcccactcacagcacttcacggggactgcagaggctgccatgtttctttggatctagttgagagaggaagacaactcacttgataaagtacaaggagagctaagttcagaaatgccatatttaaagggcagtatatgccaccgtcttctccccctgctccttaatactaaggaaagcctgagggatcttatgaaggaagacaaaggaagkccagtgttaataggatggtcttttgccatttttgtttcatgagatgacttcagctcaactctccttcaaacccaattactagccaggctctgattttgactactcaaatccaaagtggcccacattatatccaccaacaattagatatactacaatgatgactggggataagggggctataagtggttaaggaggaagaagagaattccagatacttctt

SEQ ID NO: 510804 - DNA, 622 bp, Homo sapiens
caacaaccacaaatagggggtagaatttcctgattacctgcttatactaacatgttgctatactgaagatgccattactgtcatctttccagatgttgcaatattcttcccgtatctggggggtagatcaaaaagcgtagtagcaatgcagatgcagcagtttttagctatttccacctccttgtacatggtggcagagtggacaacctagaaaagaggaaggtccaagggctggtgtatatacttctgggaaataataaggcacatgaaaattacttttctgatgtgcaaatgcatcartaagtgtaagcacatatatgtttatgcataatcaggagcagaagcaagaagtgaggatgcaggcagcagtttaagaatcccaaagccctttcaaaaactgggacagatccaagcattgatgcctaccaaaatagaacaagtgaccaaagtatacttacttagaagcaaaagactgatatgataataataaaccacaaagacatgcactaaatgcaaaccaaagagtgattttttaattgtgtaggatgtggaccacgtgttttacatcactgggggagggggtctatagtaaagatttggacaatatttaactgacttgcag

SEQ ID NO: 510805 - DNA, 577 bp, Homo sapiens
ataaatcataataagcaacttgtctcattggactctgatatgacatgtatatgtgaacaaacatatctgcaaagaacaatttaaaggtttctgttgtcatcacaatcatcttcatcatctttatcaacaccattgtaagcactatcatcaaatgaatattattttcatcactgaatataccaaaactataagtcataaggaggcaagatatacatggcccaatggtatacctttgagagaaaataaattcttctgaaggttaaactttagtgatggactgttgagatgggctgagttcatagagaggtcagacataagatggacattgaatattaaagaagaacataaaactattctaataatttagaatgaaagcctgtagacagaagacctgtagatgaaggcctgtagacagaaaatatgcagagagyggagaatatttattagatcaatttaataaaatacaaagtttatgcaggagagcacgatagtatttgatacatagaaaatggaaatatatagaacgatttacatctggataaattatctgggactttatcctatattcatggggaac

SEQ ID NO: 510806 - DNA, 549 bp, Homo sapiens
tgcagctacagacatcttccttccttccactgttagaagaggattgtgggggtttagtaacaaacttttatgtatactggtaaggcraaaaggagcaggtgcaaaagaacatcttacacaagggggtgaaagagtcaacaggcagaaccaaccctcactgaggttcctgtggcaaagacagagaaattaaagggaggtcaaatgaataccatttgtgggcaagaggcagatctcttgcaggtagatgacaatggtatgtgaaggaactgtattctaggacaactaagcataaagaaatagtgggaagcagaatcccaactcagagggagaggatgaaagaacatttattacatttccctacccagtgttcatgctgtccctgttttggtagagaaaccttgctgccctttgaggaatcttctaggttatgtgtttaaggtgttgcagaaactgttccctggactggtgggggtgggagggacaaatgacccaggtccagccagagggaattttttcagcttttgctgaagtaatttagaaagtcacttt

SEQ ID NO: 510807 - DNA, 549 bp, Homo sapiens
tgcagctacagacatcttccttccttccactgttagaagaggattgtgggggtttagtaacaaacttttatgtatactggtaaggcgaaaaggagcaggtgcaaaagaacatcttacacaagggggtgaaagagtcaacaggcagaaccaaccctcactgaggttcctgtggcaaagacagagaaaytaaagggaggtcaaatgaataccatttgtgggcaagaggcagatctcttgcaggtagatgacaatggtatgtgaaggaactgtattctaggacaactaagcataaagaaatagtgggaagcagaatcccaactcagagggagaggatgaaagaacatttattacatttccctacccagtgttcatgctgtccctgttttggtagagaaaccttgctgccctttgaggaatcttctaggttatgtgtttaaggtgttgcagaaactgttccctggactggtgggggtgggagggacaaatgacccaggtccagccagagggaattttttcagcttttgctgaagtaatttagaaagtcacttt

SEQ ID NO: 510808 - DNA, 549 bp, Homo sapiens
tgcagctacagacatcttccttccttccactgttagaagaggattgtgggggtttagtaacaaacttttatgtatactggtaaggcgaaaaggagcaggtgcaaaagaacatcttacacaagggggtgaaagagtcaacaggcagaaccaaccctcactgaggttcctgtggcaaagacagagaaattaaagggaggtcaaatgaataccatttgtgggcaagaggcagatctcttgcaggtagatgacaatggtrtgtgaaggaactgtattctaggacaactaagcataaagaaatagtgggaagcagaatcccaactcagagggagaggatgaaagaacatttattacatttccctacccagtgttcatgctgtccctgttttggtagagaaaccttgctgccctttgaggaatcttctaggttatgtgtttaaggtgttgcagaaactgttccctggactggtgggggtgggagggacaaatgacccaggtccagccagagggaattttttcagcttttgctgaagtaatttagaaagtcacttt

SEQ ID NO: 510809 - DNA, 549 bp, Homo sapiens
tgcagctacagacatcttccttccttccactgttagaagaggattgtgggggtttagtaacaaacttttatgtatactggtaaggcgaaaaggagcaggtgcaaaagaacatcttacacaagggggtgaaagagtcaacaggcagaaccaaccctcactgaggttcctgtggcaaagacagagaaattaaagggaggtcaaatgaataccatttgtgggcaagaggcagatctcttgcaggtagatgacaatggtatgtgaaggaactgtattctaggacaactaagcataaagaaatagtgggaagcagaatcccaactcagagggagaggatgaaagaacatttattacatttccctacccagtgttcatgctgtccctgttttggtagagaaaccttgctgccctwtgaggaatcttctaggttatgtgtttaaggtgttgcagaaactgttccctggactggtgggggtgggagggacaaatgacccaggtccagccagagggaattttttcagcttttgctgaagtaatttagaaagtcacttt

SEQ ID NO: 510810 - DNA, 524 bp, Homo sapiens
gttttctctttaaagatgctaagcatgccaccagaaaaatcaagccattagataaacatagaaaaatagtaatagttaagaatacattttttaaaattttcacagctctgtgcttgtgaaattatttccattacttaaaaatagtggaatggcttttgaatcttctttatgaggactaaacacttatccacacaagtttccttccattgcaaaccctgctgatgagaaaattaggattatcgttaaacccacatgctcaatttgaccttaaatctattaatagtatttttgttctgttttccactctctttcctacttctaccccatctcatcactacatgatgcaatgtagtctgagataggcccatatcaagcaagttaaattttagatagactagtagctacagaaaaggctatctatagggccacattattaaagttastaagcagttagttggagagaggaaatgttagcattcagatgcaagaaattttaaaatcatactttgccaaataaaactgtt

SEQ ID NO: 510811 - DNA, 537 bp, Homo sapiens
tctcaggtgaatgctggtttccaaagtggtattacatacatactttcttatgtatgtttctttctttctttctttctttctttctttctttctttctttctttctttctttctttctttctttctttttctttctttctttccttctttcaracaggatcttgctctgcttgctctgtgcaactgctctctttctaaactaccaggaagaaaaattgtgaagcatgtttaagagtgaaaaagctgacttcaggtttcttttctatagttacaagtcttttaatgatcttgtttaaagtagatgcacatctattctgtgaagaaaaaccacgatgcgataccatgttcttcctgcagctattcacttccttaaggagaaggggaaaaaagtttcttggacttaaaacatttggattaagggggtcggcttattatagtgctgttatctcccccacttccttctgcctgcactgagcacaaagaaatttctttagaagtttagaaggaaaaggacatctcccttgggttgtccttgagc

SEQ ID NO: 510812 - DNA, 629 bp, Homo sapiens
acccaaagcttctgacaacaaaggttatgatgagaccacagttactacctgtgactctactatcagaaagcaagaaagacaattttcagatgtgcaatatggtgggatgcattttcttgatagctttgcgggttctgttgaagaagatagagaggattctatgttctagttctgattttcagggtccattctctcccggcttccccatcacaggagagcgmtaagaggactcagtgtgtcagcttctagggggaagaggtcacagcggcacctgagggcccacggacaaacactcccagggtagagggtggggagcttagctggacagggctgcccttgcttttccaggcttttgagtggaccccagtttttattgctttgtttttcttggttatatggataggaaaacaaagagaaaataaagatgctcttaaggccctgagtggaatgaggagggtgtggcctgtgggtgcccagaggcagggacaacctctactccacacttgccccactcactgggcctgcccccacaccctaaattataccctaatttaaggaaagaaaagcacagacaagaatccaaagtttcaaaacatgtcaaaaaatcaaagcttaggaaaagtctccag

SEQ ID NO: 510813 - DNA, 328 bp, Homo sapiens
gctgttactttgggaagtagcatgagactccatctcaaaaaaaaagaatgtaartgtttatcacatgcgtatgtatttatgtttctctagggtggcttatctgcattcaaaaaatttcagtaaagcagatgttgcacagatggtcagaaaagcaccatttttgctgaacttttcagtggaaagactggataacagattgggattttttcagaaagaacttgaacttagtgtgaagaaggtaaagaaaaggagagaatttgtttatttccatgtcaggtacattttaatagctgatagatctcatgttcccagcagatgcctggcccat

SEQ ID NO: 510814 - DNA, 596 bp, Homo sapiens
ctgtccaggacctgttgagaccctttctcaaagacgaacaaacaaacagcccctaccttttgtgaaaggagctgagaatagctaagacaattgggaaagcgggcttggggatttctttgcaggtctatccctgcttgaggctgtcagtgcccaggctcgcttcctgtccggccattctcaatgtcctgttcacactggtgttttgactgctgcaccccagcccctcttgattaccccaagcgctgcctgaggctctgtgtcaaccacccagactagagagggggtacctgttttgccagccagcttggcgtgggcctccaaccacgcccttttggccaaggtggttctcgtacacacctgctgcaaccagaccagtcactccccgcccagtacaccagcctgtggtcctcactggctgcacgyggcatcaccatctgctctggatcgccatctcgcccacgcaagggccgccctccaggatggtcctccagcacttctgagccacagtgagcgctccctccttacatctcccgaagcattcactatagcaaaaccttgtacgtctgcggaggatggcctcagaaacagctcacgca

SEQ ID NO: 510815 - DNA, 454 bp, Homo sapiens
ttttaaaatgccagagaagaaagtgtggcacagagagaaagagaccttatgttttaagacatatactatgctatttacagatcaaattacatgatgtctgggacttgctttaaaataatggagcactgaaagaaatcaaagaggatctaaatatggagagacattctgtgttcatggattggagggctcaactggataaagatttcagttgcttccaaatggatgcataggtttaatgcaattcctatcaaaattccagcaggactttttctaacctgggaaatcagtcaaargtcaggtcttcatgtacaaacaagactttgtggtcacaattactttaaaaagtaattacataaaacatggctgcgtcatgatttagcagtaagtgaagcatggtttctgacacatggtagtgttatgttaggcaaatgtgaaatgccagggatgtgaacag

SEQ ID NO: 510816 - DNA, 538 bp, Homo sapiens
agggttcacagtcctatgagaataaaatgctgctgttgatctgaccggaagtggagctcaggtggtaatgctcactctcttgctgctcacctcctactgcgcgaccaaattcctaacagacaatggagcagtactagtcyatggcccaggggttgtgaacccttgaaatagaatacagtctagaaatagaccataatatatgggtttagggaaggattattcagtaagaggagatgggatcttctattcttttagttttggggaaaaattaaatttcattgtatcaccacattacttgtcaaaattaatctgagatgtatcaaaaacagtggttttcatattttgtgaccctgtagcaggatagtttttatcaaaaggaaacttatttgaaatttaagtacattgttctatacctaacaaataaaaagagagatcttctatggtttaaaacagacaaaatatcagagatcatacttaaaaagacccagaattaatgagtgaaataaaaagaggggtgggggaaatgtgagatgttagc

SEQ ID NO: 510817 - DNA, 538 bp, Homo sapiens
agggttcacagtcctatgagaataaaatgctgctgttgatctgaccggaagtggagctcaggtggtaatgctcactctcttgctgctcacctcctactgcgcgaccaaattcctaacagacaatggagcagtactagtccatggcccaggggttgtgaacccttgaaatagaatacagtctagaaatagaccataatatatgggtttagggaaggattattcagtaagaggagatgggatcttctattcttttagttttggggaaaaattaaatttcattgtatcaccacattacttgtcaaaattaatctgagatgtatyaaaaacagtggttttcatattttgtgaccctgtagcaggatagtttttatcaaaaggaaacttatttgaaatttaagtacattgttctatacctaacaaataaaaagagagatcttctatggtttaaaacagacaaaatatcagagatcatacttaaaaagacccagaattaatgagtgaaataaaaagaggggtgggggaaatgtgagatgttagc

SEQ ID NO: 510818 - DNA, 492 bp, Homo sapiens
aactgctacaaaacttttagcaaaactgagttttaaagatctagaatgttgtccatcaactggtctagaatggagaccataaactgatggccaaatcatcccacaggcatgttttgtttggccacactagggttggcttgtggagtgcttaaaacgtacttaattagttcccaacattgaaaaatcgggagatttcacrtaaaaaatccagatttctggcattacttgacctagtcacatggagtctgcattcccacctggcaatcatctgcttgcagctagagggcagttgccccatctagatggggcaagccaactccagttctcatccctaccattctccaccaggcctgcttcacctgtctccataaaatgcctggctttggtaagcctttgaagttgggatctttactttagaactacactgtgctaagaagtgtagggaaaaacaggaaaaggataaagcatttgtaagtcttcctgcgttatcct

SEQ ID NO: 510819 - DNA, 443 bp, Homo sapiens
gcttatgttaaatccttatagctcatagctatgctcttctccaagtttgaattgactaaattttgatttatattgaatttattctacatattaaaatttagaaagtcaacatctgtaaaatattgaggctcccaatctatgtatttagtgcttaatttctctcagtgatacattatagtcrtcaatgtggagatctcatacaactttagatttattccttggtatttattatatgtaacgatattgtaaataatattttaaaccttattatactgtttgtccctggcttataaagacactactaatttgtaaactatgtatccagtatttatgtctttagttcatgtttcacatttcaatacactgataaagactatagtatgatatacatgataaaatacttgcagccataaaaaaagaacaaggtctcatgtcctttgcaa

SEQ ID NO: 510820 - DNA, 523 bp, Homo sapiens
gcaaacattcataattggtaatgaagaagtgctttccataatacaaatattctgcacagagcaaaaaaaaaattatccaaatcttcttttgaaaatgatagtgtttggaaaaaagtatcaacactaaattaccaaatatttacatttcacccttcccctgtggtttggctgtgtccccacccaaatctcatcttgaattgtaatccccataatccccatgtgtcatgaaagggacccaatgggaggtaattgaatcttaagggtggtttcccccatgctgttctcctgatagtgagtgagttctcacaagatctgatggttttattagtgtcttggcatttcccatgctggcactcattctctattctgccactctgtaaagagrtgccttccaccatgattgtaagtttcctgagactttcccagctatgtggaactgtgagttaattaaacctcttgttttataaattacccagtctcaggtatttcttcatggcagcatgagaacaaactaatatagtaa

SEQ ID NO: 510821 - DNA, 478 bp, Homo sapiens
ttcagaaaaatgcactacaaaaacttgtgttcgtcaagccaagtttgttggagttctacttagagaaattataaaaaattgagkgcactgtttcttgttacctaggactataaattacttattttcaatttaaaattctgtgtgtgtctgtgtgctataaaatttggcaggaaatgtgggctgagcctaccctctttattcattttctcactgcccctgccattgatagatatgtggatgataatcacagctacttccaggatgatagttgccagcaatatttatcaacagctactagcatatcatcaacagaaggaatttcctcaagtgaccaatcagttgatgatgacactccaattatttctctagtatataatcaaattttactattaataaaataaattgcttaaaatttctccacaaatactgaatatcaacttctgggcctcaataacaaaaagatctactattgagtttc

SEQ ID NO: 510822 - DNA, 630 bp, Homo sapiens
tagagtatatttctcacactcttgagtgtatgagctttaagaaggcccaccttatacagtagaattagcgcatttttaatttgcaaccacaagccaatgtactcataatctttttcttggcctttgccttcaatataggctgttctgagtggctgccaatgtaaccataggggtgagctgagggacasggcccagtgcaggggtgtctgataaattgaaattctaagccactttatgcaaattacttgtagccctaactttgattctgcccaatttcaaatactttccttcaaccttggaatagatagctggatctacatgaccacatgatgtggagggtctcacagaagccggatcataaaggatgggctgcatggtcacttgatatcccatgatcagcatttctctcatggctaagtagcattttaagatattttttgagtgacgtatgaatgtttttctttcaattttgttttctttttttttctttttaaagtctttattttgtagccaagtctatcagttttattttttatttattgttttgttttatgtttccttgtcttttttttatttattctaaaaaaaaaaagatgcttgtgcagaatgtgcaggtttttttccatcaga

SEQ ID NO: 510823 - DNA, 630 bp, Homo sapiens
tagagtatatttctcacactcttgagtgtatgagctttaagaaggcccaccttatacagtagaattagcgcatttttaatttgcaaccacaagccaatgtactcataatctttttcttggcctttgccttcaatataggctgttctgagtggctgccaatgtaaccataggggtgagctgagggacagggcccagtgcaggggtgtctgataaattgaaattctaagccactttatgcaaattacttgtagccctaactttgattctgcccaatttcaaatactttccttcaaccttggaatagatagctggatctacatgaccacatgatgtggagggtctcacagaagccggatcataaaggatgggctgcatggtcacttgatatcccatgatcagcatttctctcatggctaagtagcattttaagrtattttttgagtgacgtatgaatgtttttctttcaattttgttttctttttttttctttttaaagtctttattttgtagccaagtctatcagttttattttttatttattgttttgttttatgtttccttgtcttttttttatttattctaaaaaaaaaaagatgcttgtgcagaatgtgcaggtttttttccatcaga

SEQ ID NO: 510824 - DNA, 651 bp, Homo sapiens
ctctagcgaggctttttgtgaaattgtaggaaaacaagtctagtaggtcagagatcgcatttgctcgtgtaagggattaataaagctcttgtctgatgctgctttttagaattacgttcgggattaaaagacagactcaacacaggcacacattttgcatccgctggtggttgtgattaatttttccgaggggatttgggccrggagcttacggaacgtgctctctgggtctaaaacccaacgacctcggcgcacgggcgagcggagggtctgggggcactgtgggtacgcgccagaacactgggggattagagaggacatcggacgggcgcggagttgccagccactgcggcctttcaatgtcccttccctccctttccccacccccagcgcaactgcttctgaaaaaaaacggtgaagactgtccggggaggctgtctttagggttttggagagaagtggggggcgggggagagagaaagagagatacttttgactgtcatgacttttcgaggggagaaaggggctcagtacaaagccactgaactttaagcatccgtctagcaagggaaatccccagctctgcattccagggaagcgctgccccaagtgcataactcaccccccaatcaaacagtcgccgtgccccgt

SEQ ID NO: 510825 - DNA, 651 bp, Homo sapiens
ctctagcgaggctttttgtgaaattgtaggaaaacaagtctagtaggtcagagatcgcatttgctcgtgtaagggattaataaagctcttgtctgatgctgctttttagaattacgttcgggattaaaagacagactcaacacaggcacacattttgcatccgctggtggttgtgattaatttttccgaggggatttgggccgggagcttacggaacgtgctctctgggtctaaaacccaacgacctcggcgcacgggcgagcggagggtctgggggcactgtgggyacgcgccagaacactgggggattagagaggacatcggacgggcgcggagttgccagccactgcggcctttcaatgtcccttccctccctttccccacccccagcgcaactgcttctgaaaaaaaacggtgaagactgtccggggaggctgtctttagggttttggagagaagtggggggcgggggagagagaaagagagatacttttgactgtcatgacttttcgaggggagaaaggggctcagtacaaagccactgaactttaagcatccgtctagcaagggaaatccccagctctgcattccagggaagcgctgccccaagtgcataactcaccccccaatcaaacagtcgccgtgccccgt

SEQ ID NO: 510826 - DNA, 651 bp, Homo sapiens
ctctagcgaggctttttgtgaaattgtaggaaaacaagtctagtaggtcagagatcgcatttgctcgtgtaagggattaataaagctcttgtctgatgctgctttttagaattacgttcgggattaaaagacagactcaacacaggcacacattttgcatccgctggtggttgtgattaatttttccgaggggatttgggccgggagcttacggaacgtgctctctgggtctaaaacccaacgacctcggcgcacgggcgagcggagggtctgggggcactgtgggtacgcgccagaacactgggggattagagaggacatcggacgggcgcggagttgccagccacygcggcctttcaatgtcccttccctccctttccccacccccagcgcaactgcttctgaaaaaaaacggtgaagactgtccggggaggctgtctttagggttttggagagaagtggggggcgggggagagagaaagagagatacttttgactgtcatgacttttcgaggggagaaaggggctcagtacaaagccactgaactttaagcatccgtctagcaagggaaatccccagctctgcattccagggaagcgctgccccaagtgcataactcaccccccaatcaaacagtcgccgtgccccgt

SEQ ID NO: 510827 - DNA, 503 bp, Homo sapiens
tgcagggctttcattgcaataggacataacttgagcttttttggtcctgcccgtagctgtctgttgctaaggctaagtcttaggtgaatacaactgggaggaggaagcttccttctcccacccaacactttcttgtaaaaaggaagttctaccttgggtgtggtgcattgagaatgaaactacctttgcaaaaattatgacagtgagagaaatgtaacctagctgacactgccatacttctaacttaacaagctaactgtgtttgctcattcctgggtgtaggcgaagctaattgtggaaggaatttagcttatagtttaactttaaataaaggataatagtctcccccaaaaactgacyccctctggggactgaaaccacctttgtaggactaatgaaaggccaaaagcttaggattatgagtggggaatgaattctggtaagatgtagatgtagttaaatgataaccagccacagttccgaagatgacaagatttgtaagt

SEQ ID NO: 510828 - DNA, 617 bp, Homo sapiens
aagataaataaatggaaaggccacaaaatttggaaccggtttcctgacataagagtcactattttttcattacattatcacattctcatctttctgtttcagagtgacaaccgtactaactacacaatgctgaaacatgatggartgggattctcagtagcccttgggtaggctgtgagaattaaagcaagtaaacacatgaaaagcacttagaataacgcctgccagttatgtgcctgtgtgtggattaaaatgtttatgtatgtctgtatatataaatatgtgtatcagtttgtaatatatacttacatatttgaacacatatgcacatgcctgcacatatgcatagatttatattctaatgctcacacacaacttgaaaagagataagcaaataataatgagcataaccaggttagctattcaaacagaacacctgtaccagacctctaatcctaaagattaaaataaaagaattaaatttttttcagtttctttattcactaggcctggagaatacaggtttctaaaacgttctaagttccatatctaaagtgggaaaagcagaggttgccttaggaatatgattcatgaagcagaggcaaagagctccgcag

SEQ ID NO: 510829 - DNA, 617 bp, Homo sapiens
aagataaataaatggaaaggccacaaaatttggaaccggtttcctgacataagagtcactattttttcattacattatcacattctcatctttctgtttcagagtgacaaccgtactaactacacaatgctgaaacatgatggagtgggattctcagtagcccttgggtaggctgtgagaattaaagcaagtaaacacatgaaaagcacttagaataacgcctgccagttatgtgcctgtgtgtggattaaaatgtttatgtatgtctgtatatataaatatgtgtatcagtttgtaatatatacttacatatttgaacacatatgcacatgcctgcacatatgcatagatttatattctaatgctcacacacaacttgaaaagagataagcaaataataatgagcataaccaggttagctattcaaacagaacacctgtaccagacctctaatcctaaagattaaaataaaagaattaaatktttttcagtttctttattcactaggcctggagaatacaggtttctaaaacgttctaagttccatatctaaagtgggaaaagcagaggttgccttaggaatatgattcatgaagcagaggcaaagagctccgcag

SEQ ID NO: 510830 - DNA, 554 bp, Homo sapiens
aataaatttctgttgtcttttatatatgtctttagttgatttgaagattactctagttgatgagtttggctcccatttataaagaagtcacacattttcaagaaaaccaacagcttcaaaatatgagtagtgtcttcttcaataagactgcaacaaacctacctgagttgattctttcctcttgtacacaaatgtattgattgctacagttgattttggaagacaaaaaaatgtacaatgatttgtggataagataaatgatagaagctgcaggtggttaaaatatgctaacactgcaatcgtaaataaaattttgaaacttttggcagacagggcaagcaacagacactgggaaattaattgttctttaatgtaggacaccgatgtgtactgaaatattttattgcaaattatattgatgatgcaaattgtaagtatgaaaaattccctgctggattatgagctgaggttatgacayggcttctatagtttctaaaacacagaacttaactatgtatgtgcattaattagatgagttagaactaggaatagag

SEQ ID NO: 510831 - DNA, 621 bp, Homo sapiens
cacagaattgtactcctggtaaataagttcctgttcaataagtgttactggatgggtggcaggctggatgaaccgatgatcattgggtcacagaactaataagtgaatcttcctactaagaaatacattgaatgtcatttggggcaatatttgattaaatatccatattggcagttgtcaacttctgcaaatattttcattttagaaaatattcttaatttgtattatcagcaaaatcacagaaaatgaaaaagccttttaaaaaaagtaattgctgttgttcatactggattgaaactctgggattctgcatattgtacattggccacagccttgaacatctccagtgtccctagtcccaagcctytagttcctctgaactctgaagagaacttaaatagtgagcctctatgtatccctctagctgtggaaatttctcggtctatcttgcctctttccatggatagtttggactcaagatgttgtaaatcttcaaacaaggaaaaattgagaaggaaatttcatagcacacaattcacagtcatttgacaaggtgtctgggaataaagcagggcttgtgccaaccagggagctgttttagaggtgttataagaaaaactt

SEQ ID NO: 510832 - DNA, 448 bp, Homo sapiens
cctatatctgggaaagccagagtcttcataaattcaataaggttaaaccttttcactggaagtcctggctcatgataaaaaggggaagacacaggccataccaatgcctggcacttattccagatgagaatgggcctgaaagcagtgtgaggagatatattatcaggaactagtggccagatctctgcattaagaaagtggtaaaggaaattgctatggccatatacttggtctggtctacccttctttcstgccttgctttgctttcactctttcttgatgtcctggaatgaaaaccccaatgatgtattagtatataagctttggtgtttctgtgtttttctaggcaacttgagtacaataggcagccacaaatatcatccttgctagccaggaatgacaaggagcaagccacatgaggagtcagaaaagattattccaggcaggt

SEQ ID NO: 510833 - DNA, 566 bp, Homo sapiens
agcccaaagttacgcagctagtgaaactcagtaatttcaaagaggtaaattggcttcagaaatcaaaacctaacaattccattatgggagattakagagaagaggttctaaaaataaatagaacaaagttacaagatgtttaaaaaagaaaagagagagaatacctccatgagagtagaaaatgatacttgattgaataaaatttttaaaaaaagcaccaaaataatgaggctcaaatcaaggaacaagaaaaagaccaccacagatgttcatggaaaaagagctacagggtagggaagaccacacatgtcaggagatattggagggaggaggggcaggtgcattccctgagtttgctagtggaaaagattcatgattatttcccatggatctgatgtgggctaatcaggaaacacagagctgacttgtaatcatcatggtatttttgtaatagataagcctttggggacagaaaatgcagcatcaagaaactggatgttatttgaaagccagtttgttaggaacttcaggaagtgtctgaatcaagaaactggaatagggatgca

SEQ ID NO: 510834 - DNA, 566 bp, Homo sapiens
agcccaaagttacgcagctagtgaaactcagtaatttcaaagaggtaaattggcttcagaaatcaaaacctaacaattccattatgggagattatagagaagaggttctaaaaataaatagaacraagttacaagatgtttaaaaaagaaaagagagagaatacctccatgagagtagaaaatgatacttgattgaataaaatttttaaaaaaagcaccaaaataatgaggctcaaatcaaggaacaagaaaaagaccaccacagatgttcatggaaaaagagctacagggtagggaagaccacacatgtcaggagatattggagggaggaggggcaggtgcattccctgagtttgctagtggaaaagattcatgattatttcccatggatctgatgtgggctaatcaggaaacacagagctgacttgtaatcatcatggtatttttgtaatagataagcctttggggacagaaaatgcagcatcaagaaactggatgttatttgaaagccagtttgttaggaacttcaggaagtgtctgaatcaagaaactggaatagggatgca

SEQ ID NO: 510835 - DNA, 566 bp, Homo sapiens
agcccaaagttacgcagctagtgaaactcagtaatttcaaagaggtaaattggcttcagaaatcaaaacctaacaattccattatgggagattatagagaagaggttctaaaaataaatagaacaaagttacaagatgtttaaaaaagaaaagagagagaatacctccatgagagtagaaaatgatacttgattgaatamaatttttaaaaaaagcaccaaaataatgaggctcaaatcaaggaacaagaaaaagaccaccacagatgttcatggaaaaagagctacagggtagggaagaccacacatgtcaggagatattggagggaggaggggcaggtgcattccctgagtttgctagtggaaaagattcatgattatttcccatggatctgatgtgggctaatcaggaaacacagagctgacttgtaatcatcatggtatttttgtaatagataagcctttggggacagaaaatgcagcatcaagaaactggatgttatttgaaagccagtttgttaggaacttcaggaagtgtctgaatcaagaaactggaatagggatgca

SEQ ID NO: 510836 - DNA, 628 bp, Homo sapiens
agaagcagtgggcaaactatttaaccttgctgggtcctgatgtgctcatccacccttttcaattcacctagcctctatgtcaaatttcacagcattttccaaccaggaacaaggtgagtatggcatctcagcttacctaatgttttatacaatgttaatacttgaataagacagtgttattaaaataatacaatgaattattataattattatagtaatacaatgaataatgcaaataaatacaatgctaatacttgaataaatacaacaaagccacaaaaaccaaaagatacaaagataaaacagaagcagtaacaagagaagcagctctattaacctctgttgccagactattaagatatgcatccccatcttcattttcttatcatgtatcttctatacacaggtttacaatctagctttttccccccactaygccactaataataaattttagtgtgcatttgaatcatctggaaagtttgatgaaaggctatgtccaaccatgcttgtttctgattcagtatgtgtaggaaatggcccaagaattcagatttctgatcaatgtaacaggtgatgctgattccaatggtcctggccatactttgagaatctctctctagtactt

SEQ ID NO: 510837 - DNA, 608 bp, Homo sapiens
actaaacacctagcctatattatacatcctgtggcttttaggctacaaacctgaacagcatgctatgtgctaaataatgtaggcaattaggacacaatggtaagtatttgtgtatctaaacatagaaaaggtacagtaagaatataattttgtaatcttatgagactaccatggtatatgcagtctgtcattgactaaaatatcatttcatggcatgttactacattagtttagccgcttctgctttctttcaattaatgtctgcaagatatttaatttttcctaatttcttcaacctcactttaccattttatttgaagttarttttttgtaggtagcatatatttggatcatatttttaaatctatcctgtcaatctttgttttttaactggttcattaagactttacatttattataacaatatttagcactgtgtctgccattttatttttttcttctgttctttctgattttcatctctgttgtctttttcttacctttctgtgtgctacttgaacattttggagaaacctattttgatttatactgtttttgagtgtgtccttttgtatagcttttcactgactactccagttattactata

SEQ ID NO: 510838 - DNA, 459 bp, Homo sapiens
acctctttaaaaatcacgttagctctttcttattcccctttctcaacgtggctgtggcaggctgaccagccagctytgttccagccatgcatgtccactacaacactttcacccacgtttcatttagaagaacacattctacccagctttggacctaagagttacaagaaatctcaaaactgttcttgttaagttaaaaacagattctttaaattcaaatgatgagaagtaaaaattttttaaaaaataacatataacaaactcctttccccctgacactatgctttaggtaaccgaaatacaagtggaataggctgagttggatgtttattataaaagtcataatcctatattataaaagtatagtaattatgtacttctgtataaatgtgatgccattagcagtgagagtgttgcctggtcactgtctaagttaatatcaagaactgagaaatgagt

SEQ ID NO: 510839 - DNA, 459 bp, Homo sapiens
acctctttaaaaatcacgttagctctttcttattcccctttctcaacgtggctgtggcaggctgaccagccagctttgttccagccatgcatgtccactacaacactttcacccacgtttcatttagaagaacacattctacccagctttggacctaagagttacaagaaatctcaaaactgttcttgttaagttaaaaacagattctttaaattcaaatgatgagaagtaaaaattttttwaaaaataacatataacaaactcctttccccctgacactatgctttaggtaaccgaaatacaagtggaataggctgagttggatgtttattataaaagtcataatcctatattataaaagtatagtaattatgtacttctgtataaatgtgatgccattagcagtgagagtgttgcctggtcactgtctaagttaatatcaagaactgagaaatgagt

SEQ ID NO: 510840 - DNA, 544 bp, Homo sapiens
gctgggatttatatggaatgccttctaaaaacaaggtagtatattaacatttgtagacttactggtgagattcttcagtcctctgcgctttcttgctctcagaatgttgccagcctggtttaaaatatccacacctgcattctcagcagaaccattgataatttctttctaggaaaactgacggacccaaaggatartactatgagaaacagacaattgggattctcaccgtggaaatatcagttgtcaacaataataacatcggtacaagacataaaatgtaaaccttgatgcacaaatacagattttggacaagttatttttaaaataaatatataaagaaaacaaaaatacatgtttaattcaattaataaaactaaggacaagctccaaactagttttgctctctaatttcccatttgtgccaccccaaatgcaatcagctttcctctcttgaatgttaatcatttcagtgtgctccttaacattttttaacccaaagaaaatctcttaaagctgactgtttttgagttttttaaaaaaa

SEQ ID NO: 510841 - DNA, 544 bp, Homo sapiens
gctgggatttatatggaatgccttctaaaaacaaggtagtatattaacatttgtagacttactggtgagattcttcagtcctctgcgctttcttgctctcagaatgttgccagcctggtttaaaatatccacacctgcattctcagcagaaccattgataatttctttctaggaaaactgacggacccaaaggatagtactatgagaaacagacaattgggattctcaccgtggaaatatcagttgtcaacaataataacatcggtacaagacataaaatgtaaaccttgatgcacaaatacagattttggacaagttatttttaaaataaatatataaagaaaacaaaaatacatgtttaattcaattaataaaactaaggacaagctccaaactagttttgctctctaatttcccatttgtgccaccccaaatgcaatcagctttmctctcttgaatgttaatcatttcagtgtgctccttaacattttttaacccaaagaaaatctcttaaagctgactgtttttgagttttttaaaaaaa

SEQ ID NO: 510842 - DNA, 509 bp, Homo sapiens
acaagatctgatggttttatcaggggcttccgctttcgcatccttcctcattttcttttgccgccaccatgtaagaagtaccttttayctcccaccatgattgtgaggcctccccagccatgtggaactgtaagtgaaattaaacctctttcttcccagtctcccatatgtctttatcagcagcgttaaaatggactaatacaacatctatgctttaaactctccccctgaaatctgctatagttatttagtgcaattactgcctcacctactctatttttcttcttcattaatgttttcaccaaatacaagtgtttagcatagtttccttcaatatatatccctgatgttgcccaggcagcgttagctattaatatttgggcactagaaaacaaaatatttcattaacttagtcaacattaagaacaaaacagcacttatctgtgcctattttttgaaagtattattgggggatggtgttgtttaatattgagaaaacagctataatg

SEQ ID NO: 510843 - DNA, 619 bp, Homo sapiens
cctttaattccaggactttctgggattttcgattggaaatggtttggttcattaggcttctcatttaagtgctttcgtttggtcctttttcttctgttaaacccatttactttcatcttcaaaaatgttagatatctcctgtgttgtgattgtctcacctgttcttgtttttcttgttcttcttctctactgagtttgtatcttttccccactttactatagcttttaggagtcttccagaatatagctagatcggtacatatattcatttcatgaagcttaaytagaatctatttattttgacctatgaatatattcaaattgacccaacatagcaaagaacaacaatgtgttgtgcactttgaataacataagaaggtgctgttacagtgtctgggaagtcattagtgttagggtttatcatagtttttcagtgttttccctctgctgcactcatctctccataagtattctggaggtaagccttttcagttgtgtaccaaacttctgcatagagtaagttatgtgaacaccaaatgagaggcctgctatgtgccctgcatatggaaaatcatggttattattagtcacaatgtcatcacagtaagcatgtctgaac

SEQ ID NO: 510844 - DNA, 552 bp, Homo sapiens
attgttcatttggtagtttctttttcctcattgccaagcttttcacctcttctctttttacatattggtttgcagggaggggcaggggagagccaaaaaaaatttaaaccacaaacctggttaaattaagttctccactacattgcacctgtgactctttcagtagaatgtgagaggaggaaaactcacaagaccactaattgattctacttaaaatttatgactataaaccccatgaattctttaaagctgccaagcaattgtaatgcagttacctattcctttctcgctttaactttccttgatgttgttgaagaaaaaatgtaacaggtaagttactcaggcaggaaagacttttgtcaaggctatcacaatatgagaaataaawcaaactcaatgcctctgaagcaaaaatcttagtgttttcacccaattctgtgaccctgaaggcaaattagagtaagggtgacaaggattgtttttataaattactaggaaggagagtttgcagaacttggtgagtgattgcatgagggagatgggtgaaaggca

SEQ ID NO: 510845 - DNA, 591 bp, Homo sapiens
ccaaactctcactaaatgttgggaaacataggaaacttttggctaatctccaggtggcacagtaaatttgctttgtcgcccactaaacgtatcttcaaccagcatctagattcttcaatatgaacagaacttttcaaatgtccttgaaaagtcacgaggtactagaataaatctttgcctagactctgattgttttataaatgaaatcttgcttttctcttaagataatgctaggcaacaaaacctctcccttaaattggtatatttgcaaacaaatctctatgaattgatgctatactatgcaagggtacagcataatatactaccctataatatactaaacatactaaacttactaaactatactataaaggcatcaccatcttctggaagtatttattgcttgcacataaatcccagctcatctgtcttgccactataaattcatataatttctgggccatgaaraatttcttttccaatttgactttattataactttaataatgggatcatttttattatttacaaagtaaatatttatttattatttacaaagatattttacaaagtaagatattatttacaaag

SEQ ID NO: 510846 - DNA, 596 bp, Homo sapiens
ggcccatgcattacttttgcacctaatgttatagctctaaataaagttattagttttttttttccacaatcttagagaaatctctgctctgctggttctgtccacgtgcagaataagcaggcatgttcttgtgttctacctcaaaaacttccatcatttaaaaaaaataggtatggcatgatttttacagttatatcggttttctaatattgtcaaggatggtggatgttakactttccagttttccttattgtttctgatttttttcacaacggaaaaacaggtaaaagtgatttatacttcaccattttatatttcagttttatgcacttccaggtttgcgtgtgcatgaatgtgtgtgtgtgtgtgtgtgtgtgtgtgtgtgtttgcatgcatgattattttgctatttgactagttttaacatgggatgcttgcaatttactttttagttttaattttctagtctgattttgaaattagtaggagcctggtaggaaaactttaggttttccagtgaaaaataagcaaaagcaaataagctgtatgctctcatatatttgtaaaatgtacataattaccccatctataatatt

SEQ ID NO: 510847 - DNA, 544 bp, Homo sapiens
actgaataaagggagaaagcagagaatccgtgaactggaagagagaacaataaaaattacccaaacggagaaacaaaatttattggggaacaaaatgagtagagtcttatgggcctatgtgactataacaaaagatctaacattcatggtaygggaatccaggagaaaggtacaataaggagagggctgaaaaagtactcaaggaaacaatggctgaaaacttttcaaatgtgataaagtattaaactctaaaagggtaaacccatagaaatccataagatacaacataaacttctaaaactaaagacaaagaaattattgatcaagagagtgagaaaataagccataaactgagagaatatttgcaaaatactgattatattaaaattaaataaagtatacttcagagcaaagaaaactaccagaaacagagaggaacattataaatttacaatacagtcaatccaccaagaagacatagcaattctaaacatgtatcaaacaacagagctacaaagcgtgtgaagcaaaaactaatagaact

SEQ ID NO: 510848 - DNA, 607 bp, Homo sapiens
aaatccaaaggcagtgagggtagttttcagcatgctttctttaggaaggtagttatttggatcaaatataagattcccttctattttggctgaggctgggtcaagtgatggaagagaaacagatttgtagagttgatagttccgagagaattttctgaagtccatgacagttggaagttgagattctttcagarcttctttcactaactttttcagactagataagaagaagtatattttgagctgacacaccatgttattatcctttgactcttgcaccccaagtaaatatggatttccaatcactaccaaaatgtctggatttcattgaccctaagtctttgggtctagatctgctacacatttgcacaagtgtttgtttcagaagcaagggcagacagtggctatgccaaaacctagggttggaattccagctcagggccctcagtggtatatggggtgaatagctcttacttactcttggatatccaattcttctgagttcaagatattggcaatatgggaagccacaaagttcttcacttgctcattctgttcccatggtagaatttggacaattttgttaatatctgcctgtgaaggactc

SEQ ID NO: 510849 - DNA, 517 bp, Homo sapiens
ctgaaaacataaaacaaaatactgcctttcctccttgcccaactgtcacctccaaattttacataaaagatgcatttataaatctatcaattcctttactcagagatagccagagtatgtttctcacctgacagtttctatcattatttggtaaagtgacaaggttgaactttcaaatatatttacattccttatttttccggggaaaatatcacactttgggcaaattttatctataaccaaataattaattcaacattatttagttctaacatgttgtgaggcctttgtatataacaagcacagttaagatacagaacattccttgaggactatgttcttattttcagttaatgtggtracacctaatacagtgtcatatgccccaatggtacttacaaaatgctattaagaaaaggaatttattgaagcattcagtgcctccttcccaggaaaaagataatatatcacataaatgtgtgtttacatcccatattttgtctactttacttttgtg

SEQ ID NO: 510850 - DNA, 653 bp, Homo sapiens
aaggacgatagaaaatacccaagtctatatttcaatatttggtagtaagtgctatggagggaaaaaggcaagataaagagacagatgctggggtgatgctgattgagatgggctaatcggaagccttctcaaggagatggcatttgaactgaggcttaaatgaaataaggggtgagcctcgccaagacttaggagatgtgtcccaggtcagggagacagcaaatggaaaagctgtgtgtgactgtcccccttggggtggtgggaaggttcttcattaaattcacagaggggttggtagtacctggcgtgcgawagggatttaaacgtgtggaacagatggatgaagataatttacaaatcttgccccagacacagacgttggcatgtgtacctcttttatctggaatatcctcttttctttgttgcctacatagatgcccccagtttgtctactccattgaactttgcatgcttggagcccctggcctcagcacactcaatcgcacaagccagcctgcagcacctgtacagcaccatgggagtcccctgcagagctgcaactttgagagtgggtatagtgacgtaactcaggttcttcaagggatgaacactccaactttgaaaccactagcctgtaggtgtggacgaaaagg

SEQ ID NO: 510851 - DNA, 559 bp, Homo sapiens
tcctaacctctcagtttgattctaatcaagttgattctgaaaacgaaagtcaccagcatctcaatccctttcattccaaaacwttcctgattcctccacagcatcattcttcttctacaatgtgatcacctgtgcacaccaaatgatgtcttcatgaagcagtcttcatcaaccacaaattttccattttattccttccttaggatacttggtacctcctcatcctagaatatgtaatttagaggcatcttcccagtgattcctcaaaggtctgccaaagtgaattcttggcccacctttttgaaaaagaattgctggaaaatgttcttactaaaaatattaagttcttgggctgggtgcagtggctcatgcctgcaatcccagcactttgcgaggccgaggcaggaagatcacttgaggccaagagtttgacaccagtttgggcaacatagcgagacactatctctgcaaaaaaaaaaaaaaaaaagaaagaaattaactggacatggtggcacatacctgtagtcctagctactcaggaggttgaggcaggataata

SEQ ID NO: 510852 - DNA, 515 bp, Homo sapiens
gcaagaggggagcctggcctctcctcatccggtgtggcaacctggggattcaatctgagatggggcctgttaacaggaacctctctctctttgctgagtttttttcctttccatccaaaaaaaccctgccctcctcaaattgtctgcaagcctaattttttgtgttcatgtgacaaggaccctgtctttagctgaactaaggaaaaattcctacaacagcgccatccccaaattcctgggtttggctggtgataagaggacatcagaaaggacatcagaaacataagtgatagcaatataaytttctggaataaaacactttccagtacaataagtaggctttcccaagtctttgttataccacagtggcctataaggtttcttgttgttgccctcagctcctggaagaacagaatcattcgtgtcagctttgcttgtaattctttctcattatgtcagttagaaagacaggtgctgttttagtcagttgctggatgtggctggatgtggctgag

SEQ ID NO: 510853 - DNA, 515 bp, Homo sapiens
gcaagaggggagcctggcctctcctcatccggtgtggcaacctggggattcaatctgagatggggcctgttaacaggaacctctctctctttgctgagtttttttcctttccatccaaaaaaaccctgccctcctcaaattgtctgcaagcctaattttttgtgttcatgtgacaaggaccctgtctttagctgaactaaggaaaaattcctacaacagcgccatccccaaattcctgggtttggctggtgataagaggacatcagaaaggacatcagaaacataagtgatagcaatataattttctggaataaaacactttccagtrcaataagtaggctttcccaagtctttgttataccacagtggcctataaggtttcttgttgttgccctcagctcctggaagaacagaatcattcgtgtcagctttgcttgtaattctttctcattatgtcagttagaaagacaggtgctgttttagtcagttgctggatgtggctggatgtggctgag

SEQ ID NO: 510854 - DNA, 462 bp, Homo sapiens
gaagttagtatcattttacagaagaaggaactgaaacttaaataacttatccaaactcacataggaaatgagttattcaagtcaagaatcaagccaagccaggccatttccaagctcatgcatgtgttttctgtctctcaagtccgtgagaagagtatccagggaataatgggagctgagtagatggagcagctaattctgtctgccatggggttcaaaggtttcacagaagaaaatgtgcagcttggccttgaggggtctggaccaggtctgggagaagggcaggtattccagatagaaaggaacatggatagractgaacaatcaatagtgtagggaaaattcagaggtttgaaatgtcactttataattctgtaaagctgtcttattcatgtgaacatagggtcatactgcagcaatatttcaatatgtattcagtgagtagctaactctattattgct

SEQ ID NO: 510855 - DNA, 577 bp, Homo sapiens
  misc_feature (1)...(577): n = A,T,C or G
cactagattcttataagtagccggcaacctagatctgccgttcacaatagggttcatgctcctatgagaatccaatggccccactgatctgactggaggcgtggagcacaggcggtaatgctcwcccacccacggctcacctcttgctgtgaggcctgttcctgacaggccacagaccagtatggatccatggtcccgggggttgaggacccttgctctgtagcatacatttgagatctcgtcttattctaattgttgcaagcaatacaacatcagaatttctggttatggagtcttgggcctctttttactgatttggaaggaaattttcaaaatttgcctagttaagcagttgactccttttgctttagtgagctcagtcttattatatccagtgttcttgctatatctcttgataatgaggctttatacatatatatatacacacacacacacaatcatacatacgtgtataatgatacctgtatatatgtataataataatgaagctttgtatataaagccttatcatataaagcctgtgtgtgtgtatatannnnnnnnnnnnnnnnnnnnn

SEQ ID NO: 510856 - DNA, 383 bp, Homo sapiens
ctgacttggagaaggtgttaaaatcccracattcctgactccttctttgtgggagcccctgccctgcagatctcacggggttgttgtgagggtcacctggggtgatgggtttggaagtgctttgtgaatgacacagtgggccttcctattcctgtcactggccctttgaccttgaatactaattgcctgggatctccaggtttcaaggtctaatcctggtagggtacgaggtgtccccagtggaacattctacagcacttcctgagaggtcccttgcttccaactttgcccagcataaccactgctcctgttccctcagcctggagagcttgcccaggggcacaagatggtactggactgaacttctctttggagaaggtgat

SEQ ID NO: 510857 - DNA, 634 bp, Homo sapiens
atccgtttatgatgaggtggttgtgtgctcagggtgcacacatatctctgagtgggtgtgaggcacatgccaggtgggcacagagacatccacctggaatcccagaatggtttgaacccctctacayatagacctttccttggtgctgggaagtcaattgtcctctccgacccttgagagggaaggtcctgggtggcccataatgtttcagatgttttaggtatcagtaacctttaaggacattactgtggatgccacccaggaacagtgggccctgtgaggcccagcccagaggtgccatgctggagaacaatggtcccctgggcctagtgggtgagtctgtcagcactgattgatttattcatttatctttaataatttcaacttttcttttcgattcagggggtccttgtgcaggtttgttacatgggcatatcatgtgatgctgaggtttggggtacgattgatattgtcactaaagcaacgagtgcacatggtacacaacggttagtttttcaacccttccccccttcttctcttccttccccctcttgaattccccagtgtctattgttcctatctttatgcccatgtgtactcaacatttacctcccacttgtaagtgagaacatgc

SEQ ID NO: 510858 - DNA, 574 bp, Homo sapiens
gatcacacttaatttatattgcatcactattggtgtagccattctttaattgaatttatttagtctcttcttcttgcactttgataggcgaaaataatacagcggggaccaaactgcagttgtttattcaaggcacttaaggggcaaataagttgataattatagtattgtttgataatgataaattatgcttaatgaaaaatgcaaattaagtataatgataaattatgcttaaatacagatgagcacatagggagagttcccacaaattattgggccacagaaactaacattttccggagaaatatacatcttgtggaggcctgaagggtgaataggagttgtcaggaggcaaaagaggaaaaacccatggagaggaaggattaacatgttcaaaagtccagcagtaagtaagagcatagtacrgctttccagtgtttctttatgcaaatgtaaacagatacacatatacccttcttacctactcaaaagatagtgaactatgcacactccttttagccttgctttattcaaataacaatatattttgcagaccttcccatgtaggtactta

SEQ ID NO: 510859 - DNA, 574 bp, Homo sapiens
gatcacacttaatttatattgcatcactattggtgtagccattctttaattgaatttatttagtctcttcttcttgcactttgataggcgaaaataatacagcggggaccaaactgcagttgtttattcaaggcacttaaggggcaaataagttgataattatagtattgtttgataatgataaattatgcttaatgaaaaatgcaaattaagtataatgataaattatgcttaaatacagatgagcacatagggagagttcccacaaattattgggccacagaaactaacattttccggagaaatatacatcttgtggaggcctgaagggtgaataggagttgtcaggaggcaaaagaggaaaaacccatggagaggaaggattaacatgttcaaaagtccagcagtaagtaagagcatagtacggctttccagtgtttctttatgcaaatgtaaacagatacayatatacccttcttacctactcaaaagatagtgaactatgcacactccttttagccttgctttattcaaataacaatatattttgcagaccttcccatgtaggtactta

SEQ ID NO: 510860 - DNA, 517 bp, Homo sapiens
ataaagaatgtgctgatacaaagttttttgttaggaattttcaatggtttacagaaataacattgattagtgattggctatacattttagagctctgggttatgagttatggtgtccagcrtatggcattgttaggttaatttatggctacttgtcatcaagtaatccagagcccacccagcaagtggcttcaaaaggtgattacttagctcaaggttggggtggtggggaatgagacctcactgctgtctcaccttaatggcccttttcagattgctcagataatagtttcttctctttctcataaataaaggaagagagactgaaagaatcttagtaattttctagaggtggtattttctagattcagaatgaactacacaaatattgagtcccctgttatttccacactatcatttgtcctccaaaaggtgaaatgcattgtctgacatcatattttagtgacagagcctgtccttgtaccaaggtctcttgtggttttctctatagtctcatg

SEQ ID NO: 510861 - DNA, 584 bp, Homo sapiens
catgcagcactttagtctcaagctgcagtttggcatatattagcaacagagaaatatgagcagctctcacgaatccaggatattgcctatctcctattcatacacccccaacttaagcaaagattatctccacaagccttcaggaaaagccacatggttctggaaattgctcaatactgatgaagacaccctgtgttgttgctcatgtttaaattaaattttaaaatcaggcttcagattaggaacaaggaatcaggatagtaatgagacaattttaaataaaaaataaagatgtaagwgttcctggcattgataattaagaaaacctatatgggaagatcaaagtatcctcctttctacaaactgatttagggcccattattttaggttccttttcttgaagccacctgccccaatatgttgtttatatttctatcaggttgcaaaatattgagacttaaaattctataattttattattctcattatttttcttatactttaatagattcatgtgttgcttaacaatggggatacattttgagagaagctcattaggtaatttcatcattgtgccaacatta

SEQ ID NO: 510862 - DNA, 644 bp, Homo sapiens
ctgcatgcagcactttagtctcaagctgcagtttggcatatattagcaacagagaaatatgagcagctctcacgaatccaggatattgcctatctcctattcatacacccccaacttaagcaaagattatctccacaagccttcaggaaaagccacatggttctggaaattgctcaatactgatgaagacaccctgtgttgttgctcatgtttaaattaaattttaaaatcaggcttcagattaggaacaaggaatcaggatagtaatgagacaattttaaataaaaaataaagatgtaagagttcctggcattgataattaagaaaacctatatgggaagatcaaagtatcctcctttctacaractgatttagggcccattattttaggttccttttcttgaagccacctgccccaatatgttgtttatatttctatcaggttgcaaaatattgagacttaaaattctataattttattattctcattatttttcttatactttaatagattcatgtgttgcttaacaatggggatacattttgagagaagctcattaggtaatttcatcattgtgccaacattattgagtgtactcacacaaacctagatggtatagcctacgacacaccttggctttatg

SEQ ID NO: 510863 - DNA, 492 bp, Homo sapiens
actgcaaagtctctatgttttcactctgccaatgtggcagagacaatactgggtgctcctggcctttccttttgtcttgagcacgggggaagaccacatttcctaaacctcccctgaaactgagactgtatgactgagtgtggccaatggtacgtgggtggamttcatgcatgccacttcccaggcttgaccatgaaagtcctttggggacactctggctttcttttccccctgttccagcaccctctgagctcatgtgttctaataggtacaaaatggcaaagcctcaatgaccctgggctcctcgacgtcataccaacctttattgcacatctacagagagcaaaaaaatgtttttgccactgagattctgggactattttgtaactgtattataatctagtctatcctgaccaaaacatctagtttaagatagagttttgaccttaattcaattgcaatcatatgatttgcaattgtaatcaaatatct

SEQ ID NO: 510864 - DNA, 492 bp, Homo sapiens
actgcaaagtctctatgttttcactctgccaatgtggcagagacaatactgggtgctcctggcctttccttttgtcttgagcacgggggaagaccacatttcctaaacctcccctgaaactgagactgtatgactgagtgtggccaatggtacgtgggtggaattcatgcatgccacttcccaggcttgaccatgaaagtcctttggggacactctggctttcttttccccctgttccagcaccctctgagctcatgtgttctaataggtacaaaatggcaaagcctcaatgaccctgggctcctcgacgtcataccaacctttattgcacatctacagagagcaaaaaaatgtttttgccactgagattctgggactattttgtaactgtattataatctagtctatcctgaccaaaacatctagtttaagatagagttttgaccttaattcaattgcaatcatatgayttgcaattgtaatcaaatatct

SEQ ID NO: 510865 - DNA, 606 bp, Homo sapiens
tcttttcttgacatgctgcacattctcatgtcttcatgcttcagcatttactctttcttatgcttcatatgtccttgaccctcctctgtgctgccacatgctacttatctttcaagatgcagcctaagtgttactactccctctgtgatgccaggcccaggtgagttaggtgctcctctgtgttctccaagtctcctgagccagcctttgggaatgagacaatcacatttcagtggctagataygccttgactgtgagctttgtgaagtatggtcttacccaattttgtactcccagggtccagggtccaggaatcacatggtcattgctaaataactgtttcttaaggaaacaaatgcttgagacacatttaacacactatcttctaagtctagctatgcaattcttccacttgtataaatagactagaagctccagtctattcctagtccaaaacccccaggacctaggctgagatgaacctcactgcaaaatcacctttggaggggaataaactctttggtaactgctctgtagctattctttgtttgactcatttctcagcttatgtgggtcccttaagggcatggacctagaacttgaaag

SEQ ID NO: 510866 - DNA, 606 bp, Homo sapiens
tcttttcttgacatgctgcacattctcatgtcttcatgcttcagcatttactctttcttatgcttcatatgtccttgaccctcctctgtgctgccacatgctacttatctttcaagatgcagcctaagtgttactactccctctgtgatgccaggcccaggtgagttaggtgctcctctgtgttctccaagtctcctgagccagcctttgggaatgagacaatcacatttcagtggctagatatgccttgactgtgagctttgtgaagtatggtcttacccaattttgtactcccagggtccagggtccaggaatcacatgrtcattgctaaataactgtttcttaaggaaacaaatgcttgagacacatttaacacactatcttctaagtctagctatgcaattcttccacttgtataaatagactagaagctccagtctattcctagtccaaaacccccaggacctaggctgagatgaacctcactgcaaaatcacctttggaggggaataaactctttggtaactgctctgtagctattctttgtttgactcatttctcagcttatgtgggtcccttaagggcatggacctagaacttgaaag

SEQ ID NO: 510867 - DNA, 647 bp, Homo sapiens
cagagtttgaatagttttaagagctgtgataaattcactttaatgggcgtcaccaaggctttaagtggagagaaggttcataaaggttagtcaatccaaatcaatgatttttagaagtggataaaaattactgcatgtcacatctggggacagtgaagtgtttgtgagattgttaagcaactcacattacagacacataccaggattttgattcagtagatcagcaatctctattccgagttcacttaaatccccatgaatttatgatcaggaacatctttcatttattcacacattcattcattcagcagccatttttggaaagcccgtgatgggtaaggcattgtactcagggtggagaatacagrgaaaaaagggacaagccatcttcacattcaagaaactcaccattctcagtgacccatgacttgaatattgttgagtaacactacacatttgaagtatatctattttgataagaaatgggatggggaagggagacagctacatttgctatggtgaattttttagaatgccagcaataggggaagctgctgcctccagcaggcttcattgacctcatttaataactattcctttgtttccacagttccccgcttctcctttgttggcttttggaaagtggg

SEQ ID NO: 510868 - DNA, 576 bp, Homo sapiens
gttcttttatttaatttttcccttgcattttccattcacttagaacagaatcccacattaaatgaggctccaggctcacttaagggtgcattttgcaaaccaaataaagtaaaatcatcagtaaattccaaatttattatgctcttctacacatgtacaaattccagtaaggctctagttatgaacataattctaagacaaggattccagatgcaattaataattttttctaaccatgttgtttattttaagtgcatgagaaggatgtaatatattcaactttgaaggaaaaaatgttcagagacaacttggacagacagaagccaaaccatagcttgacataaattgcttggcatataagaaaatcctgaaacaaggacaaatcaggatctatcagagcaaatacagaagactggygagaaaaaatggttttgtaacttccaaagctacatagtccaatgttctaccataaattgtactataggaaattgatttcagtgcttaacactgtcaaatatcctttcttttggaggtgaaaaaagactcaggcttagggacagtaactagctgcttaac

SEQ ID NO: 510869 - DNA, 509 bp, Homo sapiens
attatctcttggcatctccaactcaaccccatcaaaaactcattttatgtgttcatttcctccatccccaaccaccactgaaccaaatatattttttctccttattctgtacctggatggatggtacaatcacctatgtagtcttccaggccagaagtgtctaatggtctcctcattctattattctgtaaaagtwatatagcctatcaatccaagcatgcctagattactactgcaacttcctaactagtctttttccctccagtcttgtctcacactttcatacttcaacacgatgctttcagagtgatgcttccaacatacagatctgactatataactctctatgttaaaatcatttccatgagttctcattgctttcaagatagaacccaaattgttagtctctatgtaccatgttcatgggaattcttaatgaggtaactgggcatctagggtcagagatcacaaaatagaacaagaaaggtggtgataaaagggcaacacat

SEQ ID NO: 510870 - DNA, 561 bp, Homo sapiens
aaggtccctcgaaatccactaggtgagatagagccaggtatgtaagcatgggcttttacctttactcaaaggtaatggaaggagcagtatttagggcttgctgccctgtccctttactttcaaggaagttactggtttagaggtagagttgaagtggcaatcaatgggaaccatggttcccaagatggatatctctaatgggaaaatacgcacagttgagaagttagagggagaggggtgaattggcccaaagttaccccatacctactcttcaggagaacttgggggactttttcccraaggctatagatatccatggggcctctaagtccctcttcaggatcactccctgatggaagcagagcatccagattcagtgggaagttcatggtgcaaaggaacacctttccctctaatctcgtctctaaatcaattgtgcatccttcagtataaaaagcagttgtgattaatgcaccataagctgtgcagggcaaagagggtgaaggatctgcatgaccctagcacaggctttcggtaatacccagagcacgagattttgta

SEQ ID NO: 510871 - DNA, 502 bp, Homo sapiens
ggaaaggctggtgtgctgtggtttttctctaagtactagagcactcatcattcactgcttactccagcttttttacatggcagttgacttccaagaagacaccagtctcttacaacttaggcatgcaaccatcacacatcacagcatcatttctgccacattctattggtcatagcgagacacagggtcagtgcagattctgggtagaggatagattcttccctcctgatgacgggtgtaccatgcaatgtacagaaagagagacaactgttgacagccatgtttgtaaacagtctaccacagtccttactttaaatggktgatcatcctggtcactctcccccacagtagacctgagaagaactaggcaaaagtacctctctggattgccaaatggaaagtaggaaagatttttaaaggagcaacaagcaaataacaacaacagcaacaaacaactttttcctgtttttattaatctggaaagatgtaagtcctgtgctga

SEQ ID NO: 510872 - DNA, 621 bp, Homo sapiens
tagtcaacccaagaaacaggaatgaagaaaaaagaaagagagaaacagagaaaacagataattcctggttctggtgttgagatcagcttaatttgcttaaactaaattgaaataggttttctttattttcaatccagaggttttcaaaagatagaaaaatctttgtgagctaaagtcaccatctaaaatatttagtcacaagaattttgtgtttttggagagttgcacaggaattagggaaagtttgaaaagaaaaacatcagtttaagttaagcactaaagaaaactctctgtggctttttaatcccagtattgatttttgtaaggcaaaaatccaccactttaattatatgtgattctttgctctctaaaaataatgtgaaaagagaacattttaaatgctatcacyggctagcttagcattaagaacatttaatcacacattgttttcagatgaggttactctatgaatatgctctcaacaggagtaagaaagaaaattaatataccaacactatatatttgtgtggcattctaaaaccaaaagtgttaataacattttagaggagtattttacttaatattctgggtacttttttatactgaagtaaataatagatt

SEQ ID NO: 510873 - DNA, 621 bp, Homo sapiens
tagtcaacccaagaaacaggaatgaagaaaaaagaaagagagaaacagagaaaacagataattcctggttctggtgttgagatcagcttaatttgcttaaactaaattgaaataggttttctttattttcaatccagaggttttcaaaagatagaaaaatctttgtgagctaaagtcaccatctaaaatatttagtcacaagaattttgtgtttttggagagttgcacaggaattagggaaagtttgaaaagaaaaacatcagtttaagttaagcactaaagaaaactctctgtggctttttaatcccagtattgatttttgtaaggcaaaaatccaccactttaattatatgtgattctttgctctctaaaaataatgtgaaaagagaacattttaaatgctatcactggctagcttagcattaagaacatttaatcacacattgttttcagatgaggttactctatgaatatgctctcaacaggagtaagaaagaaaattaatataccaacactatatatttgtgtggcaytctaaaaccaaaagtgttaataacattttagaggagtattttacttaatattctgggtacttttttatactgaagtaaataatagatt

SEQ ID NO: 510874 - DNA, 621 bp, Homo sapiens
tagtcaacccaagaaacaggaatgaagaaaaaagaaagagagaaacagagaaaacagataattcctggttctggtgttgagatcagcttaatttgcttaaactaaattgaaataggttttctttattttcaatccagaggttttcaaaagatagaaaaatctttgtgagctaaagtcaccatctaaaatatttagtcacaagaattttgtgtttttggagagttgcacaggaattagggaaagtttgaaaagaaaaacatcagtttaagttaagcactaaagaaaactctctgtggctttttaatcccagtattgatttttgtaaggcaaaaatccaccactttaattatatgtgattctttgctctctaaaaataatgtgaaaagagaacattttaaatgctatcactggctagcttagcattaagaacatttaatcacacattgttttcagatgaggttactctatgaatatgctctcaacaggagtaagaaagaaaattaatataccaacactatatatttgtgtggcattctaaaaccaaaagtgtkaataacattttagaggagtattttacttaatattctgggtacttttttatactgaagtaaataatagatt

SEQ ID NO: 510875 - DNA, 575 bp, Homo sapiens
ttggctttttaacgtgcctttccttgtatcctgccatcaataacgctagtgtgtgaaaaaagcacagtatcaggtagaaagtatgtaaactgctaaaatttaattttgtttcaaaaagcatttcattgaaatgattaaatcacttttctaaaaaatgacaggatgcatcatctgtcgtggaaggaagcgtgttttggttaccacttcagaacttctgttcagattgtccaaggcatgtgttatgagaggaagaagcacttcctaggtcactgagcatttgctgctgaacatatgctatctcacaatggcatacatccacagcttttttattacatagtgatctgaatattttatggatattctgaatggtgagataattgatgatagaacactggaggaaagagttgatagctttttttttttgttggtagcatttatcagattgtcaattaaatgcttgtcatgtggtaaaggaaaaatatttattgctgaagcagacatctagacagaccttcaaccaaaagtgtggtacatgtgaraaggcacaaagatatgcacctttggaatgacggatt

SEQ ID NO: 510876 - DNA, 627 bp, Homo sapiens
agatatcaagttacaaatgtccaaggctaaatctagagattattttttctctttgaaagcatgaaaatatgcagacattttaataatgctaggtagaaaaattctgtagcaaatattaaatgtatttatgatatcaataaatggcaagaccttgtaactagttccaaggacatacattttatagacatatataactttctaatatgtcttaaaatgaataagctgtttttactttgttgcatgtgtatttttaatagaattctatttgtaactttttattcacacccctttctcttgcttgcaagagccaattgtgtatgtcattttctaattcagtattaagaaaagtcacattggaagcttgaaattagccatgatggttctgtttacaccatgcaaattggamaatgtttcaatcagaattgttgggtttttgttttttttccccagattgtcagttttgaaaattttccaatacaccactgcccacctacccagcacatagaaattgcacttgttaaggtcactaatgaccataaagttgccaaatccaatacacatttttgtttactttttatttgatctctcggtcacatctggtaccattgaacactttttttttttttt

SEQ ID NO: 510877 - DNA, 627 bp, Homo sapiens
agatatcaagttacaaatgtccaaggctaaatctagagattattttttctctttgaaagcatgaaaatatgcagacattttaataatgctaggtagaaaaattctgtagcaaatattaaatgtatttatgatatcaataaatggcaagaccttgtaactagttccaaggacatacattttatagacatatataactttctaatatgtcttaaaatgaataagctgtttttactttgttgcatgtgtatttttaatagaattctatttgtaactttttattcacacccctttctcttgcttgcaagagccaattgtgtatgtcattttctaattcagtattaagaaaagtcacattggaagcttgaaattagccatgatggttctgtttacaccatgcaaattggacaatgtttcaatcagaattgttgggtttttgttttttttccccagattgtcagttttgaaaattttccaatacaccactgcccacctacccagcacatagaaattgcacttgttaaggtcactaatgaccataaagttgccaaatccaatacacatttttgtttactttttatttgatctctcrgtcacatctggtaccattgaacactttttttttttttt

SEQ ID NO: 510878 - DNA, 579 bp, Homo sapiens
tgcccccaaaataccatctcctacagaccagcagggacactcacatccacagacacagcaaagacacagactggcagagctagctgtaaatgaggaaagactcctggagtcagatctcttgctcatttctctttgagcaggcgttgggggtggctgctaggcatttacatgtgaaatttgcaaacagctttcctgttatttgtgagtcatttgtgggttattaactactcccctctctcttcataaaaggagcccagagcttcagtcaggcctccactgcctctttgtaactagaccctgggcggggagctaaggttcccaagcagaggaaacatcattcacctcttttaatctcaatgttttgaaagcaaagctctaagaagggcccaattgactgacaggatttcccctggcattttagaagggacaagggggctattcatccccaggctagtgtctatgagtaattcctccaggtaatttatttctccaactgaaatgatgccstcactactaatggtttcccctgttctgtcaccaatattggaaaatcagttggtgtctatttgtaggacaagg

SEQ ID NO: 510879 - DNA, 600 bp, Homo sapiens
gagaactcactcgttactctgaggagggcaccaagccattcatgaaggatctgtccccctgacccaaacacttcccagtaggccccacctccaactccagcattggggatcacatttcagcatgagatttggaggggacaggcatccaaactatgtcagtatttgcagtccccttgtctctaatggttaaattatagcatttggcctctgctmtatgggagtctcatcatttctattaaaatcagagattcaactcaatggaggtgtctttcaccatcatacctggcttatagaagacagccaccacagagcttttcagagatgcaagtgctaccttcgtcaatgtgtttcttaatgtctttatgaaaggattgtcctctaggcattctgggggatggatgtgaggctggtagatgtagagatttcatgtgataaagtcactccatcattccttcctccttaagtcttggatgccttcctctacattgtgtcagggaagttctggcattccagccttattgaacatatgccaccattgagtccaaggtttagtcagccaaccaagaaattttagagccacttccagttacaagagctagc

SEQ ID NO: 510880 - DNA, 528 bp, Homo sapiens
atgtcagaagaagtctcaggagaaagcctggaaacaagttgagctggttaaacagagcatgatgaaaaaacgcaggaaagggaaatgatgtcactcatgctggcagctttgaggacaaggaagcgaaaatgtacgcttctgatagtcaactaccccgcctatcccaccctgctgtctcccaggaaggtagctggaactgcaagtggggcaaagctcccagcactaccagccagtggcaagggccttcacctgcccaccttttgaactgaggtttttcctccagcagaaccgaaggcccatgtgcttccctgyaaagtgatgcaactgggcaggaagctcagatgccagcaactgtgatgtcctagatagggaaaaccctgcattgcaaactcaggtcttgctttggaaaaaaaggagtggctggatttccttcttgctgtctagaaaattgtttcctgcccaaaaatggcttaattaggaagctgagtttgtttcctaggaagggattctccttctcttccttctgcg

SEQ ID NO: 510881 - DNA, 528 bp, Homo sapiens
atgtcagaagaagtctcaggagaaagcctggaaacaagttgagctggttaaacagagcatgatgaaaaaacgcaggaaagggaaatgatgtcactcatgctggcagctttgaggacaaggaagcgaaaatgtacgcttctgatagtcaactaccccgcctatcccaccctgctgtctcccaggaaggtagctggaactgcaagtggggcaaagctcccagcactaccagccagtggcaagggccttcacctgcccaccttttgaactgaggtttttcctccagcagaaccgaaggcccatgtgcttccctgtaaagtgatgcaactgggyaggaagctcagatgccagcaactgtgatgtcctagatagggaaaaccctgcattgcaaactcaggtcttgctttggaaaaaaaggagtggctggatttccttcttgctgtctagaaaattgtttcctgcccaaaaatggcttaattaggaagctgagtttgtttcctaggaagggattctccttctcttccttctgcg

SEQ ID NO: 510882 - DNA, 585 bp, Homo sapiens
gtgagatcctattaaaaaaaaaaaaaagaaaagaaaggaaggaaggaaggaaggaaagaaagaaagagaaaagagagaggaaggaaggaagggaaagaaaaagaaagaaaggaaggaaggaaggaaggaaagaaaagaaaaagaaaaaagaaatgaggataaggctgtggctaaggacaggctgaggccaggctaataattgggacagggctggatctggggatgaatgtgaggttgggctggggctagggctagcggttggagagacggctggagctgggaagtagatggggctgggatatagttagagatggggctccctctgcattaatctcctctccctgcagtatcrggggccctgaggatcctcccagaagtaaaggtagagggggagctgggcggatcagttaccatcaagtgcccacttcctgaaatgcatgtgaggatatatctgtgccgggagatggctggatctggaacatgtggtaccgtggtatccaccaccaacttcatcaaggcagaatacaagggccgagttactctgaagcaatacccacgcaagaatctgttcctagtggaggtaac

SEQ ID NO: 510883 - DNA, 405 bp, Homo sapiens
gctggaccttaacgatgccaccaacatattaataatattctttataattccataatttcatttatacatttatacatctcaaatcaactctatgcaaggcactgcacaatacttgatgggagatacagaagtgaagcagaactagttttccctaaaatctcttgataagaaagataaggcaggtgcataaacatctgtagcacaagatatggtgtaatgagacatttttgtacttagactcccttgtataggagcccagttattctaacgtgtttctatggccttctcatttacacctcatttatcagaatgcaccataaaccacattattttacctcatttcaagatcttcttcattcaaaataggagtgtatgamacaggctatatatattaccttctaaaaa

SEQ ID NO: 510884 - DNA, 574 bp, Homo sapiens
aatgtgtatattaattttgactgaatagacatttaaatattcttatccattaacataaatattttagttgctttaataaaattatgtattttttatctatccttcccatttcattcattgttaaatatatattatctttgtcactgttctgaatagatttttctccatgtctatttttcttggtttttactttaataaaaaatcacctttgatttttggttattctttttatgtgcaatcacattggaaatttgtttattatttcaaacagctttaaactacagttgcttggattttgtaggcataaaatatgtcagtaaaaatagatcattttactgtctcagttttttttcttaaaatgatgataatagtacctactttataacaactctatgaggaataaatgaattaaaatacataaaacattttgaaaagcacttagcatattagtrcttaatgaatgttagctattaatagtaatgataagcattcctgtctagtttcttattttagttaaaatgacttacatgtatttccatgtacgaggatattctagtgcccattgcttttctcc

SEQ ID NO: 510885 - DNA, 279 bp, Homo sapiens
aactgtcactgtttgctgatgatatgatcgtttaccacaaggatatttaaatctagagagaaaataagagcatatgytcctctctttcctacatcactgatttgaatttctgacattagtcagaccattggagaactgctagaatcaagcatcatgtagaaaataaatagtatcatgcttgaagttcttcattagcgcctgtagctatcaagtaataggaacactgtaatggtgttctgagcttagttactatgatctctggggagttcaaagtaattt

SEQ ID NO: 510886 - DNA, 493 bp, Homo sapiens
gctggccgctccgagtgcagggcccgccaagccccatgcccacccggaactctagctggcctgtaagtgcagtgggcagccctggttccctcccttgcctctcctccacacctccacgcaggctgagggagccagctccagcctcgagcatcccaggaaggggcaaccacagtgcagcgcaggctgaagggctcctcaagtgcggccagagagggcgcagaggcygaggaggcaccaagagcaagtgagggctgcgagggctgccagcacgctgtcacctctcacaacctcaatggttaccttgtctgtagtatcagaatcccttctaagaatccttaacaggtgtgtcttcaatgcctgtttgaacagcttgactaagagggagtccctaaccccagagtcatttgatcctaaagtgtacagctcagtttgataggcaaccactctttggctgaacattctcttaatatacatggcttagcagtagctttta

SEQ ID NO: 510887 - DNA, 483 bp, Homo sapiens
atgagactatgagtagctataaaaggtgggtgaatattaatctgcgttttaaagagaaagtctgacatgtagggagcagcgttttggtgtagaagataggcattatatgatttgctatgaaccagcaaatagggttaatctctacccatttatcagaaagactgatgattcctttttgcttgttaattcagggatctttttcaaatatcagatgtctttgtgacttgcattttattgctcaacaactttccaaggttactgtatttatggtgaagagtaatttgccaattcaaccactgttgcttgggatagcattcatcctgatttccagttataagttcatatttattgttatatgtgatgaattgtctgtcactgctgagtgatgcccagaaacttgactgtggtgacygaaaagccatcaaatctgagcatgaattgttcctggaaggtaaaatataactaagtatgttcatatccata

SEQ ID NO: 510888 - DNA, 581 bp, Homo sapiens
ctgcctcttttagtaaatgaagttttatgagaacacacatatgccaattcacttatgtattacttatgattgctttcatgctgcaatggcagatttgactagttgttaccaagaataagcggtctacaaagccgaaaacctttaytctttgactcttgacaataaaagtttgctaatcgacattataaaacaatctattgggaattttattgattgttatgtttcatctatgtattgagcaataatcttctgtgattaaggaagttcttagagataattctacccctcagcaatttgaaatctaaaataagacaaatacacatgaagataaccactaagttcaaccagagtaggggttgccactttgcaacagtttgtcccaaggttagctatcacttggcatatattaatcatatactcatagaactaaatatgaagaagtatttacataaagatatcattttatattagattaaacattaaattactttgatgtgtttgagaaattttcatgaagaagacagtcttgatctggactctgaagagaagggaagattttaaatggggaagaatgagaatgg

SEQ ID NO: 510889 - DNA, 581 bp, Homo sapiens
ctgcctcttttagtaaatgaagttttatgagaacacacatatgccaattcacttatgtattacttatgattgctttcatgctgcaatggcagatttgactagttgttaccaagaataagcggtctacaaagccgaaaacctttattctttgactcttgacaataaaagtttgctaatcgacattataaaacaatctattgggaattttattgattgttatgtttcatctatgtattgagcaataatcttctgtgattaaggaagttcttagagataattctacccctcagcaatttgaaatctaaaataagacaaatacacatgaagataaccaytaagttcaaccagagtaggggttgccactttgcaacagtttgtcccaaggttagctatcacttggcatatattaatcatatactcatagaactaaatatgaagaagtatttacataaagatatcattttatattagattaaacattaaattactttgatgtgtttgagaaattttcatgaagaagacagtcttgatctggactctgaagagaagggaagattttaaatggggaagaatgagaatgg

SEQ ID NO: 510890 - DNA, 581 bp, Homo sapiens
ctgcctcttttagtaaatgaagttttatgagaacacacatatgccaattcacttatgtattacttatgattgctttcatgctgcaatggcagatttgactagttgttaccaagaataagcggtctacaaagccgaaaacctttattctttgactcttgacaataaaagtttgctaatcgacattataaaacaatctattgggaattttattgattgttatgtttcatctatgtattgagcaataatcttctgtgattaaggaagttcttagagataattctacccctcagcaatttgaaatctaaaataagacaaatacacatgaagataaccactaagttcaaccagagtaggggttgccactttgcaacagtttgtcccaaggttagctatcacttggcatatattaatcatatactcatagaactaaatatgaagaagtatttacataaagatatcattttatattagattaaacattaaattactttgatrtgtttgagaaattttcatgaagaagacagtcttgatctggactctgaagagaagggaagattttaaatggggaagaatgagaatgg

SEQ ID NO: 510891 - DNA, 506 bp, Homo sapiens
tatcagccccaatttccactaaatcgctaaatmctattcccatgcagtgcatcaccttacccagtacctctcccttttttctgcccctacactattcttgatcaaatggatcactaatacatgccttccaccctctctacctgcctacaacccagtggtcttctttctattatcttgtctactttaattagtctaaaacattgctaccagattgttcttctaaatcattgctctgatcttgctccagattaaggatcctatgataaaatggtgtttctcatgacaaaccgattcacttgaatggtgtgaacccgggaggcggaggttgcagtgagccaagattgcactactgcactccagcttgggtgacagagcgagactccctctcaaaaaaaaaaagaaagaaagaaaagaagaaaaaaaaacagaacaataactcatcatatttttagtttcccagcatgccttgaactaaaatccatgcccaatttcaagaagtgtcctca

SEQ ID NO: 510892 - DNA, 600 bp, Homo sapiens
ctgagattttctgtttaaatcaccacacccactttcattttggcactttctatttttgtacttgtgcaagaatgtgctgttgttaaatctaagatctttgtgaaatctggtagattaacaagaagaagaagaagaatgattgcaattaaaatttctaagaaacgttatcttcttcagcagatttaatttaaatgtgaaattttattgattgattgattgattgatcgattgattgagatgggtctctctgtgttccctaggctgatctgaaactcctgggctccagtgatcctcctatctcagtatctgagactacaggcacccactactgtgcccagcagaatttacttttaggtaaactgttgctttttattcccagaaagccttttagcagaaccatgcctctgtggaccttaattctgtttggcaacagaaagttatatctgcatagatctacatttctgtgttttataaagtatctactgatcacactgagttatgtgttttagtggacattctgtgttggctgtttcaggcccactcaccygacttctttcagtactgaccactatagacttcataactgtgcccccttgcctt

SEQ ID NO: 510893 - DNA, 546 bp, Homo sapiens
cctcactagataggggtcttattttgctactgtaagggtaaaggggtaactgggaaggggtggcagggacgtggtaggggcagactctctggtcccatttctccaggctttgctgacagtggctggcttttagatgattgttaccttcatcttgctctcctgagctcagtaaaaaatggggatgcaggggttgctgcccaagcctgggcrctcctgggggttctgcatctcatgaagcagccgcatgatctgctgtgccgtggggctgtcgtggggaaaaccctccccagcctcttcttgttcaggctccacactgtgggagatctttggagacagggaggcagggctcagagcactgtgtgagccctcccctcatcctgccagcccaccctgcccaagggctctactcaccaccctgcttgttggcagccccaatctcctggggggctgggtcccatggagcaggctcatcagcagggttctgggcagctgccaggaatctgccatgccacttgttgcagtcgcccacaagctgcaacaccagct

SEQ ID NO: 510894 - DNA, 612 bp, Homo sapiens
cactccccagggcagaaacacaaacccagagttctttgtccatcttatcccagcatcagcaggccctgaattgttcattgaarttccttgaaggaagcttgctgtcaattagacttgttccgtttaaggttttgatctcaacaaaaatgagtgggtcatttcagtgcttctgtgagtgactctgagagacctgcagccacggctgcgtggccagccggcctcagccgtacagagcatgctttcacgttgacctgcctgaggccagccctcgtggaatgtttccaatagtaatgataaaaaatgtgcttgagcttaggtggcattgggaatatttttcaaagcacagtcacattcaaacaaacgctggggcaggcatgaccgactcctttataacctaggaaagagagattagctatggtgaattgggtccatgcagctattaagttgcaaagttgagacaggaatgcagatcttccatacccagccgtgtgatctctgcattctgcgaggcttccactaccctgtagagctggttaggtttatcttggagactctctctcctgctccaggttccagagcttttcaagagtcagagggccaggcgtggtggct

SEQ ID NO: 510895 - DNA, 542 bp, Homo sapiens
cctgccctggcagaggcactccccagggcagaaacacaaacccagagttctttgtccatcttatcccagcatcagcaggccctgaattgttcattgaagttccttgaaggaagcttgctgtcaattagacttgttccgtttaaggttttgatctcaacaaaaatgagtgggtcatttcagtgcttctgtgagtgactctgagagacctgcagccacggctgcgtggccagccggcctcagccgtacagagcatgctttcacgttgacctgcctgaggccagccctcgtggaatgtttccaatartaatgataaaaaatgtgcttgagcttaggtggcattgggaatatttttcaaagcacagtcacattcaaacaaacgctggggcaggcatgaccgactcctttataacctaggaaagagagattagctatggtgaattgggtccatgcagctattaagttgcaaagttgagacaggaatgcagatcttccatacccagccgtgtgatctctgcattctgcgaggcttccactaccctgta

SEQ ID NO: 510896 - DNA, 574 bp, Homo sapiens
ctgcctgccctggcagaggcactccccagggcagaaacacaaacccagagttctttgtccatcttatcccagcatcagcaggccctgaattgttcattgaagttccttgaaggaagcttgctgtcaattagacttgttccgtttaaggttttgatctcaacaaaaatgagtgggtcatttcagtgcttctgtgagtgactctgagagacctgcagccacggctgcgtggccagccggcctcagccgtacagagcatgctttcacgttgacctgcctgaggccagccctcgtggaatgtttccaatagtaatgataaaaaatgtgcttgagcttaggtggcattgggaatatttttcaaagcacagtcacattcaaacaaacgctggggcaggcatgaccgactcctttataacctaggaaagagagattagctatggtgaattgggtccatgcagctattaagttgcaaagttgagacaggaatgcagatcttccatacccagccgtgtgatctctgcattctrcgaggcttccactaccctgtagagctggttaggtttatcttggagactct

SEQ ID NO: 510897 - DNA, 612 bp, Homo sapiens
cactccccagggcagaaacacaaacccagagttctttgtccatcttatcccagcatcagcaggccctgaattgttcattgaagttccttgaaggaagcttgctgtcaattagacttgttccgtttaaggttttgatctcaacaaaaatgagtgggtcatttcagtgcttctgtgagtgactctgagagacctgcagccacggctgcgtggccagccggcctcagccgtacagagcatgctttcacgttgacctgcctgaggccagccctcgtggaatgtttccaatagtaatgataaaaaatgtgcttgagcttaggtggcattgggaatatttttcaaagcacagtcacattcaaacaaacgctggggcaggcatgaccgactcctttataacctaggaaagagagattagctatggtgaattgggtccatgcagctattaagttgcaaagttgagacaggaatgcagatcttccatacccagccgtgtgatctctgcattctgcgaggcttccacyaccctgtagagctggttaggtttatcttggagactctctctcctgctccaggttccagagcttttcaagagtcagagggccaggcgtggtggct

SEQ ID NO: 510898 - DNA, 532 bp, Homo sapiens
ccaagaacctggacaacttgtagtcacgaccttctaccagtgacgtctatagatggagtctgagaaaagcccaccattctgccagcttgtgatttagaaagtgcattcattcaacattggctaagcacatacgggccaggtacaattcttcatagcagggatataggatggaaaagaatcctatagattcagacaggatcccttggccctgaggtttacattctagtagacctttaaatcttggactctcagagctagcagagacttttgatactctccacctccttgagaaacgcaagcccaaggaggagaggtggcttgtccagaatcaaasagcaaattagggactgagtcagggcagaaatatggagttcctgacaaccagtcagactagcacttccccaagaggcaacaatcccaaggcatgtctggcagtgactggagcaggcatgtctggagaagagacagtaggcaaagagggcagcaacagaagagccatgatgcatgctccatgatctggggtccctccagc

SEQ ID NO: 510899 - DNA, 626 bp, Homo sapiens
gggtatagaaacatagtggacctgaaagtgtcaagagtccccttgaggtttgtggccataaattaaaagcaagacaatgcagagagatatgtgttttctctaggcaggatcatcagcctgaagctgaaggagagtgagcagagggtgggcttaaccaaggatggggttttctttccgaggacagtaagacaaagcggggaaaggtcaaggtagttgagggtatatgcaagaatctgagctgggtaaggaggacaagaaagggatgatggacaatgaaaaagaaagggccaccaggtcagaagcccttgtaggtgaaagctaggtggaacccagtactagaggcaataagacaaaagagaaaaggggacggtcagactggtgagtttgtccagattktgctggaggtgcggttatcagtaatgattaggtctacaaccacatttttcaaataatggggtgcaagtttagtaggcagtgaaatcagtttagtgggtcagaaacagcatcttattgttttaatgaaacaataaaaagcatgaaagtacattatacccagtaagagtaaatactgttttgtgaaacttctgtgtgtttgtattgggtcatcacataagctatatttctcc

SEQ ID NO: 510900 - DNA, 673 bp, Homo sapiens
acctgaaaacaactaggaattcactatagtgtcgcatgattacggagaagagaaatgggttactccgtatattaatacattcattccttcatttatttatgtattcacttattcaatatgcttcttttcaagcattggttacatgtgtcatgatgggaacaatgggaacaagcgagacagagcctgtcttcaggcttgtgggttggatgtgtgcagtgaaaacccagcgaatgtgcatcaaaccttgaatttgatgcatgagaaagtgtacaaggcaaagagaacaggaaaaactgatgcaaatatggtaacaatctagaggcaagagatagcatgcattttcaaagaattaagagtgcttcacactctttgcatacaatataaatactacctggaaaaaaaatatttttcagaattcatatcaaactgcatagtcaattaatttctaatactttagtaaggttttctctccttccttcgtttcttccttccttccttycttccttctttcctttatctctccctccctccatccctccctccttcctttcttccttccttccttcctttattcctaccatctttcctaccttccttcctctcttaacagtacttgagttttcttacatctcaagcaatgaatgcttagcagaatcctacatggtttgcatga

SEQ ID NO: 510901 - DNA, 625 bp, Homo sapiens
ccatcctctcacactttcctcatttctgtaaataagtctgccttcactaagttcttggaactggaatggcagcagtgtcaacattccctagtaagctattcattctgtagctccactgacattctatttagattctgcaaagttattttcaccatataataaaagtgtcagccatgatatgtacaattcaaagagcaartggattagttttatgttgctgcagtaacatattaccaaaaatgtggaggcttagaacaatacaaacttatcatctttacacttttgtgagttaaaagcctgacacaggtctcagtgggttaaaatcaagttgtgtgcaggactgggttcctttctggatgctctaggagagaagaatctgtttcttgtcctatttcagctcctagaggctgctgatacaccttggctcatactctacccctttatcttcaaagctagtaacattgcatctttctgaccattcttccatagtcacatttccctctaagcttgctgtggaaggttattcatttgtaagatcatatacgataagatgcactcaccttgttaagctttctttgactgtcaccttctgtcttcctcctataaaaaccttgtgattacatta

SEQ ID NO: 510902 - DNA, 625 bp, Homo sapiens
ccatcctctcacactttcctcatttctgtaaataagtctgccttcactaagttcttggaactggaatggcagcagtgtcaacattccctagtaagctattcattctgtagctccactgacattctatttagattctgcaaagttattttcaccatataataaaagtgtcagccatgatatgtacaattcaaagagcaaatggattagttttatgttgctgcagtaacatattaccaaaaatgtggaggcttagaacaatacaaacttatcatctttacacttttgtgagttaaaagcctgacacaggtctcagtgggttaaaatcaagttgtgtgcagkactgggttcctttctggatgctctaggagagaagaatctgtttcttgtcctatttcagctcctagaggctgctgatacaccttggctcatactctacccctttatcttcaaagctagtaacattgcatctttctgaccattcttccatagtcacatttccctctaagcttgctgtggaaggttattcatttgtaagatcatatacgataagatgcactcaccttgttaagctttctttgactgtcaccttctgtcttcctcctataaaaaccttgtgattacatta

SEQ ID NO: 510903 - DNA, 607 bp, Homo sapiens
tgaactaattattccagttttctgtttgtttgtttattacacagttctttcttgtgtatttttatcaaccttaacctcctgtgtcttcttgtcactctgacatgtgaatgagatcttatgcttgaatggggttttgaattagtcttgtttttctatggtagatagaaggtgtttaactgtctcagtgttgtatgttgtaaataaaagacaatgcttttttgctctttgtaaataatttgtatatctgcattgaaactttaaggtttcatcttcatctttttttatttcaaagtgaataatttttacccgaattacttaatgcacttcttttatcattaaactcttcttagamtaataaaacttctttttttatattattggccctcccttttctttactctctcccacctattatttctcctgtaattgaattgaaattgtatacaggtttgatcttcttaatgtattctccatttttagaactctcttttctaatttcaatcactttgtagtttcattttgtattgtgatgtatttctctcactgatcttccagacagatcttatttttctgagatgattagtagtttcttgttagaagtgaggta

SEQ ID NO: 510904 - DNA, 631 bp, Homo sapiens
tcttttaaacagatgtttctagcttgtcagggaaataaatttgtgtttatgtggatcaattgcactgtgtagctgataggatgaactctgcttttgaggaattaaatagtaaaaaagttggagataaaatagtttacttaattattctttgttttaaaaataagctgatatttattttacattatttactcttatatctacaaaagtgatcttactgagaaaggagctacactctttgctaagaggttaacactcatcaggacaccctggctatggagaggagctaccctctacgggtctcctccaagctgttctattgctccataaagctcctcttcatcttgctcaccgtcaacttgtctgtgtacctcattcttcctggtcacaggacaagaacttgggaaccactgaaaggtggggctaaaagagctttaacataattggggctggaacacaccccttgccctccatattacagtcaacaagaaggagagaagaatgaaggagagaagagctgcagcccttcrgggaccccaacctaggaggtccctgagccagggttgtgacaccctctttagggggctgcagttcctggtgtctccgagattctgggcaaaactgcattccccac

SEQ ID NO: 510905 - DNA, 588 bp, Homo sapiens
catgctaactaacaatgattgacaagcaagctacgtatctgaagtaggtattttgccatttccagaatgtgagggttcccttcttttccaatatcacatttaccagtttgttaaccactcaggtgtttatgcagagcactatgcagtttttcttttggctgggtgtatctcactatctcacttgcctccgtgactcattccacagcactgtagtcctgttaattcttaaattctgttctatgtttgtggagtcacactgaatttgccagaggaattttgttaaggatgtttctatggagagaagagtacctcagtttccttcccagatgtgtacggtatctttcaaaggccctgaccgggactaggatgctaagacgctgaccagggagccgctctaggtgccctctggtgggcagactggagctaaggacactgaaagaagtccaatcagactgaaaytgtatcacttcagcaagcagagaagaaaattcaggcattcatgagcttaccatagccagagcctggtctatagatttcgctcagcaaaggtcccaggaagcaggcctgaaagccactggaggagggggg

SEQ ID NO: 510906 - DNA, 515 bp, Homo sapiens
ctgtatgctatacactaagagatttaggaaggaagcggggtcagggattgaccccagactcmatcttttcaagtggggaagaaagatcttccgattgaaaaataaaggcaaaaaaggcttcaccgtcacagaagtttcaacaaccaactggatatttaaaacagttatcaaagcaaaaccattgtatgttcacttacatttttacatagtccctcaaactcacaaaatgctgtttactcagggacttcttccggtcttactagggagcctggaaagtgaggggaggattgcaagggaccactagaaccctcttcctcaattccccttctctgagaagggaggctacagcttgcctctctaaccactaaaaggcatgaccctcctcaaagttaatagccggattccctgatagatattttcactaaatgaattctcataaaactctcactaagatttagagaaggcttccagggttgaattcctgaacattaagaacagcatgttttttaaaagtt

SEQ ID NO: 510907 - DNA, 515 bp, Homo sapiens
ctgtatgctatacactaagagatttaggaaggaagcggggtcagggattgaccccagactccatcttttcaagtggggaagaaagatcttccgattgaaaaataaaggcaaaaaaggcttcaccgtcacagaagtttcaacaaccaactggatatttaaaacagttatcaaagcaaaaccattgtatgttcacttacatttttacatagtccctcaaactcacaaaatgctgtttactcagggacttcttccggtcttactagggarcctggaaagtgaggggaggattgcaagggaccactagaaccctcttcctcaattccccttctctgagaagggaggctacagcttgcctctctaaccactaaaaggcatgaccctcctcaaagttaatagccggattccctgatagatattttcactaaatgaattctcataaaactctcactaagatttagagaaggcttccagggttgaattcctgaacattaagaacagcatgttttttaaaagtt

SEQ ID NO: 510908 - DNA, 515 bp, Homo sapiens
ctgtatgctatacactaagagatttaggaaggaagcggggtcagggattgaccccagactccatcttttcaagtggggaagaaagatcttccgattgaaaaataaaggcaaaaaaggcttcaccgtcacagaagtttcaacaaccaactggatatttaaaacagttatcaaagcaaaaccattgtatgttcacttacatttttacatagtccctcaaactcacaaaatgctgtttactcagggacttcttccggtcttactagggagcctggaaagtgaggggaggattgcaagggaccactagaaccctcttcctcaattccccttctctgagaagggaggctacagcttgcctctctaaccactaaaaggcatgaccctcctcaaagttaatagccggattccctgatagatattttcactaaatgaattctcataaaactctcaytaagatttagagaaggcttccagggttgaattcctgaacattaagaacagcatgttttttaaaagtt

SEQ ID NO: 510909 - DNA, 681 bp, Homo sapiens
gtcactgtgcacctacaacgtgccagacaccatactcctcaacactctgtaggcacagaaggaacagataaaaatccctaccttcatagatattattctaggggtaacacaggtaaataaaacattaaaatagttttcacatagtagcaaattccatatagcaaaataaaacagaagaaggaatagcaaatgagggagatgccctcttaaacatggtgctgagggaaggcctccctgagaaagatatcatttaccccaaatataaaaaagcaagtaatagaaaaaacaggtaaaaggtgttctagacacttaaacctgccacaytgagaactcagggttctgatgcaaaacctcgctgcatagaatgcattaacttatttttatacatttaaacaaacaaactctacttaagaactgtgttctaaaggaaggagcatattacaggaaggcaatttttggtcagagtagacacacttaaaaactaaacctattgaaagaccaagaacaactgaaagtctttgctttgtcagatttttgaccaaaaggaaaattaaagaaacacaccgtgcccatccaatgatttcaccaaggaattttaagagagaaaatcctacttcttcctcacccagtagccagtgaaatgactgagcaaattcacaagttcactggggctgctttcat

SEQ ID NO: 510910 - DNA, 483 bp, Homo sapiens
ctccccactctgtaccttctccatccatattggcggtgacccagacatgcctgtcctcrtggtgcccgagggtggtgggtgtgtcctctgctgaccagctcttcatcaagagtctcaacagtgccaggtacctctatgaggtcatggagcagccccgccatgggaggttgacttggcgtgggacacaggacaagatcactatggtgacatccttcaccaatggagacctgatgcatggccagctggtctagcagcatgatgactccgagatcacagaagatgatatcccatttcctgctgccatcaggaccagagcagtggtgacgtggcctgggaggaggtatggggtgtcttctgagtggccatccagcctgtgaatgaccacgcccctatgcagaccatcagctgcgtcttccacgtggcctggggtaggtggcggctgctgactacagacaacatggccttcagcaatgctgattcggg

SEQ ID NO: 510911 - DNA, 483 bp, Homo sapiens
ctccccactctgtaccttctccatccatattggcggtgacccagacatgcctgtcctcgtggtgcccgagggtggtgrgtgtgtcctctgctgaccagctcttcatcaagagtctcaacagtgccaggtacctctatgaggtcatggagcagccccgccatgggaggttgacttggcgtgggacacaggacaagatcactatggtgacatccttcaccaatggagacctgatgcatggccagctggtctagcagcatgatgactccgagatcacagaagatgatatcccatttcctgctgccatcaggaccagagcagtggtgacgtggcctgggaggaggtatggggtgtcttctgagtggccatccagcctgtgaatgaccacgcccctatgcagaccatcagctgcgtcttccacgtggcctggggtaggtggcggctgctgactacagacaacatggccttcagcaatgctgattcggg

SEQ ID NO: 510912 - DNA, 483 bp, Homo sapiens
ctccccactctgtaccttctccatccatattggcggtgacccagacatgcctgtcctcgtggtgcccgagggtggtgggtgtgtcctctgctgaccagctcttcatcaagagtctcaacagtgccaggtacctctatgaggtcatggagcagccccgccatgggaggttgacttggcgtgggacacaggacaagatcactatggtgacatccttcaccaatggagacctgatgcatggccagctggtctagcagcatgatgactccgagatcacagaagatgatatcccatttcctgctgccaycaggaccagagcagtggtgacgtggcctgggaggaggtatggggtgtcttctgagtggccatccagcctgtgaatgaccacgcccctatgcagaccatcagctgcgtcttccacgtggcctggggtaggtggcggctgctgactacagacaacatggccttcagcaatgctgattcggg

SEQ ID NO: 510913 - DNA, 483 bp, Homo sapiens
ctccccactctgtaccttctccatccatattggcggtgacccagacatgcctgtcctcgtggtgcccgagggtggtgggtgtgtcctctgctgaccagctcttcatcaagagtctcaacagtgccaggtacctctatgaggtcatggagcagccccgccatgggaggttgacttggcgtgggacacaggacaagatcactatggtgacatccttcaccaatggagacctgatgcatggccagctggtctagcagcatgatgactccgagatcacagaagatgatatcccatttcctgctgccatcaggaccagagcagtggtgacgtggcctgggaggaggtatggggtgtcttctgagtggccatccagcctgtgaatgaccacgcccctatgcagaccatcagctgcgtcttccaygtggcctggggtaggtggcggctgctgactacagacaacatggccttcagcaatgctgattcggg

SEQ ID NO: 510914 - DNA, 563 bp, Homo sapiens
atcgcttgaacctgggaggcggaggttgcagtgagctgatatcgtgccattgcactccagcctgggcaacaagagtgaaactctgcctcaaaaaaaaaaaaaaaaaaggaaagaaagaaaagaaaatatatctatgcaccagagctcaacackaggttaggagcatttctgagatttggagctattcaaccatggaagttcctggcacatacatcaggtattcacaataccctttctcaggtgtttggtcactgctagtgagcctgcctggatcagtgtttcccaaatggcagtcatttgcatctttgcattttttttggggggggggggttgtgggggtatattccataccagattttttaaaaattgacattaaaaatacatgtataaaatgtgtaaagtgcactaatctaaagtgcactggatgtattttttattgatgtacatacttttgttatccatcacccaggtcaaaatacagaatcagcaccacagagggttccctcctcctccttcccagccaataatcttctcctcctacctaaccaactgttcttaattca

SEQ ID NO: 510915 - DNA, 563 bp, Homo sapiens
atcgcttgaacctgggaggcggaggttgcagtgagctgatatcgtgccattgcactccagcctgggcaacaagagtgaaactctgcctcaaaaaaaaaaaaaaaaaaggaaagaaagaaaagaaaatatatctatgcaccagagctcaacacgaggttaggagcatttctgagatttggagctattcaaccatggaagttcctggcacatacatcaggtattcacaataccctttctcaggtgtttggtcactgctagtgagcctgcctggatcagtgtttcccaaatggcagtcatttgcatctttgcattttttttggggggggggggttgtgggggtatatwccataccagattttttaaaaattgacattaaaaatacatgtataaaatgtgtaaagtgcactaatctaaagtgcactggatgtattttttattgatgtacatacttttgttatccatcacccaggtcaaaatacagaatcagcaccacagagggttccctcctcctccttcccagccaataatcttctcctcctacctaaccaactgttcttaattca

SEQ ID NO: 510916 - DNA, 636 bp, Homo sapiens
caaaagactgctgtttgcattagtcacgaatgcaagagcacaccgagcaggatagagcaggagtttatatccctaacgcagtccctacctctctgtcatttccacatgggctggagtcggactacacaatctaagcagacttgatttgctatcgcgaatattctccctaataaggaagggagagggaatgtgagttacaggttgggactgaygggaagagttgtttacaaggcaggtaactgagcagataactaagcaggtaaataggggtgagaaggtacagggaaattgttcttaggaacaaagaacaaggaagttgaacaggttaaacctttgaagaggaacttactgtacctaataagtttttttgattggctaattaaatgtctattcattattgccaaaaagtgcctaccccaacaacaagataccaaattttagaaaatgttggagctctctctgaatctaggaggaagtgagtagtttagcttttatttagtagttaggaccttaagtaaatcactttttttactgtgtttctgtataacatagataatattttttgccctgcaagagagcatatagaggaaagctctttggcagcgatactgtgccctatgaataaaaaagtgatgg

SEQ ID NO: 510917 - DNA, 560 bp, Homo sapiens
cagtggcatttcagtaactgcaactgttatctcatacattcctcaaattaaagatataagggaagggtacttgccccctctaagagaaagggctcctgtgagccttcatctgcccccaccgaaaagcagccctttttagctcagttacaaaagaaaaaagtcctgtgactttgtgattaaaaacttctrtcaaccccacccccccacataagtgcaacttaaggaggtgcaataaaccatttaaaactatatacagcagccgctcaaacaccgtttatccggtccagtttcaaataaaacaaaaaattttttttttcttggttgcaaatgccttgatttgcaactgtgagaaacagtgaccagcagtcccccagacacaaatttgctataatgttaaaagctgccaggaaagaaaaaatatcttgttccaaacgacttaaaaactgttttaaggagtgtaaaaaggaaccggtaaaaaccctcgagcgtaaaatatgaaatatgattttggtttaaatgaagagcaaagtctccttattgtttacagtaaaaaacaccag

SEQ ID NO: 510918 - DNA, 589 bp, Homo sapiens
ttcttattgatttggtaagttttttatgtattctggataagagttattgggagtgtcaggaggcagccaaatacctaggcaaatagggaagggtcccctggtgaaaccccacctccaagctgaagatagtttaaagcctgaaagccaaggtacaagtgaaatcctcagaaagtattgaaaatttgtctttctgtttggtgcacttttctctgattgagccccacctttcacctattttacatataactaccttttcctaattggttttctacactgttatgcacacctttgagtggtgtcttctctttaaccatttttgcatactcacaaaccaatcagcacatagtacactggccccagacccagctgcacagggaaatttcccaactttgagwacaggaaacaacccccatgtcccttctttgcagagagcttaatgcgaatctgtttctgcaacctctattattttccattttctagtttaaatatactttgaaaaacttcacagagtctgataaatgatagctttaaaagagctcaagttttgttcttctctaattgccttggctattcttggctttttaatttt

SEQ ID NO: 510919 - DNA, 582 bp, Homo sapiens
gtgcctaaagtaatagccattgatggttaaatgactgatatcctttaaagtgattcaaaatatagttcagatacaaagaaatagtcataagctattgtcttgttaatagctttgttaatgccaatttttatatatatayttactcttttaatcaaaactaatttattgaaatttaatttcttaaatagttttttgacatatagagcaacaaatttttttgtttgctgagttaaatcctgggaaataaatacagacacagaagaatttgtccctgggaaataaaaagagacacacaagaatttcaagttcagtctcactgttagcagggcggtgccagtctgggttctagagtaaagacatgttgtagaaagggtctgttttaaggccacctgaatctttgaagggaaatgttagattttgaaaaagtaagcagcattatcaagagaactcagacaaaaactgcaatttttcaaataagcttgttttctttctttctttctttttttttgattacatatgagcatcttccttgtgttttttttgtttttttttttttttttttttgcagctacagtaattgta

SEQ ID NO: 510920 - DNA, 582 bp, Homo sapiens
gtgcctaaagtaatagccattgatggttaaatgactgatatcctttaaagtgattcaaaatatagttcagatacaaagaaatagtcataagctattgtcttgttaatagctttgttaatgccaatttttatatatatacttactcttttaatcaaaactaatttattgaaatttaatttcttaaatagttttttgacatatagagcaacaaatttttttgtttgctgagttaaatcctsggaaataaatacagacacagaagaatttgtccctgggaaataaaaagagacacacaagaatttcaagttcagtctcactgttagcagggcggtgccagtctgggttctagagtaaagacatgttgtagaaagggtctgttttaaggccacctgaatctttgaagggaaatgttagattttgaaaaagtaagcagcattatcaagagaactcagacaaaaactgcaatttttcaaataagcttgttttctttctttctttctttttttttgattacatatgagcatcttccttgtgttttttttgtttttttttttttttttttttgcagctacagtaattgta

SEQ ID NO: 510921 - DNA, 582 bp, Homo sapiens
gtgcctaaagtaatagccattgatggttaaatgactgatatcctttaaagtgattcaaaatatagttcagatacaaagaaatagtcataagctattgtcttgttaatagctttgttaatgccaatttttatatatatacttactcttttaatcaaaactaatttattgaaatttaatttcttaaatagttttttgacatatagagcaacaaatttttttgtttgctgagttaaatcctgggaaataaatacagacacagaagaatttgtccctgggaaataaaaagagacacacaagaatttcaagttcagtctcactgttagcagggcggtgccagtctgggttctagagtaaagacatgttgtagaaagggtctgttttaaggccacctgaatctttgaagggaaatgttagattttgaaaaagtaagcagcattatcaagagaactcagacaaaaactgcaatttttcaaataagcttgttttctttctttctttctttttttttgrttacatatgagcatcttccttgtgttttttttgtttttttttttttttttttttgcagctacagtaattgta

SEQ ID NO: 510922 - DNA, 511 bp, Homo sapiens
attttaactctctgtggtatagtttcctcatcagtataattacaatactctctacattctaattatgcagaaaagacagtacgccttagtccattttgtgttactatagaggaataactgaggctgagtaatttataaacwaaaaaagtttacttggttcacaattcagcagacagtattagaagcatgatgccagcatctgcatctagttagggcctgaggctgcttctactctcggaggaaggtgacggggagacagggtgtgtagagatcacacagcaagagagaaagcaagagagagcaaaaggagaggtaccagactcttttcaacagccagccctcctgggaattaacaaagccagaattcactactcttacccccagatagggccttaatctatgcatgaggcatttgccctcataacccaaacacctctcaataggccccatctccactacagggatgaaatttgaacatgagatttggaggagacaaacatacaaaccatgg

SEQ ID NO: 510923 - DNA, 511 bp, Homo sapiens
attttaactctctgtggtatagtttcctcatcagtataattacaatactctctacattctaattatgcagaaaagacagtacgccttagtccattttgtgttactatagaggaataactgaggctgagtaatttataaacaaaaaaagtttacttggytcacaattcagcagacagtattagaagcatgatgccagcatctgcatctagttagggcctgaggctgcttctactctcggaggaaggtgacggggagacagggtgtgtagagatcacacagcaagagagaaagcaagagagagcaaaaggagaggtaccagactcttttcaacagccagccctcctgggaattaacaaagccagaattcactactcttacccccagatagggccttaatctatgcatgaggcatttgccctcataacccaaacacctctcaataggccccatctccactacagggatgaaatttgaacatgagatttggaggagacaaacatacaaaccatgg

SEQ ID NO: 510924 - DNA, 606 bp, Homo sapiens
ctctaacaaagacaactttgaagtaagttttrctatttttgttccaatttgagagatcgatttcatcacataaacacatatcatatatttaattattttacattaagttgaaatcactgaaatcaagttagatcatcctgtaaacaaaatatataatcaattactaaagtctgaaacgtaggttgtagaaagacagttttttttagaaaacaaataatgaaatctacatttgagatttctattccctaactaaaagaactagtctcaagatatttacaatcttcaactgtcttctgtttgccttatttctctctctccaaccagatctcttttgtttaatcggatatagaatttcattgaattcacaaaactgtagttagaaaacacgggacctttacgagttgtctggcattgtgatgcagagtgagatgattttttaaatataattctatcatatgttcattctttaatttcattttcttcccttcataagataaaatttaaatgatgcaaaatggtcagttttaaaatgtctttttccttccctcagtttgaattccaagatagctctgtttcagcaaaaataactcttaacatttttaacta

SEQ ID NO: 510925 - DNA, 459 bp, Homo sapiens
gtgctcactgatgcattatgcctggtacatagyaggtactaataaaatttgttgaatgaatacattttaatcacctctggttagactatgagaccagatgcctatctagtcctcaaacacatcagccaagtaatagcatagttgtttttgccagtgccatttttacccttgtagtctcaactacaaattccttggatgagtgttgtagactgacttacagccacccctccgacagcgacggtccctttataaaacaactgtggaagacacatgagaaaccactaagttttgatgggctattagatttttgacattcggcaggcatatgttctaggggctttgggagaccttaaacatgaggaaaccactacatcatataattgctcctgtaagtacaactgtaaaattctaagtgactcctttagagcccattatctgagttactatcatgtcactcga

SEQ ID NO: 510926 - DNA, 470 bp, Homo sapiens
tgggtgcattgtaccagctatgtgactcacttttgaacaacagacctaatactgctttacaatgtttatttcagcaaaactaaaaattagatacatcagggatttcggggaccacttacaaataatcaaaactgtgtatgttaaacttgcaaaatccaggagtcttctgtatggctattactgagcatcctcattcttcctattcagctagaaactagaagaagcgttcttgagacctttaccagtacaattatcataattattgcctgcattctgccctagcttccatctctcacaggttttccctgtccttccagtatcttyctagtcaaataagagttcacactgcctctatttgtcctttctctcttccctatttataggtagtgaatcaaatgtattatttggggccaggcacggtggctcacacctgtaatcccagcactttgggaggctgaggcgggtggatc

SEQ ID NO: 510927 - DNA, 470 bp, Homo sapiens
tgggtgcattgtaccagctatgtgactcacttttgaacaacagacctaatactgctttacaatgtttatttcagcaaaactaaaaattagatacatcagggatttcggggaccacttacaaataatcaaaactgtgtatgttaaacttgcaaaatccaggagtcttctgtatggctattactgagcatcctcattcttcctattcagctagaaactagaagaagcgttcttgagacctttaccagtacaattatcataattattgcctgcattctgccctagcttccatctctcacaggttttccctgtccttccagtatctttctagtcaaataagagtycacactgcctctatttgtcctttctctcttccctatttataggtagtgaatcaaatgtattatttggggccaggcacggtggctcacacctgtaatcccagcactttgggaggctgaggcgggtggatc

SEQ ID NO: 510928 - DNA, 586 bp, Homo sapiens
tgtcacctgccttactgtgtgccatgagccagcccaaaaaagtccccactagtccccaggggaggcgctaggggtgctgggctggcttccctcctctccaggtggtgcctgccctcctggggcatttcccagcccttcttcctctgcatctcargctccctggggaggcagatatgctctcaggacatcctggcagagcacagccacacgtctgccctggcaggcccaccctgggtggaggaggggctctatatgccagggctctctctctcggtggctggctttctttccacgagcatggccagatgacgaggctcacccgcagcactactcacacctccaggaagggaagttgatggcagggttctggctgcagccaggcctgcgggagcttcctccctgatctctctcactcaaggggaaagctcagggctgggcatgaaggctggggaaaggcagggaaggcagagtccccccaggctggtcaaggccccgatagccccatgtctccctgagggggcggctttccccatgaagagggtcctggtcaccaaggcatgaggacatgcccaaggctggcccatca

SEQ ID NO: 510929 - DNA, 422 bp, Homo sapiens
ccatggtcctcgcatggggagccccaratgtccccctgcaggcagggacacaggccctgcttaggcctcagcctattctgaggctccagtctgctcctccgcagcctcctcctcctggtctgtcagcggtaggtggccctccctgccaggcccctgcccaccttctcagccatgctcaggaggcatctccttagggatgcccatggtggttgctgcagccatttcctcttctagcctgtgagcttattgtcggaggggaagggtctggatccctacctccaacatgtcctcttggcgcctagcaccgagctctgggcttaggaagtggtgctgaaagactccttcatgccaggagtgatggaccagagtgaaaggctgctgggttgacccttgctccctgacccctgaccctgcatgtgtgg

SEQ ID NO: 510930 - DNA, 541 bp, Homo sapiens
cccagaacactcacaaaaagaaatttccytcatttgtttaagcaacactgattcctttcaatgttcttcactacagtttaatttctactttagtgagaatcttttagtctgagtgtatggattgcacatcaggctgttaatatccttttcagagcctacatgttacaaagttgtagtcagtgtttcatgtttatatgccttagctttcttacacaatacgattgttgcatatagaaagtgtgtgactatctgacaccccactaatattcactggcacaacttaaaggtgacctggcaaatgcatgagtcgaaattctgtcagatgatgagtaagggaaaacatttcattgagaaggctgaataacaaattctctcaacaaaaatagttgcctcagctgaatttgcaaaagtacaattttttgtggtttttgttttagtttaagcaaggataatcaaattacttcttttttattatgagcatatttattgttctcaaatagtttataaaatgttaagctttaatatgttagtgatattaatt

SEQ ID NO: 510931 - DNA, 541 bp, Homo sapiens
cccagaacactcacaaaaagaaatttccctcatttgtttaagcaacactgattcctttcaatgttcttcactacagtttaatttctactttagtgagaatcttttagtctgagtgtatggattgcacatcaggctgttaatatccttttcagagcctacatgttacaaagttgtagtcagtgtttcatgtttatatgccttagctttcttacacaatacgattgttgcatatagaaagtgtgtgactatctgacaccccactaatattcactggcacaacttaaaggtgacctggcaaatgcatgagtcgaaattctgtcagatgatgagtaagggaaaacatttcattgagaaggctgaataacaaattctctcaacaaaaatagttgcytcagctgaatttgcaaaagtacaattttttgtggtttttgttttagtttaagcaaggataatcaaattacttcttttttattatgagcatatttattgttctcaaatagtttataaaatgttaagctttaatatgttagtgatattaatt

SEQ ID NO: 510932 - DNA, 458 bp, Homo sapiens
ctaacttttattatagtatgtaatatcgcatatattatggaatatcatatgtgatatagttgtgttaatattttgatgtcatatattatataacatatttttattataaatgtatattactcatatcagttattgaataatagttatataggaggcrctaagtaaaagtcaaagtatagttatctagtttaaaattattatgaataatttccactttaaaaaaaataatttaatgggttaagttaaagtgagcccttgtttccattgattttctatttaagacctaacactttttaaaaatttaatattgaaagatactataattcattaattttgatttttatttcttttttactgttattcatttctatactaatgaaatttctagtgttaacatggattatttggtacatatatgaatctgaaatatctaagtaatataaaaatatatattattt

SEQ ID NO: 510933 - DNA, 458 bp, Homo sapiens
ctaacttttattatagtatgtaatatcgcatatattatggaatatcatatgtgatatagttgtgttaatattttgatgtcatatattatataacatatttttattataaatgtatattactcatatcagttattgaataatagttatataggaggcactaagtaaaagtcaaagtatagttatctagtttaaaattattatgaataatttccactttaaaaaaaataatttaatgggttaagttaaagtgagcccttgtttccawtgattttctatttaagacctaacactttttaaaaatttaatattgaaagatactataattcattaattttgatttttatttcttttttactgttattcatttctatactaatgaaatttctagtgttaacatggattatttggtacatatatgaatctgaaatatctaagtaatataaaaatatatattattt

SEQ ID NO: 510934 - DNA, 598 bp, Homo sapiens
cccctactccagataaaatcacaccatgagttttttccttcgtcttgaaacagcttgtctaaattaaccactccttatgacttttcccagaagccccatcttggttcttgcctcactactagcccacctggayaggaaaaattataatgtattgtaagtgaacaaataccatgtaaaaatcctcatggattactcttgacattttgaaaacaacacctcttagcactgtcatcataatactgtgttttgtaacagtggctatctaacctggaaagccattaaggaggttggaacagatcaacagcatccccaactttttggttcctctgttcatctaattggctttttaaggaaacagctctgccatggtaactgggagaccctgcctgtcatcacatagaccatgtaggcaatgtttgaccaaggtctgacccaagctttggtgaaatggcctgaaattcctcctgggacaactgtagacatactggtaaatggctgttgcatgtagtttctcatccatatcttataggagattcccacaagaccatttgtgatccctattcctagtctcagcaatgtacatctatcttgctcctct

SEQ ID NO: 510935 - DNA, 539 bp, Homo sapiens
ctgggtgcggtggctcatgcttgtaatcccagtactttgggagactgaggcaggtggatcgcttgaccctcaggagtaggagaccagcctgggcaacatggcaaaaccccatctgtacaaaaaatacaaaaacaaattagccaggcatggtatcacactcttgttgtcccagctactcaggaggctgaggcaggaggatcactcaaacccggaagayagaggttgcagcgagccgagattgtgccactgcactctagtccaagtgacagagggcagaccctgtctcaaaaaaatggaggaaggaaggaaggaaggagaaagaaaggaaagagagaaagaaagatgaaagataaaaaaaggaaggaaaggaaagagaaagaaagaaatgtaggggaaacaaaacccaaactcaatgggtaaagctatagaaactttatatatccttaaaaatgtgaaatctatagatttaaatttataaaagcttggttttgtagtgtaaataatttgtgcatcataaatagtaaggaaaagagaatatg

SEQ ID NO: 510936 - DNA, 570 bp, Homo sapiens
tgtaggctggagcgtgcaacactgcggcccacctcgctgcggttggtggtggcaacagagactgcagcgtggctggactgttgagctgctcagtgcctggcttggaggaccaggaatgggaaatcgctggcagtacgctggaggctggagcttgtgaccccacagctcgcctccctctggttgttggtggtgactgttggtggtggccacggagactgcagcgcggctggagtggtaggagaaggaaactagttttgggatagatggagggggctaaacagcgtggttggtgccaaagggaaaagagggtagcgagcacgagaaggcrttgcaaaaggacggtggggaaaagatggtggggaaaaagttttggggtagatggaggaagaaaaagggtggcgagagggagggggccaaaggcggtcgggaaaagaaggtggggaaataatggtgggagacaaaggttttgggtagatatttttctgatttttaaaatcagattatttgtatttttgcttttgagtagttttatttctttatttttttttattaaccccttgcctgatgcat

SEQ ID NO: 510937 - DNA, 581 bp, Homo sapiens
agataaatcttacccattggctacaaattagttacagaactctaaaaaatggaaagtgatcaaaacatataaaaagaccaaaaattgcaaatttctacaaaaataaaaatatacttaacctcattattacaaaaaagataagtatgttccttttgcctccacaattgatggattttgaaatgacacagatattgagaaaaatgggtagaagataacctgttacacacttctattggatgtgagaacacacaacatgtctacaaaaaaattttaaaacacagctaataattctatactagtataagttgttccataacaagacatacaatactgtagatcagacaactaaagatatacaaatactgtggcacagacaaagtagaaatatatattgtcacatattagtctggatatatgcaaaagtcacatgggtaataaactccaatttacgtgatcattaagtgaactatatttgcggagtcctrattggggaaaagaagtcaggctggtaggagcaagggaaagcaaaaagagaaagcagataagccacaaatctgcctttcttcatggtccaggactca

SEQ ID NO: 510938 - DNA, 531 bp, Homo sapiens
ggagaccaatctgatccacctgtgctggtcgcaggccggtgcctgagccatggcctgtccagcaggtcaggtgagcggctgcacatgcccccagtaccctgcacagcatcccctccttcctcgcctcccacttgcaccctgctctctgagtgtgcctagcccttggcacgtcctttaatgccaacaattccttccagaccagagacacaggcaggggctgaatgcatgccaccccctcgcaggtccatggggttgaaaactggccttgcccccagcctgccctgtcccaayaccctggctcctccttccacacattccgagtgtcacccctgtgggtgtgaatgtgggaatgaaaccaggtggagacaaagccactgaagcaaattctgtcccttaaacctgtggaaccaaagcaagactggcaactctgactctcctgtgcctgctctgccctcccagtgactctagctccctaagctggaacccagatacagcttcaaagggcatccagaggccacacaggatgtgggc

SEQ ID NO: 510939 - DNA, 546 bp, Homo sapiens
gtctgcataaccacataccataggtgtgcttgtaggtattccccacagagagagaggcatttgcagccacatgtccacatattattcctaaagactgagcctgtgaatattgtattaacctccattgcttctctgtctctcctgcaggattttagtggtactgtcttacaataaccatttcatgctttgcagatggctttggtcactgctggcaagtattgtcaaatggggttttccatgcatatttgatggacaactccacgtttcaactcagactacagaaaatmctgtctaatcaagtgaagcggattatgagttccaaatccataataggtgcctcttctgcttctaggaagaatttcatcttatgatattggataacagtcaatactgaattaaacattgactattagctggtgattttataagacatgttttaagacatgctcacacaataccacagttgtcctactttctctctgaaacaacgagtcaagggtggagcagtcccagaacagaacatggtactgatgattagcaatactg

SEQ ID NO: 510940 - DNA, 546 bp, Homo sapiens
gtctgcataaccacataccataggtgtgcttgtaggtattccccacagagagagaggcatttgcagccacatgtccacatattattcctaaagactgagcctgtgaatattgtattaacctccattgcttctctgtctctcctgcaggattttagtggtactgtcttacaataaccatttcatgctttgcagatggctttggtcactgctggcaagtattgtcaaatggggttttccatgcatatttgatggacaactccacgtttcaactcagactacagaaaatactgtctaatcaagtgaagcggattatgagttccaaatccataataggtrcctcttctgcttctaggaagaatttcatcttatgatattggataacagtcaatactgaattaaacattgactattagctggtgattttataagacatgttttaagacatgctcacacaataccacagttgtcctactttctctctgaaacaacgagtcaagggtggagcagtcccagaacagaacatggtactgatgattagcaatactg

SEQ ID NO: 510941 - DNA, 388 bp, Homo sapiens
ttccagttgctgtaggtcagcctcccacccgtcaagtatatgaactggccttcagttgcctcatctgtgatgcccaggaaggcagtgtctttggccacatcctggatggccttattctcctyggcattcttgggggcagccactgtggcctggagcccagcacacagagccttcactttggagaaaggcatccgctcaccgttggtcatgaaaagcttcttcccagacattttccccaaggagaaggcttacactgaaaccacaaatggtgagtgaggctggctgggtttggagcccagcacaggacagtaggcaagcagtctgagttccctgggaagccagacctctgaaaaatcaccctatgcccagcagttcaggccagagcctg

SEQ ID NO: 510942 - DNA, 388 bp, Homo sapiens
ttccagttgctgtaggtcagcctcccacccgtcaagtatatgaactggccttcagttgcctcatctgtgatgcccaggaaggcagtgtctttggccacatcctggatggccttattctccttggcattcttgggggcagccactgtggcctggagcccagcacacagagccttcactttggagaaaggcatccgctcaccrttggtcatgaaaagcttcttcccagacattttccccaaggagaaggcttacactgaaaccacaaatggtgagtgaggctggctgggtttggagcccagcacaggacagtaggcaagcagtctgagttccctgggaagccagacctctgaaaaatcaccctatgcccagcagttcaggccagagcctg

SEQ ID NO: 510943 - DNA, 388 bp, Homo sapiens
ttccagttgctgtaggtcagcctcccacccgtcaagtatatgaactggccttcagttgcctcatctgtgatgcccaggaaggcagtgtctttggccacatcctggatggccttattctccttggcattcttgggggcagccactgtggcctggagcccagcacacagagccttcactttggagaaaggcatccgctcaccgttggtcatgaaaagcttcttcccagacattttccccaaggagaaggcttacactgaaaccacaaatggtgagtgaggctggctgggtttggagcccagcrcaggacagtaggcaagcagtctgagttccctgggaagccagacctctgaaaaatcaccctatgcccagcagttcaggccagagcctg

SEQ ID NO: 510944 - DNA, 495 bp, Homo sapiens
ttcttcaggaaagagactcaatgattgcctctagctgcatgtcccttaccctcaccattgcaccagtacacatttcagtccataatatcttgttgctgggatccctgagttccaggaagcaacttgctcatgagtagggtgtgaaccccaggcagctccygtgatactggcattcacacagccccctaggagactcagtccacggtgctgcaatccacattgccccagaacactcctggtcacagctttgtccttcctcctcttctccccatgctccataaaatcagtccatctgctgggtccaaatgtcagaattttacaagagataaccaaaacagtgcatttggtgcagcacaccaacatggcatatgtatacatatgtaacaaacctgcacgttgtgcacatgtaccctaaaacttaaagcataataataataaaaatagaactagagaagcaagagcaaacacattcaaaagctagcagaagtcaagaaa

SEQ ID NO: 510945 - DNA, 495 bp, Homo sapiens
ttcttcaggaaagagactcaatgattgcctctagctgcatgtcccttaccctcaccattgcaccagtacacatttcagtccataatatcttgttgctgggatccctgagttccaggaagcaacttgctcatgagtagggtgtgaaccccaggcagctcctgtgatactggcattcacacagccccctaggagactcagtccacggtgctgcaatccacattgccccagaacactcctgstcacagctttgtccttcctcctcttctccccatgctccataaaatcagtccatctgctgggtccaaatgtcagaattttacaagagataaccaaaacagtgcatttggtgcagcacaccaacatggcatatgtatacatatgtaacaaacctgcacgttgtgcacatgtaccctaaaacttaaagcataataataataaaaatagaactagagaagcaagagcaaacacattcaaaagctagcagaagtcaagaaa

SEQ ID NO: 510946 - DNA, 513 bp, Homo sapiens
gtgcatcataggatttttgcattatgagtgagactgacctgtgatattccttttttgtatgttccttgtcacatttttgtattgagatcattttggtctcaaaaaataaaaaatttttaaatttttttctattttcttgaggattttgtatgagattagaacaatttcttaaattatttgtaaaattcactgaggaagacataattatagattgaatttataaatctatgtagaaaactatttagatttttgtacatcttcttgtgtaagttttggaatttatatttttcaatgagtttatccatttcctatacttttycaaatttattggcataaagtaatttctattatcattttatgatctttatgtctgtaggatatgtagtgttagactcctcatcgttcctgatactggttattggtgactactcttttttcctctttatcaatctcatcaaaaacgtatccattcttttggtcttttctaagaacaaacttgtgggtttatttatc

SEQ ID NO: 510947 - DNA, 622 bp, Homo sapiens
ccagtgctgtccctggtcatcacactgattggattggacatcgctgaggcacctgccagaggcctaggctggagagccagcttccctgtcactaactccaggctctgaagaagccctagtaagtcatttctggaggaaagaggtgggggcctgggccaagagactggcctcttgactggatcctggtgaggtccaggtaggggtttaggggggtcatcaggtccacctggggcctctctttctttctggcccaagcaactgggaacttcctgtatctacttggccatcagcaaactaaagtgtggtctttgccaaagtgaagaatagaagtggcatgtgcacgctagcgacaggtacaagccttgactgtggcatccwatgccaattcagcgccaacaggagaggtttaaaagagacaaaaatgatagaaagaggaaagttggagaaggacatgaccataaaagtttccttccaactgggcatctctcactgcatcttggaggaaggaaagagttaagggactgcggctgggatagcaagggcagacacagtgttggacggcaagagccgggacattaggattcgaggatggagcagagcagagggagagtcctgtggggtc

SEQ ID NO: 510948 - DNA, 622 bp, Homo sapiens
ccagtgctgtccctggtcatcacactgattggattggacatcgctgaggcacctgccagaggcctaggctggagagccagcttccctgtcactaactccaggctctgaagaagccctagtaagtcatttctggaggaaagaggtgggggcctgggccaagagactggcctcttgactggatcctggtgaggtccaggtaggggtttaggggggtcatcaggtccacctggggcctctctttctttctggcccaagcaactgggaacttcctgtatctacttggccatcagcaaactaaagtgtggtctttgccaaagtgaagaatagaagtggcatgtgcacgctagcgacaggtacaagccttgactgtggcatccaatgccaattcagcgccaacaggagaggtttaaaagagacaaaaatgatagaaagaggaaagttggagaaggacatgaccataaaagtttccttccaactgggcatctctcactgcatcttggaggaaggraagagttaagggactgcggctgggatagcaagggcagacacagtgttggacggcaagagccgggacattaggattcgaggatggagcagagcagagggagagtcctgtggggtc

SEQ ID NO: 510949 - DNA, 561 bp, Homo sapiens
cactgcagcctcaaactactgggcttaagcaatccacccatttcagcctcctgagtagctgggactacaggtgggtaccaccatggctggctaatttttgtattttttgtggagttggggtttcaacatgttkcccaggatggtcttgaactcctgagcccaagcatcatgcccacctcggcctcccacagtgctgggatgacaggcctgagcagccggcccaaagataccttcaggggaaagactgactctacacagtcccaaccttgggatgataaactaaccccaaacatggagtagtaggtggccccttactcccagcaagtccttctctaatggtgagattccaggacaggggagaagtctagggagagagactggggacatgcggccttccgggacctcagtctcacaccaccgggtcctgggctccctgttgtctcttatcaatctaggtttccagcgtggtgcagtgaaggagtgtgtgacccaggccccagccgcactctgcaatgacaccatgggcaagtcccttaaacccgctccagacctcagtttcct

SEQ ID NO: 510950 - DNA, 366 bp, Homo sapiens
catctccatctctctctctctcccctcaccctccaccttctctctctctcccttctctctttctctcactgtttcaacccctctctctctatcctccctgtctttctccttctctttgtccttcccctccctctctcatcccttctctctcatcttctctctgcctgtcccgtcctctgactgacctcacccctgcgttcttcactcctctccagtmcagctcagttagcctctcaccaccgatctctgcctatcacacaatttaaaaattacaggaagatggtggggggcacaggacttatggagaaatgtctacacccagctcagcttcccttagagccgcctggagttggtgctaccgggggg

SEQ ID NO: 510951 - DNA, 316 bp, Homo sapiens
acaccatcttgagtaaaagggatcagtcagggtctactgggccataagacctacctcagtggagttcaatggcwtcctctcatgttatttctggaaacagaacagtgacagccctgcagcccttggcccttaagcatttatggcttctggaggtgccaccaaagatgaccagctggaaatggagaagcctgaaagctcatggggaagattttgctttcaaaaaagtccagttagaaaaggcaccacagaacccagagagcagaggacaggccaggagagggcgctgtaggaaaagacaaaactgtcctgaactagg

SEQ ID NO: 510952 - DNA, 569 bp, Homo sapiens
ctgatgacacagagtgtgcccaaactcactcagtcctctggcagcctaaaaccactgctttaaatcccttcagcatttatgatgacacaaggttattgtaaacaagaaatattctatcaccgttgtaaatggaaagccaatgcctttaccataaataaaaagaaaccctaagaaacaagcaaaacaaaacaaaaacagggacaacaaaacaatggaattaaattctatttgtgtgctgtcacctgcataaagacccccagatttgagttgtcttggttgtaaaaggaaagaccaagtaaggggagttgaagtcagattagcccgaaagtgaatgggagacctgtgatgtccatgaagtgttgtggggtcaccttgattatagcccaagcagagagagggaaaggaaggagaagcgaacagagtttgggccctcagacaaggagaagtcattcatgtaaccaggaaacacctcccgaaagccagagtcaamctcccttgcaggcgggcccctcatggtcccttggaggcttggccaggggcccttggcaggacgaggcaccttgggagac

SEQ ID NO: 510953 - DNA, 482 bp, Homo sapiens
  misc_feature (1)...(482): n = A,T,C or G
cttagaaactaaaatgccttggaccaaatatctccaaatagcactcctgaggattaggcccaagagaatacttgggattgtccccctatgacttactatatggactcccatatttgtgcagggctacagatcttcctactatggaaaccaaggactaattnnnttttttttttttttttttttttttgagacagagttttgctttgtcacccaagctaccaaggactaatttttaaraaattatatactggctatatcctccaccctgtcatcccttaggttaaaaggacttctgactcaaactcaatgtcaagtgtctggtaggcaggcacacctggggcagctacagcagttaagttcaccacatggttcaccacgcccagcctgacaacttggtgctgattaagagctggaaagaggacaagctccaccaaaggtgggaagatccctatcaagggctcctgaccactgagactgccatg

SEQ ID NO: 510954 - DNA, 560 bp, Homo sapiens
aactcaagttaacattttaaccatatttaagtgtatagttagtggcattaagtacattcacattgttggcaactgttaacaccattcatccacagaactcttcgtcttgtgtaatcgaaactctgcacccattaaacagtaactccyccatcactctgttaatgttgtttttagctaagaagcatggctagaacttctcctttaattagggctactatgtcaaagggaccattcttctatatgtccttgccacaagttttttaatttgctagaatgctgtgtgtaacgttaggaatttatcctaagagctcatttagctaccgttgctaatgctcactgtgagtgttgtaagatgtaatgtttttgacaggattgcttatagatggtgaatgacagtatcctgataattttcattcttatatagtagatttcttataaaaagaaatttcatttaccttattgcctgtgtgattcttgagaggggcggtgaagataccaaattgcataaccgcttgtcattgatcattgggcatcatttttgctcaggcttcagcttgtat

SEQ ID NO: 510955 - DNA, 611 bp, Homo sapiens
tgtcatggagccctttaatcttctctttctcagagaaaagttagccaattcctttcaaacacttctcagctcaaatgccagttcctccatgaggcctttcctgatccttcctgaggaaaaagctaaaagccatcagttcttcctyagccccccagatctgtgcaccatacacacagacaggtggccccagactgtggggtcctgtgcatacctgagaacagaacttcctcatctatccagacacaagttttatgaggctaggctgtccccaacatctgacacgccctccacacagcacatgctcagaacttggctgctggacagatgaatgaaggaggactgaacagacacaattccccaatccctcattattctctccattgctcctctgggtgctctctgaactgtccatatgtctgtaaactcagcacccagaactacatacaggaatccagaatccaaaagtgacagacactatgtcagtccctgatgttatgccttcttggtgtggcagggaatagattcaaatggaaattagatctcttacaccctacaacacagaagtgcgctaatgtaatgtttacctgatcacaaccacttttgctggggac

SEQ ID NO: 510956 - DNA, 611 bp, Homo sapiens
tgtcatggagccctttaatcttctctttctcagagaaaagttagccaattcctttcaaacacttctcagctcaaatgccagttcctccatgaggcctttcctgatccttcctgaggaaaaagctaaaagccatcagttcttcctcagccccccagatctgtgcaccatacacacagacaggtggccccagactgtggggtcctgtgcatacctgagaacagaacttcctcatctatccagacacaagttttatgaggctaggctgtccccaacatctgacacgccctccacacagcacatgctcagaacttggctgctggacagatgaatgaaggaggactgaacagacacaattccccaatccctcattattctctccattgctcctctgggtgctctctgaactgtccatatgtctgtaaactcagcacccagaactacatacaggaatccagaatccaaaagtgacagacactatgtcagtccctgatgttatgccttcttggtgtggcagggaatagattcaaatggaaattagatctcttacaccctacaacacrgaagtgcgctaatgtaatgtttacctgatcacaaccacttttgctggggac

SEQ ID NO: 510957 - DNA, 583 bp, Homo sapiens
ggcccatggctaatacctggcaccaggagggttgtactagtcaaaataagactagcaaattgatgggctgtgggctgtggtgtgtaaactaaatattcccatagtctgattgtgatcccagtatccttggtcatttctctgaaagtgtactgaagatggcatcaacatctttcccttgagttccctcatggaggccaagaaaacacaagggtgccattgccaagtcaaaagcaacagaatcagaaacagagagtagggaaataggtgtatattgaatacttcctgtgccaatcactgttgcatgctttctatacaaatattatgtcatttagcctttacagccaccttgtaaagtgtggattattgaacatactctgtgcacatgcaagatgaggtttggaaaagttaaccagcttgcccagagttatcatctaattagtcagtamaaatttgaacacagggctgtctgacaccagacctcttgctttctcagtgtgttttcctaacagaatgagaaaaaaaaaaaatagaggcaggagtggaagaaagagctaggctaaaaaataaaaagagagacttatga

SEQ ID NO: 510958 - DNA, 574 bp, Homo sapiens
catctggtactcaaaaagatggctgctctataaatgttatttttcttgttttctccatcaacttctctcatttagattataaacttggtagtgtgtttttgtgaatcacctttgtcaaacttgtaaaaagatatttcatagtatttgaaaataacaggatcttgtttgtcttacttaactattgttaatgcaaaacctttgctttctgtacaattacatccttccttctattaacatttcagatagcatcacacactgttccttaagagattgcttcacatactgsaaagaaaaactttatttttaatttttttaaagatggggtcttgctctgttggccaggttgttgttaaacccctagcctcaagcagtcctcctaccttggcctcccagagtgctaggattcaggcgggagccaccgcgcctggccaaaagtaaaactttaaataagttattggtgaaagcatcaggaatagtccccttgtctagtaacagaacacatgagagaataatcagatgagtgttgaatattgcaaaaggaatctccttttgtttttttaatgttcccaaaata

SEQ ID NO: 510959 - DNA, 607 bp, Homo sapiens
acttgtactcattttgtacaagctttatacaacagtggctttgtaaatgaatcttaagattgtagggcaaggccaggcacgatggcttactcctgtaatcctagcaccttggtaggctgaagcaggaggattgcttgaagccaggagttcgagaccagcctcagtaacatgatgaaactccatttytactaaaaaatacaaaaattagccaggtgtggttgcatacacctgtggtcccagctactttggaggctgaggtgagaggatcactttagcctgagagacggaggttgcagtgaactgagatcacagcactgcactgcagcctgggtgacagtgagaccctgtatcaaaaaaaaaaaaaaaaaaaaaaaaggagacagagccactccaagatgctttttctttgtattgggcagttaagtaggtcagttaccaaacaaaggataatttgaaagttctccaaagcagcctgtgcaaaatatctcttccgtattataccactaacaactaaaatgttgtcattactagaggctcatccagcactggtctttctcaaaaggcacacaggcctgggagggcagtgtggttttgaaacatgccagcc
